United States Patent Application Publication US 2026/0103690 A1 - sequence listing, part 80

SEQ ID NO: 393952 - protein, 346 aa, unidentified
MGSQIIGGVDTHLDVHVAAVLDGHGGLLATASFATTPAGYGELADWLVSFGEVAVVGVEGTGSYGAGLTRHLHARGIQVVEVDRPNRQRRRRAGKSDTHDAVTAARAALAGDALGAPKTRDGNVEAIRVLRLARSSARRDRTRALNQMRSLITTAPDELRSQLRALTITKLVHIAAAFRPAGRTDVASANRLALRTLARRVLELDAEVDSIDAVLAPLVAETAPAMLERLGVGTDTAGALLVAAGENSDRIHNERSFARLCGAAPLDASSGKQQRHRLSRAGDRQANSALWRIVVTRLSYDPNTRRYLQRRCAEGKTKTEAIRCLKRYVARELYACLPQQTLLDAT

SEQ ID NO: 393953 - protein, 323 aa, unidentified
MNKDTKYFGIDISAAVFDVTDSDGVYHQFNNTAPGFRSFLKLLDPNSHCVMEATGYYHYRLAYYLVENTIRVSVENPLSVKRFIQMKLSKIKTDKSDSKSICEYGQRVDLKLWQAHSKHQMECLQITRLLSVYTKQSTMLKNKLHGETVLGNPSLLVVRSLKRSLKQVQKELKTLEDNLLKLVKEEHQTLLTHLETIPGIGRKTSLMLIVLTDGFERFRSAGELCSYSGLTPIIRQSGSSVKGRPRISKIGNKKLRNLLFMCSFNACKYNKACKALYDRIVAKGKSKKLALIAVCNKLLKQAFAVAKSGLIYDENYRSVLAKI

SEQ ID NO: 393954 - protein, 422 aa, unidentified
MKNVTDSGQKVKGQKRLMALERASWILGIDVGKEKLSCALLLKDETFRCRFDVEASLNGFQMMLERVKTETKGDGAVMFALEPTGHYWMVLGQFFEDHNQSYVLVHPLVVARSREVKQLNRGKTDAFDARLIAELACRGAVTRTQIPEDDWATIRFYAREYMDREKEIAREKNRMMSYLETTLPGFLDIFPRPLGMNSRACLRVLTNFREVLQGDIVQFESQARKHITGKRLMTSRVRRLFEMLQRGDALGLRAGRKTLFWRIINSLDRLELYEEQQDMASKALISLYEQCEFKPYLDSVWGTSPLTNSLVLGFMGNPASYDTPASLIKMAGCDPVPNESGKFKGKASISHRGRNLLRKAGDRTSFLLEKRNTVFRNFMHHLTARPKNKLTKRQARIACINKYFRIIWVLCNHRVLFNPALA

SEQ ID NO: 393955 - protein, 310 aa, unidentified
MTIHQTVIGCDVSKARLDIFNNGTNQFCAINNNAKTIVDWIGSLDDQNVLVVFEATGGYDRELMRALESQSISYSRVNPARARDFARASGVLAKTDRLDAKVLADMGCRMELQPDSVSSPERIEISELSTRRDQLVEFRKQDRTRAKLIPEGQAGRSIKRHIAWLDKEIINLDKAIADKVKASKQISKQIKLLTSIPGIRPIAATVLVAMLPELGTRTRRSIAALSGLAPINHDSGKHRGKRRIRGGRRRVREALYMAALSASHSFPRFKAFYQQRLKTNPKAKVALIALARKILVIANAIIREQKPFTT

SEQ ID NO: 393956 - protein, 478 aa, unidentified
MDRESAGLTDRPERPTRLRPDLEEVIAVPPDSRCHSRKTEVIMKPVRKRYVGLDIHKDVVEYCILDAAGGKIDGGRIMCELSVLEHFATETLAANDHVALEATTNTWAVVDILEPHVTRVVVGNPLKTKAIAEAKVKTDKIDARILAQLLRCDFLPGIWIPDAKTRVLRRLSSFRKSLVKEMIAAKNRIKNIFNHHLIKHEVAWTKAGLDELKRIELPPHERTILCCEIEMFRNFQAQIAKVEKEIKRLAYEEENVRILMTLPGVDYNTATAVLAAFGDITRFKDADHAASYLGLVPSTNQSANACHHGPITKTGSGLARSCLCEAAQHLSRNEGPLGIFVRRIIQKKGWNKAVVAGARKLATIAFHMLKNHEPYRYAGVARTRVKLQRIRMAATGERVYMPRYVDPAESLNSSVTIRHVPPVSDVYEKEGLPPAKSVDELPPGERRFLEEAGLLEGIRLREKVRTIRTPKKSSRNSG

SEQ ID NO: 393957 - protein, 425 aa, unidentified
MHSISNKKINQVTDQTLVVGMDIAKKKHYACFVDERGRVLKKSFPVLQSKEGLEWLYQCIVEAMKEFGKTEVIVGIEPTGHYWLNLAYFLDEKGIPLVMTNPMHVKRSKELDDNLPTKHDAKDALVIARLVKDGRFSYPRILKGMEAELRVGATFRSKLVEEQGAVRNQMIRWLDRYFPEFTQVFPSFGKMALAVLEYTPFPSDLAGKELEEVLALYRQSEGLQSPQRPKAKKLIERAQHSIGVTEGQQMARIEIATLVRRYRQLEKEIEALTEQLIELVQTSVEYEWLKTVPGLGDATIVELLSEIGSFSHYQDPRQLIKLAGLTLREHSSGQHKGQKRISKRGRKRLRALLFRAMMPMIRHNEAFRQLHDYYTTRPDNPLRKKQSIVVLCGKLLKVLHAVCTKHQAFDAKRMMQDIFGLEMAA

SEQ ID NO: 393958 - protein, 343 aa, unidentified
MEIHTIGIDLGKSLFHLVGVDSSGSVVVRKRCSRSQLLAYTANLRVQRIGMEACSGSHFLGRALRDQGHDVRLMPAQYVKPYVKTNKSDYIDAEAIAEAVQRPTMRFVPIKTEDQLDLQAVHRVRERWVMRRTAVVNQIRGLLLERGLTLPKGRCYVDQALPDILEDATLRLSDSFRLLLAQLKLELDQLTARIEQMDAVLQHTAKENEACQRLTTIPGIGPVTATALIAAIGNGSGFRRGRDLAAWVGMVPREYTTGGKQKLLGISKRGNSYLRKLFVQGARAVMQRRHNQPPGLSAWLAQLLMRTHQNVAIVALANKLLRMAWAVLCKNETYRPPAVIPSS

SEQ ID NO: 393959 - protein, 335 aa, unidentified
MTKVMGAVCVGIDVSACTLVVALERDHQPGRQRREFPNTAAGHQVLIQWLSKSATAVQVCLEATGLYSLDLALALDRAEGIEVMVANPRAIADFAKALLQRSKTDQLDAEVMLEFVRRMPFVPWQPPKPHRLDLRALMRRITGLKLASQQEKNRLHSVSQSAEITPLVRKDIQSHLVQLERHVEKLEQQAVTIVEADPELAQQFRHLVSVRGIARVSALHILAELVVLAPDMTARQWVAHAGLDPRHHDSGTSIHKPARISRAGNRYLRAALFMPALVATQHDPNIRAFYQKLVDRGKTKMQAIVAVMRKLLHALHGMLHTDSDFVGEKFYVIPS

SEQ ID NO: 393960 - protein, 356 aa, unidentified
MEIERTFVGLDVHSRSVVACALDDRTGELSKARLVPDHETVLAWLRQLAGPVAVVYEAGPTGYGLARFLTGRGVRCVISAPSKMHRPSGDRVKTDARDALLLARLLRLGEITAVTVPSLAQEAARDLVRVREDVRADLMRARHRTSKLLLRQGILWSGGTAWTGPHEQWLGQQRFELAGLQTAYDTTLETVLLATSRRARLDKAIGQMAHEPQWWPTVSRLQCLRGVSTLTAFGLTVEVGEWTRFSGSTIGAYLGLVPTESSSGEGRHQGSITKTGNTHARRLLVEAAWHHRRPYRPTKTMRDRWDLAPAAARARGHAGNQRLHERWVRFNERKKRTVIANVAVARELAGWCWSLR

SEQ ID NO: 393961 - protein, 412 aa, unidentified
MEGETVIAGVDTHKDVHVLCLLDGLGRKIWSGGFGADPEGYDRLAEAIGDPGSCMVVGVEGTASYGAGLTRRLVELGYNVVEVLRPKRDKARPGEGKSDPLDAERAARKAASGRGCSVPKSQDGWVEAVRQLYVARRLAVATSTSCVACAKSMLTTAPSALRERFRGRERPKDLMPLLARGRKPGDALEESVLASLRSVAAVWKEARSQVESLDERIRALLEANAPALLGIEGCGTTTAAALVVAAGDNPGRLKGEAAFSMLCGVSPIPASSGKTERHRLNRGGNRQANWALYEIAIKRMAYDERTKRYVAKRTSEGKSRREAIRCLKRYIAREVYRVLMDPNPDGAAPEGPELAKMRKAMRVTQKQAAAGLGMSAASLGHLEHGRRRSTKLERRYYELLCELKGALPQTAY

SEQ ID NO: 393962 - protein, 440 aa, unidentified
MNRKAYRAIRVNDVNWEHLARGREGVGITLGVDVGKYTLWPVCRWADGRFERPWRVQNPEEIPKLVALIKPMSVGRSLVVAMESSGTYGDALRQALADNGIAVQRVSGKAAHDYAEVFDGVPSQHDGKDAAVVAELAALGKAMPWEYHPAELWEQELAYWVEGMVAHRQLLTIWQGRLEGLLARHWPEATQVLKLSSGTLLRVLKHYGSPQALTADPQAPKHLARWGGTRLSPAKIAQLLAGAGSSVGVRTGEWPQRMIRDYAQQALAARQQANRAQRQLRRLAAGHAVLQAQGKVVGVPTACVLWASTGDPRKYHAAGAYRKAMGLNLVEHSSGTYQGHLRISKRGSARTRQWLYFAVLRLVQRCGVRPWYQAKKAHDPDGAQRTLVAVMRKLAVALYYVGVHDEEFQPQRLFGRICRQHSSPAGPPSGTGRQRQRQAV

SEQ ID NO: 393963 - protein, 379 aa, unidentified
MATSIFRENFPGASKLQETADKGRFLVGLDLHKKATAVCVFDHASPVEPVFQRKRVPNGELLAVLNRFAGKKTVVCEDAYGWHVLREALRGLPGVTFVPLDARKTAAWITSSGVKTDKIDAQVLCHVASTGSIPRLAVYVPEREHRECVQLLRHRDQLVRQRRRILQQLSVVERDASANPYTGEVPETSPLVAVLRDDLRSALETINARLARMDAEMARVSAGDPVVARLQTIPGIGRVTAFALRYKIGSIARFADAAHLVSYFGLGLREHQSGEHRVQGKIAKTGDTMLRTLLIQGAQSVCCRRPELLALYFPQLATAARLADWRHKNKVVTALARKGLTFAYHIWKGETDFDLDSYRARRQQATVPTVVPVSVRSGG

SEQ ID NO: 393964 - protein, 320 aa, unidentified
MQSVCGIDVSKDRLDIMVLPEQQCFSVRNDAAGWAELVERLRGFSISAIGLEASGGYERGAMRALLAAGMPARQVNPFKLRQFARASGVLAKNDPLDARMIASFVAIMPTQPAQPRAPAIERLAEMLAVRRQLSAEKVAAENASRLLEDAMLQRLSRRRIARLAADIDLLDGHLVKIVETDAALAYRYRLLTSMPGVGLVLACTLIALLPELGRMSRKQVAALVGVAPYAFESGKFKGRRCIWGGRAPVRNVLYMGAMSASNWNPVFKAFHDRLKAAGKLPKVVIVAVMRKMITALNAMVRDDVVWADHLRGRHSVPTAR

SEQ ID NO: 393965 - protein, 408 aa, unidentified
MRVIGMDIHRTFAEAVMIDGDRLIRLGRIKMSRDHLAAFAAKLTSEDHLVIEATGNAHAVVEAVAPFVGRVIIANPKQVHLIAKARIKTDVIDATVLARLYASGFLPEVWVPDQSTLRLRRQVTRRNQIVRQRVRLKTMIQAILHAHLVPQCPHADILGPKGRAWLLTQLLPDDESAAIERHIREYDRLTDDLRVVERELARDALGSAETKRLMTIPGIDMVVAVGLLAAIGPIERFTSPGRLVAFLGLNPSVHQSGNNPARHGRITKQGPCHARTMLVEAAWQAVRSPGPLRAFYERVRGRRGTHVAAVAVARKIAVIVWHLLTRGEDYAWVRPALHARKLRDLELRSGFPARRGQRGAGYAYNLARSRREERQRGEQAEAAYKRFTQGWTKRGRRVSADASKEERQ

SEQ ID NO: 393966 - protein, 338 aa, unidentified
MRLYAGIDLHSNNNLTGIIDEGNKIIYKQKLRNEIEQILTILEPFRQEIEGIVVESTYNWYWLVDGLMENGYRLHLANPAAIQQYEGLKHVDDEQDALWLANLLRLGILPEGYIYPKEERPIRDLLRKRLQLVRQSTANILSVQNIISRNLGVKVSSNDIKKRDDEWISNLFTDEHLFLSVNTGVGVVRYLNEKINQIERVIKEKVKLRKEFEGLLTLPGVGDVLGSTIMLEVGDIRRFPEVGNYSSYCRCVKSVRISNEKSKGSGNRKNGNKYLSWAYVEAAHHARRNYPIVQRYYQRKSAKTNGVIAIKAISHKLARASYYIMRDQVEYDAEKLFH

SEQ ID NO: 393967 - protein, 310 aa, unidentified
MEQTYIGIDVSKDRLDVHVRPGGEVFVVSRDGKGLEELIDRLRTLTPMLIVVEATGGFETVVAAAIGGAQLPLVVANPAQIRHFAQAVGKRAKTDPIDAEMIARFAEAVKPTPHQVPDEAARLLGELVARRRQIIEMLVAERQREGRAGNVRVHKSLVRHIKVLERELQDISDDISGLIRGSPVWRETEDLLVSVPGIADKTSSSLLAELPELGRLTRRQIASLVGVAPFTQQSGRWKGKSMIAGGRAAARSAIYMAALSASQHNPVLKAFYRRLLAAGKPKMVALIAVARKLLVIINAMIRDKTLWRYA

SEQ ID NO: 393968 - protein, 351 aa, unidentified
MHATTVAIDLAKDVFELAFGDAAQRIVERRRLSRGAFAHVLDNRAPLHVVMEACSSAHYWGRHFQRGGHRVDLLPAHDVRPYVRRNKTDRADAAGLLEAVRCGSIRPVPVKTPEQQGIQALHRVREYHKAQRTAAINLLRGVLREFGIAIVPGAHKVRAAVLAALEDPNNELPMTLRATLAGLLDSVAAAEHAMAAIQAQLQDFADSDPRSQRLQRAAGIGPITATALSASVGEFDRFPSGRHFASSLGLTPREHSSGNRRRLGRVTKRGDVYLRMLLIHGARAVLRSAKVAQKKSQPIDRTRAWALALAERVGHNKAAVALANKTARRLWAAEHHRASFDPDHVSAPVAH

SEQ ID NO: 393969 - protein, 433 aa, unidentified
MKIALSFVVTTHLKLRAMQKKDCIEFEQVVERGCGMDVHKETVVVSIQGKGIKTVTKSYSTFTSSLIKLKEWLIKHGITHIAMESTGVYWKPIFNVLGDDFVILLVNARHVKNVPGHKTDKKDSRWLVKLLLSGLLKGSFIPERPFREMRDLTRYRKKLVQQVTAEKNRFLKILEDANIKLSTVLSQVFGASGTKMINHILSCESYRPEELMQYVHGRIKASREDIKEALTGYITNHHKFMMRTILGNIAKIESTISEIDEQLDSVLLPYKLEKELLETIPGVGREVSIGIIAEISTDMENFPNQKHLASWAGMSPGSNESAGKNKSGRTTHGNKYLRSLLTEGGWAAARTKNTYFSSKYKSLAGRRGKKKAIIALGHKILIAAYFIIKDKVEYKELGEDYLNNFRKDKLIAYYKKQIERLDPNLEFDKEEAA

SEQ ID NO: 393970 - protein, 345 aa, unidentified
MKHYAGLDVSVKETSVCIVDETGKVCREVKVPSHPEDVVRVLKDPTWQVERVGLEAGPLSQWLFSGLAEAGLPVVCIETRQAKAFLKAQVNKSDRNDARGIAQMMRVNLFRPVHVKTLASQKRRALLTARKLLQEKALAIENDIRGLLRNFGLKVGVVGIIKFEERIFELVEGMPELAEIMAALLDARRKLREQVAKLHRKLLSIVREDEVCRRLMTIPGVGPVVSLAFTATIDLPARFKSSKAVGPALGLTPILNQSGESNRVGRISQCGDGMMRTLLYEAAQVMLTRTIKWSWLKAWAMNVAKRRGLQKAIVALARRLAVIMHRIWSDGTVFRWTKENAPAAA

SEQ ID NO: 393971 - protein, 418 aa, unidentified
MGKINEYCAGIDVGKRFLLCCALTGAAQEEPQSQTRRFDATVPDLVHLRDWLSSKSITHVVMESTGSYWVPIFNILEGHFTILLANPEEVKNRKGHKTDRKDAEHLADLLRHDHIRASYIPPKPVRDLRDLTRRRLQLTQDASRERNRIEKLLEHVNVKIGNVLSDVFGVSGNSMLLALLDGDMAVERIAQLARGQAKQKITQLTEALEGHCMRDHERFLIRSSLRHLACLEEETEEMDGEILRRMQTLPFQEAFLLLQTIPGIGQLAAASILAETGTDLSPFPTAEKMASWAGLCPGNRESAGIRKGSQTTKGNPYLRSTLVQSAWAATRKRGSIFQLRFRELAPRRGQKRAIVAIAHQMLTVLYFMLSNNAPFRGADTVPQKHRRLRRAHHHLKCLRRLGLTVEVSGSLEDAPTTG

SEQ ID NO: 393972 - protein, 320 aa, unidentified
MMAQNDLVVVGIDVSKDKVDACIRRLALRQSCPSSAQGHRRLVAWLRKHQVNKAVMEASGGYERNWAKVLRASGIEVRIVDPKRVRSFAQSAGRLAKNDAIDAEMIAWFAETFSEAPGQTHDAAHEELVALAKARISLVDLKARLQSQNEHAAPRPVQKTRERLLKNLVCEIAKLEAAISAQIKATPHLAERAEIIESVPGLAETTSANLVAGMPELGQVSDEIAVALLGAAPYDDDSGNRRGERHIKGGRRWVRNAVYMPCVGAATLNNPVLKAYYDRLIAKGKKPKVALIACMRKLIVILNTMIARRQKWDPSRYALN

SEQ ID NO: 393973 - protein, 323 aa, unidentified
MEQAILGIDISKDSFDTALLINGAYKFNTFTNEPDGFHRMTKWLNKLKCGHLHCCMEATGRYADHVAEYLYVSGHSVSVVNPARIKFYANSKLKRNKTDKADAQLIAEYCLREKPSLWSPPPANFKNLQALIRHLDGLLKSRQQERNRLNSGVSTPGVITSLQDCISFYDQQINNIQSQIQNLINNDPELLRRQTLLISIPGIGKLTAAKLLGEVRDISAFQSARQLAAYAGLTPKNMLSGSSVRKKTVISKTGNAHLRKLLFMPGITARNWNPIISPFCDRLSQNGLSPMEVICASMRKLLHLVYGILKSGKPFDPNYLENA

SEQ ID NO: 393974 - protein, 368 aa, unidentified
MGKSIKVFIGMDVHKDSIDVATGDERGGEVRHYGAIGGELAAVTRLARKLESAGGPLVFVYEAGPCGFGIYRMLRERGHECWVVSPGMTPRSNADRVKTDRRDALKLCRLARAGELTPIHVPDAPDEAMRDLVRTREDAVAMQRQARQRLGALLLRNDIRYAGKTAWTPAHRRWIAELRLPHGAQQIAFEEYVQAIDEAAARVERLGAAIQAELVHWRWLPVVAALQAFRGLQTIHAVRIVAELGDLTRFGSARCLMAFLGLVPGEHSSGQRRQQGSITKAGNSSARRALVEAAWAYRYGARVSPIIARRQSGIAKSVTDLAWKAQLRLCARFRALSARGLHKNKIVVAIARELSGFVWALGQKVKPS

SEQ ID NO: 393975 - protein, 402 aa, unidentified
MNCVGIDVSKGKSMIAVMRPFGEVVVSPFEVRHTASELSELARLLKNLDGETRVVMESTGNYHAPVAWLLHGAGFYVSVVNAMLVHDYGNNSLRRGKTDKKDAVKLANYGLDHWLTLPRYVPEEDTRLMLKTCYRQYQQYSKVQTMLKNNLISLLDTAFPDANRLFTSPPRADGSEKWVDFVATFWHCECVCGLSKKAFTAKYQKWCRKHGYNFSQDKALDIYASACGRFGVMPKTNTAKLLVEQAISQLQTTSSALAALKQEMQSLAASLPEYPVVMEMFGVGPTLGPQLIAEIGDVRRFHSKKALVAFAGIDAPPYQSGQIDVRSRSISKRGSASLRRTLFLVMGVLLQCAPMDEPVYQFMNKKRSEGKPYRVYMMASANKFLRIYYASVKAYLDSLEHD

SEQ ID NO: 393976 - protein, 314 aa, unidentified
MFYSGVDLHRRSLTVCTVDDRGSVIGRTAMKTDPAMVLAYFRGWPGEHRAVVECTTGWYWFSELLRTNGISIVLAHAKYLKAISYAKVKTDAVDAETLAQLLRMGYIPEAHQLPPQYRALRDLLRQRMVMEHRRTNLIQRIASILAQFNVTTLPLAPSQSGFADFLQACEIPPEYRMTLLMHHQECLQVTGHRKQLEKYFKERLRPTTSFQRLLTIPGIGDITGSIIAMETGDIHRFPDDKHYCSYCRLVPGAKDSGGKHSHRSGSKDGNQYLKYAFTEAAIKAMMFTPRSKPSPQDSKNEPAKPSLARLLPKN

SEQ ID NO: 393977 - protein, 387 aa, unidentified
MARKRILSTLDTSIAYEAVGLDLAKTDVALAAFDSDHKEPYFIDRIPYDKLYELLANMAPTLVAMEPCSGAHQIAEQIQALGHEVMMISGRHVQAWVKDHCNGQKTDLNDAFAILNLAYDRWLTPIRGKTREECRLLALQASYRQLKGQRTKTMVHVKATLHAWGFPIRTGSFNQKALRELIDANREAFGGEMAETLHLMIDRVRGLDHDIATVLKLLTEATKRDPRASLLRSIPGFGVLTTSRWCAVMGDIARFDSPKQTMAFIGLVPNNRITGHHTETSSGREARGQGRMSKRGDKMLRSLCILGAASLCLLVRKDRLQDCPFVASIKERLASPRPWFKVLVYVAAKLVRIATALLKYGEKFSFEKAGISKAVLKQWELEQAKAA

SEQ ID NO: 393978 - protein, 407 aa, unidentified
MIFVGDDWSEAHHDVHVSDGEGRRLASRRFPEGLEGIGGFHSLVAEFVTDPREVLVGIETDRGLWVQALLAAGYRVFVVNPLTVSRYRQMHHLSGAKSDPADAETLADMVRTYRHQLRPAAGDSELAAGINMLARTHQTLIWERTRHTNRLRSTLREYYPSALAAFTELGHPDTLAVLDKAPTPTQGAALTITQITAALKKGGRRRNLERRATEIHTHLRAPQLETSATVAVAFGATTQATVAIIAEFNTQIGVLETELGTHFEQHPDAVIVRSLPGLGVILGARVLSEFGDNPNRYLNAKSRKNYAGTSPITRSSGKVHVVSARWIRNKRLGDAINQWAFCSLTASPGCRQFYDRRRANGNTHNQALRALGNRLVGILHGCLQHHTPYNEHTAWTHQQPTPTTKAA

SEQ ID NO: 393979 - protein, 270 aa, unidentified
MDHFGGLDVSVKETSICIVDDTGRIVREVKVASEPEALLKVLENPAYRFKRIGLEAGPLSQWLFSALAEAGLPVVCVETRHMRAVLKAQINKTDRNDARGIAQMMRVGLYRPVHVKTLRSQKLRMLLTHRKLLQSKAIAIDNDLRGALRNFGLKVGMVGTMRFEARIRKLVEDLPDLAALIEPLLIVRRTLREQIVILHRRLLAIVRDDEVCRRLMTIPGVGPVVSLTYRATVDVPARFRKSKSVGAVFGLTSSKYQSGEVDWQNIALWR

SEQ ID NO: 393980 - protein, 452 aa, unidentified
MAKKKNKVRSLRVHHPDAAGIDIGSDEHWVAVPADRAEKSVMPFRTFTSDLRRLADWLKECGIRTVAMESTGVYWIPLYELLEERGFEVLLVNAAHARNVPGRKSDVLDCQWLQELHTFGLLRASFRPGPRIAELRAYTRHRQTLVEEGARQIQRMQKSLDHMNVQLHHVIADITGKTGMAVVRHIVAGQHDPEMLAQYRDPRCRAPKEVVIEALRGHYKTEHLFTLQQALSLYDIFATHIKECDERIEAVLGEIAVQFPETTAPNKAPKSPARGNQIAIDVRNPLQRIFGGVDVQSLAGIGPLTALNLLSETGHDMTRWPTEKHFTSWLNFAPGTKISGGRRLSSRRRPGRNRAGLILRQAASALARTQTALGAFYRRIAARRSKAVAIVATARKLACAFYRLLRFGGEYVERGADAAEREYQQRRLTSMKRQAKLLGFELTQLQPVAEVT

SEQ ID NO: 393981 - protein, 353 aa, unidentified
MKCDKYMGMDVHQAMTVVVVLDADGRVILETMVPTEAAALIRLVQSLSGPLRVTFEETTQAAWLYGVLRAYVTEVIVCDPRRNKLLEDGSKADKADARKLAELLRAGLLRSVYHGHQATRNLKELVRAYETLSIDTQRTMARIKALYRARGIRTPGRGVYQPKQRERWLELLTDAGIRQRVAWLYEQLDQLKPLRRNAKQAMLAESRRHRAVSLLRTIPQMGPIRCAFIVATVDTPHRFRTKRQFWSYVGLAVVTHMSSEYEMTAGRVVRRRKPVATRGLNHNCNRRLKEVFISAAIAGSLHEPYKPFLEKLKQNGMRAEMARLTLARKIAAVALIVWKKGVAFDPKKLNCTT

SEQ ID NO: 393982 - protein, 461 aa, unidentified
MAKKAKKVKSAKGAELRIVNPDAAGIDIADGIMQVCIPADRSKDNNRAFGAYTSDLHAISAWLRECGIKTVAMESTGVYWIPLFCRLQEDGLDVVLTNARDVKNITERKTDESDAEWLMLLHQYGLLKASFQPHNDAKRMRTLTRHRDTLSREASSMVLRMQKAMQQMNIKLTLVLSDITGKSGIRIIEAILAGERDPKKLAELADIQCKTPKEEITKALEGNWEEDLMFVLRQNYDTFKHYCTQLGECDAELEKLMENYRAEVAKVEDTSYSPAKKRRDYKKTRHTVSFDVERKAYEMWGVNVFEIPGISHLTALELMSELGHDFTRKFPSSKQFCCWCNISPNTKISGGKRISSHVPHRRNNVGLIFRSIASSLANAKNQLGNFYRRIRSRAGGKAAVIATAHKVAEIFFAMVANQTTYNPERVGIDEKVLLEKRITRYKRELERITGTHIEIGNACVP

SEQ ID NO: 393983 - protein, 412 aa, unidentified
MTHPKMFHIYVGIDSHKEVHTAVFINCFFEKLGEISFRNFPSSFEDFLKRAQAYQTEGITLMFGLEDCASYGRNLTIFLKSKNQNVKHVNALLVARERKNRNITEKSDAVDAECAARVLLSKFGELPDAEPDDTFWVLRSLVARRLLLVRHRSAAKNYLHSLLIHQYPNYRDYFENVDGKTSLAFLKQYPSPSTLKNTTVEELAAFLEIPSNKCIGMPKAKKILATLPDIFVQFQEIRDTVVQSAVRQLEFYIKEIGQLDESIAVFLKKFNCTLTSMAGIDTVTAAQMLSCIGDIKKFSTPAKLARYAGIAPVNYASGKRDLQFANQRGNRELNSIFFWLAVRLSIPVSGSRVIMNIFFHDYYQRKISEGKTKRQALKCVERRLVNIIWTMLTNNEEYVNPPAVEASKVKVS

SEQ ID NO: 393984 - protein, 343 aa, unidentified
MQTIRTIGLDIAKSVFQVHGVDASGEVVIRRQLKRRYVLAFFQKLPPCLIGIEACASSHYWSRELQALGHTVRLMPPAYVKPYVKRQKNDAADAEAICEAVTRANMRFVPIKTPEQQSCLMLHRTRHLFIRQQTAVINSIRAHLAEFGIVAPVGRKGVTELLHVVADPSDKRVPEVGRACLAALGDQLLSLKQQILEFDRMIMAWHRSNQTSKRLHYIPGVGPMLATALVASVADPRTFRSGRNFSAWIGLVPKQHSSGGKDRLGSISKQGDRYLRSLFVAGALAVIRYAKIHGTGHRPWLTALLGRRPAKVAAIALANKIARMAWAMMAKGERYRNPVALAR

SEQ ID NO: 393985 - protein, 350 aa, unidentified
MLIIGCDYHPSFQQIALVETETGELGERRLVHREEAEQFYSRLGEQGVKVRVGMEASGHARWFESLLRDLRFELWIGNASEIRTKRVRKQKTDRQDAQLLLQLLLEDRFPRIWVPDSENRDLRQLLWHRHRLVQMRTRVMNQLHVVALNEGLQRKKALWRPAGRKELEKFELAPWASRRRQDLLELLDQLTPKIQGLSEALEAEVEKRPAARRLMTHPGVGPLTALAFELVIGTPERFRCGKQIASYVGLVPTEESSGSRRRLGHISKQGNVLLRFLLVEAAQVTVRSLPEWRSRFFHLAMRRGRKIAKVAMARKLAVQLYWMWREGRDYGQWKNFGSHAGEPGNPDGVQ

SEQ ID NO: 393986 - protein, 315 aa, unidentified
MSENTMERFVGIDVSKDSLDICLEPGGQRLRLAYDTAGMAEVLGQLKAFGPTLIVMEATGGLELRLAGELAGQGLPLAIINPRQVRDFAKATGQLAKTDAVDAAVLAAFARAIRPQARPLKEAFVRELDELLTRRRQLVDIRVQESLRLGSASKVQKKSLTAHIAWLDERIAELDDDLKGRLRASEVWRAKDDLLRGIPGVGAVTSLTLLAKCPELGTLNRREIAKLVGVAPLANDSGKHRGKRFVFGGRADVRSVLYMSVVSAMRHNPVIKAFAERLAQAGKPAKVVIVACMRKLLTIMNAMIRNNAPWNPKIA

SEQ ID NO: 393987 - protein, 347 aa, unidentified
MKRIAVDLAKSVYQVAESIHVGRVDRRRRLDPGAFARYVQEQSGPVEWVMEACGTAHYWGRVMQGLGHAVVLLHPRYVRPYRRRNKTDRNDCDAILEAARCEGIHPVPVKSVQQQQVQQLHKLREGWKKSRVQRINLLRGILREAGIDAPNATQALLRQACELIERPEVCALRGALQVVLAEINLYEQSMRECEEQLARWHADDEIVHKLDEVSGIGLLTASALKNAVGKPERFASGRHLSAWLGMTPNEYSSGQRRRLGRISCKGNIYVRTLLIHGSRAALLAAKRCQARTPQRLTQLQRWALQTAERIGHNKAAVALANKMVRICWAVWCHERRFSGDWQSARPA

SEQ ID NO: 393988 - protein, 321 aa, unidentified
MSAALGIDIAKKKFDVALLRDGKFRAKVFDNSPAGFAALKNWLAFLGVAKVHACMEATGILFEGLATFLADEGHEVSVTNPLQIKAFGESLLSRTKTDKADARLIARFCDTMKPTPWQPDAPEIRQLKALGRRRDALIAMRTQETNRDISANDRVQESIRTVVSVLDQEIDDISRQIKDHIDNHPDLKNKSDLLRSIPGVGDVSIEAILSETNGFANFSKVEQVVAYMGLSPKEKSSGSSVRGKAGVCKTGNRRLRKVLYMPALVAMQHNPMVKELAQRLKQKAKHGRLIACACMKKLIHIMFGVIKNNLPFNPAYSLKFG

SEQ ID NO: 393989 - protein, 334 aa, unidentified
MQNITLIGIDLGKHSFHIHCQDKSGKALLRKKFTRTKLMQFLATCPPSVVVMEACAGAHFMARCISDFGHETKLISPQFVRPFVKSNKNDFVDAEAICEAASRPSMRFVQPRTETQQAIRALHRVRESLIRDKVKTTNQIHGFLLEFGISLPTGDAVIKRLSLVLAEHEIPEYLSRLLVRLHTHYFYLVEQIAELESELSQSINADDTAQRIMTIPGVGPITASLLSSQLGDGKQFSCSRDFAASTGLVPRQYSTGGKSTLLGISKRGDKNLRRLLVQCARSFMMQLERQHGKLAEWVREQLNKKHSNVVTCALANKLARIAWAITTQKKEYQA

SEQ ID NO: 393990 - protein, 520 aa, unidentified
MATTRTRKRPSARRSSASLGKPSGVLHPRVQQVGPDHFGIVCFDCAKARSKFLLADFYGRILIPPTVVAHNRPELDAAVARIRQAFVEHQLHDGLVAIERTGRYHRIVQRTFAAAGFETRIVHPFVTKQYRQPVDPGNKTDDADLGALHRATVTGCALLEATRDAAWTTLQLLIRQRRDLVQKGAALNCQIRDHLEAALPGFAACFDKLWESPIPWHLLQHFPTAEQLDAAGLTAICQSLRQAGIRFQQRTVQAVLDWAAQAAPGDVAAEQHRRIVQAYYADRQQKSLEIQALERDIAGRLVQTPYVLLLSFPGINVVSAADFAGEMGPIEHYANAKSITGRAGLRPSRYQSDQVDRANGPLVRLCNRSLRAAILGIADNLILCNHHFQVLANRWAGQGKDPRHTHVKVGMRFCRIAFQMVAGRQVFHHPSLQDRHYILHKLNVFHQEHDTGSAELLRDLQAAIGHVPVREHAAEAKPLHEELQRIHDGRRRGPQPLADILPIVLARLGVGVVQSAESGE

SEQ ID NO: 393991 - protein, 345 aa, unidentified
MTQYKNIAIDTSQAVFTLHGIDQHDRPVLRINLRRAQMTTFFKKLPRTEIAMEACGSAHHWARELTAFGHMVHLIRPQYVKPYVKRGKNDRNDAEAICEASRRPGMHFVPVKLVSQQAQGMVLKVRDTLIGQRAQLANTLRGPAAEFGVIAAKGMSKVEPLLIAMEHEIAIPPEAKVMAALWVGKSRNATPGSRKSTPKLGDAHKANAVSQRLATVPGVGPVAALTLAIEIDPAAFESARHLAALAGLTPQEHSTGGKQRMGGTGRAGNEPLRALCAAGATSVFNAAIRPSSKQMTDWLRALLQRKPRKLAAVALAIKMARVAWALMTSGESYRRPLAATEGVAA

SEQ ID NO: 393992 - protein, 259 aa, unidentified
MNVFIGLDVSLRSVAMCVLSTEGDLIEETYLDCEVEAISDHIRTRGYSVGRIGFEAGTMSQALFHGLTAEGFDVVCMESRQVSAAMSAMRNKTDKTDARGIAQILRAGWYNPVHMKSRESHEVKALLAARKAILNRCIDLENEIRGLFKAAIDDPTRFKSSRLVGAHFGLTPRRFQSGEMDNTGRISRAGDRDVRATLYIAANSLLIVSGRPSSFKTWGLKLIRTKGVRRTRIAVARKLAVILHRMWITNTPFQTEGVS

SEQ ID NO: 393993 - protein, 343 aa, unidentified
MKIIRVGVDLAKNVFQVHGVDRNEKPVWQRKLKREEWLKVLLEKIEPGCEIGMEACGGAHHWARKLEAHGYTVKLIAPQFVKPYVKSNKNDANDAEAICEAMSRPSMRFVSIKTVEQQDIQAVHRVRAELMEQRTAKANQIRGLVSEYGIVAPKEVSHLRAAIPCWLEDAENGLTSRFRKLLNGVWGDLLSLDQRVKELDQEITMLAANDPVARRLQQLRGVGPMIATALLATVGDASQFANGRQMAASLGLTPKQNSSGGKEKLLGISKRGDAYVRCLLVHGARAMIYASRNKEDHLSQWVTRIATTRHPNVAAVAMANKTARIAWAMIRNGSDYQPELAAA

SEQ ID NO: 393994 - protein, 333 aa, unidentified
MDIAKRVFQAHGADASGHVVFRKRLVRAKLLEFFAAQPPCIVAMEACAGAHHWGREIGRLGHTVRLVLPAYVKPYVKRQKNDTADAEAICEAAQRPSMRFVPVKSEEQQANGVVFRARDLLVRQRTQCINALRGHLSEYGYVFSQGITHADAVIALIEDPASFVPESARAILAVLGDTFQALEVQIQTLDAEITRRAKADPVARRLMTIPGIGPIAATAITALVPAPEGFRAGRDFAAWLGLVPLQRSTGGKQKLGAVSKMGERTIRRLLILGASAVVRWAGQRGAPEGTWLAGMLVRKPKMLVTVALANKTARIVWAVLVKGGVYRAPVPAA

SEQ ID NO: 393995 - protein, 418 aa, unidentified
MEVLRERCAALDISKRDVKACVRAPDPHRTGKRRQEVRTFASMTSALLELKAWLISERVSVVTMEATGDYWKPAYYLLEDAGFELMLVNARDAKGLPGRKTDVSDSAWLCQLTECGLLRASLVPPEPIRRLRDLTRYRTTTIRERNREAQRLEKVLEDACVKLSTVATDILGVSGRAMMQALIDGERDPQVLADLAKQKLRLKHDALVEALTGRFNDHHAFLCAVILRRIDELSVVIEEVTARVDTELAPFADTVQHLVTIPGIDRKGASVIIAETGGDMTRFRTAAHLASWAGVCPGSHESGGIKKSGVRRNGNKALGAALGNAAMGAARTKNSYLRERYYRLAARRGKQRAIVAIEHSLLTAIWHMLMNNLDYHELGPDHFTRREPTHVMRRITKQANALGLTVRFDPIRQTAAAT

SEQ ID NO: 393996 - protein, 344 aa, unidentified
MTFYAALDVGVRSLALCIVDCDGEVRLEKSLPSDVDAIAACLRSFGEEIAAVGLEAGTLTQWLTWGLREAGFKVVVMEARHVKAALGAMRNKTDRTDARGIAQILRTGWYREVHVKSLESHYIRTLLASRKALLRKCIDLENEVRGLLKVFGIKLRAGIRHGAFDAAARAPVEANPMLAHALLPLLDVRLELYRAFLELDRRVRALAHGCDICLLLMTTPGVGYITALTFRAAVDDPRRFKRSKTVAAHFGLTPRRHQSGERDNPGRISKAGDTEVRSALYAAANIILTRSTKWSSLKAWGTRLARSKGRKRALVAIARKLAVILHAMWIDATPFSHQAPEVAS

SEQ ID NO: 393997 - protein, 289 aa, unidentified
MKLYGAIDLHSNDNVTVLIDEKDKVIYQKRLANDLPLIVEQHSAYASSMEGIVVESTYNWYWLVDGLMEKGHRVHLANTAAIQQYEGLKYTDDDSDARWLAHLFRLGVLPEDYIYPKQERAVRDLLRKRSQLVRQKTANLLSIQNLYSRNTGQSISANRIKQLTSEKVDAQFTNSEVALAVKANLMVMRSLETEIAVVERVVKERIKLRPGYRYLLTVNGIGQTLALTIMLETGDIGRFPKVGNFASYCRCVGSEKLSNGKRKGNWQHEKRQQVFVVGVCGGSEFCDSL

SEQ ID NO: 393998 - protein, 276 aa, unidentified
MKLTTVGVDIAKSVMQLYYIDAETGEIVNKPVKRVAFLEHFANRSPCLIGMEACGGSQHWARKLTAMGHQVKLMPGKFVKAFVMGNKNDAADARAIWMAVQQPGKSVAVKTETQQAVLGLHRMREQLVKFRTMQTNSLRGLLTEYGEVMGKGRTALDKAIPGVLERLVDRLPTILINTLREQWNGLVELDKQIAQIERRLQTWMKEDKACKAIAAIPGVGLLTATAAVATMGDAKTFRSGREFAAWIGLVPAQTGSGGKASCWGSAGVVTRICARC

SEQ ID NO: 393999 - protein, 403 aa, unidentified
MEQVIIGVDPHKLSATIEVVDQQEHLLGSGRFTTDQRGYTAMRSYVKAWPDRVWAVEGANGAGRPLAQRLVEAGEQVVDVPAKLAARVRLFDTGHNRKTDALDAHSIAIVAVRTKGLRVLAADGELEALRMLTDRRDELAHLRVQTVNRLQRLLSELFPGQRKKDLSALQAKAMLATVRPRDIAGKTRRRMAAEELADLVVVDGKLKKIKAELKAVVIARGSTLLEIHGIGPSGAARTLADVGDITRFADRNRFASWTGTAPLDASSGEQIRHRLSRAGNRRMNHVLHMAAIVQLRHDTQGRAYFRRKVAAGKTRMEALRALKRRLSDVLYRRLVADAQTRDRTAGDTGPGGHRGATQESSAADLSPHVGTSDKPLPGPARTTLRPPIRTQKTARPRVPHPAS

SEQ ID NO: 394000 - protein, 317 aa, unidentified
MAQEVYFEQVVAKGCGLDVHKDTVVATVSGTAIMTETRTYSTFTRSLTQLREWLLSLGITHVSMESTGVYWKPVFNILEGYGMTILIVNARHIKYVPGHKTDKKDSAWICKLLLAGLLKGSFVPPVEIRNLRDMTRYRRKLEGAVTAEKNRMIRLLEDANIKLSTVLSKVHGTSGSKIIDALLAGETNPEVLVALCHWRVKADREDIKLALEGKLTDHHKFMLRMIKKDIDQTEALISDLDKEITKHLQPYAEELSLIKQIPGVGEQTAGALIAEIGVNMEVFPDEKHLASWAGMSPGNNESAGKKKVAGPRMVIKA

SEQ ID NO: 394001 - protein, 341 aa, unidentified
MDAGYDGRQIVGIDLHRRRSVIVRMAAETGQRLETVRIDNDPVALAAQIAKAGEAPEVVLEATYGWYWAVDVLQDGGARVHLAHPLGVKGFAYRRVKNDERDAADLADLLRMGRLPEAWIAPPATRQLRELVRHRAKLVALRSGLNAQVHAVLAKQGVQVPMSDLFGTAGQQLLDELCLDPAYNARVVSLRRLIDALTFEIDIVARRVAAQLAGHPGYRAVQAIDGVGPILAMVLVAEIGDVHRFPGPEQLCSWAGMTPKHRESDTKVHRGRITKQGNRLVRWAAVEAVQRLRGGVIGQTRVRIGERRGANIGKVAAARKLLTLVYYGLRDGHIRCLARPA

SEQ ID NO: 394002 - protein, 405 aa, unidentified
MNAVGIDVSKGKSTVTIRRPGDVILMPPCDIPHTQSGINDLIGKIRSLDGETKACMEHTGRYYEPVASWLADAGIFVSAVNPILIRDFGDDSLRSPKTDKADSKKIARYTLDRWAKLKQYGRMDKTRNQLKTMNRQFGFYMNQKTAMKNNLIALLDQTYPGANDFFDSPARSDGSQKWVDFVHTYWHVDCVRGRSLNAFTEHYQNWCRRKGYNFSADKAAKIYHLSSDLIPVFPKDNNTRLLIRQAVAMLNTASETVESLRQEMDAAASTLPEYPVVMSMNGVGPTLGPQLMAEIGDVTRFTHRGALTAFAGVDPGKNDSGQHIQKSVRTSKKGSPNLRKTLFQIMDSLIKRSPADDPVYAFMDKKRAQGKPYYVYMTAGANKFLRIYYGRVKEYLSTLPENEEM

SEQ ID NO: 394003 - protein, 422 aa, unidentified
MKTPSEVAFTAFIGIDWADAKHDICIQAAGTERREFSQLSHKVEAIEDWAQSLYQRFGGPIAVALELSKGPLVYALQKYDFIVIFPVNPSTLAKYREAFTPSRAKDDPTDAELVLDLILRHADRFTPLNPQSVEMRTLVSLVEQRRRLVDDRVRTTNRLRNTLKQYYPQPLEWFDRIDTPLFCDFIERWPTLVQVKRARRTTLQSFFHQHNMRRTDLLEARLTSIKAASPLTLDAAVITPHRLQALVLVDLLRVTLAAIKRFDEEIAELAPQHPDYELFSPLPGAGPSLAPRLLVAFGEQRDRFKNAAELQKYAGIAPVTERSGNKHWVHWRWQCPTFLRQTFIEWAAQTINKSYWAGLYYRQQRDKGCNHQAAVRALAFKWIRILYRCWQTKTPYNEALYLKALKRRGSPLLNQVETAISA

SEQ ID NO: 394004 - protein, 354 aa, unidentified
MMSHHDHPARTFASIGIDIGKDVFHIVGFDTSGRVVLRKKFKRLALETELGKLPPSIVGLEACLSAHFVSRMLRRLGHIPRIIPAIYVKPFTKGQKNDYNDAEAIAEAALRPNLRVVREKTQDQLDLQALHRVRARLVSRRTATINQIRAFLIEHGIAIRTGAHALRNSLFAILENRADELSPRMSDLIVGLYEDWLWLDERIETLTGEIEQISHREANCKRLMSIPGIGPMISTAVVAAIGTGEAFERGRDFGAWLGLVPRQYSTGGKSILGRISKRGSRYLRTLFIQAANVILMRPQNWEQFSFGPWLKAAEPRLHRNKLATALANKLARIAWSVLRHNIAFDAHRNEVVAI

SEQ ID NO: 394005 - protein, 319 aa, unidentified
MNDQSIVAGVDVSKAELAIAVHPTGDRWTSGTTAEAIDVLVRRLVPLQPELVVVEATGGYEAPFVAACAAAHLPVAIINPRQVRAFAQAIGRTAKTDAIDAGVLALFGARVQPVVRPVPDAATQALAALVARRRQLLEMLVAERQRLAQAPATGPVRRNLRTHIRWLERRIVDVEHDLDGTIQRSPIWRVQEDLLRSMPAIGPTVARTLLADLPELGQLDRRAIAALVGVAPFNRDSGQWRGRRTIWGGRRAVRGALYMAALVATRHHPPLACFYRRLRDAGKPAKVALVAVMRKLLTILNAMVKHQCHWQDPTTPAAI

SEQ ID NO: 394006 - protein, 339 aa, unidentified
MENNNNPYYKHYLSIDWSQQDVSIARMRAGSNQPETKLFPSDIKKIKEYLKGLQGKKILTIEETTGSHWLYVELLESVDKILICDPYRNSLLKEGAKNDKIDARKLCLLLRSGLLKEVYHTSNEDYKIRKLASAYIALVKSGVRIKNQNSALYRGEGLKYKKDKIKKGEEILSFVEGQQKRAIKLYEEEKKKYEEVFKELKKKNEVIKMLCQVSGIKETSGVKIYSVVIDARRFENKYKYWAMCGLVKHDRESGGKNYGKKNPRYSRILKNVYKSAALAAIGGNNDIREYYEVLLQKGHPIAEAKNQIARYIAKVTYAVMKNKKPYKAYQWRELNKQKS

SEQ ID NO: 394007 - protein, 407 aa, unidentified
MIRRSWRDSKVLARRTFRCRAWDLGLALDWAGQQASKAGFAGVSVACEPTGHRWRVLGQLAADRGMAFVCVQTLLTSWARRSEDLTFDKTDEKDAVLIARLTAQLRCYIPEPLDETWGRLRHLGARRERLLAETVSQVQQIRDLLECVWPASLDTAKQPFRSRTWLAGMCVVLARTGGDPARLRRLGPARFEAAVRREVVARQGKRPCLRIVRLLFAAATDPRGVTAHRPGALERVQLLLDDFRDTGRRLAEAEARMVDVLDELQLSELVCSIVGLSALGGATILAETGDLTRFASARAVVKHSGLAPREKSSGTYTGRTKLTGQGRPGLRAAAWRAVWGAQKANPVYAAKFTHLTSRDQNKLNRGQAHAAIAAALLRQLFAVVTTGQKWDAAIAAGGRCEVMEPAA

SEQ ID NO: 394008 - protein, 364 aa, unidentified
MKRVYYIGLDVHKNNTQMAVLETKGKEPVAVKVIDSDPLKVAKAILPYKKEGTVLVAYEAGCMGYTLHRVLTGMKIDCQIIAPNKVFRGGNNEKIKTDKRDATAIAWMLRREEGAGIAVPEKEDEAARDLLRCREDMQDDLKRAKQRLLKFLLRQGHMYENTGYWTMKHRKWMQTLVFQMALDKAVFEQYLYTIENMEERIGRIDLQIKEIAESPRYVEKVRKFRAFKGVDYIIALSLVCETGDFNRFPTAAAFMSYLGLVPSEYSSGKKRKQGGITKTGNGHIRKLLTEAAWHYTRPARVSKRLAVRRVGTAESIISYADRALNRLHGKYIKLLFNGKSKQAAVTAVARELSGFLWGVMTEVA

SEQ ID NO: 394009 - protein, 335 aa, unidentified
METLYFLGIDISKKTLDACLNANGTILAEMNAENNQKGIKKMFGSLKRQFKINPSQLMVCVENTGIYNLPILHYLIKAGIRVCVESALQIKQSQGLQRGKNDKIDARRIASYAFKNQKDLRLWKPQRSVIQKLKELLTVRERLVRVRVQLQKPIKENDVFMEKSIKNVITGLYDRTLRSISADIVKVENAIDGLLKEDQKLAEQFKCASSVPGVGKIIALNVIVATGEFEMISDIKKFACYAGVAPFEHSSGSSIRGKTRVSKMANMSMKTLLHLGARSAITCCDELKTYYHRKVNAGKNKMSVLNAVSNKLISRIFVCVKNQRIYEKNYQRALA

SEQ ID NO: 394010 - protein, 338 aa, unidentified
MTQHKIIGIDLAKNIFFLVEIHHKGKNLNRKKLQRSKLLNYIAKQSPCIIAMEACSGAHYWAREFEKLGHEVILYPPQHVKNQRRKQKNDYNDAEAIAELALYQRTYPVQHKSIEQQDIQSLIRMRRLCVTERTRLINQVRGLIAEYGIIIPQGKASFRQAIPEILEDIENQLSPILRELLSRQYERYLYIDEQIQWFEDKLNQTVKQFDNAKRLMSIPGFGPLTSQAVAVWLGSGQQFKTGRDASAAMGLVPKQDTTGGKVILLGITKRGNTYIRSLLVHGARAALRRAKFKSDKLSKWMLDLQERRGANRAAVALANKLMRIAWAVTTKNEEYQPT

SEQ ID NO: 394011 - protein, 339 aa, unidentified
MDKSDFAGIEVSQDELLVALRREEQTLPLQSFPNTGEGHRALGRYLARKGRVVRACMESTGVYGLDLALLLQKRPGVEVMVANPRAVRHFAQALMQRSKTDPLDALVLLEFAARMPFQPWQPPSAAALHLCALARRIEAITDLCAAERNRLHAASAAEALPAAVRQDIRRSIAFHECALEKLARQARQLIAGDPLWQERFEQLDSVPGIAPTSAIAILAELALLSPDRDVRQWVAAAGLDPREHSSGSSVHKKARISKAGNRHLRRALYMPALVAVRYDPHLGAFYQHLLGKGKAKMQALVAVMRKLLHAIFGMWKHHQAYDGSQLFALPAEPCIAEVA

SEQ ID NO: 394012 - protein, 359 aa, unidentified
MNYIFVGCDSHDKTLVTKIAKNLEVPEKKTFSATKTGRRKFVQYLAERAKGGAKVVVAYEASGNGFILCDELRAAGLACHVLAPTKIERSSKQKRNKNDDRDADRLLEILRGHYLAGNRLPSVWVPDVQTRDDRETVRTRQDMSQKATAVKTQIQMLLKRNGEEKPEGIGKGWSKSYRQWLKGLAECGAERLGMKTALGSLLRQLEFLENEIDGLEQAMQQLSDSPRWKAITEALMTEKGVGLNTALKFATDIADFSRFRRGRQIGAYYGLVPSSQESGENNDRKGHITREGSPSTRQILCQSTWARVRHDEKEREVYRRLVARNPKKKKVALVACMRRLSVRLWHVGSQAQLKMKMEG

SEQ ID NO: 394013 - protein, 315 aa, unidentified
MSDVPCFVGIDVAKAQLDIAVRPSGERWAVPNDAGGVAPLVEQVQALHPTLIVLEATGGLERIATAALATAGLPVVIVNPRQARDFARATGQLAKTDALDARALAHFADVIRPTPRPLPDAQTQELRALLGRRQPLIGMRTAEQNRLAGTSERLTQDIEAHIAWLNARIATLDADLETMLRASPLWRANDDLLQSVPGIGPVCARTLLLELPELGTLTRQHIAALVGVAPLNGDSGTLRGRRTIWGGRAHVRTVLYMGTLVATRFNPQIKAFYQRLLAAGKLKKVALTACMHKLVTMLNAMLKHRTSWRAQEVQN

SEQ ID NO: 394014 - protein, 347 aa, unidentified
MGKSIADLSSVTTVGLDLAKHVFQVHGVDASGRVIVVKALRRKDVLAFFAQLPECLVGMEACGSAHHWARELIKLGHDARMMPPAYVKPYVRRQKNDAADAAGICEAVTRPSMRFVGVRTLENQAALMHHKLREMLVAQRTQLINALRGHLAEIGVIAAQGLKNARDLAGVIKAEGDETIPACVRAALAPLVRQLHALDQEIARSDQTIAAMARDDEMARRLMTIPGLGPVTASAMATSVQDVSVFSGPREFAAFLGLTPRQNSSGGKERLGRVSKMGNRYLRKLLVVGAHAVLYHRKPHDDALRSWAKKLMQTKPFKLVAVALANKMARIAFAIMLGKTSYSAAPA

SEQ ID NO: 394015 - protein, 386 aa, unidentified
MQRDTKAVLAELVEKLKEKLDPKAPAANTERGNLRPNLNRLTVGVDLGDQWSNYCIVGLEGETLAEGQLRTTPEGVGEFFQSLNSGRVVVEVGTHSAWVQEVIVGFGHEVLVANPRLMDGSKRRRRKNDRIDANKLARLGRVDPGSLHPIWHRSKEVRQDLVMLRARDALVTARTELINATRGLVKSMGARLPKCSSPSFAQQAEAAVPIETRDALLPLVRLTAALTDSITEYDDRIDRLGREKYGHTTLLRQVKGVGPITALAYVLTLENPERFVKSRDVGPYLGLAPKQEDSGNSQPQLGISKAGDTMVRKLLVGSAHYILGPFGPDTDLRRYGLRLCERGGKNAKKRAAVAVARKLAVLLHRLWVSGDVYEPLRQSSTTMIAA

SEQ ID NO: 394016 - protein, 335 aa, unidentified
MQIYGIDFAKDKFDVSFLAPTLKNVSNKPAHKVVRNNESGITKFIKTLPADAVLVAEHTGVYGDRLLKHCTESHINIAYVGGYVIHTYKSAPDRAKTDMLDCAVLREFGERFTDKLIYKTFPKKELYELKQLARHRTMLVEDRKRYVTADKGEDCRPCRSMQVKESMERIMKILTEEIARTEKQMLDIIRAHEELSRNYDIITSVKGVGLITAVELIVKTENFTTIKTASQYAAYAGTAPYEKSSGKMNKGAHVSKIGNRRSKTLLYICAESARMHNKEIKLYYERRTIIDKKPHFYVLNAIVNKLLKIIFSLVTKGQMFDSDFIRKGPRVIKDN

SEQ ID NO: 394017 - protein, 341 aa, unidentified
MSVIIGIDPHKSTHTAVAVDRDEQPIAKLQVVADRCQTERLLVWAASFGCERTWAIESANGLGKLLAQQLVGAGEQVVDVPPTLSARVRLLGSTKATKNDHNDALSTAIAGLRHCELRSVRVEDHQAVIRLLIDRYDGLVSLRTQATCRLHAVLRELIAGGAPRRLSANRAAKLLRSVHPAGLVAIERKRLAVDLLADVRRLDQQIAATRSRITDAVEDSKTTLLELHGVGPIVAAYVLGHVGNPARFATPERFASYNGTAPIEASSGPRKRHRLNPRGNRKLNHAMHLIAVTQIRNDTLGRVYFQRKLAEGKSKKEALRALKRRISDAVWRQLQVDLQPR

SEQ ID NO: 394018 - protein, 373 aa, unidentified
MRKSTLFVGLDEAKDSIAVAVAEPGRKGEVRDYGTIANTPEALTKLVRKLGRPRDLSFAVEAGPCGYETYRHLKSLGAECLVVAPSKTPRRPGDRIKNDRRDAANLARLHRAGELTAVWVPDTESEAMRDLTRSREDGKYAETRARQRLGSFLLRHGRRYPGRSHWTASHLRWIREQTFPHPAQQICLEEYVKAVEETTERVARLAGQIRELVPQWSMAPVVNALSAHRGVSLIVASTTIAELGDLTRFTKAREVMGFVGLVPSLADTGLTHRTGPITKTGNGHVRRCLVEAAWAYRYPARRTAILRKRLEGQPDAVQNIAWKAQVRLCGRYRKLTARGKHHNKVITAIARELLGFLWATARLVEPSTLGASQ

SEQ ID NO: 394019 - protein, 408 aa, unidentified
MYERCCGIDVHKRIVVACLKCGKKQEIREFGTTTEELRSLTEWLSDSKCQMIAMESTGSYWKPLYNIFELSSLAAIVVNARDMRNVPGRKTDIKDAEWIADLLQHGLLRASYIPNREQRELRELSRYRKSLIEERARELNRLQKMLEGGNIKLASVVSDINGRSARNLLTHMLKRDTSLTKEEVSSLVRGRLRHKVESIMKALDGFLTPLQKQLMLKVVDHIDDMTKRIGEMDDLMNQYLTEYHEAIQKLDEIPGIGRQSAEIILAETGLDMSRVPTAKHFSSWAGLAPGNNESAGKRRYGRTTKGNITLKTTLIQCVKAAVKKTDSFLSAQYQRLVVRRGTNRATVAVAHTMLISIYHMLKNNVPFTDLGADYYNRFNTQSKIQHYLKKLKQLGWELDSATIPTAAV

SEQ ID NO: 394020 - protein, 339 aa, unidentified
MEQYVGLDVSQKETAICVIDGAGAKLWEGVSRSTPDAIAGVLKKRAPMATRVGMETGPLAVWHWHALKHLGIPVVCLHARQAKAALSLQANKTDRNDAHGLAQIVRTGWYRAVEMKSLESHELRVLLQARQRLVGMRTTLYNQMRGLLKTFGIVLPSGKGSTFVDLVRSRTSQLPALQLALEALLAAWCEVHKQITSLDRALRRAAKDREICRRWMRMPGIGPLTAVAFHTAIDVPARFRRSKDVGPYLGLTPTRYQSGEIDHVGRISKCGDRLTRSLLFEAAGVLLSRSRAPSALKDWGHAIARRAGYSKARVAVARKLGIIMHRLWIDGTEFVATIA

SEQ ID NO: 394021 - protein, 393 aa, unidentified
MSLDHHFAEPTAIRTNLGAIFVSLELSRSTWLITSLSPGGGEKMSKHGLSAGNIAALLARLSELKQKAFARTGQSFQVIVIQEAGLDGFWIHRVLQSEGVESHVVDAASIAISRRRRRAKTDRVDGEALVRALLAYKRGEPRVCAMVRTPTPEEEDRRRLCRERKTLTNERVQHVNRIKGLLFCQGISDYEPLRRNRRQRLDELNTGGGRPLPPHLKAQITRELDRLELLLGQIEAVEIERDALLSAMKPDGMNADAVRSPPAMLINLNGIGPEIAAVLWSEGLYRSFANRKQVAAYAGLAPTPWQSGSVAREQGVSKAGNPRLRTTLLQLAWLWLRHQPQSALARWFHERVRRNGGRLRKSTIVALARKLLVALWKYVTAGVVIDGAVVRAA

SEQ ID NO: 394022 - protein, 319 aa, unidentified
MDILGIDVGKRDLHANLLQGDQSSAKSFPNSKNGFGQLQKWLQNRKVQKVHACLEATGGWSEGVAIALCEFGHVVSLVNPAQIKAFANSTMLRTKTDKIDAAMIARFCRMHNPPAWTPPAPEIRILQGLVRRHESLVEMRTEEQNRLQSPIVAPAVMKSIVATLEHLQNEIDRVDREIAQIFDDYPPLRHQRNLLTSIPGIGATTAARILGEIPNIVEFRDVKAVAAYAGLSPRHYESGTIRWPTRIAKTGNSGLRTALYFPAVSAMRHNPTLKIFADRLRARGKSNMTIIVAVMRKLLTLAYGVLKSGKPFVFAYENA

SEQ ID NO: 394023 - protein, 391 aa, unidentified
MIYVGIDVAKDKHDCFITNSDGEVLFKPFTITNNLDGFNELYQKIESVTEDATKVKVGLEATGHYSYNLLGYLIDKGLPTYVINPLHTNLYRKSLSLRQTKTDKVDARTIASMLMSDVNLKSYSDISYHNEELKSLTRYRFDKVKERAKLKTSVSRLVCILFPELEKLVPTLHMASVYSMLSEFPGAKHVASAHLTRLTNLLSEASKGRYSKDTAITFREAARASIGSNMPAKSLELKHTIKLIQELDSEIDEIENEIKVIMDEINSPILSIPGINYRMGAMIIAEIGDFSRFDSPDKILAYAGFSPSTYQSGQLDGAYAHMEKRGSRYLRYALYNAAKYVCHWDPTFAGYLAKKRAEGKHYNVAISHAVKKLVRVIYHLEKTKQQYIKVA

SEQ ID NO: 394024 - protein, 385 aa, unidentified
MKNTIVHDEGAVSLEVAVNKVKLSGSIIKIGLDVHTRLYVAVAQYDHLLPKPARRLAPMEFVPWVEQLLRAGHTVHVVYEACGFGFGLYRELKALGAHCYVIAPRKLDEQCTRVKTDPRDATTLCQRLSRYLDGNTRELAVIRVPTEEEEQARHVSRQREQLVRLRQKLEAQGRSLLISHSLASPAHWWKNQTWSRLRKLLPGWICIRLEVHRPALLTLQKEIDALSAQLQAAAPADVPLGIGKLSTVVMTREICSWERFSNRRAISCYTGLCPSEHTSGTKRVPGSVTKRGNPRLRAALVECAWRMVRFQPHYPPVKKRLAILAKGARATGAQRKKAIVAVARHLAIDLWRVHTGRCSAAQLGLKTAETLIVRGEQKAELNALA

SEQ ID NO: 394025 - protein, 455 aa, unidentified
MIQRNRSVIPKPVKARAAALTITHPNAAGIDIGSAAHFVAVPPDRDDEPVREFPSFTVDLNAIADWLKACKVDTVAMESTGVYWIPLFELLESRGFTVLLVNARHVKNVSGRKSDVLDCQWLQQLMTYGLLSGAFRPTEQVCVLRSLWRQRAMLLRSQGRDVQHMQKALTQMNVQLANVIADVVGETGQKILRAIVAGERDGQVLGAMKNVRVKASVEEIAKSLQGSNWRAEHLFALKQALDAFDFIGTQLAECDTQIEQQMQTLQVHDGEPAKGKKRGRARNAPKFDLRTQLFKMCGVDLTRIDGIDVTTALAVISETGADMSRFPSDKHFASWMGLCPGTKITGGKVMSGKTKRCANRAAQALRLAAAALRTSQSALGAYFRRMCARMDKPKAVAAAAHKLARLIYTMLTKGEEYTDQGQAYYEERYRERVLRQLSQRASKLGMQLVAMPQTA

SEQ ID NO: 394026 - protein, 348 aa, unidentified
MAVTIVETRAITGGAGTHADTHVAAALDPVGGLLGVREFPATSAGYTGLLGWLGGFGTVCLAGVEGTGSYGAGLARHVTAAGVRVVEAGRPGRQDRRRQGKSDPLDAVSAARAAQSGRARGAPKGRDGAVEAIRALMVAKRSAGGERTRTTSQARALVLTGPGDLRARFARHTPAALVTGLASLRPRPGDVVGYATRIALRELGRRAEFPGGQLERLDELIVPLVTARAPGLLALFGVGPNTAALLLIAAGDHPGRLRSEAAWAHLCGAAPIPASSGKTVRHRLNPGGDRQANHALWRIVFTRLGAHPATRAYAERRTAEGKSKAEIIRCLKRYVAREVYPRLRTPAG

SEQ ID NO: 394027 - protein, 424 aa, unidentified
MSSDLEIAAFIGLDWADQQHVIRLRMAGSASVEAQLLDQKPETLQTWIGQLRQRFGGRPVAIALEQSRGSLLYALMNVDFLLLYPVNPQNLAQFRKAFYPSGAKDDPQDALLLLEMLEKHRDRLRVWVPDDADTRCLRLLAENRRKLVNRRTALTNQLTSLLKESFPQALDWAGPLDSLRACDFLQHWPSLQRLQQTATSRLRKFYRDHTHLDSDAIHQRLDQIRQAQPLTRDSAVLAAAELMIPALVRQLRCLIESIQQFDQQLKDRFQHHDDYTLFHSFPGAGPALGPRLLSAFGSNRNRFECAAEVQMLSGIAPVTERSGKSHWVHWRLACPKFLRQSFHEFAAQSILFSTWARAFYDHLRSRGTSHHAAVRTLAFKWIRILFRCWKNRTPYQEQIYLASLRRHGSPLCAALSPPTTGANL

SEQ ID NO: 394028 - protein, 359 aa, unidentified
MLTQSNKIDFSGQHFYVGLDVHLKSWKVSIMAEKLTLKTFSQDPNPELLHQYLVKNFPNGIYHSAYEAGFCGYWIHNRLIALGISNIVVNPADIPTTDKEKVNKTDKRDSKKIARSLRNGDLKGIHVSSLKSLEDRCLLRIRGTLVKDLTRYKNRIKSFLYFHGIEMPEAFSKSATHWSKRFMNWLDSIELTEISAKKSLTLLIVESQHLRLTLLNALRGIQELSRSEAYANNVRLLQTIPGIGTLTAMIILTEMDTINRFANFDQLCSFIGLIPSTNSSGEKENIGEITHRGNNYLRSAIVESAWIAARWDLSLNKCFHDYCKRMESNKAIIRIARKLLNRIRFVLKNNQPYICSVIK

SEQ ID NO: 394029 - protein, 365 aa, unidentified
MTKRSTIAATQCRKISGQKLTVGLDLGDRNSWYCVLNEVGQIQLEQRVRTTVPALREVFGAIPRSRIALETGTHSPWVSRLLHELGHEVIVANARKVRLIGESRKKDDRLDAQTLARLARVDPALLCPVKHRSAQAQADLMMIRARAGLVRMRTGLVNTARGLAKSYGERLRSCNVRNMNPDKAEGLRPELQVALQPLLATIESVSERIAEYNDRIEKLAQESYPQVALLKQVKGVGTLIALTFLLTLEDPHRFGKSRDVGGYLGLQPGRRKSGESEPQLHISKEGDPYLRTLLVQGAQHILGPFGVDCDLRRWGLKLAERGGRNGKKRAIVATARKLSVLLHHLWVTVYEALHNSSRATVATAA

SEQ ID NO: 394030 - protein, 407 aa, unidentified
MLFVGDDWAEDHHDVCLQDAAGRVLAARRLPEGVAGITRLHELVAGHLDGDDPGQVVLAIETDRGPWVRALVAAGYQVFAVNPKQAARHREVVAVSGKKDDAFDAAALADMVRTRRHQLRAVAADSDEAEAVKVAARAHQKLVWERTRHALRMRSALREYFPAALEAYAPLTLTGPDTLELLAKAPDPAAAARLTIAQISAALKRARRHDVAGKARQIRAALRGQHLGQPEIVTEAYAAGVRASAAVIAVLNEQVKVMEARVESLFRRHPDAGIYLSQPGIGVITGARMPGEFGDAPGRYADVKARRNYAATSPLTIASGKKKTVHARFIHNDHLVSAMHDQAFAAISASPGARAYYDELRSREIDHTDALRRVANRQAGILHGCLKTGTGYDEHTAWGHRSQPAAA

SEQ ID NO: 394031 - protein, 413 aa, unidentified
MRRCIGLDVHRDFAQVAVWQAGSVVQAGRFATTPAAVREFAAGLGPEDEVALEATGNTWAIATVLGSRAGRVVVSNPAKTRAIAEAKIKTDKVDAAILAGLLAADYLPPVWLPDADTAALRRQVLRRAHLVRQRTRLKNQVQAILHRNLIERCPAADLFGIKGRAWLAEQLLPPDEQAAAAALLRQLDFHAEELRLIDTELGKVALGRPEVRRLISIPGVDATVALSIIAAVGDFHRFRSPDKLVSYLGLNPRVRQSGNQPANHGRITKAGPAHARGMLVEAAWAASKAPGPLRGFYLRVRAKRGMQVAVVATARKLAVLCWHLIIKDEDYAFALPSLVAHKQRQLELRAGLPPVRGRKGPAASYSLKAVRAAERDLASQAEVAYRTMIAAWQPSKSAKPRSDAVARNAELSR

SEQ ID NO: 394032 - protein, 473 aa, unidentified
MQGRKEKGRKAYKKAKRRARNQETITTKGPTLKIGIDVAKRRHSAALFDPEMRQIGHILAVKNTRKDAERLLAKALEISERVGLSPLWGMEATGNYHLPLLHFLVEHGQSVVVFNPYQVKKYKDVCLAQTDTDPHSAVILCDMLDEVCRRKRIRLKAREVREINPDLEQAKHMARYRFSLARSVRDRKRQTVSIVDCIFPEFEQVFGKGYLSKKTARMVLGRYPDPATLAKLEEEKVDELVMDARRTSKGRYGDDAVKTLIRLARDSFGVRCTGIVGPACRQIRFLLWEMEFVEAHIQAWDEEIARVMEDFPYYREVGQLGCVTPTMMAAFVGEIGVVDSFTDPDQIVSFAGWDVREARSGDTREKRRRLNKRGRTELRDASYWLAGVSIMHEGKDSEYYARKRREGRTHKEALIALARNKLKQIFTAMKNSRYKPQTEARTATIAESGTGTDQDQEEASQAPVRVTPPGLPG

SEQ ID NO: 394033 - protein, 313 aa, unidentified
MMASQDVFVGIDVSKDRLDVHVRPLGVGFSVGNEAGGYAGLIARLRPLRVKRIVLEATGGYERALWLALSEAGLVAAVVNPRQVREFARAAGRLAKTDRLDAAVIAHFAETFAPRIGKPDAVADRLGEHVLYRRSLQDELVALEHQRRRLETPALRERADRRHAALRAEVKEIEREMRAIVDSDPAKKALFACLTALKGVGLVLACTLIANMRELGSLSRHQAAALIGVAPLNHDSGTRRGYRAIAGGRRRVRNVLYVATLSAVRSNPPIKEFYRRLSASGKPPKVALVACMRKMLVMLNGRVRDELAAAGVP

SEQ ID NO: 394034 - protein, 317 aa, unidentified
MNNTEIQTPVNVGVDVGKANLDIALHPSGQFYTIPNTEAHIRRFVRILKNYEIERIVVEASGRHEHALVQACDKAGLPIIIVNPISVRRYAQAIGVLAKTDRIDAQVIAQYAATLKPEFKPIPDKTSQKIKDLLVRRSQLLEMSTMEKNRLQILPKSLHRSIKSLLRMLQNQIETVTRQIEQEVAKVDQWRTKMEIMTSVPGVGKVLAYTFLSELPELGSLNRKEIAALVGVAPINRDSGKLNGKRRIRGGRHRVRTVMFMAMLSSIQCNPVFKRFYERLKAQGKIPKVALIACMRKMIVVLNTMIKNQEPWRGEMA

SEQ ID NO: 394035 - protein, 454 aa, unidentified
MRHGKKKQKPGQVQEDMPVINSNAAGIDVGSAEIWVSIPPDRDEEPIRRYATFTADLYALADWLKQRGIESVAMESTGVYWIPVFEILERKGLHVVLVNAKYAKNVAGRKSDWLDCQWLRLLHTFGLLPSSFRPAAAIATLRCYLRHRQMLIEYASAHIQHMQKALTQMNLQLANVVSDITGDTGMRIIRAILGGERDPQRLAQMRDYRTKNDEATIAKALQGNYEPQHVFALKQAVELWDFYQQQRTTCDQEIAQYLHNLDSAVDVDSHPIPPPRAPKKRRNSPGFNCRLETYRILGVDLTQIDGISESSALTILSEIGTDWSRWKTEKHFASWLTLCPNNKISGGRILQRRTRKSSNRVHDVLCVCAQTLFNSRSALGAFARRMRSRLGPQKAIVAIAHRLALWIYRLLRFGKTYVDIGQDAYEQQYQQRKLKTLTRQAKHFGFQLVALAES

SEQ ID NO: 394036 - protein, 333 aa, unidentified
MVAGTNGSLDKAGATKMTQTNTLTAGIDTSKAKLDVAVEGSGECWQVANTPQGWRRLAAALVKLGVGRAGIEATGGYERGVVAHLRAAGITVLVLQPAQVRAYARAHLRRAKNDRLDALLIAACAAGMKQQGVEPDPRLAELAAHLTFLEQIEEDMARLKVRLEHIRDVRLRSIVLTDVASLRRRRLTELARIVATLRVHEDLARRLDLITSVPGIGERTAVAIVIRMPEIGRISREQAAALAGLAPFDHDSGKHKGQRRIAGGRARLRRSLFAAALPAAFRWNKALIPLDARLTARGKAHNAALVACARKLLIYANTVVQRGTPWTEQSAAT

SEQ ID NO: 394037 - protein, 371 aa, unidentified
MKKDSTIKFIGLDVHSKTISVAIADEGRKGEVRHYGTIENTFEAMDKVIKSLTETGVELRFIYEAGPCGFALYRYLTGNGFTCIVTAPGLIPKRSGVRIKNDRRDAMTLARLYRAGELSGIYVPEPEDEAVRDLARARDDARVAERKAKQRLNSFLLRHNLIYPGKTKWNRTYFNWLGSVGMKYPAQKIALQEYIEAANECTGRVARLSEQIGLAVEEWRMAPMVKALQALRGVSLICATVTVAELGDLSRFQNPKELMAYLGLVPSEHSSGETIRRGGITKTGNGHARRVLVEGAWTYKHHARITYPLIKRQRELSRSIIQISWKAQVRLCARYRMMIARKKPNNVVVIAIARELAAFMWAIAQEVKTAA

SEQ ID NO: 394038 - protein, 344 aa, unidentified
MQIAVLGIDLGKNSCSVAGLDSTGAVIKRRRMRPESIAAFTEKLPACIVAMEACCGAHHLGRMLAAQGHQVRLMSPEYVRPYVKAQKNDDRDAEAIAEAATRPTMRFVELKSESQLDVQTLHRARDRLVGERTALINQLRAVLLERGITIPQGRRKLEQHLEAMTVSDGDHSLSPRIRQLIDDMRAEWLELDRRIADFDNEFAAYARSDPDARRLATIPGIGVLNATALLAAIGNGRTFARGRDLAAWLGLVPRQITTGGKQHLVGITKRGNKYLRKLLIHGARAALPSLATSATPLGGWLRGLMQRMHKNATVVALANKLARIVWVVLRRGEEFDAAAVTAVA

SEQ ID NO: 394039 - protein, 342 aa, unidentified
MTIVAGFDVHRAQITFDALDTDTGELKRGRIDATPAGVERWVGRFAGREVHVALEACTGWLFVARALQRSGAIAHLAEPVETRALRGRKRRAKTDREDARWLRQLLGEGRLPESWLPPEHVREWRSRARLRKTLIDERTRWLQRIRATLFHHGVEGAPERLRTGDGREFLSQLKLPADARERIAIALAMVDSLELKLRPLEEELRKLARRQAGCRALMSLYGMGELTSLVTLTELGDVARLSASRKAVRMAGIDIGVHRSDRRTRVGRLNRQGSPQLRWALYEAAQSACRPSSPDREDYLALKARGLSHTQASLTVARKLARRSFHVLRALGPAALEPITNA

SEQ ID NO: 394040 - protein, 342 aa, unidentified
MKLYGGIDLHCNNSVIVLSDEEDKVIYRRRLPNNIELVIPELAPFGKDIEGLVVESTYNWYWLVDGLMDAGYRVHLANTAAIVQYEGLKYADDDTDARWLAKLLRLGLLPEGYIYPRQERPVRDLLRRRSRLVQQHTGNLHSIQNLMARNRGRSLGANRIKQLTYEEVDRLLPDGDLALAVKSNLAVMRTLEGVIAMLEKTVKGRIKLHPAFKPLLTVSGIGEILGLTIMLETGEIERFAKVGNYASYCRCVGSEHISNGKRKGRGNRKNGNKYLAWAFVEAANFAVRYNPKIKRYYQRKCARTHPVVAIKTVAHKLARACYYILRDQVPFGYQRCGAANLY

SEQ ID NO: 394041 - protein, 320 aa, unidentified
MDVEIARMSAQGAKILTRRFDPDIKQIKEYLNSIKGKKIMTIEETTSSHWLYVELLDCVDRIIICDPYRNSLLAEGPKNDKIDARKLCLLLRSGLLKEVYHSLEEDYKIRKLVSAYEALVKAGVRVKNQKSAIYRAEGLRYKKDKIKKQDEILSFIEQQQNASIKHYEQEKEKYENKFREIKKKNKIIKMLCGISGIGTISAVKIYAKVIDAGRFENKYKYWGMCGLVYYQRESGGRNYGRKKPRYSRTLKSVYKTAAMAAIGGKNDIRDYYEVLLKQGYSISEARNQIARYIAKVSYGVMKNEISYRAYQWRELKKVAA

SEQ ID NO: 394042 - protein, 426 aa, unidentified
MTYRIAGIDVHKRMLAVVIADVAVGGEYQFERRRVGTSPSELCRLADWLVAQQVDEVVMESTAQYWRPVWATLEQRWRPKRLQESAGARSGQLHLAQAQSNRGAAGRKKDFPDAERLVKRLVAQELRLSFVPDVEQRLWRTIMRRKHQLTRNRVQFQNRLECLLEEAHIKLSSLVSDLLGKSARYMLQAVAEGETNPETIAALADHRLRATAPQLRDALGACRDLHPVYRQLLKMALEELKLMEEQIDKLEQEMANLLSAQQDVVQRLAEVPGLGVDSAQQIIAEVGPQAAAFPSAKHLASWVGVCPGEEESAGVNYSHRSPKGNRQMKGLLNQASNAAVKTKGSIFEFIYRRLVVRLGHAQAIGAIAHRLCRLIWMILHQAIRYEERGPAVSRSTTERRAAKMIRELRRLGYRIEPVECKAEGSV

SEQ ID NO: 394043 - protein, 337 aa, unidentified
MPALTIGLDIAKNVFQVYGVDRGGRPAIQRKLRRSDVLKFFSKLESSLIGIEACHGSHFWARELTKLGHTVRLLPTQYVKPFVVGGKNDANDASAICAAVSRPGIHPVPIKSAEQQSLQSVHRMRERLVHERTAKSNQIRSMFAEEGFIFPIGIVQLRQGIVALVSDADAHITIVLRRLGSMYLEQLAALQRWLEELTSEIANIFKRNESCQRLATIPGIGPLVATALFSGVGDPMQFKNGRQFAAWLGLTPRQRSSGGKSKLGGITKHGDTYLRTLLVQGARAVMRFVGRRDDRHSCWIKAVMQRRHVSVAAIALANKTARIAWAILASNDSFKLA

SEQ ID NO: 394044 - protein, 514 aa, unidentified
MSGRKVPALHVRTVQQPLSPPPTPTIVHPNHAPTRSRQADTADALRRAGRLSEQTRRDAEECAKVAGLPIQHAHAAGIDVGDSTHWVCVDSTPDGSDTVREFPAHTPGLRLLALWLRQCGVTTVALEASGVYGHVLFLTLLEAGFEVILTAPQFARQIKGRPKTDKRDCQWIQRLHKHGLLPAVFQPNEATHSLRDYVRQRANLVRLSGQHIQRMQKALVLMNLKLTKVLGDVTGVTGLKIIRAILAGQRDPRVLAKLRDRRCQHTAAEIAVALDGRYRPEHVTELRCCLTMWEKYQEVIAELDTVIAGQLRAMARQSELPPLSPKRRVRGRKPHDPRFDVRAALYYVTGIDLTAIEGIDELHALTLVSELGTDFTKWPTVKHFASWLGLCPNWKKTGGKVKSSQTRRGKNRAAGALRLAAWSLMRSKSYLGAYLRRQRSRLGAPKAITATAHKLARIVYNVMRYGVAYMMETEAAYAEQVRQRLEKQLQRRAQELGFELKKIDPPATPTVGVV

SEQ ID NO: 394045 - protein, 342 aa, unidentified
MTITILGIDLGKTVCSVVGLDVTGAVVLRRKVRPQSVIKFASGLPPCIVAMEACCGAHHLGHALCRQGHTVKLMSPEYVRPYVKAQKNDDRDAEAIAEAATRPTMRFVELKRQDQLDLQTLHRARERLIGTRTRLINQMRAILLERGLTFPKGRRKFEIGLASLLDDTDIDLSKRISALLADMREEWKEMDRRIAELDREFADRAKSNEATRRLLTIPGIGNLTATALIAAIDDAAAFSIARDLPAWLGLVPRQHTTGGKPRLFGISRRGNVYLRKLFIHGARAALPTLSRADTPLGRWLRGLLARAHYNVVVVALAAKLARIAWATLRRGTTFERAVPVRA

SEQ ID NO: 394046 - protein, 338 aa, unidentified
MNLSRIGLDLAKQVFQVHGVDRHEHVVCRRQLKRAQVRDFFRQLPPCLVAMEACGSAHYWARELRELGHTVRLIAPQFVKPYVKGDKHDAHDAEAICEAASRPSMRYVPVKSAEQQAVQSVHRVRSRLGRARTALCNEVRGLLGEFGLIATRRGRAATMALLETVTATEPAPLPAPMGELLRELKDELQTLEARIARLERQIQAHVRGDARIQRLLAVEGIGPISASAVAASAGDARQFRTGRQFAAWLGLVPRQHSTGGQQRLGNISKRGDTYLRTLLIHGARAVMRCCANKTDARSRWLQGLLQRRPANVVAVALANKNARILWALLSRETCYRPG

SEQ ID NO: 394047 - protein, 310 aa, unidentified
MDMKAVGIDVSKDRLDVHVWPDGIAFAVARDGKGLAELIERLLPLTPDLVIVEATGGFETVVAAALAGAGLPLVVANPAQIRHFAQAAGTRAKTDPIDAAMIARFGHDMKPDVRPLPDEATQLLADLVARRRQIIEMIVAERNRERRATVRRIKKSIARLVRALEKELAEIDAEIDAGVRGSPAWRDKEDLLASVPGVGPVVARTLIAELPELGTLDNKKIASLAGLAPYTRQSGQWKGKSMIGGGRKSVRCALFLAALVASRHNPVLKAFRDRLRAAGKPKMVALIAVARKLLTILNAILRDQKPWQPA

SEQ ID NO: 394048 - protein, 347 aa, unidentified
MNFYNNTHPYYCGIDLHARSLYVCILDQEGKTCLHKEIAADPDKLQQLLEPYIGDIVVGVECMHCWYWVADFCEEAGIDFILGHALYMKAIHGGKAKNDRIDSFKIANLIRGGNFPLAYVYPKAMRATRDLLRRRMKIVRHGADLKAHVASTTSQYNLPPNKVNLKNRDAREQLRNTFPELSVQKNIDLDLVILDCYAEQLSKVEWYIQQQAKQHKPNHFHLLKSVWGIGPILALTIIYEIGDIDRFESVQKFASYARLVKCKAESAGKTYGTQGNKIGNAHLKWAFSEAAVLYLRGNEKAQKYLLKLQKRMSKAKALSALAHKLGRCVYFMLKNESVFDERRFLKG

SEQ ID NO: 394049 - protein, 334 aa, unidentified
MEKDHYIGVDISKRTIDVAIYVKNPAKKGIFPHETFSNSEAGFKDMKRWLRKHSVVLSKSLFCMEATGNYTYELCLFLEQLGVAYSIQSPLHLKRSFGLTHGKNDKVDASRIAYYAYLHRDDIKLSKLASNSVRKLKSLIAERKSLVVEIARCKAQLKETGENAPSPGTVKRTEALQEFLESQVEAIEEEMAQTIETDEQMRTNYNLLLSVDGIGVVNAINTIIATHNFEMFDNARQYASYIGVAPFEHTSGTSVRGRTHVEPGAKMLKADLTGAVRSCINHDKEIRKYYDRKIAEGKAYGVVANAIKFKLLLRMFAVIKRGTPFVRKPDFIYS

SEQ ID NO: 394050 - protein, 351 aa, unidentified
MKPNFEPGKWFMQCVGIDIAKGTFTACLCMYEFDMGCATEPIVFSNNKTGFNQFVKWSRKEALKGYPIRYVMEPTGVYYEQLAAHLSKLDLDICIVLPNKAREFAKYEGILTKTDDMDAYTLGMLGCLDKRLKSWTPPSPIYRELRQMTRFVADINKVRTELQNHLEALTHSEITEKSIVKHYNKLINEIDKQLASNQKAIRDKIKQQPGLSERIERIATIKGLGYMTVVTVLAETNGFALITNRKQLTRYAGLDVPAHQSGPVDPKRHISKQGNVHIRTALYFPAIVSTQYNPQMKDFYGRLCARNPQSKMIGVTATMRKLLLLIYSLWKSGEEYDSKRDKPIKKEKERG

SEQ ID NO: 394051 - protein, 393 aa, unidentified
MICVGIDVAKDKHDCVILNSEGKILTGVFTIPNNADGFDTLLQKIRSCTSSDDKIKVGLEATGHYSYNILGFLINQGLPTYVINPLHTNLYRKSMSLRKTKTDRVDAKTIATMLMSNVDLKSYTDTAYHNEELKSLTRYRFDKVRERAQLKQSVSRLVTILFPELEKLVPTLHMSSIYALLIEFPGAKQITEAHLTHLKSLLKDASKGRYGRDMATEIRDAAKHSIGSVMPAKSLELRHTIRLIRELDSEIEDIEAAIEAIMEELQSPITTIPGMGFRMGAMILAEIGDFARFDSPDKILAYAGMSPSTYQSGQLSLAGTYSHMEKRGSRYLRYALYNATKYVCHWDPGFAAYLAKKRAEGKHYNVALSHAAKKLVRLIYAMEKSRQPYKRAA

SEQ ID NO: 394052 - protein, 307 aa, unidentified
MQDIFIGVDVSKDWLDLCEPGRGEQRIANGGRELTAFARRAARQEAWVIFESTGGYDRALCEALERAGTRFSRVNPARARDFARAIGAAAKTDRVDARMLALMGERLRPALTEPTPQARRALRAQAARRLQLVEMRKQEATRLKQTANAEACADIRSHIRLLDRRIVRVEARITELVAEDETFADAERRLRTAPGIGPVVAAILIAELPELGRLDRRAIAALAGLAPVARDSGKRIRSRAIAGGRPVIRRMLYLAALQASLHHPRFKAFRARLQDNGKAPKQAIIAVARKLLTILNAMIRTQTDFAT

SEQ ID NO: 394053 - protein, 413 aa, unidentified
MEIVHTRCAGLDISKRDAKLCLRLPGKRAGTFTRKVTTWGATTRQILALRDLLVEAEVTVVALEATGDYWKPFYYLFEDVLNVMLVNPRHVKNVPGRKTDVSDCQWLADLAAHGLVKACLVPPEPIRRLRDLTRARTALTRDRARVIQRLEKLLEDAGIKLSSVATDLTGVSSRGMLDALIDGRSSPEQMANLARTSMRSKIGELTEALHGQFTDHHAFLTRMYLDQIDQLTPMIDELTTRIETLIAPFRAARDLLVTIPGVNTLVADVIIAETGADMSVFPTPGHLASWAGVTPGHHQSARVTKSAKTRPGDRYLKAALGVAALAITRTRGNYLNALYKRLAPRRGPSKAIVAVEHSILISVWHMLTRAQPYHDLGADHFTTLNPERITRRAIHQLEQLGFTVTLTPTQNAA

SEQ ID NO: 394054 - protein, 428 aa, unidentified
MDDVDRNRLEEFRQLRQEIRHSEQHLIVGIDVAKERHHAFFGTATGKTLLRSLVFNNDYEGFRKLLDQTEALRVRHDLKKVVYGMEPTANYHRPLAEFLIHLERCVVLVSGVTAKRNRESLDGRWDKHDVKDSANVADLISQGKCLYYDFPAASLRGLRNLLSFKRRLKKQEQSYQGRIRNHLIAQYYPEMDREYARLRTEGVGIMRWCFPPSEMTMLEVDPFIERVTSGRVRLEKRERLTRIWDQAAETVGCDTVPGAAHEARLMAEGLGQIREMIEETEEQIEELCEGFPEYAYLLTIPGFGPDVSSKVLGAIGEADRFQNGKRVVKLAGYDLSADRSGKGLERANPQISKRGKANLRYALYQAALIASTRNREFIRYFTNKIRGREKEKGIQRKLLVKLSAKMLLIAWTLMKKKEAFNSAYLNLE

SEQ ID NO: 394055 - protein, 427 aa, unidentified
MAYRIAGIDVHKRMLAVVVADVDVDGEWCFERRQCETSPSQVQALAEWLLARDVEEVVMESTAQYWRPVWDALERHWQPARRCRADAVPTSGTLHLAQAQSNNGPRGRKKDFPDAERLVKRLVAHELTLSFVPDVTQRLWRTVTRRKYQATCTRVQLRNRLECLLEEAHLKISSLVSDLLGRSGRRMLQAVARGEADPSTVAALGNPRLHATPDELRDALGACSDLHPLYRRLLTMTLDELEMIDTHIRQLDAELALLLREHQEAVERLAAVPGLGVDSAQQIIAEVGPTAATFVTAKRLASWVGACPGHDESAGVNHSHRSPKGNRQMRRLLNQAANAAVKTKGSIFELVYRRLVVRLGHAQAIGAIAHRLCRLIWKILHDRVAYEERGPAVTQARAQRRAATMIRQLRSLGYRVERMSSPASTLA

SEQ ID NO: 394056 - protein, 422 aa, unidentified
MSYCPVAGIDVSKRFSDMCILSPDNKIFAQEKIYHDETSINRANALLQKAERLFFSKPVIVMESTSHYHLILFQFFSEHGYDVIVVNPLQSNSMKDFSIRKRKTDRVDAFKLAMMYRTKTLRPSQIPQTATRALRQLCRHRAELLNDVSSYKNRLTALLDQTFPGYDKVFSDVGGVTSCAVLVRFPTPTILLMEEESELVEVIAAASKSSYSFAKKKAGLLISAAQKAQTLGIHSCADETLIVCTIQMLRTLSESVLQIETAIDDLLAQIKEMRNNVSLLQSIPGIGSHSAALLLGEIGDISLFKKPKQLAAYFGLDPTERQSGSFRGTKNKLSKRGSPYARAALHMGVVNSICKRGKDSAANPVLLSYYEKKCKNKPAKVAQAASMHKLVFIIFAVLRDQKPFELKTPEQHAVEQGFVKAA

SEQ ID NO: 394057 - protein, 326 aa, unidentified
MSSVLGVDVSKAKLDVALLSQDGKYRSKVFANTQAGLEALLLWLQALLPHGLGAVHVCMEATGAYHEALALFLHDQGVCLSVVNPMRVKRFIELEGSRNKTDAGDAKSLARFCQMTAPEPWQAPSPGVRALQALVARLDALQEMRQSEANRLEVAHAAVQPSLREVLNTLDKAIADVKAQIRQTIDDDPDLRQRGELLQSIPGLGERTIPQLLAYIGDPQRFKNVKALVAYASLSPVIRQSGSSLDKRRGTHPQGHRQLKRALYFPAMVAGKYNPVIAAFWQRLKEQNKPGKVIVVACMHKLLAIVYGVLKSRTPFDPTRFSPANA

SEQ ID NO: 394058 - protein, 417 aa, unidentified
MDTMYSKVAGLDVHLKSIQNAVRCGQESGKLFKGVRSFGTMTRDLRAMADYLQSLGVTHVAMEATGVLWKPVWNVLDGRFTLLLVNPRHLKKVPGRKSDVSDAEWIAQLLQCGLLRGSFVPPRPVRELRDLTRHRAQLTGEHTRVVNRIHKLLEDANIKLGAVASDILGKSGRAMLHALAQGEEQPQQLAELALGALREKLPQLQLALEGHFSEHHRFVLRRLLSHLGYLESQERQFSQRIAHRLDELLPRAVHDRLDAIPGVNRKTIENVIAEIGPDMTVFPDAPHLCSWTGICPGNEESAGKRLRSRTRKGNRWLRRTLAESAWAASHVKDSYLATQYRRLAARRGKNRALLAVGHSILVIFYHLLTHDVKYHDLGADFFDRLEPERLRRSLVKRLDHLGYSVTLTPKPPRQGAA

SEQ ID NO: 394059 - protein, 455 aa, unidentified
MKMGIAKEKASLYNKATQKYKEAINMIRNYSTQREKIERITEKTLIIGIDIASHRHYAQALTWRKVEVTKGLYFNNERQGFEEFLEWVNHAKQKMGAGDLIVAMEPTGHYYFALEEYLENLGIEVVIVNARDVNQMGQYYHNHRSKSDPRDAMLIGYLCSEGRYAVTTRPKEGPYAELREYTVRREQLVKKQIASINELHGLFTQLFPEHKQIKTSGISEGLLVIFLELRTLEAIQAAGWEGLYDILKKHKKYQIGKDKVKQIHALSMSSIGIKRNVKATQTVLTSVIEEYQFYQQQIKAIDDDIIAQLNEMDAAKKLMAIPGIGPIITATFLAEVGDIANFKSAKQILKLAGYAICTNESGNHKGTRRTSKMGRKRLKKIIYQAALATISNNDDINQIYTYYTQERKDPLKKMKAVIAIGCKLIRIFFSLLTYNHHYDGQKMLSDIKRPQGQAA

SEQ ID NO: 394060 - protein, 345 aa, unidentified
MDKIIRIGIDTSKHVFQLHGVNAAERPVLRKKMRRRETIDFFTTCSPTVIAIEACGGSHHWARLLTSLGHEVRLIAPQLVKPYVKRSKNDAADAEALCEAMSRPTMRFVPVKSVDEQAALMLVGVRDRLIRNRTQLANAIRGYATEFGIAAAKGLAHLPLLLERIQADETVPELARELFASQADEYARLEEKIADVDAKLEAWERNDERSKRLKTIPGIGPIGAALLIMKTPAPELFQSGRQFAAWIGLTPKDHSTGGKLRLGCITRAGDEALRAALVVGATSVIQHARRTGKASVWLTELLKRKPPKLAAIALANKMARIAWKALVSSETYNAKSASIVMAGVA

SEQ ID NO: 394061 - protein, 355 aa, unidentified
MSSEKYIGLDVHQATISVAVMDSQGKVVMESILETKASTLLEFFAGLRGSLFVTFEEGTWAAWLYDLLKPHVTEVLVCNPRKIPLLKQGNKSDKIDARKLAERLRLHDLKPVYHGETGMRMLRELARSYLTVVKDLSRVMNRLKALYRSWAIPCAGRDVYYRRHRSQWLDKIPEAGTRRRAEQLYQQLDLLQHLRQQARRELLAESRKHAITAKLRKIPSLGPIRSALAVALIQTPHRFRSKRQLWTYSGLGLETRDSGEYHFVKGQPRRRKKQATIRGLNKDYNHDLKGLFKGAATRASVKPGPFQEFYQRSLAKGIKPTMVRLTLARKIAAITLTLWKKGEDFDIHKLNSQAA

SEQ ID NO: 394062 - protein, 394 aa, unidentified
MSLCVGIDVSKEKFDACGIGEGGKKMFSVSCPMDRSGFDKLVVQLPTDKTSFLLGMESTACYHMPLFSYLTTHGYQVVISNPLLIAQYANRSLRKTKTDKRDVLTIAQFLMQEKESLSVETCSPLIGELRDLARRREKLTDQVTALKSDMKRILSVTFPELEHLTGVFTKSTLRLLADFPSAHALRQANYSAIAAIVIPRSRGRKSHASVHALMTAAVSSVGVTSPAKEMILKQEACLLLEVEEQIRETTKLLMSLRNERIRDDTEILCSMRGIGENTAVNFLVEMGGAIGIYKNDKKLIAAAGLDPSTYQSGKYAGRSKISKRGNRHLRRVIWLMTTRTITNNAIFRAYFFKRRTEGLPYKKAVLATAHKLIRVMYSMLTHRTCFVEGGINYS

SEQ ID NO: 394063 - protein, 335 aa, unidentified
MKKASIGIDISKSNFHVCFKIRLEEGKIKILGTSSFQNNTKGFEELLDWVDKKNKEDPDPVFVMEATGVYGEDLVYFLHDQDRIASVVLPNRMKGYFKSLNIKTKTDKIDSKIIAEYGIERRLDIWKPMSSNYKALRELCRELLALKNTRTKALNQLHAMKYAHGRLGELVKMKESQIEFYDDNIAELKKHIQLAVESDQQLVEKLKKVVSIPGLGFETAVILASETNGFLLFHNIKQVVSYAGLDVSHNESGRFRGRSKISKKGNTKIRQALFMPALTATVHNQPIKELYERICEKNPNIKRKGVVASMRKLLILAYTLWKKDEIFNKEYKWAA

SEQ ID NO: 394064 - protein, 403 aa, unidentified
MEVVYPNSCGLDVHKKTVMACAITPRGKETRTFSTMTRELLELKDWLRAHKVSHVAMESTGVYWKPVYNLLEDEFTLLLGNARHIKAVPGRKTDVKDAEWIAELLRHGLIQGSYVQNRSQRELRELARYRRTLINQRSQVINRIQKVLEGANVKLSSVATDVVGASGRAILEEMIAGVQDPKALAEMAKARLRNKRSSLEDALNGLVGTTQRMLLASLLRHLDFLDSEITGLSDDISRRMGHLEEAIQHLDTIPGVGRQTAEEILAEIGPDMSRFPSAQHLASWARLCPGNNESAGKHKSGSTGHGNHWLRSSLVQASWGAVRAKHNYLASTYHRIAPRRGSKRAILAVGHCILVGIYFVLSRNIIWQDLGENYFDEHHHQRILNRAVYRIQSLGYRVTLVPA

SEQ ID NO: 394065 - protein, 425 aa, unidentified
MQIVYRRCGGMDVHKKSVVVCLLLIDESTGEERQQRRTFGTTTRALLELAAWLKLWGVEVVAMESTGVYWKPVWNVLEEELGADCKQMLVNARHYKQVPGRKTDQKDAEWLAELVQHGLVKASFVPPKATRQLRDQVRARASLMEDHTAVANRLQKLLEEANIKLSSVASNVLGVSGRRMLKELAKGNRNAAELAELAVRRLREKIPQLREALEGRMSAHQQQMLGDYLQQLEFLEQQVEQLDRRTEEHLQATGQIADLELLDTIPGVNYVVAAEILAELGPNVEKQFETAGHVSSWAGMCPGNHISAGKRYSGRTNKGNVWLRRALCQAAWAASKSKNTYLAVQYKRWQARRGKKRAIVALGHQILVIAYTMLKNRTPYREMKPEECKSQNSRPRNPEALVRSTVRQLNALGYEVTLTSATPPT

SEQ ID NO: 394066 - protein, 313 aa, unidentified
MTIHVGIDVSKASLEVALGSDGDRLEVSNDSAGFRSLIRRLQALGCELGRVVLEASGGYERGVQAALQAAGLAVCRVSPDRARAFARAVGLLVKTDAVDARMLAQFAVVLKSPAPQETPSTPVQRELQELVHRRQQLISHRDDERRRLQQATLTVVRRSITTQIRQIARAIDTFDQRIRAAMQQTHPTNQAIAAVKGIGPVTVAVLAAFLPELGRLNRKQIAALVGLAPFNSDSGQHAGPRRIRGGRAYVRRILYMATWSVIRSQQAYRAKYKQLRARGKPAKVALVACMRTLITALNAMTRDQSQWRQTMPS

SEQ ID NO: 394067 - protein, 391 aa, unidentified
MTAVVIGVDPAKRSHAMAVLDEHEEQLAALQVGNDSAGYAAMLALAKRWKNRVWAIEGAGGVGVQLAQRLVADGETVLDVPPKLSTRARIFDRGHGRKNDPTDARTVAVVALRTKGLRQVVLDDELIALRLMSERRADLVRTRTATVNRLHQLLMELIPAGAERKLTATKAKALLATVRPRDVAGRTRRQLAVDLIEDVTVTDRKLKDLDKRLREAVDATGTKLTEIKGVGVATAAMVLGETGDVRRFPSKHHFASYNGSAPRDWSSGGVDTRRLSRAGNRKLNHALHIIAMTHKRYDERGAEYYARKLAAGKGRKGALRCLKRRLSDVIFRTLTEERNQREAAGPEGQSGATTKSSATDRTPMVSTSEKPLTGPAAPDATPDRRALPVPV

SEQ ID NO: 394068 - protein, 404 aa, unidentified
MLFVGVDWAEDHHDVCVMDAAGTVLGKRRVPHSVRGIGELHELVSEFSEEDEPVVVGIEIDRGLLVSAMVGAGYEVYAVNPMAASRYRDRHGVSGAKSDPGDAKVLADLVRTDRHNHRPVGGDSELVDAIRVLARSHQSAIWSRQRQVNSLRSALREFYPGALEAFGTDLASADALAVLAIAPTPELGRTLSRSKITSALRRGGRQRNLESKAEQIRAAMRAEHLSAGEVLAGAYGIITASSVEIIGALNREIEVLEHALAEHFESHPTAKIVLSLPGLGTTLGGRVLGEFGDDPNRYADAKSRKNYAGTSPITRASGKSLVVLARFARNRRLANALDQWAFCSLTKSDGARAYYQLLRGRGKTHRQALRQLANRWVGILHGCLETGELYDEAFAWPASQPTAA

SEQ ID NO: 394069 - protein, 339 aa, unidentified
MKLLPVGIDIAKNVMQMHYVDEETGEVVNKPIKRAQFLEHFANCAPRLIGMEACSGAHHWARQLTKMGHQVKLMPAEFVKAFNIRNKNDAADARAIWLAVQQPSKPVAIKTEMQQAMLALHRTRERLVAFRTMQINGLRGLLTEYGEVMGKGRAGITKAIPDVLARVADRLPAVLIDTLREQWSRVAELDEQIARIERRMREWKKDDHAVRAISDVPGVGLLTATAAVAMMGDAKAFRSGREFAAWVGLVPKQTGSGGKVNLHGISKLGDKYLRTLLIHGARSVLTNAKEPGPWIGEMKKRRPLNVVIVALANKMARTIWAILAHDRPYQKGYVSVKPA

SEQ ID NO: 394070 - protein, 347 aa, unidentified
MNFYTTEHKHYCGVDLHARTMYVCIVSQQGVVLLHRNLPCDPQKFLLTIQPFREDLVVAVECIYSWYWLADLCAKESITFVLGHALYMRIIHGAKAKNDRIDSHKTAVLLRGGLMPRAYVYPADMRATRDVMRRRLHFVRQRGSLLAHIQMTHHQYNLDSPGKRISYRSNRDGLGEGFEDASVRDSIAADLALIDHYEVVIGELELAVLRQARVHDPNAFRLLTTLPGIGRVLGLTILYEIHDISRFPSVQDFASYSRLVKCERNSAGKSLGTSGAKIGNAHLKWAFSEAAVLFVAKCAQGKTLLTRLERKHGKAKALSILAHKLGRAVYFMLARNQAFDLERFTKS

SEQ ID NO: 394071 - protein, 423 aa, unidentified
MEVLHRRVAGLDVHKKTVVGCVRLMVRRTPTRECRTLATTTEGLLALLAWLTASRCTQVAMEATGVYWTPVWKILSAGDFTLIVANAAHIKQVPGRKTDINDAMWIADLLACGLIKASFVPEEDIQELRALMRTRKQLVREQTRHVQRLQKTLEEANINPGLNPGDIMGVSGRRMIEAMIAGERDPHRLAALAARGIKASPKALYDALYGRLREHHRFLLKLHLQQWDALDAAIRQIDRQVAGQIARMDEEAADETSPFRELILRLSAIPGVSRLSATAILAEIGRDMSRFPTAGHLVAWAGLCPGQNESAGTRKSARLRKGAPWLKTMLVQCAWAAKRAKDSYYMAQFHRLRSRRGPQKAICAVAASILTAIYHMLKSGTPHRDLGADYFDRRSPEAKAKRLVTQLTKLGFDVKLQPLAVAA

SEQ ID NO: 394072 - protein, 349 aa, unidentified
MAEVSTIGLDIAKAVFHAHGADARGQMAFSRRLTRAKLLEFFAAQPRCMVALEACGGAHHWARQLQALGHDVRLIPPAYVKPFVKRNKNDAVDAEAICEAAQRPSMRYAAIKTEAQQAAGMVFRTRDLLVRQRTQLINAIRGHLTEFGWVAPKGPSHINVLATLLEEGEEIGASLPEAARAMFLVMTGQLEQLNEQIKLLDKEIARRAREDEAARRLMTIPGIGPITATALLALAPPAEGFARGRDFAAWLGLTPRQHSTGGKERLGAISKMGERTLRRLLIVGSSAVVLQASKRGAPRGSWLEQMLARKPRMLVTVALANKTARIIWAVLMKGEDYREGYRAPVAAAA

SEQ ID NO: 394073 - protein, 340 aa, unidentified
MNEITTVGLDLAKHVFQVHAVDAEGDTVLRKQLRRGQVLAFFSRLPRCLVGMEACATAHYWARELRALGHEVRLMPAQYVKAYVKRNKNDAADAEAICEAVGRPTMRFVPVKTAEQQAAVLLHRGRERLVRQRTMLVNALRAHLVEFGVIAPQGLRNVGRLIAIIRDDDDARLPGLARQVLQVLAVQIEQLEAAIAALEKRLMGWHKSNPVSQRLATIPGIGPIIATAIAAMVAEPSGFRSGREFAAWLGLVPRQNSTGGKNRLGGISKRGNQYLRRLLINGASANLLRSKATNADPWVIGLRRRRPSLVVAVALANKTARIAWAVMHRQENYQRMATAA

SEQ ID NO: 394074 - protein, 351 aa, unidentified
MRTSQKITGIVATIGIDIGKNTFHLVGFDQRGAIILQQKVSRSQLERRVANIPRCLIGMEACSGSHHIGRQLAEIGHDVRLIPAQYVKPFLKGHKNDYRDAEAIAEAVQRPTMHFVTIKTPEQMDLLALHRVRSRLVGRRTGVINQIRGFLIERGITVRQGPMPLRKALSEILSSDTGALSPRMVGLIADLAQDWRRLDERIAAVSAEIEALAEQDDSCQRLMTVPGVGPIISSAVVAAIGNGTGFKQGRDFGAWLGLVPKQESTGDRTILGKISKRGNKYLRTLFVQAAHVVLERRPSAAMRGLWPWVEQASKRLHRNMLAIALANKLARIAWAVLARGGTYQPRITHAA

SEQ ID NO: 394075 - protein, 287 aa, unidentified
MSNKSNSLVATIGIDIGKNAFHVVGLDRRGAIVLRQRWSRGQVQARLANMPPCLIGMEACVGAHHLSRGLHLQGHDARLMPAKYVRPYSKGQKNDFRDAEAIAEAVQRPTMKFVATKTAEQLDLQALHRVRERLVSQRTGIINQIRAFLLERLMTVPGIGPIISSAMVAAIGNGAVFTKGRDFGAWLGLVPKQISTGDRTILGPISRRGNRYLRALFVQAARVVLVRTKDSDRYGLKAWIDAAKKRLHHNVLAIALANKLARIAWAVLNKERAFECVSTRATSSQPA

SEQ ID NO: 394076 - protein, 355 aa, unidentified
MKYIGLDCHKKYDHATIINTETGEIKAKRLTHTREEFSEFIGQRANTRVVMESCWNWSKTYELVKDLVEEVILAHPLKVKAIASAKIKTDAIDSRTLAELLMADLVLQAHLRKAENRVKQRVIRHRAFMVVMRTRVKCKIHDLVDSQLLPAEVIQAKPHNLFSKKGMKWLTLLELTNVEDRRMLESYLRLVALTNQEISASNEMIEDIYSKDKDAQLLATIPGIGITLAALISTEIDDIERFASASKLCSYADLVPSTRSSGGKTYHGRLTSEGNRWLRWALIEAVVPASYADAEIRDRLNAIRKIKSANIAKTIMARWLLKIVYHVLKEDRPYIVANPDKTCPSRLLFALASSR

SEQ ID NO: 394077 - protein, 339 aa, unidentified
MSGGIDLHARTMYLCILNQDGEILVHRNMPAGPEPFLKAVAPYREDLVVCVECIFTWYWLADLCAREGIPFVLGHALYMKAIHGGKAKNDKIDSQKIAVLLRGGMLPQAYVYPAAMRATRDLLRRRMHLMRKRAELLAHVQNTNSQYNLPGIGKNIAYKANRDGIAERFPDPAVQKSIEVDLALIGHYDHLLNDVELSIVHTAKQHDPQTLSRLQSVPGIGKILSLVLLYEIHTIDRFPRVQDFVSYCRLVKCAKESAGKRYGTSGAKIGNAYLKWAFSEAAVLFLRTNPAGQKYLARLEKKHGQGKALTVLAQKLARAVYYMLRRKTAFDMSMFLQSS

SEQ ID NO: 394078 - protein, 463 aa, unidentified
MDVLYSHVAGIDVHKKQVTVTARTPDPRRAGRREKTRTFRTFYADLLAMGSWLVEQQVTRVAMESTGPYWWPVYAALREAGGPGLVIDVVNAAHVKAVPGRKTDVKDSQWLARLLEVGLLRGSFLPPDEIREIRDLTRYQTKLTEERSREKQRLLKVLEAAGIKLDVVASDTFGVSGRSMLDALVGGERDPHVLAGLARGVLRNKTEDLRLALSGRFTVHHGQMIGFHLARLDHLDQMIGQVKEKIGHCGTPGTSRRVPTGPAGLVAAFAEQIQLLTSIPGISDRVATVIVSEIGVDMSRFPSAKHLAAWAGLAPGNNESAGRRRRARHRKGNTHVQSILIEAALAASRTRTRLGARFHRLHRRFGGKANKTAGKKAAFAVAHTLIKVIWVVLSTGQSYADLGHDYYTRRVNPESHTRRLIAQLEAVSGKKIILVDHDDGPPAPHDSSHSDVPEPHHSGGAAA

SEQ ID NO: 394079 - protein, 408 aa, unidentified
MNPLFVGIDVSSKNNVAYLMKPDGSKHSSFSVQNNLGGAKLLSERIVSALGSMQLERVVIGLEATSIYGDSLVYALREDGRLGRFQRKIHVLNPKQVRKLKELYPDLPKNDWVDAFVIADHLRFGRIAKEVYMDDYRYQALRTLTRARFDVIQNLTREKQRFANYLFLKCSGMAQDKGIQNTSATTIALMERFETVDNLANADLDDLTAFVAETGRGRFADPESTAKAVQAAARGSYRLPKTVNDTVNQAMAVSIASMRALKEQVKVLDKAIEQQFEIIPNTLTSIPGVGKVYSAGIIAEIGDIHRFASQASVAKFAGLVWTQHQSGEFEAEHSRMIKSGNRYLRYYLLEAANSVRRCDSEFRRYYDLKFKEVNKYQHKRALALTARKLVRLVFRLLKDNRLYIPPEG

SEQ ID NO: 394080 - protein, 440 aa, unidentified
MSMSKTYRSVPVKRVEVEKVLAAHAGEFVEAGFDIGKRWVWTTIRFRDGTCLRPWRAGNPLEIGSLVDLLKQAGERVKLRVAMESSGTYGDPLRQALSDAGLDVHRVSSKASHDWAEAFDGVPSQHDGKDAGVVAELCAMGKSVAWPLQKPTELEQELGYWVDQLDAAHRVQQVWIGRLESRLARHWPELGQERKLSAPTILKALRHWGSPAALGADPQAAATLSRFSHRLLDQAGIDRLVQEAKQSVGVRMNAWDQRRVREDAEGALLAHRQKRAARRRLHELARRHELIPALGEVVGIPTACVLWVCVGDPRHYGSGGAYRKAMGLNLAERSSGMYQGQLRISKRGKSLPRRFLYFAALRYVSKQPVKQWYLEKKRRDGDGGMRGVVAVMRKLPLALHAAARGEAFDAARLFKSIVNEVNNSNMRRQVQGGDARPKRQ

SEQ ID NO: 394081 - protein, 384 aa, unidentified
MRKPTRYLGIDVHADSLAVAVAEAGRRAEVRSLGMLPNTSAAVRRFVAKLGGPKGLRACYEAGPCGYALYWELTRLGVVCEVVAPTLIPVKAGDRVKTDRRDAEKLARCYRSGDLTPVWVPDEEHEALRDLVRAREAAKKDQLRARHRLSKLLLRHGQRPPEKTTAWGSKYMAWVRQLRFEQRPLELTVVDYLAEVDHAAARIERLEKAIAEAVEAAPPAFREVVAALQTLRGVALLTATTATVEVGAFARFESPRQLMAYAGIVPSEHSTGGPGRARRGGITKTGNAHLRRVLVEAAWTYRHRPVLGPRVRQRQEGQPASVLAIARKAQHRLHSRYVRLAARGKPGQVAVTAVARELLGFMWAIAAPIERAAHGIVVVDSRAA

SEQ ID NO: 394082 - protein, 402 aa, unidentified
MQTSSIDVFIGIDVGKSDHWATALDRDGERLFDKALPNDETRLRDLYERLSHHGRVLVVVDQPATIGALAVAVAQDMGITVGYLPGLSMRRIADLTPGNAKTDARDAAVIAQAARTMPHTLRAINGSDEDAAALSMLTGFDLDLARQVNQTSNRIRGMYTQIHPALEKVLGPRLEHDAVLEVIASWPTPAALRKAGRARINAKLKAHGARHHEAWADEIISALKAQSVVVAGTDAAGIVLPHLARQLIALHAQRSDVAAKVEALVEAHPLYQVLTSMPGIGVRTAAVLIAETLGRDFATGAHLASYAGLTPVTRRSGSSIRGEYTSHAGNKRLKRAMFLSAFASLRSDPASRAYYDRKIAQGKRHNQAVIALAHRRILTLHAMIRNGTLYDPQPTHQLPAAA

SEQ ID NO: 394083 - protein, 347 aa, unidentified
MSYKIAGIDVHKKVLMVVVIDATTPGEKPERRRFATMPSDLHRLLIWLREQGVEEAVMESTAQYWRSVWLELEPHMRLHLAQAFSNRAPRGRKHDFKDAERLVRRLIADELILSFVPGGEQRSWRNMTRMKLQLTRDRVRLQNQIECLLEEMRIKLSIVVSDLLGASGLRILRALAAGETDPKQLAQLGDKRLQCTEEQLVDALTGSAQPLHREMLALQLERLQLIDTQIAKLNGMIAQAMKPHQEAVMRLAEVPGLGVDSAQQIIAEVGEQASTFPSAAELTSWVGTCPGKEESAEQNHSSRSAKGNKYLRRVLNQAAHAAVKRKGSYFQVVFRRLLPPCMRGCGL

SEQ ID NO: 394084 - protein, 370 aa, unidentified
MSVRRILAKTIDTDLEYEAIGIDLAKNCVSAALLTTDGEVVCIDRLDYSELEKSAQALSSTTFAMEPCTEMNYLVQKLEAWGHRCLVIGGKNVQNYVENHFSGQKTDLNDAQALAFLAQDTQLRTIKAKDVEQQKYASLTTLREQYIKQYRQTIVSLKGICQAWGLNISKGISGKARLKDLIENHAAFPEELKESLVDMVTHAQTAQKALNKITKTLEELAKSDKVCQLIQTIPGLGSICSCRLRATVGDIKRFKSPKDFPAYYGLVPRSIATGHNERKGKITHRGDRTMRSLMVQGAGCVIRLATCGKLKSKQLTKWILKKQKEKMPWGKLVCAVAAKLLRIVRAILISSKPYNPKIAGVAKCSLSKGS

SEQ ID NO: 394085 - protein, 348 aa, unidentified
MERYIGLDAHATSCTFAVLSERGRRLDSAVVETNGHALVKFLRGVPGDKHLCLEEGTQSAWLYEVLQGQVRELVVTHAYERKRGPKDDQRDAFHLAESLRLGAVSPVYKDRGQLSELRAHADVYAKLVTDLVRAQNRLKALFRSRGVQVVGGAVYTQRDRQAYLDELARPYRGSALILYSELDALRAIKKEAEKQLIAQSHQHCISAVLQTCPGMGPIRVAETIPIIVSPYRFRTARQLWAYSGLAIVMRSSSDWVKTAHGWERAERLRTRGLNRNYNRRLKNIFKGAATTVITQRLEPMVGDYQRGLEQGTKPPMAKLTLARRISATMLAMWKNKEAYHPERYRPTP

SEQ ID NO: 394086 - protein, 341 aa, unidentified
MSEVTTIGLDIAKQVFHAHGADASGAMVFSRRVTRAKLIQFFASQPRCTVAIEACAGAHHWGRELQRLGHEVRLIPPAYVKPFVKRQKNDAADAQAICEAAQRPTMRFVAVKSEQQQASAAVFRARDLFVRQRTQFINALRGLLAEHGWVAPKGVFHARSMMAQIEDPSCSLPQGARDAFLAMIASIKALDEQIVLLDREIAQRAKEDPAARRLMTIPGIGPITATAILALAPPAESFRKGRDFAAWLGLTPRQRSTGGKQKLGAISKMGDRTLRRLIIIGSSAVVLHAARRGAPKGSWLEQMMARKPRMLVTVALANKTARIVWAVLARGEDYRAPAAAA

SEQ ID NO: 394087 - protein, 480 aa, unidentified
MNVNVKKNKRQVKVQDSSINVLSMEEMKSRIATVEKDMKSYTWRELETNGKFAKNDKLSFISDDMLIVGCDIGSEIHYIRAIDTRGRELSKEVYSFSNNEGGFQNARDWMVNLAAARDKKQIVLGLEPTGHYWFALAAWMISKGISVVQVNPYAVKQSKEIEDNSQLKDDRKDPKLIANLVKDGNYGMPYLPEKVYADLRRLSMFRDQLTEDRIRYINRLHRELKIYFPEYMDAFGKIDGAFALEVLKTAPMPDDILALGEAGLREIWQEAKLRGRGYSRAKEIVEYAEKSVGLKDGTYAGREAVKWFASQIVVLDERLAEVESALHQRCMEIPHAENIIEIRGIGENILSGILAEMGDISRFDDVKEIQKISGLSLVACSSGKHKGQTKISHRGRKRLRYWLFQAAKSAVSHGYEYKQLHEYYTTRTDNPLKKMQSLIVIACKLLRVIYTILKTGIKYDPEKLLKDIRWPEKATVKEAA

SEQ ID NO: 394088 - protein, 440 aa, unidentified
MLPSGIDLHKRTVVLSTVTADGQPVRDATLPTTREAVRAYFEALPGPHRAVVESTSTWYWLRDLLVSAGVDLRLGHSKYIKAISYAKVKTDAVDAATLAQLLRSDLIPEAHMVSPAWREARDLLCARLQLVGQQVRCKNTLDGLLAQYNVTPPAALPPLVQLRTTMLAEQYALLGAQAKRLADALNPRLLPTPDVQRLVWVPGIGRIVAFTVVLEIDGIPRFPSARDFVSYCRLVPGAGNSGGKTRHKRTKDGNKYLKLAFSHAAVRASQYFPENRAFHRALARRKPPAAARALVAKELARIVYVMLTKQQPFNGPFKGKPARLTGAACLRLRSQACSSAAFDWAVSRRAAAEPPGPVPRTVSPQWCMAATEARPPRGIGERRHRYMRDPLHRDGRTRHKPPPTRLRRNPLMALATVLKVKHSPALVVRAPHTSAGAFGP

SEQ ID NO: 394089 - protein, 365 aa, unidentified
MSQDTDCLFVGIDAHQDTLSIAVLPLGAECPEPARKIANDPAKIRQVVQLLEKRGSLHATYEAGCTGFVLWRQLTQLGVDCLVAAPSRIPVLPGERRKTDRLDAQRLAIFLRGGQLTAVRPPTPELEALRTLTRSRDAARKSVVAAKHHVSKLLLHRGAIWRGGTLWSRAHRTWLRSVELDDPDDRVMLALKLRRLASRESELQELDELIEQRAQRDDIAAQVCALCAFRGVQTLIATNVVAEIGDPRRFRDHAAVSAYVGLVPSEHSSGSKVRRGGITRTGSRHLRRLLIEASQHYRRPYPESKKLRLRREQAPTAASELARSVEQRLVKKYRRLSAAKHTNLAKAAIARELVGHLWQAMREAN

SEQ ID NO: 394090 - protein, 341 aa, unidentified
MATTVFDCPQVCAPASSPRAFFGVDVASAHLDICSYGSSAVKRIANTPAAISRWLGCVPPGSAIAMESTGRYHQALAAGACAAGFAVYLLNPRDVRSYARGLGARGKTDRLDAQVIARYGAHEHHQLRLWQPVTLQQQALDELLRRRAVLVNCQQKLRMSAADCPAVLATLAPLMQEFDRALKAFDRQIRAAVQAVDTHGQAFDCITSVPGIGLLSGAALLGVFRRLASASADAVIAFLGLDPRPMDSGHKVGLRRLSKRGPPEWRRLLFNAAMSGSATKAWKGCYEHERTKGLSGTAALNVLARKMTSEQAVRRLAEKPVLNPGVGGAGLAALAREDQQQ

SEQ ID NO: 394091 - protein, 331 aa, unidentified
MTLVIGVDIGSKTAPMAWRKDGKNAGTWVIEQSATGHSLAVKKLLALKPDLIVMEATGIYYLDLAIKLTSAGLPVAVINPKSAFNFAKAMLSHSKTDKIDAQLLAEYAERMTPRVWTAPTPQMLELRALGRHLNRLTGRRTQAKNELHALKATGTTSKMLIEDEEDAIVTLDKRIDRFRGAALDLILQDSELSVSYKCMVAGPGIGEASAIAMLAELVTLPRTLKSNQVSRHAGLDVRLTQSGTSINKPGRMSKAGNAYLRSAMFMPALSALRCDPYVKAFYEALVTRGKKKMQAIGAIMRKYLTGVWACMRSGEAFDTARLFSEKHLLKA

SEQ ID NO: 394092 - protein, 366 aa, unidentified
MKTTPRTKTLYVGMDVHKESISISVLDGDSREGRPTITVRNEPRDLRRVIARLQPEGEIRACYEAGSCGYEVQRLLASMNVCCDVVAPSLIPVRVGDRVKTDRRDAEKLARLFRAGELTSIRVPTEAEEALRDLVRCREDAREDVLRERHRLLKFLLRHGRVFRDGKHWTLAHWAWLHRQSFEDPAAQSVLVEYRSRLESTLARLKALDEQLAAAAEREPYKTPVARLRCLRGIDTVSAIALVAEICDFKRFEHPRELMSFLGLVPSERSSGGVRRQGSITKTGNGHARRILVEAAWHYRHPPRRSVTIAARWKGQPREVVDHAWKAQERLHRRHFRLTCRGKPSQVATVAVARELCGFIWAIARS

SEQ ID NO: 394093 - protein, 311 aa, unidentified
MEHPCFVGIDVSKAHLDVYVRPSGESFRVSHDDAGFVTLIGRMRPLTPTVIVLEATGGYEVTVAVALASARLPVAVVNPRQIRDFARATGQLAKTDALDARVIALFAEAVRPIVRSMPDEHARALGELVARRRQLVDMLTAEQNRRRLLRDRGLQRHLEAHIAWLNDALERLEAELTTRIRSTPIWREADDLLRSVPGVGPVTSCALIADLPELGHLDRRRIAALAGLAPVARDSGAFRGRRMIVGGRAHIRRSLYMATLTAIKHNPVIRAFFHRLVAAGRPGKVAVTAAMRKLLTILNAMLRDRRPWQIA

SEQ ID NO: 394094 - protein, 335 aa, unidentified
MKHDMHVLGIDIAKRVFHAVGMDDRGNIVYRKRLSRHDLIPYIAQLPPVRIGIEACGGAHYWARRFRAHGHEVKLMAPQFVKPYVKSNKNDSRDAEAIAEAVTRPTMRFVPIKDVDQQDLQALHRVRERLMGARTALVNEVHGLLHEYGIIISKGVAKFRQAVVGKLESEKDKLTSLSREMFWKRVDEFALLEKQLAYDQEKRDTVATTHPECQRLMTIPGIGPFTATALVAAISDASAFKNGRQCAACLGLVPRQHTTGGKERLLGISKRGDTSLRKLLGHGARTTLRWVGRKTDRRSQWMRQLLERRGKNRTAVAVANKNARMVWALLTSHQD

SEQ ID NO: 394095 - protein, 377 aa, unidentified
MDQPIRFFIGLDVHKDSIAIAASQANSRDEARFIGTTGHSVHQVVKALSNSQCSPSELAIAYEAGPCGYGLARELIARGYNCEVVAPSRVPRRPADRIKTDRRDALLLARLHRSAELVAVAVPDPSDEAVRDLTRARDDAVKAQRCARQQLMALLLRLGKPYREGRGWTQKFLRFLADLQFDDPHHRIVFTEYRLAVQSAGERIERIEAGIREAFNTWRWQPVVRALMCLRGVDFLTAMTIVAEIGDLRRFEHPRQLMSYLGLVPSEFSSGNNRQRGALTRTGNSRVRRVLIEAAWNYRHRPKISREIETRQEGLPAAIIEIAWKAQVRLCHRFHKLRYRGLHQNKTCAAIARELVGVVWDIARRFRPIEHPTSSRQ

SEQ ID NO: 394096 - protein, 351 aa, unidentified
MSLKVNSAIAVIGIDIGKNSFHVVGHDKRGAIMLRQKWSRGQVEARLANLPPCLIGMEACVGAHHLSRKLQMLGHDARLMPAKYVRPYSKGQKNDFRDAEAIAEAVQRPTMKFVATKTAEQLDLQALHRVRERLVSQRTGVINQIRAFLLERGVAVRQGLRFLRAELPRILAGPCDALSPRMLRVIEGLAGDWRRLDERIEGLSSEIEALARQDKGCERLMTVPGLGPIISSAMVAAVGTGDAFSKGRDFGAWLGLVPKQISTGDRTILGSISKRGNRYLRALFVQAAWVVLVRVGPKHWERYGLKSWIEAAKKRLHHNVLAIALANKLARIAWSVLAYGRTFEVSKVQAA

SEQ ID NO: 394097 - protein, 313 aa, unidentified
MCEHRMVGIDVAKATLDVAVRPSGEQHSAPNDSEGIAALVDWLGTREPTVIVVEATGGYEAALVAALGVAGLPVAVVNPRQVRAFATAAGYLAKTDRLDAQVLAHFAEALRPTPRPLPDAQAQELAALLERRRQVVAMRTAEQNRLGATRVERVRARIQAHLAWLDADLQEVDDELRRSLRASPLWRERDDLLQGVPGVGPVVALTLVADLPELGRLSHAQIAALVGVAPLNRDSGTLRGRRTVWGGRAAVRAALYMGTLRATRCNPVIQGFYVRLLAAGKAKKVALVACMHKLLTILNAMVRHGATWRAQAA

SEQ ID NO: 394098 - protein, 332 aa, unidentified
MHVLDEAGRTVEVSAVHPDADALRTLAGRVLRHGQEVSAVIESMTGSRFVHDQLELAGWEVAIADPVKAKGLAPLAAKTDKIDAHVLAELARRDLVPEIWLPTPGVRAERERARFRLHLVRHRSALKCRIHATLMSFGHTVPVTDLFGNSGRELLAGFELPEPWARTLTKSLAMVDELDERIDECGQELTRLGADQPYIPLLLTVPGVGPLLAYTIAAEIGDIGRFASPKKLTGYTGLCPLVRQSGNHDFRGPLAKNGPKYLRWALVEAATHAARDPRYRDRYERNKKRLGRQRGAKVARIDIARQLAEAIWHVLTKNEPFAPASPAILLVA

SEQ ID NO: 394099 - protein, 419 aa, unidentified
MKKTAGLDIHKVTIFCGIFDGKHHQDVKEFSTTTVSIHSLGEYLHEQGVTQVALESTGIYWIAVWNILEAMGFELTLVNPYLIKQMPGRKSDVKDAQWIATLLHKELLRGSLIPEQNIRELRCYSRKYMRLQQKQTSTLQELERILEMAGIRITSLVSNISAKSVRQIIKQIIQGNDDAQELIKYIHGRILKRHGIEKVKEALQGFVLEQHRFLLEQAMEELELLEKQSEQCLVKMREICQRHYSKEMKLLKSIPGISEISALIIIAETGAEMKAFENSGKFTGWIGLRPRNDESAGKLKSTATTKGNKYLRTIVVQVAWAASRTKDSFFKEKFDRLCMRKPRKKALIAIGRKISVLIYNVLSREEPYNPDFLKVYKKATFQKLLEYHKKQIEKLEKSLSETQEKRSVIFVVAQTPFTN

SEQ ID NO: 394100 - protein, 390 aa, unidentified
MSQPNDSKKSATPLDQDNTMIAVIEMGQASWLVAAIVPGLERQPLKKLGSDERALIQLLQRWRNEAVQAGRTIKRLVVAYEAGRDGFWLARWLRARDIEAYVIHPNSVAVSREHRRAKTDRLDTELLKRAFLGWLRGEAGHCSMAAIPTIEEKDARRPNRERENLVGERTRIGNRMKATLARFGIRSFKFTLRHADERLNDVRTAEAASLPANTHAELRRDLARLRVVRDRIKEIEQQRLQRIEQAAPSQNGSHAMVRLLARVIGIGVETADMLVNEILSRQLRDRKAIARYAGLTGSPDESGKRRREKGLSRAGNARVRRGMIQLAWRFLMFQKNSALAQWYRARTADGRGGTRKTMIVALARKLLIALWRMVTTGEIPEGIALRPAVA

SEQ ID NO: 394101 - protein, 355 aa, unidentified
MTITKYIGMDVHKESISIAVMNAAGKLVMECVIETKGSMLLQFIDGLRGDVHVTFEEGTWAAWLYDLLKPHVSEVVVCNPRKNALLKDGSKSDRIDARKLAELLRGNHLKPVYHGEQGLRTLKELARSYLNISKDVTRVMNRLKALYRSWGIACAGTKVYAPRHRSEWLGKISEAGVQRRAEHCYQQLDALRLLHQQVRRDLLLESKKHQAWKLLGLIPGIGPIRAALLIALIQTPHRFRTKRQLWTYSGLGLETHDSAQYRVVEGQLQRSKKPVTLRGLNQDHNHDLKDIFKGAATRVSSSSGPLHDFYEHLLAQGRKPTMAQLTLARKIAAITLIVWKKEVRFDASYLKSQAA

SEQ ID NO: 394102 - protein, 405 aa, unidentified
MEIIIERGCGLDVHKETVVACIMGTGIKKEIRTYTAMTNDLFRLRGWLQEAGITHVAMESTGVYWKPVFNILEDRFEVILVNARHVKNVPGRKTDVQDSEWLCRLLRSGLLKGSFIPPRGIRDLRDLTRYKRKLIQTIVAEKQRVEKVLEDANIKLSSIASDTFGVSGKRIIEELIQGKLGAEEMAELSKGRLRPKREHLKEALVGEVREHHKFMIRACLKHIRAMEKILLGIERKIREKIERDYKEEDELLQTIPGVKENASTVIAEIGVDMDVFPDEMHLSSWAGMSPGNNESAGKKKPGSTTYGNKCLKAILIEFGRVASRMKGTYLRSKYHSLVGRRGKKKTLVALGHKILIMCYHILKYRRPYKELGEDYLDKRRKDRITRSYIKRLNHLGYEVILQEVA

SEQ ID NO: 394103 - protein, 352 aa, unidentified
MERFIGVDAHTQSCTFAVVDAKGKHLRTDIVETNGQALVEYVRLISGRRHLCLEERTQSQWLSEILSPHVHDLTVVWAEKRRGNKNDELDALGLAERMRTGCLGRRVFKAPESFMELRALARAYDLVTRDVVRTKNRIKSAYRSRGVLVTGKTAVYDPESRTELIAKLPMQTRVAVDMLCRELDGQEKIKAEAQKAMIVAARKHGAYRIIKTAPGLGPIRAAQVLAVVVTPQRFRSSRQFWAYCGLAIVMRSSSDWVQQPGGAWARSAVQQTRGLNRNHNHLAKALFKAAATTVITQIQKGPLYADYERLLAGGTKPNLAKLTIARKIAAMTLAMWRNKEAYEPAKHPKPTV

SEQ ID NO: 394104 - protein, 343 aa, unidentified
MEECNIVGIDLAKNVFQVHASDEIGRRLFSKKVSRGQLLKLMSSIKPCVVALEACASAHHWGRQIAKLGHEVKLIPPIYVKPFVKRQKNDAADAEAIVEAASRPTMRFVAVKSADQQAAGMAFKTRDLFVRQRTQLVNALRGHLAEHGVVAPQGIVHLKRLKAALSDETNELPTTVILHAELILDQISILQSQIETLEKEILAVSRKEELAKRLMTIPGIGPITAAALLAFAPDPATFQRGRDFSAWMGLTPRQHSSGGKERMGRTSKMGQRDLRRLLITGAMAVVRWAARNGAQEGSWLARMMDRKPKMLIAVALANRMGRIIWALMAHGGTYNSHRDTAQA

SEQ ID NO: 394105 - protein, 411 aa, unidentified
MQIIYERCAGLDVHKRSVVACLLFPENGQPRKERQTFSTMTPDLVRLRDWLKAHDCTCVAMESTGVFWKPIYNLLEEHFQVLVVNAQHIKTVPGRKTDVKDAEWIADLLQHGLLRPSFIPPAWQRNLRELTRSRSTLTEERSRVIARLQKGLEDANIKLASVVSDVMGTSAQHMLHALIQGELSPAAMAELAQGKMRSKREQLAQALTGHLQPHHRLLITEHLAHIGNLEQAITRLNTEIAERLAPYEEVLLRLETIPGIKRRIAEILLAEIGPDMSRFPSAAHLASWAGMCPGNHESAGKRLSGKTRKGSQWLRTALVEAAHAASHCKECYLSAQYHHIAFRRGKKRAAVALGHTLLIIIYHLIVEKKEYEELGGDYLDRLDHQGKEKRLIRQLEKLGFEVSLNPTSPAA

SEQ ID NO: 394106 - protein, 296 aa, unidentified
MLIIGCDFHPRFQQIAMMDTETGELVERRLEHENGEARAFYASLPKPVLVGMEATGYAQWFERMLAEFGHELWIGHASEIRAGVVRKQKTDARDAQHLLRLLLEKRFPRIWIPSPAERDARQLLRHRYKLVCFRVSVKNQLHGLAMSQGVCRKKQLFTAQGREELEKLSLGPWGSRRRQELLGMLDQLNPVIDELDRAVRQEAESRADAARLMIHPGVGPVTALAFVLTLGPVARFRRSKQVVSYLGLNPKERSSGDKQHTYAISKQGRRNAVDLARGRAVNFSESRREPHKFGQR

SEQ ID NO: 394107 - protein, 405 aa, unidentified
MIVIGADTHKGSHALAAVDEGTGRVRGSREIKADDAGHLAAVRWARGLDEDRVWAIEDCRHVSRRLEQALLAAGERVVRVPPHRMGASRKGEREPGKSDEIDALAVARAVVKDGVEQFPVAYLDEQAMEIRLLLDHREDLIAERTRTVNRLRWHLLDLCPELERSLKRGALNQSRVLDRLDRALRKLPAGARVRIAREQVSAIRGVTRQIDQLQAELLELVKAHRPQLLAEMGCGAVVAAILIGHTAGVKQFRKPSSFGLQTGTAPIPCSSGQRTQHRLNRGGDRQLKPRAAHRRDHPSPTRSSDQGLPVAQRSRRQDHQWRAALAEATPSPSLLQAACRTARPGAPSRHRHPDHRAPPGGDSRASPPTASDRANHDRPLPDGLPRLERPTPDAQSRSRARCRRP

SEQ ID NO: 394108 - protein, 315 aa, unidentified
MNSKINQKEISVGVDTGKHQLDIYIRPLDIYFTVPNSESGALEAIKEISKYVPDRIVIEATGRLEHTFIEACSKANLPFVVANPAHVKKFAGAIGQLAKTDKLDAKLIAHYGEAIKPPLSTLKPDKLRHMSNLLARRRQLVTMEKNRLQIMPKEISSIIKPILTAIKNQLEKLNNKLASLINTCEEYKIKNDIIQSMPGVGNVVAFNLLSNMPELGYITNKEAVALVGVAPINRESGIYQGQRKIRGGRHQIRTVMFMAMLSAIQCNPVFKATYQRLVAAGKAKKVAIVACIRKMVVILNSMVRDGVHWNPEIAK

SEQ ID NO: 394109 - protein, 344 aa, unidentified
MDHFAGLDVSVKETSICIVDDTGRIMKEVKVASEPQALLKVLGNPAYRFKRIGLEAGPLSQWLFSGLAEAGLPMVCVETRHMQAVLKAQINKTDRNDARGIAQMMRAGLYRPVHVKTLRSQKLRMLLTHRKLLQSKAIAIENDLRGTLRNFGLKVGMVGKVRFEARIQELAENFPDLAVLVEPLLIVRRALREQIVILHRRLLTIVRNDEVCRRLMTTPGVGPVVALTYRATVDVPARFRKSKAVGAVFGLTCARYQSGEVDWSGKISRCGDEMMRTMLYEAAQSMLRSKKWSWLKAWAMQIARRRGMKKAIVALARRLAVIMHRIWVDGTEFRWTREQAAAAA

SEQ ID NO: 394110 - protein, 319 aa, unidentified
MAQNDLVVAGIDVAKDKVDVCIRSLSLKRTFAGTEEGRRELASWLRRRKVGKAVMEASGGYERDWAKVLRNAEIEVRIVDPKRVRSFAQSAGRLAKNDTIDAEMIAWFAETFDEARGQAYDETREQLHQMVNARQALKGMQAKLESQGEHGLPAAVQRMHARILKTITVELVKFEAAIAAMIQATPRFTELAEIIESVPGIGRTTSAALIAAMPELGQANNKIVAALLGVAPYDDDSGRRRGERHIKGGRRRTRNVFYMACLGAATQHNPVLKAFYDRLVAKGKEKKVALIACMRKLISILNIMIERRQKWDASRYAVS

SEQ ID NO: 394111 - protein, 430 aa, unidentified
MSQTPNTAIAVIGIDIGKNSFHVVGHDARGAIVLRQKWSRGQVEARLANIPPCLIGMEACVGAHHLSRKLASLGHDARLMPAKYVRPYSKGQKNDFNDAEAIAEAVQRPTMKFVATKTVEQLDLQALHRVRERLVSQRTGIINQIRAFMLERGIAVRQGIGFLRTELPTILATRPDALSSRMLRVIEELAGDWRRLDQRINGLSGEIEALARQDQACSRLMTVPGIGPIISSAMVAAIGTGDVFSKGRDFGAWLGLVPKQISTGDRTILGKISRRGNRYLRVLFVQAAWVVLVRIKNWERYGLKPWIEAAKRRLHPNVGDRARQQACPHRLGRAGQRTRLRTDEDRRCRCPTRLTIAPCSAPSRRGLATPEPAASQAQRPALTALARDAIHVLRAGTKERPLARTKELRDIRSKRRCNPINRFQPRSARG

SEQ ID NO: 394112 - protein, 339 aa, unidentified
MKNTKYYIGLDVHKERTSYCVRDKLGNILTEAEAATLYSELEPRLKPYLAASMIGLEASTSYYTLYQNFLKNGYHIKVANTIQLRQLIAKNDKLDAQRLSEMLRLGAFPESYIPEEKIQHLRSLIQMRHALMQEKVRCNNRVQAFLDRNGVMMPMCKAFSKKWKHALMQHLGSGNVSTELRYEYDHYVYLEKTNEQADQEIIGYTKTYWNQEYQLLRSITGFGVLLPCYIIAFVHPIERFLSNRKLRRYAGVIPVAKESGNTTSRGRIPKTSSKALLRWALVQAANTIGKTNTTLGRYYRRKKNQKKNTGIAKIAVASTLVDIIYKVLTTKKPYISAAC

SEQ ID NO: 394113 - protein, 414 aa, unidentified
MESVYRSIAGIDVHKKMLAVVLRRACGEPVEYEKRKFGTTHQEIQHLGAWLRAQGVGEVVMESTAQYWRPVWYGLEPHFRLHLTHPLKTRGPRGRKSDFRDAQRLADRWSSGDLEESFIPGSEQRSWRWLTRTRVQLKKKQGVIHNQVEGLLEQGGIKLSAVVSDLFGVSGWAMLEHIARGVTDVEVLTKEARGALRKKDAELKEALVGQLEPNYRMLLRHYLDQVRLLRQQVEEINQALALAMQEHIAALHRLSKIPGVDLYAAQELLSEIGPKATAFASGEQFASWVGVCPGSQESAGVNYSHRSAKGNRYLRRLLCQIAWAAIHTKATFFAGLFARLKPRVEGKGAAWAVAHRIAKIVWLVLHQGVEYQEKGSAPPNERTLVRKFKRMLKEFGRLGLDVHALLDQQLPARA

SEQ ID NO: 394114 - protein, 346 aa, unidentified
MEHYAGIDVSLEFSSVCVVDAQGKIVREVKVASEPEALVAFFASLGFAVKRVGLEAGPLSQWLHAGLKRAGFDTLLLETRHVKAALSAMMVKTDRKDARGLAQLIRMGWFRPVHAKSMGSQEVRALLVARKQLLRRLIDVELSIRGILRGFGLKVGVVTRKSFEGRIRELVSGHITLERIAGAMLSARATLKVEYEKLHKSVLTIVREDAVCRRLMTVPSVGPLVAITYKTAMDDPNRIAKSKAAGALFGLTPKKYQSGEKDLTGGITRAGDEMVRTALYEAANVLLARITRFSKLKRWGMDVAKRRGSKRTKVALARKIAVILHRMWVDGTTYRWTTAQPTAVQA

SEQ ID NO: 394115 - protein, 367 aa, unidentified
MKKNNTTPRSRKGTARKAGPITIGMDLGDKSSRYCVLEENGEVQAEGSVATTKKAMLQKFAGLKRCRIAIEVGTHSPWVSRLLKHLGYEVIVANARQVKLISQSSRKNDRMDARTLARLVRVDPQLLSPIQHRSEQAQQHLARIRVRAALVEARTKLVNAARGFSKAQGERLPARDAAAMGVEEMAELPAGLQEVLRPLLEQVESLTDQIQKADVELEQIARAEYPETALLRQVKGVGLLIALTFVLTLDDHERFQKSRDAGCYVGLRPRQRESGASQPQLRITKEGDRYLRTLLVQGAHHILGWRGPDTDLRRWGLKLASRGGKNAKKRAIVAVARKLAVLLHRLWATGEVYEPLRNSGVTATQAA

SEQ ID NO: 394116 - protein, 328 aa, unidentified
MICDHRRLPADLEPLTSILREVGGPVTVTVEATLQWAWLHDRLTAAGFTVQVAHPQQVKLISHARCKTDPIDARKLAELTRVNLLPAIWVPSPQVRRWRQLIRGRAALVRWRTRAKNRIHGCLAAEHLRVATTDLFGRAGREWLGRAPLSPAARREIEVQLAVIAALEPQITGDDAEVKRIATHPDAQRLQTIPGIGSFGAALLVAEIGTIGRVATAHELAASAGLVPSTRSSGDKISHGGVSGASNHWLKWILIEAVQTLKQVPGPVRFHYERLLRAKGKPKATVAAARKLCTYIYWMWTQELSYPAWLETELKRAGCPMHTLASSA

SEQ ID NO: 394117 - protein, 419 aa, unidentified
MVHVHGARVQRLSAEMRGVPLEQLVAVPVDVGRSTAAAMACDFTGEVLVPPFEFALNRHGVAELVGRVDARLPVGIRLVRVGIEAAGHYHRPLLADRVLPAAWQVVELNPAWVTAQRRVNGSRGVKTDRVDLAAICDLLLAGRGHEVRAPIDALVELTAWVAHRRRRVQMRTATKNQLTGQVDRCFPGVAACLCSLLDTKVGRLVIAEFSDPARLARLGVARFRTFAARRGIRVSVTIAQRLVEAARQALPTAEAAVARDVLAADLALLGDLDSQIAAADARIAAILPATRYQVLTTVPGWGPLRAGAYGAALGDPDRWPSARQVYRAAGLTPAQYESAGKRRDGRISREGSVELRRALLDLGVGLWHSEPAARGYAIRLRERGKPGGIIATAMARVAGRLAYAMVRDQTTHDPNQRRS

SEQ ID NO: 394118 - protein, 433 aa, unidentified
MNNNIVVGIDVAMEKHQYQICDTETIYSKGAIQNNIAGGNKLLAKIKEVAKDREVVVGMEATNNYHICLQTFLQNNGLKVIVINPLKTSAYSKIDDFGNKTDPIDAKGICNFLLDNKHKNIKQMNQKYLKLRELCRCWLKLKGDMTRISLRLRSRLIIINPEFESYFQKTLCKSGLWLLEEYLIPENIAELDVDKLQYELRKIAGVFGKKDTAQRIVDLAKNTFGVKNDIEGYLRYIQYHLDEFKFLREKIFEIKKEIRRETEKDYCKVEIEYISSIRGIGTEVAAGILAELGNFDNFEKQSSIVRFAGLTVLRKQSGKSEGKSRMSKQGSSYLRCFLYQAAMGTKLHSATFAAVYANRKLKVKDLNPIDKRIANAKALANIARRILETVYTCNKKKRLFNDKIAFESLKIDDFIRETIAVQFKEQLAKATRQ

SEQ ID NO: 394119 - protein, 320 aa, unidentified
MKHKVGKDNTVARFIGIDVSKQWLDVATLPERETRRFSNDGAGQEQLGAWLIQLAPELIVMEATGGFETRVVTALAAEGLALAVVNPRHVRDFARAFGILAKTDRIDASVLAAFAEKVHPPVRPLPDEDRRELIDLVDRRRQLVTMRAEEKTRLSQATASARQDIKEHIEWLDERLRRLDIDLTAKLRSSSLWKAKEEILISVPGVGRVTVFTLLARLPELGALNRRAIAALTGVAPFARDSGQHRGRRMIWGGRADVRSVLYMAAVSAARINPVIKSFYLRLKQAGKPAKVALTACMRKLLTILNTMLHNNQPWQAPST

SEQ ID NO: 394120 - protein, 397 aa, unidentified
MIAVGIDISKAKSTVAVIDSDGTVLASPFTMAHTQPEMEAFVSYLKGLGEPTTILMEYTGHYHYPVLKKLQDEGFPVCIVNPYQMKKYGDVEIHKAKTDKKDALRIAAYALEKSYKLVPYSSMEQKYEDLKFLSRQYNQRISYVAKLKVQLIALLDQTMPGITRILPLNSRNPEKCALLLFIKRFKSFDEIQRIGKARFLASYDVLAKKASERSASSKGLSIYELAVDSITTRGEDPYIWLSQNQCVDLLSTTQNAADEIISQMRNIAETIPEYKVLRAMRGVGDRLGPIILAEIGDIRRFHSGKALNSYAGNDAPPYQSGQFESRNRHISKRGSSALRKACYEVMQALKLIKPQDDPVYLFMLKKEQEGKPFNVAKMAGVNKFLRIYYARAMELYK

SEQ ID NO: 394121 - protein, 360 aa, unidentified
MKKVSKPMRNMEVPAKPEMTMGLDIGDRYSHYCLLNATGDVEEEGRIQSTEAALRRHLEGEPRMRIALECGTHSPWVSRLLTGLGHQVIVANARKIPAITGSESKNDRNDAEKLARFAAYDPKLLSPLKHRSEQRQVDLNLIHARATLVRARTMIVNALRGLIKSAGGRLPACSTESLPTRAAGAIPPALIEVATPLVEQIALLNAQIGGMDKQEEKLAVKYPEIVLLRTAPGVGPIVAAAYVLTLDRPDVASNRAAGAFLGLRPGQSQSGDADPQQRISKTGDRCLRSLLVQSAQYVLGRFGPDSALRRWGLKLAATGGKRGKKRAIVAVARKLAVILHAMWRSGQRFQAFPQASTVAA

SEQ ID NO: 394122 - protein, 407 aa, unidentified
MDKLFVGIDVGSRDNAVHIMLPDGITCKTFSVQNNLGGAQAISKHVVDALVGNNLSSVAIGIEATGVYGDNLMCFLQGDGATGQFERKLHVLNPKQVSKFKQAYPDLPKNDGVDAFIIADSLRFGRIATSVYMDDYRYTALQKLTRARFYAVQNLTREKQRFMNHLFTKCSGLAQEKVFSNNYGAAALAVYEEFETPDDIANMDVGDLAAFIAEKGKNRSPHPDQIAKAVQAAARGSYRLPKTVNDSVNQVLSISISSMRAMQSQIKALDKEILRQFVNIPNTLTSVPGIGPVFSAGIIAEIGDINRFRGEASVAKYAGLAWSQHQSGTFEAHNTRLIKSGNRFLKHYLYEAAFSLVRCDTEFRRFYDLKYKEVNKYQHQRALALTARKLVRLVFRLLKDNRLYRSA

SEQ ID NO: 394123 - protein, 341 aa, unidentified
MPIVTIGLDLAKSVFQLHAIDEHGAVIMRKRLTRGQVLPVLEKIPPCLVGMEACGSAHHWAREIQALGHEVRLMPAQYVKPYVKQNKTDAADAEAICEAVQRPTMRFVATKSIEQQAVMLNHRGRELLVKQRTMLANAIRAHFAEFGIITAQGTQNLFKLKQAAEQGSLTKTAMDVLELLFDQLDALNKNIKALELRIHTWHKSNETSQRLTSIPGVGPLTASAIVASVGTACSFGTARSFAAWLGLTPREHSSGDKQMLGGISKRGDGYIRKLLVHGARAVVRMRGRKNAEPLPWLDGLLERKHRNVATVALAHKNARVVWALLNTGEVFEKGTRQVKMA

SEQ ID NO: 394124 - protein, 388 aa, unidentified
MQDVADQSVAPTTIRADLCAIFISLELSRSTWLATSLSPGGGEKMSKHSVSAGDIAGLLARFSELRRKACARTGKSFPIIVIQEAGLDGFWIHRVLLSEGIESHVVDAASIATSRRRRRAKTDRIDGETLLRALLAHKRGEPRVCSMVRAPTPEDEDRRRICRERKVLIMERVQHVNRIKGLLFSQGASGYEPLRRDRRARLDALQTGDGRRLPQHLKAQICRELDRLELLLEQIKAVEAERDALLNAEQTKASAPPPMLLGVHGIGPEFASVLWSEGLSRHFDNRRQVAAYAGLAPTPWQSGSVNREQGISQSGNSRLRTTMIQLAWLWLRHQPRSALTLWFKDRMERNGGRRRKTTIVALARKLLVALWKYVSAGVVIEGAMIRPA

SEQ ID NO: 394125 - protein, 347 aa, unidentified
MRFYNQQHDYYCGIDLHARILYVCILDSAGNKLLHKKIDANPDALLDVIAPYQDQIVVGVECMHCWYWVSDLCLDYAFDFVLGHALYMKAIHGGKTKNDRIDSYKIASLLRGGNFPLAYVYPKAMRATRDLLRRRTKIMRHGADLKAHVSNTFSQYNHPSPNLQLRYPYAREEVRNRFDKPAINRNIDLDLNVIAFYTKELASVEHFIEQNAKQHNPQDYQLLQTVPGIGRILALTILYEIGNIQRFPTVQQFASYSRLIKCKAESAGKQYGTCGNKIGNAHLKWAFSEAAVLYLRGNEKAKKYLTRLQKRMSKAKALSALAHKLGRCVYFMLRNKTVFDEQKFLPE

SEQ ID NO: 394126 - protein, 348 aa, unidentified
MASLQTDRVVTGGVDTHRDVHVAAVLDQLGRVLATGSFPATPVGYRTLTAWMGSYGTIGVVGVEGTGAWGAGLSRHLESVSVRVVEVTRPNRQRRRRYGKTDTTDAISAAKAVLSGEATSPPRGGTGPVESLRLLRIARRSAMKQRTAVANQIHAVLVTAPDQIRTRHQGLNLTQTVEIAARYRPADPLDPTQAAKLALKTLAVRYQHLTQELATLTTNTTTIVQATAPQGLLDMCGVGPHVAADLLITAGTNPTRINNPRSFAALCGVSPVDASSGLNQRHRLNRGGDRQANAALYHITIVRLRWHQPTRDYMTRRLAQGKTKPETIRCLKRYIANEIHHHLTQPPT

SEQ ID NO: 394127 - protein, 341 aa, unidentified
MQTTKYFIGFDISADDFSASCITSPDNLVFSTQKFLNNFDGFSGFVSLLSKHNIQPPEVIICMEATGVYSESLSYFLASRGLTLCIEAPHKIKNKTKDSPRKNDFVDAQAIAEYAYRYIDKLSVWKPKDEILEQIQVLLTTREHLTVQMTANVNALKTLKYKYYQTPLANQIYEQTINKLKEHIKQIDQEIKNLIDKDDSFRNKISLAKSVPGVGLLLAANLLVLTKGFTEHVNYKHTAAYSGICPYEQTSGTSLHKSPRSKKCGPAKLRKLLYLAALSVRTHNQNFKKYFLRKSAEGKNKRLVLNNIENKLLKIIFAVVNSGVAYTDYYKSVNPALLKTA

SEQ ID NO: 394128 - protein, 403 aa, unidentified
MKKFTSKEGVGKTAASTTRRMGDQQAQRYGAYVGLDVHKDTIAVALAYPGRDAPEYRGEIAHSAKAVAKLIGRLSPTGELLGICYEAGPCGYGLYRQLMALGHECEGVAPSLMPRKPGERIKTDRRDALRLAQSLRSGDLTAVWVPDAEQEAMRDLTRAREDMKAQELKARQQLNAFVLRHGYGWPGNKSRWTQTHFNWLESLKFNHDWQQGVLQEYIDAVKAATRRVADGVGQRERALPHWRLAPVVDSLIALRGVDKIAAMTLLAELGDITRFASPRQLMAYLGLVPSEHSSGKRKRKGAITLAGNAHARRMLIESAWSYRFPARQTMHLKRKAKNASEEAKAIAWRAQKRLCGRYRTLNQAGKIQKVVGVAIARELAGFIWDVVRHEMPRVQPTPVHRST

SEQ ID NO: 394129 - protein, 341 aa, unidentified
MGELNTIGLDIAKSVFQVHGVDAAGAVVIRKRINRAKVLEYFGELPPCLVGIEACPSAHHWGRELQGLGHTVRLIPPSYVKAYLKRGKNDANDAAAICEAVTRPSMRFVPIKTKEQQTALMLHRARQLLVRQRTMLSNALRGHLAELGIVSAKGRNGTAELLRIIADGRVSPAACGILKVLARQYSAIGIEIVSIDKSIMALHRRCEASRRLAEIPGIGPIGATALVAEIGDWKTFSSGRSVAAWIGLVPKQHTTGGKDRLGSITKQGNRYLRWLLVVGAMAVIRYARKHGTQKRPWLGRLMERRPTKVAAVALANKMARMAWAIMAGGERYKEPRLLLAA

SEQ ID NO: 394130 - protein, 341 aa, unidentified
MKVAIAAIDLGKHSFHLHAQDERGHELCRKKFTRPSLIQYLANLDPCTVAMEACGGAHFMAQEVAKLGHTPKLIAPHLVRPYVKSNKNDFADAEAICEAATRPTMRFVAPKTQAQQVLAMLNSTRDGFIKDRTATVNRIHAALLEVGVSLAPGFKSIKELPALLEAGSFSVPLKKILMRLHGHFCYLDEQVKTSDKDLECQAAEDDLAARLMTMPCVGPITSSALAAELGDGKQFKCGRGYAASIGLVPKQHSTGGQTVLLGISKRGDRNQRRLLIQCARVYLIQLDRQKGALADWVRQLLASRHHSNLVVCALANKLARIAWAIAAHHTEFDAGPAAMNA

SEQ ID NO: 394131 - protein, 472 aa, unidentified
MGCLRKPVWLFGPPVGLLVWGGQQAEPASVFVSPCPKIRAPYDPVNEVDLLTKECTMNSHPEATAKRFLAIDLHKHYLVIGGVNRRQEVVLNPCRISLQKWPAWAKTNLLSTDAVVLEATTNAWEIYDQVAPLVDRAIVAHPPKVKWIAEARVKTDRHDVLRLAHLLAADLIPEVWVPPVEVRELRSLMAHRRRQVQMGTRARNRLHSVLHRHNLKPPQGKIFAKKHREWWQKLDLSPTQVMHIRHDLATIDHVDEQLAEIEKELYRLSTSEPWADQVPFLLQLPGFGLIVTLTVLAAIGDISRFSRPKKLVGYAGLGASIHDSGMKHRTGRITKQGRKELRWILVEAAWRAADTHPYWKDQYERLERRIGSTKAAVAIARKLLVAVWYILTERTADRHADPDKVAFKYIMWSWKLDDAKRNGMSTRQWARYHLMQLQLGEDLTHIMRGGHRYPIASDDELKALLPELQAAD

SEQ ID NO: 394132 - protein, 404 aa, unidentified
MKGPIVSIDVSKGKSDYQAFKEMNVKYTGSRSIKHTKEGFDEIVNLVREMEKKLETEVCVVYEATGVYHRVLKKVLEDNNIKQFIINPLLSAKTRKNDSLRSPKTDKLDPKSIAKTYYSHSLHNSHKPETIYHELRELSRYYEDILVHLRKDKVAFRAQLDVVFPGYDTLYDDLYGPVALAVIEKYPHPEMLQKKKINTVSKVIQSKTCHRQAMSDTMADKAIEYSKTIYSGCDKDDIEVLILQRFIKKLKEDMAEAERTIGEMIKLAQELPDFSIIKSIPGIGDNLAARIIAELGDMTRFKKKNELVAFAGLDPRISESGQNDGDHMHITKKGNKRLRCLLYLAVTCSIRLKRDDNSIKDFYIKKKQQSNPMCSKAAKTACASKLVRIIYSMCKTGELYQYNK

SEQ ID NO: 394133 - protein, 353 aa, unidentified
MVVVGVDAHKRTHTCSAVDGIGRRLGVKTVPATTTGNATMLRWALSTFGPELTWGIEDVRNVSRRLEEELIRSGQRVVRVPTYLTARTRAFARTRGKSDAIDATAVARAVLREPDLPVACHDSVSRELELLTERRETLVDQRTATVNRVQWRIHELDPIRSAELKPLIFAKHRAPVAAWLADQPGLVAELARDELDDIARLTQTINAVEKRIVQQVRAHATHLLGIPGCGELTAAKIIAETANVTRFKSEAAFARYIGVAPLPYSSGSTDGHMRFTRSGNRQLNAAVHRIAVTQIRMAGPGRQYYDKRRTKGNSSSAALRLLKRRITRAVFSRLKADEADRRSQATAGSPERR

SEQ ID NO: 394134 - protein, 308 aa, unidentified
MSIWIGIDVAKATLAIHVHPEGRFLSLPNSAEGYAELLTRLAGRSVGNVLLEATGGYERPVMRALADAGLPVTRINPRRARAFAQAMGKSAKTDPIDAAMLARMAELVVAERLHPSAAQEELRALVQRREQLVQQRDDDRRRLKQATHERVRACLAEHVLWLRGQIRAIGKDIVRLQQQVDDDLARRLMAVPGIGPVTAASLQAYLPELGHLDRREIAALAGLAPYNADSGKKEGKRRIRGGRGAIRRVLYMACWCVIRLQPDFQARYRRLREQGKCAKVAITACMRVLLTRLNAMARDKTEWRSPAW

SEQ ID NO: 394135 - protein, 341 aa, unidentified
MGEVSTIGLDLAKTVFQAHGADGSGGVVFRKRLRRDRLLAFFAGQPRCLVAMEACASAHYWAREIAALGHETRLIPPAYVKPFVKRQKNDMADAEAICEAAQRPTMRFVRPKSAEAQGAAVVFRTRDLLVRQRTQLINALRGHLAEFGFIVRQGPGHVSKLIELVAAPSSELPAEARPVLSVIADSLQATQAKILVLDREIAARAKADPVAQRLMTIPGVGPVVATALVALAPEASTFRRGRDFAAWLGLTPRQHSSGGKERLGRTSKMGERSLRRLLILGASSAARNAGRDGSRASPWLVGMLARKPRMLVTVALANKMARIVWALMAHGGTYRAPVAAV

SEQ ID NO: 394136 - protein, 434 aa, unidentified
MPAAAFRFGETWLGVLMANVMIGVDPHKGSHTAVAIGAGEEPLGELRVDACPSQAEQLRAWAVAWPQRAWAIEGAAGLGNLLAQQLVAAGVRVLDVPPKLAARVRLLQAGDTNKNDPNDAYSVAVAALRSKLARPVLADGHAVVLKVWAKRHRDLARLRNQACCRLHAVLCDLVPGGVRREISAGRAARLLEQVRPADAVTTARCELAGEFLADIRRLDAQLRECHNKLAAAVRASGTSLTGLFGVGPVIAGTVIGDVRHVFRFPRRDHFASWNGTAPVEVSSGDRRKVYRLSLRGNRRVNHAIHMAAISQIRHKHSDGRAFYEKKLAEGKTHKEALRALKRRISDAIYAALAADARRAASACSKSPGGQPGDHSASRAAGSHPAHRHFGQATPGPAPTIRPGANSSRAPTQPNRARRRAAHSPASSKKPPATT

SEQ ID NO: 394137 - protein, 339 aa, unidentified
MTLKFKQAAQEPKPLFAGIDVGAEELILVIRKNGTPYKAQKFANTPADRARLVKKLANLPGIIVCLEATGVYHFDLSIALHDAGVALMVVNPKASHNFTKALMKNSKTDAVDAETLAQYAERMDFVAWTRPSDEKIVIRSFARRIDALTRQKAAAKNNLHALGVSQETPKGVLRDVNLSISQLEKRIDRLTQDVLTLIESHPELNRIFELLVGIKGVAQTSAIALMGELLLLPPGLSHREWVKFAGLDPRAFDSGKSVHKKARLSKAGNRHIRSALYMPALSAKRHDPHVKAYFQHLVDNGKKPLQAVCAVMRKLLHAIHGMLKYDKPFDNARFYAIPA

SEQ ID NO: 394138 - protein, 430 aa, unidentified
MKSNTQNAKIEAITEKTLVLGIDVGSETHYARAFDYRGIEYSKKPFKFSNTEVGFATFKEWILDLKERHEKDKVVPGMEPTGHYWFNLGKFLQDNEMKPILVNPHHVKKSKELDDNNPTKNDRKDPKVIAGLVREGRYMIPYLPDGVYADLRTASNIRFQLQAELTRIQNRISRWFNIYFPEYKTVYGKPDAKSGMLILKAAPLPEDILTLGIDGVNQIWRDAKLRAVGKARAKTLIKAAEHSIGSKEGTMSARMEIRMLLEDYESQNMRLQEVMVLIEELVKEIPMAEKLLEIKGVGIRTVSGFLAEVGDISRFNNPKELQKLAGLALVENSSGKHKGETTISRRGRKRLRYLLFEVAMSLVAKNPEFRELHNYYTTRRLNPLKKMQSLMAIAAKLIRVFYAMLTKGVDYDPKKMVSDIKRPAVYLQAA

SEQ ID NO: 394139 - protein, 335 aa, unidentified
MQIYGIDLAKEKFDVSFFDLTSKKVSNQPSHKVVTNNLKGIGKFFKGLPSDAVLVAEHTGVYGDTLLKCCMDSNVKIAFVGGYVIHRYRATPDRAKTDVLDCALLRDFGERYPDKLKYKTFPEEALYELRQLARHREMLVEQRKQLITADKSEDCRPIRSLAVKRSMDRIKEMLDTEIAETEKEMLKVINGHESIHHNYELVKSVDGVGLITAVELLVKTENFTKITTARQYAAYAGTAPYEKSSGKMDKGAHISKIGNRRSKTLLYICAESARLHNKEIKLYYERRTLIDKKPRHYVLNAIANKLLRIIFSLVEKGEFYDANFIRQDPRVVKHN

SEQ ID NO: 394140 - protein, 377 aa, unidentified
MKVLIGIDPHKASVAVAAVNEAGELVEGAHFSQNRAGLRALERWSKRFPERRWAVENAGGLGRHLAQRLSAAGEAVVDVPPKLSARVRMLSTGNSRKNDRLDAFATALAAWRNERLAAVDPEAGSEVLRLLSERRGDLVAERTRALNRLHGLLRDLVPGGVAGTLSTHRAARILRGIRPQEGASARLRRRLASEILRDIRTLERKIADLNERIEAEVEASGTVLVEIFGVGPILAAKIIGAVGNVARFPTRAHFASYSGTAPVEASSGEVVRHRLSLAGNRHLNNALHMVAVCQARSDVRGGAYYRKKIAEGKSRKEALRCLKRCVSDAVFKSLTADLQAPSRSPHPARPFSVQPAHAILCRGHRGDRREAGGNVGG

SEQ ID NO: 394141 - protein, 337 aa, unidentified
MQFKFFVGIDVSKDTLDFSVVTEGKEILDFKIENSLRAIKAALLNLKKIKGYELSQVVFCLEYTGLYNNHITHYLQSVDAHIWVEKAIQIKRSSGLQRGKSDKVDAQRIAFYAFRNQDKARLWVAPRAVIQQLKRLTGVRERLLIMVAQLNKPIQESKRFDSKEVFDVIKKSCQSSLRAIKADLKKVEQKITEVIKTDASLSHLFELITSVDGIGSVIACEMILTTNEFKNINDPKKYACYAGVVPFEHTSGSSVKGRNRVSHFANKNTKRLLHMASLSIIRYQGELKTYWQRKLQEGKHKMIILNAIRNKLIQRVFAVVKRGTKYEKIYSHSLQGS

SEQ ID NO: 394142 - protein, 359 aa, unidentified
MDGSKGHPKLTAGLDLGDRYSYLCLIDQENGEVMEEGRLRTSPKAFRRRFASEQPPMCIAIEAGTHSPWVSRVLEECGHEVLVANARKLRLIYSNKRKTDEIDAENLARLARVDPKLLYPLRHRGEESQAHMALIRSREALVSSRTQLVNHVRGAVKSFGHRLPKCPARSFHKRASEHIPEALRPALGPILEQIGSLTERIRNYDRKLEAISKEHYPETDLLRQVEGIGPLTALTFVLTLEDPYRFERSRSVGAYLGLVPARDQSGDRDPQKRISKEGDEMLRRLLVGSAHYVLGPFGSDSDLRRHGEKVASRGGKNAKKRAVVVAVARKLCVLLHSLWITGEVYDPLHNARRREGLAA

SEQ ID NO: 394143 - protein, 465 aa, unidentified
MKRIERTAEGQEVRKQTTRSMNGLDVIHPDAAGLDLHKEVIVACAPMAAGDTRHPVRKFGTYTSDVRELARWLKQYGVTTVALEATGVFWLPVVALLRAEGLEVLLVNAREVRSVKGRPKSDRLDCEWLRRLHACGLLRGSFIPDAETEMLKSLWRHRLNMEEEDARAIQRMQKAFQIMNIRLDIAVTDIVGETGLRIIEAILAGERDPRKLATLRDPRVAKSEREIADALTGNFKEEHLFIIQENLAHHRFLQERIRETDNRMGLQMETMEKKGDAAELPVATKPDRSRHGETLTRERLYELLGVDLTQVDGVGVLTVSSFLVNAGRDMSPWMTENHFASWLGLSPNVKQSAGKTRSGSTRKTASALAHSLRMAALTISRLDSGLGAYCRRLKARIGAPKAITATARKLAIIFYRAVKAGGGVKRFTAEDYEQANRDRILKALRRRAARFGFDLTMKSAVPVEA

SEQ ID NO: 394144 - protein, 400 aa, unidentified
MLSIGIDVSKGKSTVCGMKPGGEIVYAPFEVQHTREGMSELVSLLRSSGEEVRAVLESTGSYHCPVVAALLENGIFVSVINSLRMKRFCSQSIRKVKTDRIDAMQIALYGLAYWQELQPTRLPEDTYRELQLLARQYYQMTSMLIKAKVDFNALCDQVLPGMQELMNDHAGRHKLSDFVLRYHHTTHILEMGETRFRKDYCKWAEKKGYRNCERMAVLIFATAQNGIPVLPNAPSTQIVITEAIRVLHTVEASRDAILTQMQALAKTLPEYSLVREMPCIGDTLAPRLIAEIGDVRRFHSKRALIAYAGIDAPPYQSGKFCANNRHISKRGNRYLRKTGYEVMQSYVMHKPANDPIFTFIEKKRGEGKSGKLAMVAGLNKFLRVYYGKVTELYRSLPAIE

SEQ ID NO: 394145 - protein, 343 aa, unidentified
MQAITTVGLDIAKSVFQVHGVDARGSAVVRRQLKRRYVLAFFKKLPPSLVGIEACATSHHWSRELQALGHTVRLIPPAYVKPYVKRQKNDAADAEAICEAVQRPSMRFVPTKTPEQQSCLMLHRTRHLFIRQQTAVINTIRAHLAEFGIVAPVGRNGVEDLLYAVADQRDERIPDVARACLEALGALLSRLKAQILEFDRQINAWHRSNETCRRLDELPGVGPALATALVASVADPKAFRSGRDFSAWIGLVPKQASSGGRDKLGSITKQGDRYLRSLFTAGALAVIRYAKIHGTQHRPWLTKLLERRPTKVAAIALANKIARMAWAMMAKGECYREPLALAR

SEQ ID NO: 394146 - protein, 343 aa, unidentified
MEQYAGIDVSLESASVCVVDTTGRIVREAKVASEPEVLIAWFGKLEVTPTRIGLEAGPLSQWLYAGMREAGLSVELLETRHVRDAFKAMPVKTDRSDARGIAQLMRLGWFRSVHCKSLPAQELRAILTARKLVQSKRHDLEMSLRGILRGFGLKMGQTTPRSFEARVRELIDRHATLLAVADALLAARAVLAEQLGKLQKRLVSLARQDTRARLLMSTPGVGVLVALTYAAAIDDPTRFRSSKATGAHFGLTPKKYQSGETDVTGRISKIGDAGVRTALYEAANVILTRPVKGSSLKSWAMRIAKRAGMRKAKVALARKLAVVLHRMMVDGTEFVAGKAAAKA

SEQ ID NO: 394147 - protein, 317 aa, unidentified
MDSKTQPDRFVGIDVAKGHVTVHVRPDAIAFNCKTDAQGLANLLDRLRPLTPKLIVLEATGGYEAVVAAALAEADLPVAVVNPRQTRKFAGALGRLAKSDTIDAADIAHFAEAIRPEPRPMPDEQTVQLRALLARRHQLVVMAGAEQQRHDRAETPLARRSCAAMLRSLTAEITRIERAIDKLITASPIFCAKQDLLKTIPGVGDVVARTFIAELPELGTVDRHKIAALVGLAPMNHDSGKMRGERHISGGRPQIRSPLFAACLSVIQHNPPLRGFYQRLLKAGKPKRLAIVAVMRKLVCIANAMLRNQQPWAHAQS

SEQ ID NO: 394148 - protein, 408 aa, unidentified
MQVVYERCCGLDVHKRSVTACALTPEGKAVRTFGTMTEDLLELADWLKGQGCTHVAMESTGSFWKPIYNVLEATEAFTLLVVNAQHIKAVPGRKTDVKDAEWIADLLRHGLLQPSFIPSREQRELRELIRYRQELVDERAREANRIQKVLEGANIKLSSVATDILGKSGREILKALIEGQTDPEALADMAKGRMKAKREELRRAVQGMIGDHQRLLLREQLRHIEELDARIARLTQEIAKRMRPFEDQLERLDTIPGVGRQTAEVILAEVGPDIEHFPSAAHLASWAGMCPGCHESAGKRKSGRTRKGNRTLRRALVEAAQAAGRTRNTYLSAQFRRIAKRRGNKRAAVAVGHTILVIAYYLLKRKTTYEDLGPLYFEEKQRETAIRNSIKRLERFGYKVTLEAGTPA

SEQ ID NO: 394149 - protein, 316 aa, unidentified
MQSALFIGVDVAKDNVVVACSQATFAPRTVSNKPTALKAFLRSLPAQSSIAMEATGSYHQSLADLAHQLGLRVYVLNPRDLYHYARGVGLRAKTDRVDAALIARFLASEGARLRPYQPATMEQRKVDHLLRRRARIVSLKTALQLACAEAPSIRAETASVLKGFAVLLKKIDRQLADLQQAMPERAQQFERLQTIPGVGTLTACWLTNLFDRIKFRNSDALVAFAGMDPRPCDSGQKRGKRRLSKRGPAEGRRLLFNAAMAASRCAAWKETYTRCRQQGWASTEAIMILARKILRIALAMYKTQTGFDPAFIGKRA

SEQ ID NO: 394150 - protein, 339 aa, unidentified
MNCTVFGLDLAKRVFQLHWLEMETGGICRLQIRRQQVPEFFANRKPCIIAMEACGSAHYWGRKFKSQGHEVRLIAAQFVRPFVKSNKTDTADAQAIWEAAQRPGMKFVALKTEEQQSVLTLHRMREQLVKMRTMQVNQLRGLLYEFGVDLPQGRKKGMARVVEELAQLDSTLSAMVIDLTRQQIHRIHGLDQDIVGIENKLLLWKKEDKASKKLMDIPGVGILTATAAVATMGDAKTFKSGREFAAFLGLVPRQSGTGGRVKLLGISKRGDVYLRTLLIHGARSVIQHQKKKAPWLEKLLSRRPHNVAAIALANKMARLIWALLAHDRRFEKEYAASAA

SEQ ID NO: 394151 - protein, 410 aa, unidentified
MASAALTCGIDWAEAHHDVALVDEGGMVMARKRVSADLPGFTALLALIAEHGGSPELTPVAIETDKNLFVTALAAAGFTVYPINPKALARYRERHGQAGAKSDPADATTLANVLRTDLHIHRPLPSISDQGLAVKALARQHQEAIWALHQTISRLRAVLLEFYPQAVKAFPKMQQHAATTILAAAPTPAAGQRLTRRRVEALLHRCGRRNDPALVEQILADLKTPALRQPEPVERALGVTVEGQLRIIVAMRDAVDQLEAEMAVAFDAHELAPILRSVPGLGPVLAARVLAEVGDDPTRFRTAAGLRAFAGTAPITRASGRSHYVKARRIRNKRLGDACHWWAFATLTRSPGARAHYDRRRAAGDHHNAALRNLANKLLGRLWWCLQKHEPWDDDAAWAQPSPTPQPVAA

SEQ ID NO: 394152 - protein, 389 aa, unidentified
MKIYVGIDIAKLNHFAAAISSDGEIIIEPFKFTNDVDGFQLLVSKLESFDKNSLIIGLESTAHYGDNLVRYLVTELYQVCVLNPIKTCQMRKNNVRKTKTDKVDTYVIAKTLMMQDNLRFVSFFDLDMMDLKALGRFRQKTIKQRTRLKIQLTTYVDQVFPEIQYFFKSGLHQHAVYALLKEAPSPKEIASMHMTHLANLLKVNSHGHFTKEQAKELRVLAQKSVGANDSAISIQITQTIQQIELLDSQLEKIEAEMTDIMKFNDSVIMTIPGIGYINGGMILGEIGDIHRFSNPNKLLAFAGLDPSVYQSGNFQAKTTRMSKRGSRILRYALVNAAWNVVRNNATFKAYYDAKRAEGRSHYNALGHCAGKLVRVIWKMLTDEVEFNLE

SEQ ID NO: 394153 - protein, 352 aa, unidentified
MIIIGVDYHPEFQQIALLDQDTGELQEKRLSHPGEAEKFYRALAVSQKVRVGMEASGHARWFERLLGELQFELWIGDAAAIQSQRGRKQKTDRQDAEHILKLMLKDDFPRIWVPSGENRDLRQLLWHRHRMVQARTRIMNQLQAVAINEGLRCKKRLWRTGRQQLALLRLAPWASRRRHDLLELLDGLNPTIAELSQAIEQEAAKCAEARRLMTHPGVGALTALAFVLIIGDTERFQCGKQVASYLGLVPLEKSSGNRRRLGHITKQGNSLLRFLLVEAAQVTVRSLPEWRSQYFHLLMRRGRKTAKVAMARRLGVDLYWMWREQRDYQSKSSVRTQDSPEQAMVCNRTPRN

SEQ ID NO: 394154 - protein, 376 aa, unidentified
MVDYNDKTVYLGIDVHKKTYAVTAICEGQVVKKDTLKAEASFFASYCKKYFPGARIETAYEAGFSGFHLHRYLEEHDIKNLVVHAAGIEIASGNRIKTDKRDSLRLATQLSVGRLKGIFVPSKEREDARTVTRLRESLVRKRSSIGAQLKALLFQQGLIPYNSKQRVSPKWVRSLIDKTFAPGLKFAIHQYVNMWLALDEQIDEIGKQMACQAQQEGSLEMLYRSVPGIGPIAARTLANELGDMSQFKNERQIFSYTGLTPSEHSSGEHIRQGHISRQGKPLLRRILVQSAWIAIRVDRNLAQIFDRISAKAGSKKAIVAVARHLVGKIRACVRTGSLYISLSKTEEKRGSETSPVPSLLGQLGKASDCALRAQVG

SEQ ID NO: 394155 - protein, 390 aa, unidentified
MERQPFVPRDYDVFAGLDVDKRSIAVTFTDHQGVSRSMRIPYSVEHLWTYVRKHFAGQKVAFAYEAGPTGYGLYDGLVAHGAPCVVAAPSMIPKAPGQRVKTNRLDSRGLSETLRGGQLKSIHVPTPPYRDLRHLTQLRDTFVRELVGMKLRLKALLLLEGIAFPPAPAGSQWSGRVKQQLRTLACSGTVRFKLDQLLDSVEFSEQQVLKTTREIRRFCQHDPELARCIALLRTIPGIGWLVASQLVARIGDWRVLDNVRQLGGFLGVVPSERSTGEKTERGSITRTGDSRLRSKLIQAAWSAIPTGRRAESLLPLGVPDSSAPVGGSGRHRGGGAEAHDAHRRGLDAAASVCGPSKSACRFLDRRGDTAPGNDSTTGRTGRITLLRVDA

SEQ ID NO: 394156 - protein, 402 aa, unidentified
MNAVGIDVSKGKSMVAIMRPFGEIVSAPFEIKHTASDINSLVELINSVEGESRIVMEHTGRYYEALAHQLSEANLFVSAINPKLIKDFDNDSLRKVKSDKADAIKIARYALDKWQNLKQYNVMDELRNQLKTMNRQFGFYIKHKTAMKNNLIGILDQTYPGVNTYFDSPARSDGSQKWVDFASTYWHVDCVRKMSQNAFIDHYQNWCKRKKYNFSQSKAEEIYGKAKELVPVLPKDDITKLIIKQAVNQLNSASTTVESLRTLMNETASKLPEYPIVMAMKGVGASLGPQLMAEIGDVSRFTHKGAITAFAGVDPGVNESGSYEQKSVPTSKRGSSDLRKTLFQGMDVLIKTHPQDDPVYQFLDKKRAQGKPYYVYMTAGANKFLRIYYGRVKEYLSSLPES

SEQ ID NO: 394157 - protein, 428 aa, unidentified
METPTLNPELVAWIGLDWADQAHEIRLQAVGSRRVESFRVEQKPEALHAWVAQLRARFPQGKVAVALEQSRGAVIYALMNYDFLLLYPVPPKGLARYREAFFTSGAKSDPGDADLLLEMVHSHRDRLRLWQPDDALTRQLRLLVEHRRRTVDDRTALTNRLTDLLKTYFPQALEWAGDLRKLAACEFLSQWPSLKALQAAGRPTWRRFYRCHRRLSAEELDQLLQAIAQARPLTEDRALVEASVLMTQTLIEQLRAVIAALARLDQALEKLFEQHPDQGLFQGLPGAGEALAPRLAAAFGSNRHRYQSAEELQQFSGIAPVTESSGKTCWVHWRMACPKFLRQTFHEFADASRKKSRWAEAYYQRRRQDGVSHHAAIRALAYKWIRILYRCWKTSTPYDESVYLQALRRRHSPLWLAATALSIQEGHA

SEQ ID NO: 394158 - protein, 455 aa, unidentified
MRKPQVIPDEDHEVVYERVAAVDVAKASGVVCLRTPDPQRPGRFVNRIWEDVPATRARIAELGGELLRCRVQMVTLESTSDYWRIWYYVLEGIGLAVQLVSASQAKNLKGRPKTDRLDAMWLARLTQWGMLRPSFVPPAAIRRVRDFTRARTDLVRERTRVLQRLEKLLEDAMVKITSVVTDGLKAKSSVAMVAALVAGERDPRTIADLAKGSLRGKRDQLAEALDGMFDSHHGVIARMLLDQVAFLDQRITAMEDQAIAALAQVEESWGVDATGETGPGRGTTPDSPVLAAAHRLAEIPGISVWLAIVIIAEIGLNMAVFPTPAHLVSWLGLCRSAAQSGTRHGKGRQKKGNSYARGAAGQAALAARGTATFLGERYRRIARRRGGAVAQVAVARSIMIIVWHLLNDPAARYRDLGPDWHARRTNRDKKIRTHIQGLKALGVTVAITDDEQQAA

SEQ ID NO: 394159 - protein, 345 aa, unidentified
MDQISRIGMDTSKHIFQLHGVNAAEAPVLRKKLRRKDMMAFFAKLPPTVVAIEACGASHHCARELQSLGHSVKLIAPQLVKPYVKRGKNDAADAEALCEAMSRPTMRFVPVKTAEQQAALMLIGVRDRMIRNRTQLSNAVRGHAAEFGLTAAKGMAHLVPLLERIEADESLPALARELFAIQAKEYAQLQARIGEIDVRLTTWHRADECSQRLAKIPGVGPIGAVLLRMKTPKPELFQSGRQFAAWIGLTPKDHSTAGKVRLGVITRAGDEGLRSVLVVGATAVIQHAQRSGKASPWLVELLRRKSPKLAAVALANKTARIAWKMMVTGETYIAKSAPAVRAGTV

SEQ ID NO: 394160 - protein, 395 aa, unidentified
MQQIKTWCGIDVSAKTLAACRCRDKRQESREFANNAEGHAALLKWLGRGARVCVEATGVYHLQLALALRRAGVELMVVNPRVAKDYSKTLSNRSKTDKVDAAVLLDYVQRMDFTPWEAPSTAVQQMRELGRRLTELVRVSVEEKNRLHAKKAAALSRAVIHDIEQHVAQLKKRIKAIETAAIKVIKADDDLRTQYEILLAATGIGARSAVLLLTELAVLDPTMTVRELVAYAGLDPRVYESGTSVHRPARISKVGNARLRATLYMTALSAIRHDRGARAFAARLVARGKKKMQAIVAVMRKMLHGIWTAMQRRVPFDNAVLFAASLAQAESSDSAVAANQPQLEQDHPQGRSEAKELPQQLDPARAKATHSGRRNKPSSAVPARSVNRKKRSSAA

SEQ ID NO: 394161 - protein, 392 aa, unidentified
MYYIGIDIGKQYHEASIVDSSGNLISKSLNFSSNHKGADKLMDYISEHISDENYVVGMEATGHYWYTIYSYLISRGITVYVINPLQSDSFRNLYIRQTKNDSKDSFLIAEVIRFGQFTTTTLANDNLLSLRQLCRYRANVISARTEIKLRINTILEQIYPEYEKLFNDKYGNSSLAILKKYLLPENIAKASIDELHDILKVNSHNRFSAGKAGELKESAINTFGIKIAQSAFAFQLKQLIDRLKLLNDQITELDNEILSYYNKFDCYLHTIPSLTPISAACILAEIGDIHRFKNSSALVAYAGIDPTVHQSGAYCSTHNRMSKRGSSYLRHTLFLAASCCVFHGSAFNDYYLKKRAQGKHHLVAVGAVSRKLTTVVYAILKSGKPYEDVKFV

SEQ ID NO: 394162 - protein, 390 aa, unidentified
MIYVGIDIAKDKHDCLITNSDGKVLFDSFTFLNNRMGFDEVFKKLESCSKDLSQIKVGLEATGHYSDNLLEFLISKGLTTFVINPLHTNLYRKSLSLRKTKTDKVDAHSILNMLRTENLKPYSHTSYHIRELKSLTRYRFSLVQDCARLKASYARLCVILFPELEALVPNLHIASVYSLLLEFSNVHAIASCHLTRLTHLLSDASKGRYSKDKALEIRNAARVSVGSLSEVKSLELQQTIRLIQLMEEQISQVEAKINPIVDSLHNPIMTIPGISYRMAAIIIAEVEDFSNFDSAGQILAYVGLEPSVYQSGQLTSTHAKMVKRGSKYLRYALFNAAKYVCHWDPTFSAYLAKKRAEGKAYNVAVSHAAKKLTRVIYHLVKTNQPFVKQA

SEQ ID NO: 394163 - protein, 395 aa, unidentified
MFIVGIDIAKRSHEAIIIAEDGQVVRKAFSFRNNCTGYNLLLEQVRRLTLVKSQIVFAMESTAHYWLALYARLLKDGYTVMVLNPIRSHSLRELYIRKAKTDARDSLIIADLVRFGRCKASNVPQDKILALRELCRSRAYLVDMAADLKRKLIALLDRIFPEYESLFDSVFSKASIAVLSKYSTPQKVKNANLRKLTDLLMESSNGHFGEWKAHQLKEAACSSFGIDDSGGVYSTLLGMFLEQILSLTAQADSLEKQISIFFQEFNNPLTSIPGVGTVLAATILSEIGDITRFSSADKLLAYSGLDPSVKQSGEFKSNQNRMSKRGSPYLRRAIWLASTVAVHRDPMFQTYYEKKISEGLHYMNVIGHVSRKMTAVIFAVLRDGQPYQPILQSAG

SEQ ID NO: 394164 - protein, 398 aa, unidentified
MTRKNTLKSLPTDTEFRVVGLDLAKSDVSVTAIPVDDNTPSLVDRMTYADLLDWAGKISPTLFAMEPCNGYSLLCLQLENLGHEIKVISGSTVSMWVNTHLSGQKTDLNDAIALARLAVSDAELTPIRHKSITEIRIQTVQAVRQQLMSQRSKSIVSFKALAQQWGIPCAAGHRNLKKLRESIEAKVDLITRPVANAMLFLLDAVKSLDRQIGQLNQTLQELVMSDERGRLLQSVLGVGTQISARVITVVGNIERFNSPRSLVAYVGVAPRNFITGHKNLTKKKHGNCPDLSHKGQGKISRRGDKLLRSLFIQGAACLYMQFCKDQLPECQLKRWILKQLARQKTYGKLMVSLAAKLIRIVWAVLTYREKFNIQKAGMTRSMWSEMALETPLNKEVPA

SEQ ID NO: 394165 - protein, 370 aa, unidentified
MHESKDIILAVDYHAENIEFRWFNTADGEERTGKYPTTRENVLRQVEEAACEVAPGGRVVWIMESTTGWARVKELLGDRAEFVLANVLEMPLPPKARRRKTDKIDTGRLLREYLNGHLPRSFQTPLWWRQVRRLVNCRQDLVERQTALKNWITSLLHHETWQDRANLWSATGQTRLRAMALPESDRQLVTWKLEQLAHLEQQRLELEKRMQVLYQAWPEAQAVDQLRGIGLVTAVSVLAHIGPIQRFATPEDLISYAGLAPGVRNSDQTRHHGRLGGGGTDEHLRYLLIEATQWLCQIPRYRPTYERVLAKRGKKVARVVLARLALRSIHKMLRDRVRFNPTPRPRPARPTFTGKAGRRGAVAAAAGGSR

SEQ ID NO: 394166 - protein, 389 aa, unidentified
MIYVGIDVASNKHECYLMNDKAEVYSSSFTISNDEEGYKKLHNSIKDFVKQTNDSNVRIGLESTGHYSTNILLYFVKANYKVMLINPLLTNMDRKATTVRKTKTDKVDARGICMFLDRNKNDFKPYTLISYHKNALKSLSRERFSLVKDFSKQKIKLQRLINVVFPEYLNFFSDLYTSSSLDLLYAYPTPKLMKRAKLSSISKFLHGNCKITAKEIQDKSACSIGQSLDYYAFEIRLVIDSLRFHKKQIESYDTQIKVVMDEVGKNIMSIPGISYTNGALILGEIGDINDFESADKLLAYAGLDPSVYQSGKYDANQNTISKRGSKYLRYPLHLASNVIWQHDNTFRDYYNKKLKEGKHHFVILGHIDKKLVRIIYTILKKDIPFSSQN

SEQ ID NO: 394167 - protein, 301 aa, unidentified
MTALSIVAHSHPFVVGVDVHVRNHVFAIVDATKGALLDMQAFPTTAAGINRAIKWVARRTNADAETLWVIEGAASYGAILAGTVATHGYPVAEAPRMDAKKNRGVGKSDRMDAHRIALATLPLAVEKLRRPRLNEGIRQGLRILVTARNSMAKDRTRSVNALNALVRSNDLGVDARKKLTSTQIEEISRWRERDEELSLSIGRAEAIRLAKHILDLYEQLKSNETQLDGRLKVSEAAPLLEEKGFGAGTAAKCLVAWSHEGRVRDEAAFACLAGVNPIPASSGNTTRHRLSRGGDRALTGR

SEQ ID NO: 394168 - protein, 337 aa, unidentified
MNKTDTTFLPCGIEVSSKTLVVDLAGKAPREFPNTPIGHRALLTWLRRAPLPLRVCMEATGLYGLDLALALVAAGIPLLVANPRSVRNFARALMQRSKTDPLDAILLREYAARMPFAPWQPPSPQALQLIAAARRIQALTHMMAAEKNRLHAASLSHTVPPMVRFDIRRSIQNMERAVERLTQGVLLFILDDPQLARRKQLLVSIPGIGLTSAIQLLAELLHLGPDADVRQWVAYAGLDPHEHTSGTAVARKPRVSKAGNAHLRRALYMPALVATRHEPHLRGFYHHLLERGKAKLQALVAVMRKLLHAIFGMFKHDTPYDGSKLYALKPQAELQCA

SEQ ID NO: 394169 - protein, 370 aa, unidentified
MGNASTLHVGLDVHKESIAVAYATEDGATAPVPLGAIGTRQGDIDALVRKLQSKSARLVFVYEAGPCGYWLYRYLTRKGLTCFVVAPSLIPRKAGDRVKTDTRDAVTLARLARSGDLTPVYVPAVPDEALRDLARAREDALHDLNAARFRLKALLLRNDVRYVGRANWGAEHRRWLARFVFPTPAQQIVFQEYVRTVTERTELLQRLEAELLEQAKTWRLSPVVEALQALRGVQFTVAITTIAELGDLTRFDTPRQLMSYLGLTPSEYSSGERRRLGGITKAGNRHARRVLIEAAKAYRHRAKVSEQIQVRQEHLPAVIRDIAWRAQVRLCGRYRKLLARGKHPNTVAAAIARELAAFMWAIAKARPVPA

SEQ ID NO: 394170 - protein, 428 aa, unidentified
MNEKVLVVGIDAGRFTHEWALVEEGGKVVWRKGVANVMVFLRSALKQVETRALGTVLVFAMEMDYGNSGALVRLLLEAGHEVRLCAPLRVKRYRESLGLGNKNDKKDAGVIARFCLERRERLPKAHRPRSGRQALRILSRQLDRVSRQRTRQGNYLRGLLVEYYPDLVSARLLGVLPSPTALAFLRRYSALSRAKGASVTQLTEVLRQASRGKIGKERAQQIKEHLKDYDLPAVVEQAYAEVVRSLVKTLELLLAEEERLLTLAERVAVGDHHYQKLLEVPGIASRLGVKILGEMGDPQAYGKEEKWAAHAGYVPVERQSGEGRGLRFLPQACNKRLREAIFQSCVASLKSSPASRAYYDRKVQEAPPKSQPSGKGRKYKPAVRALLALGRHRCRLIWKLLTTEERYDESKLGQNGRNEEAQSLAQAA

SEQ ID NO: 394171 - protein, 315 aa, unidentified
MTQTSITTAGIDTSKAKLDIAVHNRTERWQVANTLPGWRALASRLAEAGVTRVGIEATGGYERGVVEHLRAAGLTVLMLQPLQVKAFGRVHLRRAKNDALDAVLIAACAAALNPPEIAPDPRLTELADYLTFLEQIEEDIKRFKTRLEHIKETALRRIVNGDIVRLKARKAAQIRDIAKRLRAYDDLAKRLKLVLSVPGIGERTALALVIRMPELGRVSREEASALAGLAPFDADSGQHRGQRKIAGGRSRLRRSLFAAALPAAFRWNKALIALYARLMARGKAHNAALIACARKLLIYANTVVQRGTPWTEKAA

SEQ ID NO: 394172 - protein, 316 aa, unidentified
MGEDVTRVLGVDVSKASLDMAWSGDGEVQRLANDTAGISAVVAKAHELEVQRITVEASGGWQLPLVAALLHAGLPVVVVNPRQVREYARATGTLAKTDRIDARVLCAFTLAVQPPLRPLKDKQAEALSALLARRQQLLGMRTAEKNRLTLGATGLVRKNLKAHIKWLDRHLRDTDRELKQLIEASPAWQARQDLLTTAPGIGDTTARVLIGQLPELGQLNHKQIAALAGLAPFNRDSGTLRGQRMIWGGRHDVRTALYMATVSAIRANPPIRDFYQRLKSNGKPSKVALTACMRKLLVTLNAMLRDQTPWQNTAKA

SEQ ID NO: 394173 - protein, 420 aa, unidentified
MKDITTKKLKKVSEKTLLVAVDIGKVKHTGYWRLPDGTDIKPFEFFNNGRGFQKFWECICEAKRVYLVEEVVVGFESTGSYAEPLLHFLRKRGVRLVQVNPFHTKRLKELQGNSPNKTDHKDPKVIADIMELGHSLTVVIPEGVAAELRRLTNARERAMERRNILLNQLQDLVFMIFPEFLEVMKDVKGKTSRYLLRNCPTPEDIIKKGLENLTQELKEVSRGKLCGDRAEALFRAAWESVGIKEGQKSIVLEIRECLLLLEASEGFIGKLEEEMANRLSEIPYSRCILSIKGIGKVTAAGLIGEVGDFRQFRTISEIIKYGGLDLFEISSGKRRGKRRISKRGRPLLRKLLFFASLNTVKKGGAMYDFYQRYLHRGMHRNKALIAIARKLLRVIFALVRDHSMFVRDYFGIPYQFQEVA

SEQ ID NO: 394174 - protein, 287 aa, unidentified
MNSEKYIGLDVHQATISVAVMDSGGKLVMESILETKAATILQFFAGLRGTLWVTFEEGTCAAWLYDLLNPHVAKLVVCNPRKNALLKYGNKSDRIDARKLAELLRGNHLKPVYHGETSVRTLRELARSYVTTVKDLTRVMSRLKALYRSWAIPCAGRDVYYTRHRAEWLGKIEHAGVRRRAEQLDQHLDVLQQLRQQVRRELLAESRKHPATAKLRQVPYLGPIRSALLVALIQTPHRFRTKRQLWAYSGLALETRTSAEYRYVEGRLRHSKKLLSSGVSTRTTTMI

SEQ ID NO: 394175 - protein, 392 aa, unidentified
MGRVVIGMDPHKRSATIEAIDQRERVLTTGRFGTDTAGYQAMLAAGRQFPDRVWAVEGCAGIGRHIAQRLVTDGETVLDVPAKLSARVRVFDTGHGRKTDPVDAHSVAVAGLRSPDLRTVAVDDATVALRLLVDRRDELGRARTETISRIHQLLLELIPGGAKKFLTRGQASYLLRTAPTPVGIVARTRHDLARELIDELTAIDAKIRAADKQLRQLVAAAGSSLTNLNGIGPSGAARLIGDITDISRFRTAAHFASWNGTAPIEASSGDQRRHRLSRLGNRRINRVLHIMAVVQLRHDTPGRTYYRRRLSEGKTTMEAMRALKRHLSDVVYSQMVRDAKRSRTSGTGPGGHSGMTLQSSADSPIPTAASSDKSQPGPATNKPRTTSRDPLT

SEQ ID NO: 394176 - protein, 388 aa, unidentified
MYYIGIDVSKFKHTCLIASNSGEVIKDCFDIDNSTIGFTKLKSIIDSLDSNQIKIGFESTGHYSANLAQFLINNDYKFFQLDPRRVKKFSLSLSSRKTKTDKIDAGVIARFLMTVDSKANIPLYYHISYLKSLSRHVYRLQKYISKSKIELVNMLDQAFPEFFQFFSSIYGKTPFSILEKANSLKSISNMSSSRYDSLRKLSMGRFKYSKFIKLKHAASHSVGIDQDFYWSLIHFLIKRINALSAEKKSIEDIIIAVLSSNPSSVLTIPGISYLSCAAIISEIGDVNRFSNYRSLIAYAGLDNSVYQSGTNLKLGRISKRGSVYLRTALFKASVSIIMKSKLFYDYFFLKKSQGKHRTLVLTCVSRKLLRVIFHLLKTNTSFNDNLVS

SEQ ID NO: 394177 - protein, 394 aa, unidentified
MILVGIDIGKNKHTFSIIDKNSGEILLSPSDFSNNLKGFLFLIQKLSSYTKSELLIGMEDTGHYHFALLKYLLDRRYTVALINPTTTDLTRKLQGGITKNDPLDSLTICDVISSNHRNKPYRVTTLNRFDLYEQKQLTRHHHNLKEELNTYKNRLQKCIDIVFPEFNSLFHSKYGIVYMNILKTFSSAKAIANADIRSIRKCFEFKGQGKRISLSAEQLKLTAKSSIGIPSIAEEIQIRHLVSQIELLEKQLSEIDKRIEEFSLKNNSPILTIPGISHFSGTSIISELGDICNYTKASQIIKFAGVAPYHYESSQFTAQHTAITKKGSKYLRKTLYQIILPVISNNEVFYAYYTKKLNEGKGHRCAQGHCIRKLLRVIYHLLSTRQPFNPKLLV

SEQ ID NO: 394178 - protein, 414 aa, unidentified
MEKQWNIVCGADIHKTFLIATILSRDGTKITKRFGMTSNDLLNFKNWVIENGCEQVAVESTGTYWVPIHTVLEGSVGLIVGNAYKIKHTPGNKNDLADADWIAELCLNGMIEPSRIFPRAERDLRRLTRIREGYVNDMTREKNRIHHALDSCGIKLSSVLSDIFGKAGQTILNGLLEGRTIDDILKGINLKSIKATTDEIREAIKGSLDFTQILLIRGSLEQMEAIQSRIDEIRKEIKGRIADRKEDLKIAMSIPGVGFTSAATLLAEIGDVTDFKKPEQLAAWAGLVPSVYQSAGKLITGSITKHGSRHIRWILVQVARVIARGRNSKLKRFFLRVKSKKGSNVAIVALARKVLCILHHLLTNREIYQEKGINKKVKIDVRKEFSPHEMGLEEMIAYLVRAGYVVRKGSEGGG

SEQ ID NO: 394179 - protein, 346 aa, unidentified
MNETTTIGLDIAKQVFQVHGVAIDGTVTVKRQLRRSEVIRFFDKLPRCRVGLEACGGAHFWARELTVLGHDVRLIPASYVKPYVKRGKTDAIDAEAICEAVSRPTMRFVPIKTVDCQAGVMLLKTRYLLVKQRTQSINSLRGHLSELGIIAAKGTGKVETLIAIIRDKTDERIPAVARRALEMLAEQVEALFQRIATLENEIVSEVRRDDTMRRLATIPGVGPITAATIVALVPDPGAFNSGRHFAAWIGLTPKMHSTGGKERLGRISKMGNPVLRSLLVVGATAVSRHARRGATVSPWLTGLLARRPAKVAAIALANKMARVIWALLTKGGVFTRRPATAAQHAA

SEQ ID NO: 394180 - protein, 393 aa, unidentified
MTASTDDHTDAADVEAREEIVLGVDTHADMHVAAVITVMGVLMGTQAFPATADGYAALLSWASGHGRLRRAGVEGTSSHGTALNRYLRRHDLRVLEVNRPDRARRRRRGKTDAIDAENAARAVLSQEAAAIAKTGDGPVEMIRMLKVARDSAVKARTQAINQLRAVLMRADSALRDALAGLGSVTLIRTCADLPAAEHRTIDDAARGVLRMLARRILALTEEARAHERTLVAIITECAPKLLQQYGIGPDTAAALLITAGDNPDRLGSEAAFAALCGVNPIEASSGKTVRHRLNRGGDRRSNSALYTIVVTRLGRDARTRAYAERRTTEGKSKKEIIRCLKRYVAREVFPARTGRVTPDHGAGRRACWAKIGPTLTAGWRSSIDGERPLRGRG

SEQ ID NO: 394181 - protein, 351 aa, unidentified
MELGVDTHKRTHSLVALDEEGRQLGTKPVANTPEGWTEALAWARGKQQHHRRWGIENGGSLGKGFAQFLLAQGEADVREVRPQRTAQYRRRGRTQDKTDQADALASARLLLAEGAHLPTIQRDDGSTELRLLSDHRDNLLVDRTRLINQLHAQMLQIDPGYQARSGALTARRGRLYCRDLVLPEADGVTQTRLLIVGQLVGQILRLEEEIAAITAALGERVRASKTPVLALCGVGEVIAARLLGELGTVLRVPSAAALAALAGSAPVAVSSGGRGGYRLNRGGNRQLNRVIHLMALSQRRCDPRAQASYAKKRAEGKRPRAAMRCLKRRLVDVLYRCFTRGTIAPPTAAAA

SEQ ID NO: 394182 - protein, 514 aa, unidentified
MSEGTAQPPFSRLCPRLLRKHSAWLIRHIPLTQKFHPQPLAPAKMADWVHAHYARVRSPYAAQDKPFASGFTNPYRNGGDIMLKINYMSTLFVDIDVSSKSNSVYAMDFEENKYLSTSFGNNQPGADELVNRIAACMQKHKNLDTLLIVLESTSVYSVHISNFLASSEVLMPYKPYVFCVNPKATANYRKSYIGMEKTDPTDAYLIADFARVGRTKKLEPWRGGQFIALKRLTRHRMHLSECITREKTYMVSNLYLKFSELQLLEGDDKPFGNLYGATSSAILTEFLSPQEIIDMPEEDLLAFLAQRSRNRICDLSKTSELLRKAARDSYRLDKCMYEPLNISLASSFNCIQAYQKEIRLIEQAIEKCMKGMNPNALIILQSIPGIGPVWASGILSEIGDISAFHSSDALAKYAGLYWPKGDSGDFISEDNQMSKAGNPYLRYYFGEAANSIRKHIPEYADFYARKYAEVSKHQHKRALALTSRKFVRLVFGLLAKNQLYTGEKLDTEHNTGSN

SEQ ID NO: 394183 - protein, 346 aa, unidentified
MELYIGLDVSLASTAICAVSGRGKIMMEATAASEPEELVAALKAMPGGVVAVGLEAGPLSQWLYRYLTDAGFAAVLMETRQVKGALKAMPIKTDRRDAEGIARLLQMGWYRPVHCKSVSAQEMRALLSARKAIQQAAINLELSIRGVLRNFGLKMGRVAKGRFEARVQELTEGNPMLEAAANPILATRRTLRQELAGLEKALRDHVKEDPACRTLMTMPGVGPVVALTVKAAIDDPARFRSSKDIGPWVGLTPRREQSGERDIVGQISRAGDVGLRTALYQAATTMMHRGRKNWLTAWAMNVAKRRGKKRATVALARRIGVVLHRMWTDGTDFRFTRKDAAAAAAA

SEQ ID NO: 394184 - protein, 351 aa, unidentified
MTQQTTAETIATIGIDLGKNTFHLIGMDARGKIVLRRKIARGQLQSCLANVPVCLIGLEACTGAHHVGRQLAALGHDVRLLPAQYVKPFLKGHKNDYRDAEAIAEAAQRPTMRPVPLKSAEQLDLQALHRVRSRRIGQRTAVINQIRGFLLECGIAVRQGPAGLREALPTLLAHRTDVLSPRMIHLIEELAEDWRQLDERIAVLTRDIAALAGQDAGCRRLMGIPGVGVITASAMVAAVGTGAAFTKGRDFAAWLGLVPKQISTGDRTILGGLSKRGNRYLRTLFVSGAQTLLRDPGRWQNHGFGRWVMTALARLPRNVLAAALANKLARMAWSVLFRGCGYEAEFATRAA

SEQ ID NO: 394185 - protein, 421 aa, unidentified
MRGFGLDVHRDFCEVAIAEEGRIRSAGRIPTRVPSLELFAQSLAAGDVVALEATTGADKIVSLLQGHGVRVVVANTRKLKSITEAKAKTDRLDARTLARLLVSGLLDEVWTPDERTRTLRRLTNRRERLVRARTRAKNEAHGVLARNLCERPPVTDAFGKGGRRWLAELQLPLDERLTLDGCLRQIDFLDAEVAALDSEIAKQALAWPEVLRLMSVPGVNVQTAATFMASVGDVRRFSSPRKLVSYLGLDPRVRQSGSGPARHGRISKAGASEARHMLGEVAWKVMVTPGPLRAFFERVRARRGPQVAATATARKLVVLFWHLLTREEDYAFARPAMTRSKVRRLELLAGAPPQKGRKGVAGGKSKAVFDAERELSRQAEAAYRRLVSDWRSSGPRKAGAGATPGRASSGPSKGKAARQTP

SEQ ID NO: 394186 - protein, 338 aa, unidentified
MYYSGIDQHKIFSVITTVNDEGIIVKQAELKNNSFDILNYFASLGNEHSATVETTGGWYWMNDLLSSHNIPLKLAHAKYVKAIAYAKVKTDKVDSHILAQLLRLNFIPEAYKISDDVRPLRDTLRARLRLSQKRTSCMNFMNRMLEKFNINDPSLLSDFYKLQYQQFDFQEHLLKQQMLTLEKSLYPSLIPNDDIQRLLWIPGIGKMNAFTILLEVGDINRFADVKHFFSYCRLVPSARNSAGKLKQRSSKDGSKYLKVVFSDAAVHALQYYPPIKKYHDSKLRRKKKQVAHAIIAKEIARIVFYVLKYKTDFNNHFKGLLIEPKKSDQWPRITSPVV

SEQ ID NO: 394187 - protein, 493 aa, unidentified
MGACGLESGDVVLAAIPIRKMTIGIAQTLLLVIEWRIAMPKRTTGDRPELKTVSVGAAAIDIGSKMHMAAVNPACTDVPVRSFGTFTQHLHDLADWFKACGVTSVAMESTGIYWIPVYEILEQRGFDVILVNARYAKNVPGRKTDVSDAAWLRQLHSYGLLRGSFRPDAEIATLRAYLRQRERLVEYAAAHIQHMQKALMEMNLQLHHVVSDITGATGMRIIRAVVAGERNPDVLATYRDVRCHSSPETIRAALVGNDRDEHIFALTQSLELYDIYQAKMLDCDRKLEVLIAALSNKGGKPVGKLSKPRIKTKQVNTPTFDVRTALYGVLGVDLTEIHGLGPSLALKLVGECGTDLRAWPSAKHFTSWLCLAPGNKISGGKVLSSRTRRSSSRAAALLRLAATTVGRSDTALGAFYRRLSSRAGKSKAVTATARKIAVLFYNTLRHGMSYRDPGADHYEQQYRNRVLANLQRRAKSLGFLLQAIPGDADPAVS

SEQ ID NO: 394188 - protein, 409 aa, unidentified
MEVLYPRCAGLDVHKESVVACVRVMAGGPVQATVRTFTTTTAGLLELADWLAAHGCTHVAMESTGVYWKPVWHVLASDFELVLANASHIRNVPGRKSDVSDATWIADLLAHGLLRGSFVPPPAVQELRDLTRTRKQLVRDLGQHTQRIEKVLEDANLKLTTVLTDVVGASGRRILEAVIAGETNPDALAKLASPRVKAAPVVLAEALVGRVTPHHRFLLREHLLMIDHLRQRIAAFDAQIGAALEPFRVAAARLVTIPGVSLVAAHVIVAEIGIDMTRFPTIGHLISWAGLCPRMEQSAGKRRSTRIRKGAPWLKTVLVQCAWAATRAKDTYLQAQFRRLKSRRGPMKAVVAVAASILTAAYHMLREGVPYRELGPHHFARVDKARLAQRLARRLRDLGYEVQLNATAA

SEQ ID NO: 394189 - protein, 336 aa, unidentified
MAVQVWSAGIDVGKGAIDTAVHGKPDAMHHATRDDPGLRDLIVWLGDHDVVRVGLEASGGYEREVIDTLEDAGFEVHLLNPRQVRRFAEAKGRLAKNDRADARVIAEFMAKMVDRTADRRDRSLDVLVEHLSVRRRLVTWVADSVNAREHLRDPAMRKVIEAQRKGFDTALKKLDKTIAGLIGAHPDWRETERRLRSVPGVGAVLAATLIGLLPELGRLSRHGIAALVGVAPFDDDSGKRRGPREIHGGRATVRHALYMAALVGKRHNPLLAAFAARLKGKKPKVILVACMRKLIVMLNAMMRDKADWNAAGKLAARSAIPSRDEMTGERSHGAQA

SEQ ID NO: 394190 - protein, 398 aa, unidentified
MLDQAWVGVDVGKDHHWAAAVDADGRVLLSRKLANDQQAILGVLVEVAALARRLTWTVDLTTSEAALLLAVLWGQGQQVRYLAGRAVSQAAVGYRGEGKTDAKDARIIADQSRMRRDLPELRPGQDLIVELRILTSRRTDLVGDRTRAINRLRQQLTAICPALERVADLAGQRGWVVLLAHYQRPGDLRSVGVAPLAALLAGHGIRNPDRIAQAAVAAASTQTVGLPGQDVAADVAGALAREVLDLQARITQTDHALQARFHRHQLAEVICSMPGFGFRLGAEVLAAIGQLELIGSADRLAAYAGLCPVANDSGKRTGRRRTPQGYNRALRRAMYLAALTAIRCSPHDRAYYQRKRAEGKRHVQAVICLARRRTNVLWALLRDHRTWQPQPPANHQAA

SEQ ID NO: 394191 - protein, 412 aa, unidentified
MDVMYSCCCGLDVHKKTVAACLITSTEGAEPVKEIRTFRTMTADLLALTDWLEEAGCTHVAMESTGVYWRPVYNLLEGQFELLVVNAQHIKTVPGRKTDVKDAAWIAELLRHGLLRGSFIPSKPQRQLRELTRYRSTLVQDHARTLNRLQAVLEDANLKLASVVTDVYGVSARAMLAAILAGERDVETLADLARGRLRAKRDQLKEALEGRVTAHHSFLLTEHLSTLEYLDEAIARISGEIDQRLTAEQEAIALLDTIPGVGQRAAEILIAEIGTDMSRFPSAKHLASWAGMCPGNHESGGKRLSGKTRKGSRWLRQILVEIAHVASKTKNTYLAAQYRRIAARRGKKRALMAVGHTVLTIVYTMLTRQQPYQDLGAAYFDQRERHRVERRLVQRLERLGYEVALQPKALAS

SEQ ID NO: 394192 - protein, 500 aa, unidentified
MKTKPSSKLNSSIYRNQNALLRALFDRAADPRKVLCVALDYAKRKHVALCCDGNGEILRAPFAVDNTVEGVAFLVEQISATARRPKIPKCDIFLGGEDEPSYVANFTAALRSRQYLVLRVNAAEAKENRENQIASTDLLDLLGIAKTLLSRRARSTEPVGSKDKKLSQDLYFQIREITRCRRGLVRQQTAASNRIHAYVDQLFPGFLEQPKSGLTPFCEASIALMMERFSAPEIARRRPRTLAAFLARHGVRQPDEIAAKLIALASGALPPAPQRLAALQRTLSATVDLRQCLTRNANELRCQAAILLASTPYAMLTSIPGIGFTLAAGMAGELGHPLRLSGVDSLCAFAGIVPHTFQSGGPDQPACQGHTPARCNHILKDWTVQSAQKILLYGPPELKDRITRWNANGQHGIFAGARRYLRLLRSLVLNQVPYLDPASRSSTASNDERADAALRAWLILIRKWRTIPGGLTIISDQSTPLGFWRRTAMESRDVVLPLKP

SEQ ID NO: 394193 - protein, 323 aa, unidentified
MPRKSPDTVAVIGIDLGKNTFHLIGLNKRGAIVLRQKLSRSQLETRLANTPPCLIGMEACVGSHHLARRLKALGHDAKLMPAKYVRPYSKGQKNDFKDAEAIAEAVQRPTMRFVAIKTAEQLDLQALHRIRERLVSQRTGVINQIRAFMLERGIAVRQGLRFLRAELPGLLATRGDVLSPHMIRLIEDLAGDWRRLDERIEALSAEIEAIARADVHCQRTMSVPGVGPIISSAMVAAIGTGEGFSKGRDFAAWLGIVPKQMADSGEGGHRFRSIADSNPVIADSGSRRRLQGLTPRRSCQVCHAWPVFPAACPLQRACAGSLP

SEQ ID NO: 394194 - protein, 431 aa, unidentified
MQETTQHDAVDVFVGVDVGKGQHHAVALDRNGKRLYNKALPNDEVKLRALIAELKTHRRLLFVVDQPSTIGALPVAVARAEGVLVAYLPGLAMRRIADLHAGEAKTDARDAAIIAEAARSMPHTLRSLRLADEQLAELTMLRGFDDDLAAQVTQTSNRIRGLLTQIHPALERVLGPRLDHPAVLDLLERYPSPSALAAANEKTLANRLTKLAPRLGKNWAAEIVQVLNEQAVIVPGTQAAAIVMPRLAQQLAALRKQRDEIAAEVERLVLAHPLWPVLTSMPGVGVRTAARRLTEAAPKAFATAAHLAAYVGLAPVTRRSGSSIRGEHPSRRGNKVLNAPCSSPPSLPYETQSHGPIPRARSSRASATTKHSSRSHGDAATSCLPCCATAPFTHPSQPLTLDERHRAPARAVPQHRRAAPRPCAGCDPAPM

SEQ ID NO: 394195 - protein, 416 aa, unidentified
MGTQYALRIGLDWADQKHDLMVLAAGADAPVHCEIDSAPESIDHWLAERRIEHPAGRFAVCLEQTRGAVCYALLKYDFIDLYPANPSTLARYRHAFSPSRSKNDRCDAELLLDLLVKHPDHLRRLEPDSAAMRKLTLLCEARRKEVDGRTRLANRLQSLLRDYYPQALGLCGQKLHSPLALDFLGHWTTFQALRRARKTTITHFYKSHHASERTAARCLETIAASCPVTDDAAIMETSILRVRILLEQIRVANQAVKTLEDEIEKTHPEADASALFASFPGAGKALAPRLCGGFGSDRTRFASTESFQAASGIAPVTEASGKAHWVHWRWSCSKFLRQTLVEYAHESRKRSAWAKTFYDSQRAKGNGHHAALRALAFKWARIMYRCWQNRTPYDEEQYMQSLKKHGSWLAQATEAA

SEQ ID NO: 394196 - protein, 462 aa, unidentified
MKLYLGGDVSKGYADWVILSEKKQAVLDNFQLDDTYAGHCKLYSTLEGYFGKHPGLEIYAAVESTGGYENNWFSTLKSYQKVFNLKVARVNPSGVNFNRRAGLKRNVTDAISALSIAEYLINHPDNIKYDQDDQWKSLCRHWNFVEMQKQQRVQTINQLETILYSANPTLMRFKKDNLPNWLLELIIQCPTAATLAKARPEKLAKIPYLSLARAKTLVAEAKQSIASATDKNAEILVSQIARQIKLFDQNIKAQMQLIERDLSCPEIEILKTFKGIDTISAIGLLLEIEAIERFPTVKGFSCYFGLHPKFKQSGDKVIGVRMSKQGSKNMRKMLFNIAKGAITYNPLITAVYEKKLSHGMKKMAAIGVCMHKILRIIYGMLKNKQAYNPLIDRKNCERSKDKQQEKQQQENANIDKSRRYQEFDIKAPISRKQTKKRKEHDLSQCEITSQSTGSACSSKTKL

SEQ ID NO: 394197 - protein, 315 aa, unidentified
MRNCIGIDVSKGSFDVFVLEKNKALVMTNDSEGICKCVELCQQIQPELIVMEATGGYETLLASTLQAKGFPVAVVNPRRIRDFAKAVGQMAKTDKLDAQIIARFAATLEPMPHELIDSNSRRLKALMSRRKQLVEMHTAECNRKEHAIDIEVTRSIEAIVNAIESQLSNVEKELDSWIQQMPELKQKAEYLQSIPGIGKTTAHMLVIELPELGVFNRRQIAALVGVAPINRDSGVFRGKRMTGGGRRHVRARLFMPTLVATQFNPVLRKYYRTLVDAQGKCKMVALTASMRKLLCIMNAMLKNEQYWQPNLIENA

SEQ ID NO: 394198 - protein, 345 aa, unidentified
MEIHTIGIDLGKTVFHLVGLDARGEVVVRKKCSRNQILGFTANLHVSLIGMEACGGAHFLARALREQGHDARLMPAQYVKPYVKTNKNDYIDAEAIAEAVGRPRMRFVSIKTDDQLDLQSLHRVRERWVSGRTAVINQIRGLLLERGITIRKGRHHIEESLPGILEDADNKLSGALRVLLTQLRLEMQYLQGQIDESDKLIQRIAGELEDCRRMVSVPGIGPLTATATIAAIGNGSAFKKGRGFAAWLGVVPGEHSTGGKQTLTDTSRRGNRYLRKLFVQGAHAVLQQRMKQSNGLNTWLAQLTSRKRIQVAAVALANKMARMVWAVLSKGEAYRPPLSVETAAV

SEQ ID NO: 394199 - protein, 374 aa, unidentified
MTKIARIGIDTSKGSFQLHGVNEKDEVVLRRTVRRRQFLEFMAKLEPTVIGLEACGASHHWARELRRLGHRVMLIPPQAVKPYVSPGRNNDKNDAEAICEAMSRPRVRARLVPIKSVEQSASQMLMGVRDSLLKRRTQLCNTLRGHAAEFGLVAAKGLDKIEPLLARIAGDEGLPALAREIFADLGREHAELSKRIAQIDRKLAAFHRANELSRRLMEVPIVGPVGAGLLITKIVNPHGFRSGRLCAAWVGLTPKDHSTGGKQRLGGITRAGDESLRAVLVSGATAYIQQVRRGRIVPSPWLAALLERKPPKLAAVALANKTVRIAWKLMTSGERYDPTHGVGREGLGASLYGGLRAEPLAPSPTGGDSHAVAA

SEQ ID NO: 394200 - protein, 546 aa, unidentified
MRLSQAWHVFSAKGTVSCKPDTVSTVIQPLARGAAKSSPQKRPAVNNCAAAKMKRSEKLSRPRHDRAGRIAPAGSRSCKPHLAKVSPSAPVPLAASVPKSERTIAREAPCIRLTFDRATMHNKKGEPMKEWKEITHYAGFDWARDHHVVVVVDRQGQIVADFQFDHSVEGWKSFRQKTTALESVAVAIETSQGAAVDQLLQYEYTLYPVNPAAAASYRQRKAPSGTKTDHLDAWSLADALRVDGHGWKALAPMDELSAQLRLLCRDEVALIEQRTALVNQLQQALLEYYPAALEAFEDWTMPSTWDFILQFSTPEALVKAGKRRWKKFLHTHRLWRAQTLEKRLALFAQADQFKASVAITKAKSQLALSLCKLLRTLQEQLDQYRKQIEALFENHPDHHLFGSLPGAREKLAPRLLAAIGSDPKRYGSFQVLQSFAGTAPISFQSGQLRRAKVRWACDKFLRHTVHLWADCFRKASAWGQAYYRKKRQDGKSHACALRCLGQRLLKILFRMLTERKPYDAELHARNQQKHGSWVLALLPQPTPPPQ

SEQ ID NO: 394201 - protein, 361 aa, unidentified
MAKVRSWAGLDVHARSVLAVTLDAQSGEIRRQRLPAETAKVVEFLAGLPGPARAAYEAGPTGYGLARALRAAGIECVVAAPGKIERPAQDKVKTDQRDAERVLRLLMIDALCPVRVPTVEEEAIRDLVRAREDVRGDLMRARQRLSKLLLRHGIVYEDTSSTWTARHRAWVRSQDLGGGAQVTLLDYLGGIDTLEHRRTQLEQALAELVPASPYAHTVARLRCLRGIDTLSAVGLAAELGDLTRFDRPGKLMSYVGLVPSESSSGESRRQGKITKTGSKHARRLLVEASWHYRKTPARGVTLQRRQEGQPATVVAISWQAQQRLHRVWRRLAEQRGKRSTSVAVAVARELAGFCWALAHAE

SEQ ID NO: 394202 - protein, 331 aa, unidentified
MKLKEVIGIDVGKESNEGRIHSSQKFLTFENNTKGFEKFVEWVSKNSSSEKEQLLFAFEHTGLYSFPLAVFLTEKNYVFVLLPGLELKRSMGITRGKDDKMDAKRIAQYAYEKRDSIKPYIMPQEEIIQLKRLLTLRERLVKQCSGYKASLCEYKQFLKKKDNLTLFETQEQMIKYLSKYIEKIDNELSSIIKKNDQLKQMYDLIVSIKGVGPQTALFMISYTHGFTRFETWRQFASYCGVAPFPYQSGISIRGRTKVNNLANKKIKSLLDLCAKSSIQFNMEMKMYYEKRVNEGKTKMGTINIIRNKILSRIFATVRRGTPYVNTIAYQS

SEQ ID NO: 394203 - protein, 351 aa, unidentified
MDVTTVAVDLAKEVFQVALANRAGRVIDRRRLTRRQFERLIDDLPITTEVVMESCGTAHYWGRRATARGLQVRLLPVQYVRPYVRRSKTDRADSEALLEAARCGEIRPVPVKTVEQQTLQALHRIRTQWQTTRVARINGVRGLLREHGYEMARGARTIVKRATTLLDAADTTIPAVLRHVLTAVLDEIRELEAKIAGIDRQLADIATTDPVASRLRTIPGVGVLTATALVGSVGHIHAFHRGREFASWLGLTPRESSTGGRRYLGRISKKGDVHLRCLLVHGARAVLRCAFLAAARRGPDQVTRLQQWAIATAQRRGRAKATVALANKLARIVWAVWRRQETFHAAPALAA

SEQ ID NO: 394204 - protein, 338 aa, unidentified
MGRFIGVDLHRNCFTVCLIAENGREYISEYRLEEIDRFLGRLRETDEVAVEVTGNTRLFYDLVAPHVARVVVVNPSEFRVIRQSTKKTDKHDARALALFLSKNLLPEVRMKDKQHAELASLTQTRDALVKQRTALKNKVNNLLSSRGVNLKREALTSEKGLRAVLGMKFAPLMEFELEVLVEQIRAINTSVAKLESTIKQEGVKLPGHKNLKSIKGIGDLGATILLTVIGDVNDFANEGKLAAYFGIVPRVSNSNQTERSGRITKRGSKLGRTTLVQCALIAKRYSPYLARFYERIKTRRGTGKAIIALAKKFLGIIYNTLKENWVFVDFPNFELATE

SEQ ID NO: 394205 - protein, 403 aa, unidentified
MSEVFAGLDWASRLHAVCVIDERGVVRLQCEATHDAAGLVDLSRRLHAAGAERIAIERPSGLIVDALVEAGFTVVPIHPNIVKATRPRYRSHGGKSDASDAYLLADLLRTDGHRFKSLTEQCDDIRALRALVRGRDELVDARIQLANQLRDLLESFWPGAASVFADVDSPIALDFIQRYPTPGSARSLGPKRMAAFCAQHAYSGRRSPDELLERLHAAAQIALGDMETRVKGELALALARILARLVEQIRLITSRIEHEVAALDDGRILMSFPRAGRVCAAQILAELGSVRERFDSEEHLAAEAGVTPVTYASGKAKSVAFRWACNHRLRRAITCLADNSRHASAWAAATYANARARGCRHPHAIRILARAWLRVIWRAWLDRKPYDPASHGGLQTMLKTVGG

SEQ ID NO: 394206 - protein, 481 aa, unidentified
MKTKPPEKIQKATSPSTRGHWNEMNRKQRREMMRQIQSEDLSLEVVHPHAAGIDIGNESHYVAVPPTRDSQPVRHFGCTTVELKALAEWLKQCGIRTVAMQSTGVYWIAVYDILETAGLDVYLVNARDTKNLPGRKSDVQESQWLMKLHTYGLLRNSFRPSQEIRTMRTYWRQRDDLIRAAVSHIQRIQKALTQMNIQLGNVLSDVSGVTGQAILKAILAGERDPHKLAALRDPRVKASEEQIARYLEGNWQEDLLFVLKQEQEAYEFCQQQMAECDRQLQQYLQQREDRSQGASLPQEMRKGRLVRKKGNKPMFALRPELFRITGTDLTQVDGIDVVTAATILSEAGWDMSKWEDEHHFVSWLRLCPDNRISGNKVLGKGRLPTNNRASIALRMAASTLRLSNTYLGAQFRRFRTKLGAPVAIKAMAAKLARLVYRMLRYGMKYVDQGAKIYEAQHRQRQIGQLKWNAAKLGFRVVEAAT

SEQ ID NO: 394207 - protein, 326 aa, unidentified
MQSILGIDVSKYTLDLMLMTDYGISHKVVKNDPKAFPKLVEWLTKKQSGKVHACLEATGQYGEEVADFLLDHGHQVSVVNPARIKHYGASKLHRNKTDKADAALIAEFCQKENPALWEPLSPEIKRLRALVRRLQDQKANLQQEKNRLESGEKDPWVIRDLETHIEYLKKRIKATEAEIEEVVNQSPDLKFNRMLLTTIPAFGKLTAHTFLAEIGDVKRFNNAPELGAYAGLNPKGHRSGTSVFKKTRISKQGRVELRRCLYMPAVVALSCNPVIQDLNERMTQRSSHKMEIIIAAMRKLLHIAYGVLKNQIPFDPDYGKQFDFSS

SEQ ID NO: 394208 - protein, 458 aa, unidentified
MYRELKPLRQALSTELKASMPPTVPGAEPEQLLHTYLDRLTMYVGCDVADKTLTLIALDADGEELKHLCAAPNTPDGFELIWKWMDGLCCQHHLRITLLAMETSGIYYWAWWDYLAGRPNLARVLYNPRTTEHMTEVLSKRVRTDLVDAYALAEQVRLGSTPEVVPTEDSDLLTARFCSRAARDLAQRINDHKNQLRSFVRAYNPAVGRAFPGAKFHHPAVYALLQHYLFADEFVAAGVDAITTILEDNCRSAFGRDHAQLLVDLCRQTLTRPIGRQVIQQRVRYLTSDVLDAQKQKKYFLKTGYDLIKGRQQAKLLRDSTGAGVSNTLALVSEVGDIHRYPSGAHVASFLGLTTSKHISGTTLFHSKRITKQGSPNGRYAAVNMALHLSLRVPKYQAMYKRIKNRKPPRKGHFVALVAIARDFVTNVLYDMWRYQRPFFLEVEDYRAYRKTHPRSDD

SEQ ID NO: 394209 - protein, 347 aa, unidentified
MLHAGLDLSRRKVDVCLLSEAGEHLDQLTAAPDADALRGLARRIAEAYREPVCAVVESMTGARLVHDTLEQEGWNVEIADAQRVKGLAPLACKTDKIDSQVLAVLSHRDLVPAIWLPDPRVREERELARFRLHLVKHKSALKNRIHSTLINFGKPCPVTDLFGVAGRRLLERLQVPEPWRGNVTASVELIDDLERQIDEINTRLKDGHADHPYIPLLMSAPGIGWVLAFTIAAEIGEIERFPSPEKLTGYTGLCPRVNQSGDKDRRGPLTKHGPTYLRWAMLEATMHALKHPVYSKRYQRNKKRLGKQRGAKVAQIDIARRLTHAIWHMLSRKQQFAPRGAAFRLAA

SEQ ID NO: 394210 - protein, 404 aa, unidentified
MIFAGVDWAEAHHDVCVVSENGGVLEQRRVGHSVAGIGELHAVIAAHAGAGEPVAVGIETGRGLVVTALLAAGYQVDAVNPVASARYRDRHVTSGARSGRGDATVLADLVRTGRHSHRQVAGDFDLAEAVKVLARSHQSAIWARQQQVHALRSALREYYPAALVAFGTGLAAGDAVAVLPLAATPTAGQALSRAQIAAALRHAGRQRNIDQKAGEIAAALHAGYLHTPPAVATAYGPAARSAARLITAYTAEIAEPGQALAEHFEQHPDAKIVRSLPGLGTVLGARVPGESGDDRTRFASPQSRQNYAGPSPITRAPGRSHVVLARHARNKRLAGALGQWAFCSLTQSPGARRYHDQLRGRGKTHRQALCQLANRWTGILHTCLQRGQLDNEHTAWSHPEAAAA

SEQ ID NO: 394211 - protein, 345 aa, unidentified
MEHHAGIDVSLEWSSVCVVDANGKIVREIKVASEPEVLVEFFKGLSFPVTRIGLEAGPLSQWLHAGLTRAGFETVLLETRHVKAALSAMSIKTDRNDARGIAQLMRMGWFRPVHAKSVGSREVRALLVARKQLLSKLMDLEASMRGILRGFGLKMGVVTRKGFEARVRELSAGQAMLERVTSAMLEARAALWREFEQLHREMLRIVRDDEICRRLMSTPGVGPLVAITFKSAIDDPGRIAKSKTIGALFGLVPKKYQSGERDVSGGITRTGDESVRTALYEAANVMLTRTTRFSSLKRWALEVAKRRGLKRARVALARKLGVVLHRIWIDGTTFRWTKHNPAIAG

SEQ ID NO: 394212 - protein, 317 aa, unidentified
MNFVGIDVSKTQLDIAERPGNKRWSAVNAEAEIGKVVEMVGALSPQVIVIEATGGMEVPLVAALSQARLPVVVVNPRQVRDFAKAVGRLAKTDRIDAEILAHFGEAVKPKVRALKDEDVQTLTALVTRRRQVIEMLTAEKNRLGISPKVVHKDIQKHIDWLQARLENMDRHLDSAIRKNTAWREKDDLLRSVPGVGHVLSVSLITGLPELGTLSRRQIAALVGVAPLNRDSGLFRGKRTVWGGRAHLRAVLYMAALSASRVNPALSRFYRRLVEAGKKPKVALTACMRKLLGILNAIIKNRIPWQADHATCPSPKNP

SEQ ID NO: 394213 - protein, 341 aa, unidentified
MQITTVGIDLAKNVFQVHGVDDHGQVVLRKALKRSQVMTFFAQLPVCLIGMEACGSAHYWARRLQALGHTVRLMAPQFVKPYVKTNKNDAADAEAICEAVQRPSMRFVAVKTAEQQAVLSLHRARQGFVKARTATANQIRGLLSEFGITLPPGIAHLNMVCERMAEEALPASFRRLIDDLLCHYRQLDTRIIELEREIHAWHRSSDTSQRLAAIPGVGLLTATAVVASVGDARQFKNARQMAAFLGLVPRQHSSGGKPTLLSISKRGDVYLRTLMIHGARSVLHHAAARPNADQLWHVQVMQRRNRNIAAVALANKNARTMWALLVRAPAYDPQHRAAQAA

SEQ ID NO: 394214 - protein, 355 aa, unidentified
MDNLRYIGLDVHRDTISAAVLDHDGKLIMQSVVPTRASAILDFLHGIRGTLHVTFEEGIHSAWLYDLLQPRVARVLVCDPRKTRLLKSGNKGDLIDARKLAELLRNDALSPVYHGELSSLEVQRRTRSYTMLTEDTTRIMSRVKAVFRGQAVPYHGKSIYRPDRRESYLAQLPTPGLRQRVELLYQELDAVHRLRLRAKREMLAECRKHPAMKWLQSVPFLGKVRTAVLIGRVQTPHRFRTKRQFWSYCGLALETHDSAQYHVLHGQVERKPRFVQVRGLNWNHNHDLKDVFKSAATMAAVREGVFRDYYCGLLAKGIRPEMARLTLARKIAAITLKIWKEGGMFNAEQVKPQAA

SEQ ID NO: 394215 - protein, 324 aa, unidentified
MQNVHVIGIDISKKTFDACAMFNGKNKKNSFNNNGTGCEELISWIKEFGLTDPHICMESTGSYSEAVADFLYNSGYKVSVINPLQVKSFRISKMIRQKTDKSDCEVIAMFCLQNFPVLWSPKSRENKELHEVNARIDTLKMELNRLINSLEKEIINKIVANSINEEMQFIKDMIKKLEQEALNIINDSPQLKRQYDILTEIKGIGTKTAMTILADMPDVSRFENAKQYAAFVGVTPSHFQSGTSVKGKSHISRLGSRKIRKALYMSAIVVKNHNNAFQAFVNRLVSKGKRPKVIIVAIMRKLLHIFFGILKSNKSFNQNLAFHC

SEQ ID NO: 394216 - protein, 463 aa, unidentified
MAIRIGIDVACRAVHRAACADATGSLLWKNVRFRTSPEDLEALWRRIPAAEVDITVVMEPTRNAWVPLAAWFRRHGAKVVMVPPEQSADLRAYYNKHAKTDRLDAELLARLPGLHPDGLHIEQGLGCAEPLRRAVKIRSTLVRRRVTCTQRLDALLEILGPDWICALGTVMTATVLLFLTRWSDPQQVLRLGHKRLTDWLARQSRGMWSAQKAEAILNAAATTLRLWGTDGMDFAALAADIALEAELALDLDRQIKAIDKRIATYYDKADPEHIALSAPGVGQILAAQIVGRLGDPQRFTNLAAVRSYSGLVPRQNSSGVASAAGGPTKQGDACLREAIFLAADHARRSDPTLAQRYHRLMVENGKHHTSALCSIGAVLLTRIATCLRKGEPYLLLDIDGTPITAQQGRAIAKERYSIPAEVRKARRTVHRSVPQKPTDLTMAGRGDSTKKGVARRSMVTTTP

SEQ ID NO: 394217 - protein, 412 aa, unidentified
MEALYRCCCGVDVHKRSVVACLIRPGGGGRPSKEVRTFGTMTADLLALVDWLVGAECEAVAMESTGSFWKPLYNLLEGVLPAVMVVNAAHIKQVPGRKTDVKDAEWIADLLRHGLLHASFIPDRAQRELRELTRYRTSLVRERAAEVNRVQKVLEGANIKLSSVATDLTGVSARGMLAALLAGSTDAAAMARCARGRMREKIPQLELALVGSFGPHQRFLVAEQLAHIDYLDALIARVSAEVAARVRPFAEEAALLDTATGIGRLSAEAVIAEVGVDMTRFPDADHLTSWAGLAPGSNESAGKRRRSKTRKGSPWLRATLVEAAHAAGHSRDTYLGAHYHRLAGRIGKKRAAVAVARKLLATLYHLLSTHQPYHELGANYHAHRAKQALERRAVRQLESLGYAVSLQPKEAA

SEQ ID NO: 394218 - protein, 346 aa, unidentified
MVLIGCDFHPGWQQVCWLDLVTGETEEKKLVHAPGEAEKFYRQFPAPSRIGLESTGNCQWFVDLLTSLGHEVWIGDAAKIRASDVRQQKHDKRDAQLLLRLLEDGRFPRIWTPSSEEKDQRQLLIHRHKLVRVRAQVKNELQHLALNQGVQEKRHLWSEAGQKLLRQLPLKPWAGRRREDLLKLMAMLDEQIKLLDEAVTKASEENEKARLLMTQPGVGPVTSLAYVLTMGDVTRFPRGKQVASYLGLIPREYSSGGHQRLGSISKQGNRFLRMLLVEAAQIAVRYDPEFRREYLHRCHTKPKGVAKVAAARKLAIRLYWMLRTNTRYPEIVRIESRPRVPLVSAS

SEQ ID NO: 394219 - protein, 366 aa, unidentified
METIYIGVDFHARQQTICYLKTETGELVTCELKHQDKEVVRAFYAQFSGQVIVGLEASGYSSWFERMLEELGCQVWLGHATEIRRRARWRQKNDRRDAELILDLMLHNEFPRLHRPAVQSREVLRMLRYRQKLIKMRTMSKNSLQAIALQAGLAKGSRLFTKAGQQELGTAEMSPVLHWQREHWLQLMEPLNQQLLETMVWFKSQSKDDDRITRLRTHPGIGLLTSLCIVHTLQPVSRFRNTRKVAAYAGFDPIERSSAERKCFLGISKAGSRLLRYLLVEAAQTAVRKDEDLKRFYQRLADRRGRPKAKVAAARKLLIRAYIMMRDEIDYAEFRHRAVAARLARRSQGPANVPEVLIGQPASPEQ

SEQ ID NO: 394220 - protein, 312 aa, unidentified
MNQPKSNVFVGVDVSKERLDVAVRPSGEHKSFTNDEAGIAQMTDCLGRLSPEMILFEATGGWQMNAVNALAARRLPVVVINPRQVRDFAKATGQLAKTDAIDAGILAHFAEAVRPEIRELKPLEARKLEALNTRRRQIVEMLTAERNRLTTAPEWTRPDIEDLIAFLKKRLATINRDINKLIRQSPLWREKDKILKSFPGVGPVTASTMLSDLPELGSLNPKAIAALVGVAPLNCDSGKHQGKRKIWGGRACVRLLFMCAKTAVRCNPVIRGFYERLLGAGKLRKVALTACMHKILIILNAMIRDQVCWKTA

SEQ ID NO: 394221 - protein, 443 aa, unidentified
MSEEVRHTSEPEFAALVAIDWADKKHVWRLEVIGTGERERGELEHTPEAIEAWASHLAERFSGRAIAVGLEQSRGSLLYTLTKYAHLVLYPIHPTTLARFRAALFPSGAKDDPMDADLLLELLLHHRGFLRPLQPDTLETRRLQLLVEQRRQLVNEKTRQTNRLTARLKMYYPQILQWFEEVDSPMVSALLLRWPTLQKLQRARPDTLRKFFHQHNCRGTQRIEQRLEQIGQAIPATHDAAVVETCVVAVQLLARLIATLRRGIAELDGRIEKVAASHPDFALFDSLPGAGKVMAPRLIVAFGTQRERYSSAKEIHAYSGIAPVLERSGKSTWTHFRWTCPKFLRQTFHEWAGHSLSKSHWARLYYQQQRAKGKAHHAVIRALAFKWIRIVFRCWQNRTPYDEQIYLRALQQRRSPLAVTESPTVNLQWIKSGGFWKLSTDPS

SEQ ID NO: 394222 - protein, 456 aa, unidentified
MKIPQSTIRLLTGRLVKILLNREVSTMKFNTQNAKIEAITEKTLVLGIDVGSEMHYARAFDYRGIAYTKKPFKFSNTEAGFMSLQAWILDLKEKHEKDKVVPGMEPTGHYWFNLGKFLQDNEMKPVLVNPHHVKKSKELDDNNPTKNDRKDPKVIAGLVREGRYMIPYLPDGVYADLRTASNIRFQLQAELTRIQNRISRWFNIYFPEYKKVYGKPDAKSGILILKTAPLPEDILTLGIDGVNQIWRDAKLRAVGKARANTLIEAAEHSVGSKEGTVSARMEIRMLLEDYESRNIRLQEVMALIEELVAQIPMAEKLLEIKGVGIRTVSGFLAEVGDISRFNNPKELQKLAGLALVENSSGKHKGETTISRRGRKRLRYLLFEVAMSLVSKNQEFRELHNYYTTRRLNPLKKMQSLMAIAAKLIRVFYAMLTKGVDYDPKKMVGDIKRPAVYLQAA

SEQ ID NO: 394223 - protein, 348 aa, unidentified
MAMLADTVELVIGVDTHKHTHTAAVVVAATGAVIQQVTVPATPAGYRQLLGLADRHDGRRVWAIEGTGGYGAGLTRFLHAHAEQVVELDRPKRAARRHGAKSDPLDATRAAREALGRDQLAQPRAAGQRAALQVRLTARRSAVQAATDAQRQLHALVVAAPDTLRSRLRGLTTPRLVSTCGRLRLQTPWDTETTATAASLRALARRIQHLNTEIAEHTRAITALVRAWHPELLTPTGVGPIVAAVVLCAWSHPGRCHTDAAFAMLGGAAPIPASSGQTVRVRLNRSGDRHLNQALHLIVLTRLRYDPATRAYAQRRRAEGKTNREIRRCLVRYVARQLYRLLEAQPAL

SEQ ID NO: 394224 - protein, 424 aa, unidentified
MSRRARRNHTPAFKIPWEVDSNRRSDRVRLLPPTLEATMQTVADRSEAPTAIRTDLGAIFVSLELSRSTWLITSLSPAGGEKMSKHVVRGGDVAGLLERFAQLREKTRARTGKVFPFVVIQEAGLDGFWIDRVLQNEAIESHVVDPASIATSRRRRRAKTDRIDGEALVRALLAYKRGEPRVCAMVKAPTPKEEDRRRLCRERKVLIAERVRHVNRVKGLLFSQGISGYEPLRRDRRERLDTLQTGDGRLLPDHLKAQVRRELDRLELLLDQIKAVEAERDVLLAAQQAPAPAAMLLDIKGIGPEFAAILWSEGLFRHFDNRRQVASYAGLAPTPWQSGSVDREQGVSKAGNPRLRTTLIQLAWLWLRHQPQSALALWFEERVRRNGGRLKKKTIVALARKLLIALWKYVTAGVLIEGAVMKAA

SEQ ID NO: 394225 - protein, 434 aa, unidentified
MSGRETVQPEVKFVAYVGIDWADQKHAWCLQKAGSTERESGELEHRPETVEAWVGELCRRFGQGPIAVAVEQVKGALVCMLRKYECLHLFPVPSTMSAAMRKALYPSGAKDDPRDADLLLDLLVQHRDRLRHLRPDNEETRRVQNLVEERRKLVDEKTAQLNRLIGYLKIYFPQMLEWFGRLDRKLVCEFLERWPSLEELKKVPPAELRKFFRQRQGRHHELTEDRIRGIVQAMPAIQDRAVIEAKGAVVQVIAQLLRSLLEGIANLDRKIAEAASAHPDFFIFQSLPGAGAALAPRLLAALGSQRDRYGSAEEVQKHSGIAPVTETSGKKKWVHFRWACAKFLRQSFHEWAGHTIAYSAWARAYYQQQRKRGNDHHAAVRSLAFKWIRIVFRCWRDRVAYDENKYLAALARRGSPLSSVLATTATPLCNPCGS

SEQ ID NO: 394226 - protein, 284 aa, unidentified
MKKFIRIGVDLAKNYFQVHALVSDVGPAVTRKLRRSKMHEFFSQIEPSLIGMEACGSAHYWARELKAMGHEVLLMPPAYTKPYVKRGKNDAVDADACCEAMSRPGMRFVPVKSAEQQATLMLHKTRELLVKQRTMSVNALRGHLSEFGIIAAKGIGRVDELLDLVESDTTLPNAARASAKVLAHALEGLDKAIDDLEDEITNAQAQNEMTRLLYKVPGIGKIIASVIAASVPDPSVFKSGRDFTAWLGLTPRQNSSGGKQALGAITKQGNRYIRKLLVLGRPRC

SEQ ID NO: 394227 - protein, 424 aa, unidentified
MIPVPSYVLLVTILLVWRKISKYINMNRNRTVAGLDVHKDSIYLCIMGHDEAIIFEKTYGVLTPELRQMCNDMVDRGVTEAAMESTAVYWVPVWNELCESMELKLVNPYFIRQLPGRKSDVRDAQWIAECLLKNLIKGSFVPEPIVQDMRKLNRRIFDLQEDLTYYSNKLDAALQRCGFRLSNYVAKITGKSYRKAVESIASGVTDPDELIKCVHGRIINKHGRETMLAAMTGSFSTTDITVIRQYWELLAIYTRQSEECQSKLTALCEAHFPTEYKRLQTIPGVKERAATAIIAETGVDMKTFATAASLVGWCGLKPRNDVSNGRYKSRKITHGNKYLRKILIEISWTASRTRNCFFSNFSYIQVTQKHKSKMKIQVAIARKILVAVWHMLSKQEDFIDLYLKRLEEQRLMEEKIRQLESKMA

SEQ ID NO: 394228 - protein, 422 aa, unidentified
MKDHKRKLYVGIDVHSREHKVALVPIALLEFGEAWRKVKPLSIKNNISDFERLDAAIRAHLSSAEEAAIAVDHTGGHYSEPIVYFLQAKGYTVYHLETKAVKAARERFLDQESKSDVIDATGAAYLLYLRDVHGLSFRISAMTPELGSRAATLNSLVLQRWQFNKLATQATNRLHQFLLAVFPEGEARYFNQLLRIIPYYPTPKDILNSNGLERIEKLQQKDREKILELAANSVGVPGDIYQWLIRDLGVQRMEAQAKRDAITSMLRRQVVAHPYGEILLSFPYLGEIAAATIIAITKDIERWPDKKKFKKALGIYNSMTQSGTSSGRTRQGKEGSRDGRRVLFQVCFGCVRTNAADSDFKDYYLRQVARGKPRIKALVSTMGKLAEIIYHCLKAREPYQYQGKCKATRTSDNKKLRGGIDS

SEQ ID NO: 394229 - protein, 324 aa, unidentified
MMTLPILGIDISKTKFDAVLFHEGKYRHRVFSNKEQGFAKLREWLLQLGFASVHACLEATGTYGDPLARFLHQAGHHVSIVNPARIKAFAMSELSRTKTDKTDAYLIARFCFSQQPKLWTPPPLELTELQALVRRLENLQDMHQQESNRLSSEILSKQVLQSVTTHLEYLDQEIQKTKKLIKNHIDQHPTLKNQRDLLTSIPGIADATAAKLLAELQNFKSYSSARQVAAYAGLTPQHHLSGSSVHRKARLSKTGNTRLRKSLYMPAIVAKQHNPIIKTFCERLKERGKNNMTIIGAAMRKLLHIVYGVLKSGKPFNPNYQLAA

SEQ ID NO: 394230 - protein, 387 aa, unidentified
MSQASDLTRCFAPYDQATTLIAVIELSLSSWLIAGMVPGLARQPLKKMAPDEAGLLRLLERWREEAVKAGSVINRISVAFEAGRDGFWLARWLRTRGIDAHVIHSSSVAVSREHRRAKTDRLDTALLMRVFIGWLRGERGHCSMVAVPSIEEEDAKRPNRERENLVGERTRIINRMKSALARLGIRGFKPELRKAPQRLDTLSTPEGIPIPINTLDEFRRDLVRLALVREQIDAIERTRIAQLEAAPKTGPHAMVRLLAKILGLGIETADMLVNEVLSRNLRDRRAVARYAGLTGSPDESGKKRRERGLAKAGNARVRRGLVQLAWRFLLFQKESALVLWFRARTESAAGVRKTKMIVALARKLLIALWRMVTTGEVPAGVVLRPSP

SEQ ID NO: 394231 - protein, 347 aa, unidentified
MEQIIRIGMDTSKYIFQVHGVDAAERPVLCKRLGRKQMLEFFAKLPPTVIGMEACGTSHYWARELEQLGHEVKLIAPQHVKPYVKRNKNDGRDAEGLCEAMSRPTMRFVPVKTIEQQAALMLAGLREQMIARRTQISNTIRGYAAEFGITVAQGLNQIEPLLARLAQDESVPESARDLFALQGRDYAQLQIELKAIEARLMAWHRANADSRRLAKIPGIGPIGAATAVMKTPDPGAFASGRHFAAWIGLTPKDHSTAGKTRHGKITRAGDERLRSVLVAGATAVIQQAKKGRGRPSPWLIALLKRKPPKLAAVALANKMARIAWKLLVTGESYDGARMPKASVAAAA

SEQ ID NO: 394232 - protein, 343 aa, unidentified
MQAITTVGLDIAKSVFQVHGVDVQGSAVIRRQVRRRYVLAFFKKLPPCLVGIEACATSHHWSRELQALGHTVRLIPPAYVKPYVKRQKNDAADAEAICEAVQRPSMRFVPTKTPEQQSCLVLHRTRHLFIRQQTAVINTIRAHLAEFGIIAPVGRNGVEELLYAVADHEDDRIPEVARACLEALGALLCKFKAQILEFDRQINAWHRSNETSQRLDELPGVGPALATALVASVADPKAFRSGRDFSAWIGLVPKQNSSGGKDKLGSITKQGDRYLRSLFCAGALAVIRYAKIHGSKHRPWLSRLLERRPTKVAAIALANKIARMAWAMMAKGECYREPVALAR

SEQ ID NO: 394233 - protein, 417 aa, unidentified
MSTDVRFFGGIDWASETHQVCLVAADGKIIGERAFAHGGAGLAEMCDWLVTTSGEEPPTVAVAIEAPHGPVVEILLERRFQVDAVNPKQLDRFRDRFTVAGAKDDRRDAYVLADALRTDRHCFRRLTVEDPVVIELREWSRMAEDLQQERNRLANRVREQLWRYYPQALELGDDLAADWFLDLWALAPTPAKAARLRESRVAGLLKAHRIRRIDATEVLRILRQKPLVVASGTVEAATAHITAVAARLKLVNQQIKQAHRRLDELSDKLAEGREEDAPGQKSKQRDVTILRSLPGVGRIVLATLLGEAAEPLRKRDYHALRTLSGVAPVTRRSGKRCVVLMRQACHLRLRTAVYHWARVAIQHDVRSRARYAELRKRGHSHGRALRSVADRLLAVACAMLKSQTTFDPEHAVEAVAA

SEQ ID NO: 394234 - protein, 342 aa, unidentified
MKLFIGLDVSLAKTAVCVVSEHGQIIKEAEADSEPGVLARWLRDLDGRIAAIGLEAGPLSQWLHRGLTEAGLEAVLMETRQVKGALKAMPIKTDRRDAEGIARLLHLGWFRPVHCKSVSAQETRAVLGARKAIQQNMIALEMSLRGLLRNFGLKVGAISRGRFETRIRELADGNPMLETATAPMLRARATLRQELAALEKQVRQLAQDDPVCHRLMTMPGIGAVVALTFRAAVDDPTRFRSSKRVGPWVGLTPSRNQSGERDLSGGITKAGDVNLRRALCQAATVMMNRGRSTWLRTWGAQLAQRRGRKIAMVALARRIAVILHRIWVDGTTFQSDAAPNPA

SEQ ID NO: 394235 - protein, 356 aa, unidentified
MSNYITIGMDLGNRKHTVCALDQTGNVLWRKDVANTPEALKPFFEENAGATVAMETGLCCRWVSALAKSCGCDALVGNARKLAAIWQSKQKNDENDALLIAELARASRRLFHPVELRDDERHEMVQLIELREVAVSQRTQAVNSVRGLCKAHGVFIPKCDASCFHKVAAGAIPDGMAWKFKPMLRHLKEVAATIKRYDAMLEEYAQKHFKEEVELLRTVPGVGPITSCAFVALIADPGRFGSARDAGAYFGLTPGQDKSGDKDAPKHITKTGSALMRHLLVTAANHILRASSPDTALKRHGERICARGGKVARRKAKTAVARKLAVVMLAMLKSGKAYDDGIAAVKAGAGESTVAA

SEQ ID NO: 394236 - protein, 347 aa, unidentified
MTIVEAPPGITGGVDTHLDKHVAAALDPLGRLVGTESFDADSAGYKALLAWLEDFGQVSKIGVEGTGSYGAGLSRFLRRKGIEVVEVNRPNRQSRRNQGKSDTLDAVEAARAAISGRASGAGKTKDGSVEAIRVLVVAKRSARQARVKAIVQMRHLVITAPDQLHSRLKGVTVHALVTEGAKLRPTKSGDSVTAATKASLSSLAHRIQALDRELAELDEKIESLLLAIAPDLMARFGVGPDTAASLLVAAGDNPERLHSEAAWAHLCGVSPVPADSGKNAGHLRRHNGGNRQANSALWRIAMVRIAHEPETRAYFDRRVKEGRTKRDIIRILQRYIAREVYRFLPRG

SEQ ID NO: 394237 - protein, 397 aa, unidentified
MYIVGIDIAKRKHEAAVIDGEGAVIIKPFSFTNNCSGYNRLLAMLTKAKLPLDEVSFAMEATGHYWLALFTRLQKEGFRVQVINPVQTNSIRSFYIRQAKTDPRDALLIAEVIRFGHFSESTLHPENIYELRELCRGRHAIVSMQADVKRKVVALLDQVFPEYETAFTNLFGDTSMAILQTCPTPKELSEMRLEELCHLIEVSSHKRFRMAKARELQALARNSFGFAMAGDVFSTMIRLYAKHLDFLKQQVREMDRKIAEIMDTLDTPITTITGIGPTLGAYILSEIGDISRFSSAAKLAAYAGIDPTMRQSGEYNGVRNRMSKRGSPYLRHAIWLAASSAVLHDPALKLYFQKKRDEGKPYMASVGHACRKMVSIIYAVMRDNKAYTPYIPNEISA

SEQ ID NO: 394238 - protein, 473 aa, unidentified
MARAARRPGARQYPKRRSSRGRSAPFEQMNLNAAGIDVGATEHWVAVPEDRDEELVRRFGAFTADLYVLAEWLRQCQIETVVMESTGVYWITLFEVLEERGFDVKLVDAHDARQVPGRKTDVKDCQWLQELHTYGLLRGAFRPEDQICVLRSYLRQRSMLVAMASRAVQHMQKALEQMNLKLTEVVSDINGKTGMEIIHAILAGERDPQRLASHRDRRCKHDQATIAKALEGHWRAEHLFALQQALEQYEFLQQQLQACEQQIEACLQTFVTHVEVEPPQPTPACKRRARQRQAPSFDVHQYLDAMTGVDLTQIDGIDALTALKVISEIGLDMTRWPTGKHFASWLGLCPGNKLSGGKRYRMRSKPTANRAASALRLAAQGLVNSHSALGAYYRRMRARLGAPKAITATAHKLARLVYSLLRYGTAYVDAGQQAYEQKYRDRVLTNLQRKARVLGYQLVHVEDTGRVQAAATL

SEQ ID NO: 394239 - protein, 415 aa, unidentified
MEIVYPRVAGIDVGKKVVAVAVRTPGDQPGQRHQQLRKYRTFYPTLREMVGWLVDQAVTHVAMEATGVYWKPVFHVLCEVESLDVLLVNARHVKNGPGRKTDAKDAEWLAELCEVGLLRGSFIPPKEIAAIRELTRYRKKLTEARTSELQRLCKVLEDGGIKLDSVASSITTLSARAMVEALIGGERDPRVLADLARGVMRKKIPDLTMALAGRFGAQHALLARMHLGHIDHLSGMIQTLDGEIEQVITPFAEQVRRLRTIPGIGERTAQVLVSEIGVDMTRFPTAEHLASWAGLCPGNNESAGKHRRTTTRKGNREVREALVEAAWAASRTSTYLGARFRRLHRRFGKQGGSKAAVAIAHNLLVIAWFLLHDGTDYQDLGADYFTRHDHPDTKKRRLIRELQALGYTVDLTPAA

SEQ ID NO: 394240 - protein, 454 aa, unidentified
MAKRRKRAKRLQAGELPQQLKHVNLNAAGIDIGSERHFVAVPPGRDEVSVREFSTFTPDLHVLVEWLRQCGVTTVAMESTGVYWIPVYELLERERFEVKLVDARRVKNVPGRKSDVLDCQWLQQLHTYGLLEGAFRPPDEVCVLRGYLRQREMLVQSSSMHIQHMQKALQQMNVLLHNVVSDITGVTGMKILRAIIGGERDPKILAAHRDRRCRNSEETIAKSLVGNYRDEHLFALKQAVELYDIYQSKLADCDLAIADYLQRQPKHTPDEPPAPSQPTNAQRNVRGEVNIRSQLFQMTGVDLFAVKGLSTDTLLTLAGEVGFDMSPWRTEKHFSSWLGLSSGTKKSGGKILSSKTKRTSNRAAAAFRIGAASLSRSKTALGAFYRRIKARVGAPQALTATARKLAVIFYSMLKYGTDYVETGQLAYEQKYQQRRFNSMQKQALAMGYQLVQIN

SEQ ID NO: 394241 - protein, 310 aa, unidentified
MERIFVGLDVSKDRLDVHVRPTDEQFAVANDEAGVATLVHRLAGLRPTLIVLEATGGYESTVAAALAHAGLPVAVVNPRQVRQFARASGQLAKTDRLDARANARFAETVQPAARPLATEQAQVLGELVARRRQLVDMLGAEQNRYRQARAQGLRQRIRAHITWLTRAIEELEGEITQLVRSSPVWRETEDLLTSAPGIGDITAHALIADLPELGHLTRRRIAALVGLAPWNRDSGRWRGRRMIGGGRAAVRRALYMPTIVAIHHKPLIREVYRRLTAAGRPKKVAVIAAMRKFLTILNAMLRDRRQWQPA

SEQ ID NO: 394242 - protein, 418 aa, unidentified
MIDDVQWFAGIDWATQSHRVCLLDIEGRHVDERDFAHGGAGLTELRDWLLEKTKAAPGQIAVAIETPHGPVVEMLLDHGFLVYAINPKQLDRFRDRFTVAGAKDDSRDARVLGGALRTDRQAFRRLVVDDPVVIELREWSRMADELQQERTRLANRVRQQLWRYYPQAIELTDDVADDWFLALWQRVPTPATAATASERTITRILKDHRIRRLDAATVLQTLRQKPLFVAPGTTEAACAHIRTVAARLRLVNQQIKQAHRALDGLCAKLEAATESPSGQIREQRDVTILRSWPGIGRIVLATLLTEAAEPLRARDYHALRALAGTAPVTRRSGKQCFVIRRLACNKRLQNAVHHWSRVAIQHDAVARRRYDALRRRGHGHARALRSVADRLLYALCTTLKRQTTYNPNCQTAQLTASL

SEQ ID NO: 394243 - protein, 353 aa, unidentified
MDRVDMGKGEAMEVRIVGVDLGKNSCSVVGLDAVGRVVLRRRVRRQGILSLVAKLPGCIVAMEACCGAHHLGRLLVAQGHEVRLMSPEYVRPYVKAQKNDDRDAEAIAEAATRPTMRFVALKTAAQLDAQVLHRVRDGLVGQRTALMNQIRSILLERGIVIAQGRRKLLEALEAVSSGSEDSRIGARMRLLLDDMLDQWRALDARITALDDEFAEMARNDPAARRLATIPGIGVLNATALVAAIGDGRTFSRARDLSAWLGLVPRQATTGGKPRLMGITKRGSTYLRKLILQGARAALPSLANRPTPIGAWLRGLLARAHVNKVVVALASKLARIAWALLRNETNFSAGSLTA

SEQ ID NO: 394244 - protein, 332 aa, unidentified
MVEGTKGSHHKERSTKMRKHNMVCAGIDTGKRKLEVALTSGHRLQVDNNPEGHAALSAWLRKHRIKRVGIEASGGYEQAVVRKLRFEHFVVVVFQPAQVRAYAKFHLQRAKNDKIDAALIARCTADAPKIHAPPDPRLAPLAEHLTLIEQITQDIAHVKTRRETCRDPHSQRHWEGEIARFKALLRVEFRALVANIRQHRDLAKRLDLIASVGGHGLRTAVAIVVRMPEIGHVTREHAAALAGLAPFGDDSSDQVGVRHIEGGRERLRKSLYTAALPAAFHWNPQLKLIYQRLTAAGKPHKVALVACARKLLIYANTVVERGTPWTAVRAPA

SEQ ID NO: 394245 - protein, 374 aa, unidentified
MLYVGIDLHSKQITVCVRDESGEIVLRRQVSTRPEKVDLFFDQMLASDGEFMAIVEVCGFNDWFTEKLRQRNCNDIVLIQPDNSSKKKTDRRDANKLCELLWCNRLLLQKGKRVNGLRRVYIPREDESADRQITALRKRLAQFRTKTLNKIHRILHNRNLMWQYPTKTFQTQAGLQWLKQLELPAVDRMEMDYLIQQWELFDQQIKSVEQQIVERVQQTQSDQIMSPSQLLMTAPGVSFYSALAIASRIGDIRRFHTPRSLANFFGITPGCRNSGNSNHRLGSITKEGSAIVRFVLGQLVLHVLKKDPQIRAWYRRIRNRRGSKIARVAVMRRMTTIFWHMLTHNEPYYAGGPPRLKHNRLSSGSTKGTKQTAA

SEQ ID NO: 394246 - protein, 409 aa, unidentified
MELLIARCAGLDVHQATVVATVRVPDEQGGRRSVTETFGTMTADLLALREWLQAYGVTHVALESTGVYWKPVYYMLEDGFTLLLINMQELKRVPGRKTDVQDSEWLAQLLECGLLKASFVPPPPIRELRDLTRYRVQQVRERAREVNRLCKVLEDAGVKLTSVVTDVLGASGRAMLRALVEGTTDPTVLADLARGKLRQKLPRLQRALQGRFRAHHAFLIEQIFAKIDFLDETLHRLTAEIDRRVAPFEPMLARLDTIPGVDRIGAISIVAETGGDMRRFPSAGHLCSWGALCPGQNESAGKRRSGKTRKGNRYLRRTLIQGALGATRKNGSALQARYHRVKRHRGHKKAVVAVGHQMLEIAYYVMRDEVSYDELGADYFNRRHAERAVRRHIRQLEALGFHVTIEKAA

SEQ ID NO: 394247 - protein, 410 aa, unidentified
MDLLRREVPATSLVVAVDPGKAFNRVWLTTGERGLIGEPVTLPVLRDGVDELERLVAASGIEGPPVIGLEATGALHRAWASEIERRWPGSLRLFAPSETTAARAQLGSRRFKTDDRDCAALIWLLRQGAGRPAEPEVVAAMLGTVAHRRQLVDARRVLQQRLHDQLNALCPGLSAPAGHGRALKLSSPTGQAVLASAAAFAGRAPSKRSLLARAPGRMTDQTAAFWTGRWKRLLDPPPDAELRAARLGRDLRRWQDLGRDIALADDQLSALLAQTAGQILTTLPGVAAVRAAAFAAYTLPIARWPTAEHLYSATGLAPATYQSSTVTRRGRISRQGLPEHRDALMAIAWGLSQNSSAFAARDAELRARGFRPIQARVALGRNACRLCWRLLHTQQPYDDQRYARARRRGR

SEQ ID NO: 394248 - protein, 358 aa, unidentified
MQTNVLKQCLGIDVSKDSLSYCLGALLGDLEKELKLGPEVSNTKSGFKQLSKWLKSHNYNDALPIVVMEATGVYHQKIAYYLHNLGYEVCIMQSGRVKRYAQSLDQRSKTDALDSKMLSMLGLERKLTPWTPPSETLQELKLLSRERSTLVKERSIEKNRIHAIKTASYTNKNTLKRFNKRLKLLDLQITEIETEMKELVSHDSNLSEKIKLLKSIPGVSFISGVTVIAETLGFSMINNAKQLVSYSGYDVVLRQSGNYTGKTKISKKGNKHIRAVLHMPSMTAIRLNPTLKPFYDRLKPKKVKPIIALVAVQRKLLILMYTLWKNDQYYDAQYEVKKAARKQVLAAQDRNKIEFVTS

SEQ ID NO: 394249 - protein, 347 aa, unidentified
MLIIGCDFHPGFQQIAIFDNRTGEIEEKRLQHRAEAEQFYRSLAEQEVRVGMEACGHYPWFERLLAELGFDLWFGDAARVRASVVRRQKTDRRDAEHLLHLLIEDRFPRIWVPSLEVRDVRQLLVHRHKQVQARTRTKNQLQAMALSHGVQKKYKLWTQTGRAELEQLPLLPYAAQRRQKLLEELDGLETEIRQLDRRVAEEAGQRPEAVRLMTHPGVGPVTALAMVLTLGPAERFESAKQVGSYFGLIPSEASSGGKQRLGRISKQGSSFLRFLLVEAGQTAARYDPQLKRFYRRLATRKNRGVAKVAVARKLATRMYLMLREGWTYAQLNQAVMSVSPSHSVAGE

SEQ ID NO: 394250 - protein, 343 aa, unidentified
MLTITLGIDLGDRASAYCQLDAAGRVTARGKLPTTPAALERFAAGQPPERVVLEVGTHSPWVSRLFAAAGHDVIVANPRRVRLISAAVRKSDRLDAEALARLGRLDPALLAPIQHRGADAQADLALLRSRDALVRTRTLLVNHVRGSVKALGARLPASSARSFGRSVRPHLPAALAPALTPLLDALDAVNTQIAATDRTIAQVAETRYPETRRLRQIAGVGPITALCFVLTLEDPQRFPQSRGVGAYLGLCPRERQSGARTPQLRISKAGDAMLRRLLVTSAHYVLGPFGPDTTVRRWGLRLAERGGMNAKKRAVVAVARKLATLLHHLWVTDEVYQPLERAA

SEQ ID NO: 394251 - protein, 427 aa, unidentified
MSYRIAGIDVHKKMLAIAVADVEVDGDYPFERLKVGTSPAQLRALADWLVEREVEEVVMESTAQYWRPVWEALEQYWRPRRRMRDGAPRCAGTLHLAQAQSNRGPGGRKKDFPDAERLVKRLAAQELTLSFVPDAEQRLWRTVMRRKYQVTRNRVQLHNRLEALLEEAHIKVSSVVSDLLGISARRMLQALADGETDPAALATLAAPRLRATPAQLADAFEACPTLHPVYRRLLQLTLDELRVIEDHLAQLDQQMADLLMAHHDAVHRLAEVPGLGVDSAQQIIAEVGATAATFPSPKHLASWMGACPGTEESAGTNYSHRCPKGNRQMRRVLNQAANAAVKAKGTIFAIVYRRLVPRLGHAQAIGAITHRLCRLIWKILHEGIRYEERGPAVSVEAKKVRTRKMIRELRTLGYHVELLPAPSSNPA

SEQ ID NO: 394252 - protein, 425 aa, unidentified
MLGIGIDWSEEFHLVALGRPGEGVIEVSRVEHSPTEVDALVAKIAGLEPDPAEVRVVIETRHGLLVERLVDAGYVVVPVNPDLVARRRGPAKKKDDAEDARIACLIALDRHERLRPLIPHGEIAGELRAIARDDERAARDERRLLNRLRQDLISTFPAALAIGGEDLGAPTFLRMLERWPTADTLAAAPRTELVAFARSCRHGWPERLADRVQASLAAEHFRPKDYLVRAKADTIRLAATQLLAIGAQRRTWERRMGELLLGAPRQGRDKRPRGDGLGKGFPGGEIYLSFPGLGDRLAARIAGEIGDHPEQFDTPNSLQCYAGKAPVTRRSGKSEVVVACRLAHNRYLGGAVQQWAFCSLRRSGWAREFYDSQRARGKGHQAALRALGNRWLEILWHCLHRGVPYDEAVHVANRNRALGRTTQAA

SEQ ID NO: 394253 - protein, 410 aa, unidentified
MDVFCGIDWAEDHHDIALVNRDGGLLARARIGDDAAGLTRLLDLLAEHGDSAEDPVPVAIETPRGLLVACLRATRRVYPVNPMAVARYRDRHSVAGRKSDHGDAVVLANILRTDLHAHRPLPADSELAQAIAVLARAQQDAVWGRITAHNKLRSHLREYYPGFLAAFAAAKGGITRPEARAILAAAPTPADAAKLTLAQLRALLRKAGRSRGIDARAARLRDALRKGQMRQLPLVEQAMGRQALALLRQLDAACHSADDLEQAATESFTLHPDAGIITSFPGIGPLTGARVLAETGDDRSRFTDAKGLKAYAGAAPVTRASGKTRSVTRRHIKNNRLAQAGYIWAFSALTASPGARAHYDRRRGNGDRHAAAQRNLFGRLLGCLWHCLATGQHYNEKTAFPNQAARPAAA

SEQ ID NO: 394254 - protein, 501 aa, unidentified
MKTKRRKAKLQAGIRSISVTSNEAEQKLEIMRPDAAGIDCGAQEHYVAVPVDRVSAGQPTVRSFSAFTEGLDAAVDWLKECRVTTVAMESTGVYWIPLHQKLEAAGIEVYLVNARHVRCVPGRKTDVKDSQWLRQLHRFGLLNASFRPEDITCRLRSLHRHRDNLVSSSASEIQHMQKALQQMNLHLHQVVSDMTGLTGLRIIDAILSGQRDPQELIKLRDKRVSKSTPQQMQAALVGDYRAEHLFVLSQSLQAYRFHQARIEECDRQTEPLLEKLAQQVEAASARLKPLKGAPQEERLPVPRNELKTGTSASGQPNKAKRKHKPIANEPKIELAGLLERICGIDLTQVVGLNVLSVLLIVSEIGIDMSKWRSAKAFCSWLGLCPGNKISGGKVLDSRTRQVVNRVADALRLAAQSAGRTETCLGIFYRRKQAHLGAPKATTATARKLACLIYHLLKYKQPYQKLDPAIYQLRLQKSALRKLQNQAITLGYKLIPTANVPA

SEQ ID NO: 394255 - protein, 370 aa, unidentified
MLDTTTFVGLDVHARSIKAVSLDVMTGEVRSATFGYDAGAVAGWVRSVDPKARCVYESGVTGFDLQKRLSGLGVDCVVGAVSKMIKPSADRRRKNDRNDAEFLARMLSVGNVVEVWVPDDECEAARDLTRALEDARDDLSRAKQRLSKFLLRHGLVFDERTPTGRRKGNWTRAHWSWIESIGFAEGADNEALAYYVDAVRRAAEDKARLEGLVEAEARKPRWRRRVDSLRCLKGVDTASAADLVFEAGEFSRFGNARSFASWVGLTPSEHSSGESDRRGAITKAGNKHLRKALVEAAWHYLTCSGRPKDLARGQAPDRGARRHAAKGVRRLVERREALLARGVHNNKANVATARELACWVWAVGLMAEEA

SEQ ID NO: 394256 - protein, 346 aa, unidentified
MEHYVGLDVSLKLTSICIVDRTGKVEREGVVTSDPEAIATYIKLHTSHVARIGLETGATSTWLWTELNKIGLPVICIDARHAKAVLKMQINKSDRNDAAGIARIMQCGWYKEVCVKDLDSHATKALLVSRALLVKIKRDIENQIRGLLKNLGLVIGRAKMNVFAVRAAQLAEERSELFAAVDPLLKAREAVEQQIADLDRKVLRLARNNAQVRRFMTAPGVGPVTALCFVATIDDPARFKRSRSVGAYAGLTTRRYASWEIDWTGRISKCGDKMLRSYLYEAANVLLTCVAKWSALKAWGIRLAKRSGLRKAKVAVARKLAVILHRMWIDGTEFKWSSRDAADQPA

SEQ ID NO: 394257 - protein, 420 aa, unidentified
MDEITEEPAALVERIAALDIGKAALTACVRVPHEDKPGARRQQVRTYAALTPALLELRDWLTCQGVTRVVMEATSAYWKPPFYLLEDGIECWVVNARDVKNVPGRPKTDRLDAVWLAKLAERGMLRPSFIPSRPQRQLRDLTRYRRTLTQERTREKQRAEKLLEDAQVKLSSVISDIFGASGRAMLAALISGQRNPHELACLARGSMRAKTSVLQEALTGHFTDHHAFMLTMMLARVDALTAQIDTLTTRIEEAIAPYAAQVAQLDDIPGIGVIAAQDLIAEIGTDMSRFPTPGHLVSWAKFAPRARQSSGRSKAASTGKGNPWLGGTLGEAAISAARTRTFLASRYKRIVSRRGKKRALVAVGNSILTIIWHLLSDPAARFTDLGPDWHDRLAPLRRKRQLIAELERISGKKVTLHDAA

SEQ ID NO: 394258 - protein, 437 aa, unidentified
MSLNRLQVGIDFSQKRADFCLLFPDGQPLVAHQAFPNSLPGYQKARQLLLDSLRTQSFDGLDVSGEATSYYWLPYFWQMAHDSELSACDISLFLLNPRQVFWFKKSLPPDDKTDNVDPFYIAERTRTRRPTSSWEPQDDWMPLRFYTRLRFHLAQSLTREKNYYLIYLFLLHNTYQRIKPFSDTFGVTSQQVLGGELSLAELVALPEEDLAEKLDAWSGGNLDDPLETAKKLHQVASESFVLSEPLALAVQRILDSTLEHVKFIEKQIEQAEQWITAEVETRHPEVRFLETVPGVGLVLAADITAEIGDLQRFFRTKKWNKKHKCYRARTLREVEDAVAKLAGLWWPQNSSGDFVSENRPLAKTGNRYLRYYLVQAANGMRRHIPAYVSFYGSKSREATRFKHKRALVLTARKSIGLFVGLLHRKEAYRPQEVSGHL

SEQ ID NO: 394259 - protein, 355 aa, unidentified
MSCEKYIGMDVHQATISVAVMDSMGKVIMESILETKASTILEFLGGLRGTLSVTFEEGTSAAWLYDLLKPHVAHVLVCNPRKNAALRQGNKSDKIDARELANRLRLNDLKPVYHGETGVRMLRELARSYLTIVKDLSRVMNRVKALYRSWAIPCAGRDVYYTRHRSQWLEKIPEAGPRRRAERLYQQLDMLQYLRQQARRELLAESRKHSITAKLRQIPSLGPIRSALAVALIQTPHRFRSKRQLWKYSGLALETRISGEYVYVHGERRRSKKQISIRGLNKDHNHDLKGLFKAAATRASVIPGPFREFYQRSLAKGIKPTMVRLTLARKIAAITLTLWKKGENFDLEKLKSQAA

SEQ ID NO: 394260 - protein, 378 aa, unidentified
MAIGLSDGRLLEEFEIAHTAAGFQDFFKRVEASAQRHTAPIAVAMEGYNGHVRPLDSLVKARGWQLYNVNNLKLARFKEIFPAAAKNDRIDTRKALELFQLRDHLPMAGDVLQKIEPIPEENNVLKRLSRRQRRLVDERTRLGNALQADLQAACPGLLEITREVNNYWFLNFLTCRKGLPKLARLRPASLLKVPGIGHKYAGLIEAWQSKAFFSHDVDLVGVMIQQDAERMLQLREQIKALKGQMARVAKDSAMACQLDTIPGFGLICNAELAGEIGTIERFRKEASLAVYLGMATLDHSSGKSRRSKRPKHVNVRARAAMMTAVDAHRKLCPQSKRYYEKKRAEGKRHNQAIRALGRHLCPVIFKMLKDDRPYWIET

SEQ ID NO: 394261 - protein, 308 aa, unidentified
MTIHHNFIGCDIGKEAVDIFDPRTARFCRIPNTEAQLSAFAKRLDPAGDLVVLEATGHCDRLVRLCLAQAGIAFARVNPKTARRFAEARGRLAKTDRIDARSLSHMGAMFGLSADAPPCPVHERLAALARRRDQLVDARAGERRHLGEAFDPAVRADIEAMIAILGERIAAIESAIDEQMQSGNLAEGARRLASAPGVGKVTALALLAHMPELGTLSPKAAASLAGLAPFNDDSGKRAGRRRIKGGRPRVRKALYMAALGAIRASSRLRTFYLAVKARTGAAKAAIIAVARKLITILNAMQRDKTHFR

SEQ ID NO: 394262 - protein, 350 aa, unidentified
MLYTGLDLHKSFSYITTMDERGEIIGQKKLPSNGEIVEFLKGFEDTMEVAIEATPSWYWLYDCLEEEGFDVRLSHPLRTKAIASAKVKTDKVDSATLAHLLRGNLLPLSYVPEKPVGLNRELLRYRASLVKIQTRVKNKIHSILAKSNVGHNYTDLFGKAGMSFLHSLSLPESYKMALDGYLSVLDSVRQEIKTASKRVQQLAEEDEDAVLLMTIPGVGYYSALLIKSEIGDVKRFPSAKRLCSYAGLVPSTYASGNVCYHGHITKLGSKWLRWILIEAAIHAVKRPGPLRGFYHKVERKKGGKVAKVATARKLLEWTYHILKEGKSFQEVERAVEARGRGEPGNCSGSE

SEQ ID NO: 394263 - protein, 380 aa, unidentified
MSQKVMHIALDVDDKNFTGHGMCVETGEVIAFKCRPVLKKLIEKIKKQVPPGYGIKICYETTYLGFSLARDLIRAGYHCDVIASSLIPTLAGDRIKTDRLDAEKMALYYSNDMLVKVNIPDEDDEVVRQLIRLRKSIKRQITEMKNRLVSQGKIFGVEIPKTTHWNQTYSEKLYAQFNTLEVNLRDLLLFYRDLIDAQCLHLSRVESRITDYAQSSKYKIAHDSLICLRGVKSLTAMTLLAEIGDINRFAHPKKLVSYMGLDIAEYSSGGKERKLGITKAGSSHLRTCIVESQQILARRPSASRCVKKRREGASPDIIKIAIKCDDRMYKRSKHLMAKGKHSNKIKVACAREMVGFIWEVMKYTTRGNQILSTMGDMVRR

SEQ ID NO: 394264 - protein, 343 aa, unidentified
MDYYAGIDVSLEQSSLCVVDATGKIVREAKVASEPEALVIFFQQLGMAVTRIGLEAGPLSQWLHAGLTKAGLETVLLETRQVKAALSAMIVKTDRKDARGIAQLLRMGWFRPVHCKSPPAQETRALLVGRKLLQGKLLDVELSIRGILRGFGLKVGAVSKGRFAARIRELIGGQPMLERVIEPMLRAREALHQEFHTLHRAMLGIVRHDGVCRRLMTVPGVGALVAITFTSAIDDPGRFRRSRAVGAHFGLTPKKYQSGETEVTGGISRVGDPLVRAALYEAAHIMLTRTVRFSGLKRWALEVAKRRGMKRAKVALARKLATVLLRLWTDGSAFRFGQEAAAA

SEQ ID NO: 394265 - protein, 328 aa, unidentified
MTMNPALCVFNHVVAFEVAKDSLVIHVLPTDKQSVAANKPKAIRKVLLAEMRRNAECGLGPLLAVCEATGGYERHVLAICVEFGIAVHKAHGARVRHFARYLGLIAKTDPIDARVLALYGLKTQDLRLYVPPTPEILALRDLKTRRDQVQQMLFAETSRLEHARHASVSRGLKAHIASLRKALAALEAEIAAHVKACETLAHKARLMRTLKGVGPATVAALLAYMPELGAFTKGEAACIAGLAPINNDSGAFQGPRHIEAGRAAVRKTLYMTALVAIQHNPVMRLFADKLRRNGKPSKVVIAAVMRKLIVTLNAILRSGEPWSHAQIA

SEQ ID NO: 394266 - protein, 356 aa, unidentified
MSQNLDSKVAVIGIDIGKNSFHIVGQDRRGALVLCQKWSRGQVEARLANLPPCLIGMEACTGAHHLSRKLQALGHDARLMPAKYVRPYSKGEKNDYRDAEAIAEAVQRPTMKFVATKTADQLDLQALHRVRERLVSQRTGIINQIRAFLLERGIAVRQGLHLLRAELPSILGTRTDVLSLRMLRVIEDLAGDWRRLDERIEDLSGEIDALAHHDKGCERLMTVPGAGPIISSAIVAAIGTGDAFSKGRDFGAWLGLVPKQMSTGDRTILGSISRRGNRYLRKLFVQAAWVVLVKLGPEQWERYGLKSWIEAAKKRLHHNVLAIALANKLARIAWAVLHKGRAFEYVKTNATASRSA

SEQ ID NO: 394267 - protein, 320 aa, unidentified
MTEAVVLQSEFRVLGIDVSKDTLDGCFLPGPVRFVKENTEEGISQISKAIQERGIDLIIVEATGGYEIPFVVALTVQKLPVVIMNPRRIRNFADAIGVLAKTDKIDAEVIARFGETIRPPVRSLPEEKYSLLSQLVVRRRQMVEMLTMERNRFAGSLGAIRKAVEKHIRYLEKGLAGIEKQIGDEIKKSPEWKQKSDLLETVKGVGPVLTSTFLSALPELGTLSKKKIAALVGVCPFNCDSGHMKGKRMIFGGRQDVRNVLYMSALVACRYNPVIKSFYNRLILAGKPAKVALTACMHKLLIILNAIIKNRTPWRCPTPI

SEQ ID NO: 394268 - protein, 367 aa, unidentified
MKKISTAAAKQSRNILQPKLTIGLDLGDRNSWYCMVDEAGQIRLEQRVRTNAKGLQEIFGALPRCRIALETGTHSPWISRLLHGLGHEVIVANARRVRLIGESRKKDDRLDAQTLARLARIDPKLLCPVRHRSAQAQADLTVIRARAGLVRARTALVNTVRGLAKSYGERLRGCNVRNMNPEKAEGLSPELQAALQPLLVALESLSEQIAEYNERIEKLGQESYPQVALLKQIKGVGTLIALTYMLTLEDPHRFRQSRDVGCYLGLQPGRRNSGQSEPQMHISKEGDPYLRTLLVQGAQHILGPFGVDCDLRRWGLKLAERGGKSGKKRAIIATARKLAVLLHRLWVSGEVYEPLHNSNQREMPAAA

SEQ ID NO: 394269 - protein, 391 aa, unidentified
MPKPQQRQPDDLSRSLISLNMDTTLIVVIEMSQSSWLVAGIVPGVEGQPLQKMKPDEAQLLALLYRWRDEASRAGHHVARIAVAFEAGRDGFWLARWLKAHAIDAHVMHASSIAVSREHRRAKTDRLDTELLKRAFLGWLRGERGHCKMVAIPTINVEDAKRPNRERENLVSEENRIVNRMKAALTRLGIRGFNPKLKKAPERLEGLRTPEGEAIPPNTIAELRRDMARRQFVRKQILEIETARQQHHAKGSGDGPHAMVRLLARVIGVGIETADMLVQEVLSRNLRDRRAVARYAGLTGAPDESGAKRREKGLARSGNARVRRGMIQLAWRFLMFQKDSALAQWYRARTENAAGSRKTMVVALARKLLIALWRLVRDGVVPDGVVLRPAQ

SEQ ID NO: 394270 - protein, 357 aa, unidentified
MSIVGGLDIHRKQLTFDWVDEQNDKWERGRIAPADREHLAGWLTRFDPAVTGPVAFAMEGCTGWRYIAEEMDKAGVTAHLAEPAETSARRGRKRRAKTDKADAKLLRELLAQGRLPECYIPPTQVLEWRALLELYQDLRSQHTSWVQRIQAVCFHQGATAPGQAGIVRGDRARLRAIVDEQLSIVGRLQVNTALSVMDVLAEHLDRLRRRLLSTARGVKGARALMHDIYGVGPLSSLALCAWLGGADRFSSSRKAVRFVGLDITVHSSDGKRSPGRLSRQGPEVLRWLLFEAAKTSARACAPGYGYYTQVKERYDANRACLSQARRIVRQSAHILTGLGDDAFTVVAQPAAPTTIAR

SEQ ID NO: 394271 - protein, 415 aa, unidentified
MSPCIEEPALEVIYQCCCGLDVHKRTIAAGVRRLLEDGGMHQETRTFGTMTRDILALADWLAAESVSHAALESTGSYWKPVYNLLEGRFRMVLVNARHVKHVPGRKTNVKDCQWLGQLLQAGLLRGSVIPERPQRELRDLTRHRSQLVGERSRAANRIQKILEDANLKLAAVASDILGASGRDMLRALIRGETDAGEMADLARRQLRSKIPELRPALEGKVTAHHRFMLGELLNHLEYLENRIEAFSRPFAPAIAKVATLPGFDPRSAQNVVAEIGADMEVFPSAPHLASWAGVCPGNNESAGKRKSGKTTKGNRWLRSALSQSAWSAAREKDSYFQAQYRRLAGRRGKKRAIVAVAHSLLTIIYPMLKDASDYRELGCDYLDQRNARSLLPHLLKRIKDMGYQVTLQELSQEAA

SEQ ID NO: 394272 - protein, 424 aa, unidentified
MKVTYQTCCGVDVHKSFLVATIVKTNGGIEPSYQKKRFSTFNNSILEFKQWLLDNDCHDVCMESTGKYWVPVFNLLEDEINVVIANPKWVKAVKGNKDDTKDSKWIGDLFRLGLVKGSYIPCKKVRILREYTRYRYKLVSCRSSEKNRYQNALTVCNVALDSVVSDIFGKSSSSIIDYLLEQSGTSINHEEIASKLLRSLKSKEDAVIESIEGYQMTDAQKYRMRLVRAHMDYITAEINDVDKMIEKMISSNPDFENAVQFLCTIPGVKRDSAITIISEIGTDMSQFSSSKRLCCWAGLTPGSNESAGKKKSVRITRAGVYLKPALVQCAHAAVKSDKSPYYKKKYESLVKRRGKKRAIIAIARMILTAIYQMLSTGEQWNPCDLYKIDMPVALVEKQKAKAIKQAKKLLQREGLLPPDESLAS

SEQ ID NO: 394273 - protein, 309 aa, unidentified
METYVGIDVSKDRLDVHILPQDEAFAVERNGKGLALLVERLRPLLPSLIVVEATGGFESTTAAALAGAGLPLVIVNPAQIRHYAQALGKRAKTDPIDAMVIARFAFDIRPELRALPDEITQFLADLVARRRQIVEMMQAERQREKRATLKRVKKSIARLIAALEKELAELDSEIDDAVRGSPAWREKEDLLASVPGVGQKTARTLIAELPELGSLDRKTVASLVGLAPYTRQSGRWRGRSMIGGGRKTVRSALFIAAMVACRYNPVLKPFYERLVAAGKPKVLAIIAVARKLITILNAILRDKKPWQIA

SEQ ID NO: 394274 - protein, 380 aa, unidentified
MIIGLDVHKDLVYVTRMENDGKITEQYEMKNSEESWNKFVGKYILEMPEIALEASTSGKHVARILSYAGFSVHIADPKKLALIFKSSKKNDKLDSENLAKLLRLNEFPEAYLPSKEYEEMRTLTRHRKYLGEEVVRIKNKVHSILSLNGIKIKATDIFGKKGLSELSKSIERLSYSEKIVINDMLKRIIDINEKSEKIENEMAKIGKDREDVKKLMTIPGINIYIATGIIGEIGDIHRFRNKESVASYAGLVPRQDQSGKNDRKGHITKEGPSILRYLLVLAAQTVIKYSKKMKNKYLSLVKRIGRNRAIVAIARILAETIFTMLKKNVDFEDEIIPLTEKKIKKMIERANSGIGEINIQESIKLISSKGFKSLSTKPFS

SEQ ID NO: 394275 - protein, 330 aa, unidentified
MELDTIGIDLGKTVFHLVGLNRAGEVVVRRKCSRLQLLRFPSKLRVRLIGMESCGGSHFLGRALREQGHEVRLMPAQYVKPYVKTNKNDYIDAEAIAEVVGRANMRFVPIKSDEQPDMQSLQRVRDRWVARRTSVINQIRGLLLERGITFRKGRRHAEACLPGIPEDADNRLSGLLRMLLMKLQDELRQLQSQISEADTLIAKAAKEQEPCQRLMAIPGVGPLTATAVVASIGNGAEFRKGRSFAAWLGLVPKQESTGGKQKLLSISKRGNHYLRRLFVSGARAVLQCRDKQPFSPLSKIFDRALLKFKFAPKQVCVCAVLGITYPHGCD

SEQ ID NO: 394276 - protein, 369 aa, unidentified
MQRKEISFKGQKVFIGIDVHKDSWRVAIAPEVGVVKGHSQKPSAQELLDFLKKYYPDGEYHAVYESGFSGFSTYYALQDVGIDCIIIHAADVPTTQYEETMKTDKVDAAKLVRSLKSGLLTGIYIHKRDDIDARSVVRLRKTVQKQLGSYKSRVKHLLHSNGVTFPERFSTPGSHWSKVFIRWLKEEVALLSATRISLDLLIVQVEAIRKTLLMATRNVRELSRSERYRHGCELLTSIPGVGVNVAMTLLTEIGDINRFHNEKEFASYLGLVPTSHSSGGKVAHGEKTFRGNKYLGPQIVEASWVSIYRDRGLGCAYLNYKKRMKPQEAIVRVARKLSNIIFSVLKTGQKYKPYEWDEQQKHTDLQATS

SEQ ID NO: 394277 - protein, 337 aa, unidentified
MYMGLDVHREFFVASCICDGVVVKRCRMPGTAEAVISLASKEFNGASVRAAYEAGYSGFWLYRRLVAAGIDCIVVHAASIEVSARDTVKTDKRDSLKIAQQLAAGRLRGVRVPTQEQEQRRLLTRTRDQLMNKKRRVMVQIRMRLHYFGRFPESIQRRIKLQDVEDILTGLEGELQRTIGMLRDEWIELAKRIKEIDRLLVEQAKDDPLDAVYRSVPGVGSLISRILSAELGDMSQFRNERALFSFTGLTPSEYSSGGHICRGHISRQGNTRLRHMLVEAAWKAVRKDPVIKEYYIKLSERIGKRKAIVAVARKLVGRIRAALRKNEHYTLDYRAAA

SEQ ID NO: 394278 - protein, 353 aa, unidentified
MSERSKEQITFVGIDLAKRSFHLYGADAAGRQVLSRKLTRKQLVTLVGRLPACTIAMEACGSAHDWARRFRQYGHEVRLIAPQFVKPYVKSNKNDAADAEAICEAVQRPRMRFVAIKSVEQQDIQAIHRMRSLAVDQRRALSNQIRGLLLEYGIEIPKGRASLQRRLPEILEDADNGLSALFRTELHRLDAELRHSNERVAHYDQQIDAIAEAHAPARNLMTIPGIGAKAATALLAALGEDPTLLKNGRALAAWLGLVPRQHSTGGRDRLLGISKRGDVYLRNLLIHGARAVLRHVERKDDAHSRWAQRLKGRRHHNVAVVALANKLARIAYAVLTTGRPYQPDTPSPAGATA

SEQ ID NO: 394279 - protein, 374 aa, unidentified
MQVVHDHCCGLDVHKKTVVACIMVTSPQGVVQKQVRTFSTMTADLLALADWLGASHVTHVAIESTGVFWKPVFNLLEADFAVILVNAQHIKTVPGRKTDVKDSEWIADLLRHGLLKASFIPPQPIRVLREMTRYRTSLIKERAQEVNRLQKTLEGANIKLAAVATDVLGKSGREMIQALIDGETDAQVLADLARGVLRKKLPQLQEALLGRVQPHHRTLLAHILAHIDFLESTLEQLLADIEAQLTPYKEERELLTSIPGIADTTAAIIIAEIGVDMEVFPSDKHLASWAGLCPGNRQSGGKRLSGAITGGNPYLRSVLTESWPGLFPIPKTTTYLPNIIVWPDASDERRRLLLWRDPHSGHHLSCLTDQETVH

SEQ ID NO: 394280 - protein, 359 aa, unidentified
MYSQINEFSFKGKNIYVGIDVHLKSWTATVLSDSLTLKTFRLDPSPEALCTYLFRNYPGANFYSVYEAGFSGYATHRALLRMGINNIVVNPADVPTTGKDKLRKTDAADSAKLAISLRAGQLKPIYIPEEDAQELRSLARLQATITKDQTRIKNRIKGYLRFLGIAIPAPFSGTACWSHAFIDWLRSVSTATPNGKYVLDVYIAQLEEIRQRRLELLRLMRRISKEAPLNAQIELLKSVPGIGDITAMRLLAEIIDINRFKDVNHFAAFIGIVPMCHKSGDDSRDDNGSITSRANRMLRCALIESAWTAVGLDPVLTRSFEDLAKRMKRTSAIVRIARKLVNRIYFVLKHQCPYVTCTN

SEQ ID NO: 394281 - protein, 374 aa, unidentified
MNFIGIDLHTNRFTCCYRDERSSVQEPAKGRTIKTFELDAEGLAAFYRTLTEDTHVLVEATAPTFSFVRLFQDKVKETIIANTYELKQVSLARCNTDKIDADKLCRIMKAQVLSGEPLVSPVTLPPVEIQELRGLFSTYRLFKKQNVQLKNRIHSLLKEQLYGFTQEEIFGKRDRKEIREIAPDSPLHFQVNLLLDRLESAEEDVETLKEKVLRQAAPFMSQIRILTSMKGVSVFIAIAIIADIITVNRFKNSKRFTSYLRSAPSVSNSNTSVNNRGTNKKGRKLSATLLTQSLNHVMNSSLKLRRWYDRLCEYKKPGLVRTGLRRRVLAEIYQMLKKGEYHYGRDAKNHEAKMDQYRRFLEKQENITIFEETA

SEQ ID NO: 394282 - protein, 351 aa, unidentified
MNRADIGSVASEEVFVGVDVHRKSYSVCALRQGVVALKATVPAKPGKLVELLCKRFPGQRVRTVYEAGFSGFVLHRVLDAAGIASIVVDPASVEIAVNDRVKTDMRDSRRLAALLACGRLRGIRIPTVAEETSRLIVRTRQQMVSARTRAGVQFKSRLHQFGLIAVEDSRRVSDVFMQEKIAAVAEGPLRLSLEALYRSWLHFHGEVSRYDALLRSKKEQGVEEKVYRQLPGVGPVTARMLATELGDLRRFGNERALFSFVGLTPTEYSSGESVRRGHISRRGSPMIRWLVVEAAWRAIRVDKALCNFFMRVAQTAGKKRAIVAVARKMLGKIRVCFRLEIPYEKDFGVAV

SEQ ID NO: 394283 - protein, 367 aa, unidentified
MKKISTVQALGNEIFKEQKLTIGVDLGDRWSFYCVLDEAGKIILEQKLPTTPEAIKQTFGRIPRSLIALETGTHSPWVSRLLTELGHELTVAHAQKVQLITKSNRKDDRHDARTLARLVRIDPELLGPVRHRSAQAQIHLTVIRARAELVSARTALVNAARGLVKSYGERLPKCGTQQVSEKLAEGLSAELREVVVPLLTEIESLSERIQEYDERMEKIAKEVYPEVSLLKQVKGVGTQIALTYVLTIEDPYRFAKSREVGCFLGLRPGRRNSGQSEPQKHISKEGDRYLRTTMMVQGAHYILGPFGEDSDLRRWGRKLAERGGKNAKKRAVVAVARKLAVLLHRLWVSGEVYEPLRNSQKAMRAVA

SEQ ID NO: 394284 - protein, 340 aa, unidentified
MEYGAIDLHLKASLIRIVDGGGHVVLDRTIATTRAAVTQVFAGRAPLRVLVESGTESEWVAQTVEACGHEVIVADPNYALMYGHRSRQIKTDRRDVAALVEACRVGIYRAAHRVSAAQREARRVVRIREQLVRMRTQTINQLRAQLRQEGIRLGRGGAETVVRRLDALEVPAALRASLAPLRAMLTTLAPLITAATAEIEARASADPVVRRLLTVPGIGPITAVTYRATLDTWERFGDARAVTAFLGLVPREDSSGTRHRKGAITKAGPGPVRALLVQAAWVVWRQRQGRAALHAWVERLAARRGKRIAVVALARRLARILFAVWRDETEYQAVPIVAAA

SEQ ID NO: 394285 - protein, 370 aa, unidentified
MESIIYVGMDVHKDTYSICCYDPKTDRYLYEHKMKSTTANVLKYLDNVRKQLVDVSFICGYEAGPTGFGLCRDLLKKDIACVVMAPTSLRRSSCHKVKNDKVDARLLAKDLFTHDYSPVHISSQKEESIKEFCRMRRSLMTEVKTAKQILTAFLLRQGKHYEGKTHWTEAHRKWLKELAFDQPYLQEAFEEYIIGLNSLEARLKRVEKRLDEIADDEEVGAKVKKLICFCGIDTLTAVSIVSEVGDFMRFGRAWDFSNFVGLTVGEDSSGQREKKLGITKSGNCYLRRLFIESAKSIKRTNVKFSKSKRLLARQKGNDPKVIAYADKCRYRLKHKMLNLENRGKAANVASTAAARELACFVWGMMTDNIA

SEQ ID NO: 394286 - protein, 514 aa, unidentified
MSEGTAVSPFSRLSPRLLRKHSAWHIRHIPLTQNFHPQPLAPARKADWVHAHCARFRSPYAAQDKPFASGFTNPDQNGGDIMLKINYMSTLFVGIDVSSKSNAVYAMDFEENKYISSSFDNNQPGADKFVTMIAECMQKHKNLDTLLIVLESTSVYSVHISNFLSTSEVLMPYKPYVFCVNPKATSNYRKSYIGMEKTDPTDAYLIADFGRVGRTKKLEPWRGGQFIALKRLTRHRMHLSECITREKTYMVSNLYLKFSELQLLEGDDKPFGSLYGATSSAVLTEFLSPQEIIDMPEEDLLTFLAQKSRNRISDISKTSDLLRKAARDSYRLDKCMYEPLNISLASSFNCIHAYQKEIKLIEQAIEKCINGMNPNALIILRSIPGIGPVWASGILSEIGDITAFHSSDALAKYAGLYWPKGDSGDFTSEDKQMSKAGNPYLRYYLGEAANSVRKHIPEYADFYARKYAEVTKHQHKRALALTSRKFVRLVFGLLAKNQLYTGEKLDTEHNIESN

SEQ ID NO: 394287 - protein, 343 aa, unidentified
MQIRSVGIDLGKTTFHLVALGEGSQVLFKKKFTQKQLITFTANLQTSLIGMEACSGAHFLGRALREQGHDVKLIPAQFVKPFVKSNKNDFLDAEAIAEAVDRRNMRFVPIKTDDQLDLQALHRVRDRLMTRRTSVINQIRAFLLERGVVFAKSPIRLRERMPDVLENADENLTPRMRNLLSWLWEEWKDLEQQLNVLNLEVKQIGSGDAACRRLQQIPGIGPLIATAIVAAIGNGAAFHKGREFAAWMGLVPKQHSTGGKSKLLGISKRGNQYLRKILVHGARSVVLNFKRDHAPIGAWMNALETRVPHNVLVVAVANKLARIAWAVLSSGNDYRANPVQMAA

SEQ ID NO: 394288 - protein, 372 aa, unidentified
MNPLYVGIDVSSKSNVVYLMLPNGDKLSNFELKNSQDGSSQLVKRILSALTSHSLDTVLIGLEATSVYGDNLVYFLREDATLDPFNRKIHVINPKQVNKFKESYNDLPKNDYVDSFVIADCLRFGRINKEVYLGDYRYLALKNLTRARYYAVCNLVKEKQRFMNVLFKKYSTMTQEKVFSDNFSTTALSVYEEFESAEALANMDLQALTDFIMEKGKNRFPDPDSAAKAIQKAARSSYRLPKAVNDSVNQVLSISITSMKALESQIKEFDKAIAAQMELLPNVLTSIPGIGPVFSAGIMAEIGDINRFGNHAQLAKYAGLAWKQHQSEGFEAQTTRLINSGNRLLKYYLCEAAFSLVRCDKEYSDFYHLKYK

SEQ ID NO: 394289 - protein, 352 aa, unidentified
MIIGCDFHPSFQQIAYVEQETGEYEERRLSHRGEAEAFYRSLAGKAVRIGVEATGNDRWFHKLMSELGHELLVGDASAIHASAPREQRTDKRDARHILRLLMENRFPAIWQPSVGNQEQRQLLLHRCRLVRMRTRIKNQLDSIAKNEGLTGSRVWRAKRRQQIEALPLTGWYAERRKDLLALLDEMDKLIEPLDEAVRAAAEQNAEAQLLMTHPGVGPVVSLSYVLILGDWRRFPRGKQVGSYLGLIPAEASSGKHQQQMGHITKQGNTLLRWLLVEAATKAQSKDPSWHRQYVRLSMNKHHGVAKVAIAHKLAVRLYWMLRSGQNYTQIVERGSHAGQSDLAGGCGLRPIN

SEQ ID NO: 394290 - protein, 341 aa, unidentified
MNITRVGIDLAKTVFQVHGVDERGKPVLRKQLRRAQLLEFFANLRRCVIGMEACGSAHYWARKLSSLGHEVKLMAPQLVKPYVKSNKNDRNDAEAICEALGRPNMRFVPIKNPEQQALLGLHRVREGLVAARTAQVNQMRGLLAEFGLIIPKGIAKMRTHVPEILEDGANELPGLMRELLARCYEQFLVLDARVHELEARIVRWHRENETSQRLAKVPGVGPLTASAYFATLGEAQSFKSGRQAAAWLGIVPRQNSSGGKQQLLGISKRGDVYLRKLLIHGARAVLRQLKPEQAHSWLAQLAKRRHHNVAVVALANKNARILWALLAHGREYQHDYVSVRP

SEQ ID NO: 394291 - protein, 402 aa, unidentified
MVSVGIDVSKDKSTVCVLKPYGEVVFSPYEINHVETELSELISRIRLFESEVKIVMEATGAYHFPVLQRLKEAGLFVSIINPLIMKKYVSSTLRKGKTDKLDSIRIANYGLDNWFKLVDHRVAEDVYEELRQLGRHYSHYVTMRIQSKLNMDNLLQRTMPGIKTLLSGKRSEEPTKDKLSDFAEEYWHYNNIKSKSEAQFVSGYAKWAKKKGYHQSETKAKKIYAMALDGIPTLSSNNPSTKMLMLESVKVLREINRTLETILTQMQALSRSLPEYNVVRSMNGVGDVLAPRLIAEIGNVRRFHSGSALIAYAGIDSPPFESGSFIGTKRKISKRGSSLLRKTGYEIMKCLKAIKPNYDNAVYLFMLKKESEGKPKNVAKIAALNKFLRIYYARVKEVYQYI

SEQ ID NO: 394292 - protein, 435 aa, unidentified
MGRAREAVAAQMGASLAAGMGWRPCAMETMHDRCAGIDIGKRSLTVCAITPGPRGEPVRETRSFGTLTSDLLRLADWLADREITAVAMESTGSYWKPIWNLLEDRFELLLANAAHIKAVPGRKTDVRDAEWIADLLRHGLLRASFIPARPDRELRELVRYRTTLVRERASEINRLAKVLEGANIKLGSVSTNLGGVSGRSMLAALSAGVDDAEALADLARGRLRAKREALIEALAGSVGAHQRFLLGTQLRHLVDLDGLIESLDAEIASRLATAGAVIERLATIPGIGRRTAEIIVAEIGLDMARFGSARQLASWAGMCPGNYESAGTSHGGRTRRGSPWLRSTLVSCARSASRTHTYLGAQYRRLAARRGARRAFVAVGHTILGIVYHVIRSGRPFEDLGPTYFDRRDADRVTKRLTRRLEDLGYDVVLRQAHG

SEQ ID NO: 394293 - protein, 373 aa, unidentified
MGIGGFHELIAEHVDDLSEVVVGIETDRGLWVHALTSGGYQVYAINPLAVSRYRDRHNVGGAKSDAGDAKVLADLVRTDRHNHRPVAGDSPDVEGVKVLARAHQNLVWVRTRHTNQLRNALREYYPSALVAFDDLADRDALAVLERAPAPGVGARLTVTQIKAVLKRAGRQRNLDRRAREIQAALRTDQLAAPDVVAAAFAATTKTTVGIVSEINHQLGELETVLAERFSQHPDADIYLSIPGFGDVLGARALGEFGDDPNRYADTKSRRNYAGTSPITVASGKKKAVLARHVRNRRLYDAIDQWAFCSLTQSPGCREFYDQRRANGDLHHQALRALGNRLVGILHGCLRHRALYDEHTAWAHRQTTTKTAAA

SEQ ID NO: 394294 - protein, 309 aa, unidentified
MKQSVVYIGIDVAKAHLDVAWAGTFRRLPNERSGHAVLVRWIKQSATPVQLICEASGGYEQGLLESLEKSEVKVTLVQAVRVRQYARAAGILAKTDQMDAKVLAAFASAMQPPPTPPLCAEQKRLRQYEAQRRHLSRVLVAEQNRLAQLSCAELRTLSRGLISKIKKQIETIDTRIGDLIAQDQTLREKAQKLTAIRGVGVRTAALLLAQMPELGQLNRRQAAALAGLAPFNHDSGSICGKRAIFGGRRALRSGLYMAALSAARFNPILSRFYRRLRTKGKPHKLALTAVMRKLLLALNQTLKPIPSLA

SEQ ID NO: 394295 - protein, 345 aa, unidentified
MPIVGGLDIHRKQITFDYLDTVTGEVRRGQIAPADRGHVRAWLARFAGHGDVAFAVEGCAGWRYVAGELAAAGIAAHLGEPADTAALRGRKRHAKTDKTDARHLRALLAEGRLPECWIPPAQILEYRALLETYHDLRRAHTAWVQRIHAVFFHQGAPPLSEGALRTEPGLAALRAAAAAHLSAAGQQQVATALDMLAATEARLGPLRHQLRQAAAHLTGAKVLAARLYGVGPVTGLALTCWLAGKDRFSSSRKAVRFTGLDITVHSSDRKGPPGRLSRQGPPMLRWALYEAGKTHARTSAPDHGYYATVKDRKNSKRAALSEARKIVRQACHILTELGDDALTAA

SEQ ID NO: 394296 - protein, 342 aa, unidentified
MNRVYVGLDLGSSSFQQVGLTETGRPRFQREFETSESNLIKGFADLRGEIHVHLEAGELAPWAISVITPLVHRVFCSHPQANAWIAKDADKCDRLDAFKLADLLRLNRFKEVHYPREQLRRDFKTLVQHYEELTQQQARLKTKLKARLRMQGVIVRGAEVFSARGRKAVLAQVNSPVVRTAIKQLYAVLDQSIESQTAAESLMMQAAQALPEMKILRTAPGIGPIGACRFSAYVHTPQRFSSTRKLWKYCRLSVSHRSSNGKPLRRPRLDRSGRGALKDVSRKAFEAALRRQDNNGFKRAYHRALETTHDPRHARLTVQRKIVSTLRAMWINQTPYCDELMS

SEQ ID NO: 394297 - protein, 289 aa, unidentified
MGNEKRRFSNDTIGHRELIKWVKQLKVPVQVICESSGGYERAFVQAFAGAGLKISLVQANRVRQFARAAGILAKTDRIDAEVLCAFGKVMGPQAVTAAKLEQEHLRELESQRRHLTHLLVMELNRGARVSDACVQRLNRRLIKQIKNQIEQLDLLIKGHINQSHELSAKAAKLMSISGVGTRTAALLLARLPELGELNRREIAALVGVAPFNRDSGRMCGKRAIYGGRKPVRHGLYMAALVAAHHNPFLRDFYLRLRAAGKPAKLALTATMRKLLIALNSALKTDPTYA

SEQ ID NO: 394298 - protein, 349 aa, unidentified
MALTIVEDARAVTGGVDTHADTHVAAALDRIGGLLGVEEFPATAAGYVRLLGWLGGFGTVALVGIEGTGSYGAGLARHVTAAGIRVVEVDRSDRQDRRRQGKSDPLDAVSAARAAQSGRARGAPKGRDGAVEAIRALMVAKRSARSERTQTINQARSLIVTGPDDLRTRFTGHTVAALVSELAALRPRPGDAVGYATRIALRELGRRGEFLDGQLERLDALIVPLVTARAPSLLALHGVGPDTAALLLIAAGDHPHRLRSEAAWAHLCATAPIPASSGKRTRHRLNPGGNREANHALWRIVITRMSSHAPTRAYVERRSGQGLSKKEIIRCLKRYVAREVYRHLRAAAD

SEQ ID NO: 394299 - protein, 426 aa, unidentified
MNTTTDFAATLGLDWADQKHDLWIRPADGSKAEHVRLEQTPEALHEWVAKARELFANRRIAIALETSRGPVISALMAYDFIVLFPVNPKCLKDYRSAFAVSGAKDDRTDAQLLEEFVRLHRDKLRALEPDTELTRKLAGLVENRRHLVDERTRLVNQIHATLKTYYPLAEALLDGQMNTPMGADFLARWPDLDSLRRANPEGVRSFFYQHNSRSAKKTEERLAALKKAKALTTDPALIVPARHLVLALAGMLRPLHRAVACLDKEIEQAMDQHPDAPLFRSFPGAGPALAPRLLVAFGTNRDRFDQSSEVAQFYGLAPVVVQSGNSKIVHVRYRCPKFGRQTFHENAGCALKKEPWARCYYEQQKERNKGRHHQACRALAYKLVRIYFACWKHRKTYEPDRYLKALETHASPLHRKLENFTAAHCE

SEQ ID NO: 394300 - protein, 471 aa, unidentified
MMEPQEIEDQEHEQVLERVAAVDVAKASGMVCTRVPHQARAGKRRTRVWQVDATTNAVLELGEHLAAEGIEKVTLESTSDYWRIWFYLLEAAGLDVQLVRAQDVKQAPGRPKTDKLDAVWLAKLTERGMLRPSFVPPSEIRQLRDYTRLRTDLTRERTRHYCRLEKLLEDALIKVSAVASKLDTKSVRDMLEAMIAGERDAQVLASLARGRMRSKHDRLVQALTGKFDDHHAELARMLLDQIDALSAQIGTLTTRIGELIAAIPAAQGVDADGTTGPAAGQGEGAPVLPAVDRLDEVTGIGREAAQAIIAEIGLHMSIFPTPGHLVSWAKISPKTVQSGAKNRSGKTGKGNPYLKGVLGEAAAAAGKTDTFLGERYRRLARRRGKLKALVAIARSILVIIWHLLADRATRYQDLGAGYHASRIDKNRKTRNHVRQLEALGYTVALTQAGGVMGPVNWRDAACPGRPPATKW

SEQ ID NO: 394301 - protein, 366 aa, unidentified
MDSVARGSGPIHLGLDVSKNKIAVGILRWDEQVPDTEMLFNDEASVRRLVDRFPDRGQLRTCYEAGPTGFGLHRLLRSMGVACDVIAPALIPKAPGDRVKTDRRDCRRLARLHRAGELVAIRVPSEAEEAVRDLCRARAAVVGDRTRIRHRLSKFLLRHDRVWRETAWTVRHEQWLLGQRFDDAALRATYAHYRAMLTAREAELTALEADLAYWYTHGPFTDAVARLAAYRGVAYVGALTVASEVGDWRRFPAARTFMGFTGLVPSEYSSGEAVRRGHITKAGNTHLRTQLIESAWAYQHHPNLGVTLRRRQEHADAATVARSWSAQQRLCGRFRRLNARKTSRSVVAVAIARELAGFLWAEMTAA

SEQ ID NO: 394302 - protein, 404 aa, unidentified
MSVHVAPVTSSTIVVAVDVGKTSAMLSVTDCARKRVFGPVEFSMTRSGLVATVHRVEAVVVASAQVKVGVEAAGHYHRPVLDYGWPTGWEVLELNPAHVAEQRRVVGRRRIKTDAIDLEAITDLLLAGRGQLITEREVLIGELSAWAGQRSRRVATRSATKNQLLAQLDRAFPGLTLALPDVLGTKIGRLITAEFADPARLCALGVSRLIRFAAARDIQLRRALAERLVTAAREALPTRDGVVARRVLAADLGLLADLDTQIETAERELAALLPASPYATLTSVPGWGVVRVSNYAAALGDPDRWPGPRQIYRASGLSPMQYESAGKRRDGTISREGSVALRRALIDLGLGLWLTEPTAKAYAAELRSRGKPGGIIGCALAHRATRIAFAMVRDHTSYDPSRWA

SEQ ID NO: 394303 - protein, 355 aa, unidentified
MVLHVGLDLSRRRVDVCAIGETGELVGQFRSPVDRDGLFGLSRRLEPYGEQVRAVVESMNGARFVHDELTAYGWRVLVADAQRVKGLAPLACKTDKVDARVLAELSWRDLVPAIWLPTAGVRCERERARYRMHLVKHRTTLKNRVHSTLIAHGHQAPVSDLFGAQGRRLLASLELPDPWAGTTTATLELIDDLDRRIAGIERELQRAGAEHRYVPILMTAPGIGWILAYTIAAEIGEIERFPTAKRLVSYTGLCPRVHQSGEVDLRGRLSKHGPRYLRWALIDAAAHASRHPIYTERYQQIRRRVGRQRGSKVAQIDLARRLAEAIWHMLTKNEPFTPFTPTGATRPLAATTAPH

SEQ ID NO: 394304 - protein, 351 aa, unidentified
MDCNYIGLDVHQASTTIVVINKRGKMIQELVMQTNGQQLRSHIASVKGRKEITLEEGCMSDWLYTLLGPVVDRIVVCDPTENRKILSGKKSDSLDARHLAELLRGGYLKEVFHKTHPMDSLRSCLKTYLVITRDLTRCKNRLKALFRSRGIKTDSSLYHPDNRRYHIDLLDRLAEKERSIYLFEQLDILSGQKERAEQSLISQARKHKGYRLLKSVPGFGPIHAATVLAIVVTPHRFRTKRLFWSYCGLAVVKRSSSDWIEGKEGLELRRREQTLGLNWNRNPVMKYVFKQAALVAIQSTPFKEYYDFHVEKGLNAALARVTVARKLAAVTLCIWKKGVRFDQDQILGNLS

SEQ ID NO: 394305 - protein, 319 aa, unidentified
MSHVAIFGIDVDQARLVVARHGMEGTQTIDNQAAAIRAWLKHTPAGSRIGVESTSRYHETVVRLAQAAGHTVYVLNPRDVRHYAKSIGRRAKTDRVDAVVIARYVAKEADQLHPYVPRTDRQQALHVLLQRRAAVQRARTQLRQALTAHGPAPAFQPLMDAARQALRQIDTHIREHMRQGAQAALFQRLVTIPGIGPVIATCLVHHLQRWPLARVDSWIACTGLDPRPNDSGRKIGVRVLSKRGDATLRQMLYLAAMTFARHPLGKALADRYRQRRFCSTAIYTILARLLARIAWHLAKTSSCFDADRFAKDHHIPLQA

SEQ ID NO: 394306 - protein, 422 aa, unidentified
MKKRTIYSDQSQELLTLFEDAGTNEKVMFVPIDYAKKQHVVMFCNGNGDILRKPFSVRNDSEGMAYLTDQLLRACRHRHIEQNHVFFGCEDPGSYAQNFMNTLRSHGWIVASVNAKEAKKQRDNMQASTDRLDLMGIAKTVLNRRGNCSPAQTGIYLNLRNLVRHRRKLVFLTTELRNRIHTVVDRLFPGFLDEKKSGIIPFSEGSLYLMEERFSARQICRRRRKTLIEALKRSGTPKAQDAAAKLQDYASQVLNPPDEYVITLQISLSQHIKHYRCVKENIEQMQKEIAMWLAKTQGALLTTVRGIGIVLAAGATAEIGDPFQQKPLNNLVSYAGIIPTVKQTGGPDGQTYRGSVRKSSNRILKDYLVQSASHLGLHGPPDLMMDYKRRDAAGQHADFGMARRYLRMAMCLMRNSQIYLPR

SEQ ID NO: 394307 - protein, 429 aa, unidentified
MEEVTDEPLYRDRVCGIDIGKARMAVTIRVPSDKDPARRMAETREFGTTRREVLALADWLRCWQVRAVVMEATGDYWKPVFYRLEAEGLECVLADAKQVKNLPGRPKRDPSDSRWLAQCFERGAVTSCFVATPEFRIIRLHTRYRRDLTGERTREKQRVEKLLESAAIKLSSVVTDLHGVTGRDIMDHLIAGERSPKVLAQLARARARRKIAELEEALEGAEFFTPEHAALLKTMLCRIDSLEAEIATLSEVTERLLAPYEEQLQQAESMPGWGRRSAEDTVAETGVDMTRFRTGAHLVSWAGRSPLDHQSGNRKGHARHKKGNRYLGAVTGETAVAAGKTATREGARYRRIARRRGKAKACVALGNTQLKVYHKLLSSPGMRYEDLGPDYYDTQASARRQVRALQKRARELGYTLIPDLTSCPEVAGA

SEQ ID NO: 394308 - protein, 391 aa, unidentified
MQVDDIDVFIGIDVGKSEHWATALTTAGECLHDRPLPNDEARLRERDGWRESAGRLLVPAPPPATIGALAVAVAQDMGITVGYLPGLSMRRIADLSPGSAKTDQRDAAVIASAARTMPHTLRSITSSDEDAAALSMLTGFDLDLARQVNQVSNRIRGLYTQIHPALEGVLGPWLEHDSVLEVIATWPTPAALRKAGRARIDAKLKANGCRRHAAWAQAIVEALSKQTVTVAGTDAAGVVLPHLARQLIALHTQRADTAAQVEALVEAHPLYPVLTSMPGIGVRTAAVFLAGTLGKTFTTGAHLASYAGLAPVTRRSGSSIRGEHVSHGGNKRLKRAMFLSALASLRTDPVSRAYYEPILALAHRRILTLHAMIRNGTLYNPQPAQPLTTTA

SEQ ID NO: 394309 - protein, 322 aa, unidentified
MSQPNPLCMGIDVSKASLDIAVNRSVESFTASNDINGFDTIVSVLKQHTVSLVLMEATGGLESAVACSLQAEGFDVVVINPRQARDFARAMGYLAKTDRIDAKVLAQMADVINRHPKRERFIRALPDAERQVLSAMVVRRRQLITMLVAERNRLHPAHPQSRKSINIIISALEAELARIDENMNKHIQTYFKALADRLSAIKGVGAMTAATLLAEVPELGKLSRREISALVGVAPVNRDSGTLRGRRTLFGGRAGVRTALYMATLVATRFNPVIKTFYNRLLAAGKPKKVALVACMRKLLTILNAMIRKDEEWNDSYHQITP

SEQ ID NO: 394310 - protein, 354 aa, unidentified
MRIVCALDVHRRQITYAIVDVGSGESSRGRITPATRESVREWLARFDSLHDVHFALEGTTGWRFVAEEVARAGHRAHLADPAETAVKRGRKRRAKTDRADCDLLLRLLSARELPESWIPPAQILELRTRVRLRKTLVDERTAWQQRLQAQLFHQGAPAGVRPRTRAGREALASVELSPAGRELVALALRMIDVIDHELAPLDRALSLYARRQPGCRALITRLYGVGPVTATAIVAELGDARRLGCSDDAVRHCGLDVTVHQSDRKRAPGHLSHEGPELLRWALFEAAQQACRPASPDYDYYRQVARRIDHNRACLSVARKLCRRAFHILRELGAEALAPIEPAPPGEEVTPAAA

SEQ ID NO: 394311 - protein, 464 aa, unidentified
MDRTNKAQQSLKRRHEPVKMELPVELKSVNLNAAGIDIGSRHHFVAVPEGRDKVSVKQFGVFTADLEELAEWLYQCGVTTVAMESTGYYWIPVFELLEGKGFAVKLVDARQTKNVSGRKSDMLDCQWQRELHTVGLLKGAFRPPDEVCVIRGYMRQREMLVQASSMHIQHMQKALTLMNLRLGNVVSDITGVTGMKIIKAIIGGERNPQVLASNRTEQCQHSQKVIAKSLQGNYRAEHLFALQQALELYEVYQEKIKDCERELMKVIQQQPHKTEEEPPPAEQKLRRRDKVRGEVDVRSELYKQTGVDLYRVPGLGPETLLTLRGEVGLDMTSWKTEKLFSSWLGLCPGTRESGGKVLSRRSKRSRSRAAAAFRIAAASLRNSRTALGAFYRRIRARSGEAKAVTATAHKLAKIYYRLLKYGEAYVELGEKAYEERYQQQRVKALKKQAALLGFALVATALSQT

SEQ ID NO: 394312 - protein, 311 aa, unidentified
MYYIGIDVSKKDLSVFDGKDLKFINKEGLTSFKKYLKKKVNFSDLVIIFEPTGVYSLYLKEFCAENNIKAYIVNPKQSHNFTRALGKRSKTDKIDARILYQFHKLIEEKDIKVPQIDQQAKTLASYLTSYEFALKQRISLSHHLESLRDKRLIALMRKDLKRAKKLEDKIFDDIKEYLGKNQDLKEDYQRLSTIPGIGEKAAIALLTLFKTYQGTNRAQITALAGLDPIKRESGTSVKHKVKISKNGKGIYRKILYLPTLCATVHNQKIKIFYQRLLANHKTKKLAVIASMRKILLIAHAMYRDKTEYVAI

SEQ ID NO: 394313 - protein, 346 aa, unidentified
MSYSTTVGVDLAKNVIQISVVSDRGKELSNRSLTRKKFAEFLGKQKPSLVAFESCASAHYWARAAVRHGHEARIIPAKAVAPFRQGHKTDSNDALAVAEAARRPNIKDAPLKTVEQQGLQAIQRARELLIGECIALSNHLRAILLEFGVTIPQGFAALLRALPEALEDGDNELPDLYRPTLHRLYGRMLEVREDIEAMTREVGLLVKDHPICHKLTALEGIGPIGALLLYAALGSGTAFSSGREFAAYLGLTPRQFSSGGKTNIVGLSKTVGNRRLRSVLIQGALAYVYRMKEPKSSKDRWLKDLIERAGPRRAAVALANKNARTAWALVTHGTEYQRRQPLEVAA

SEQ ID NO: 394314 - protein, 371 aa, unidentified
MNHVTSIGLDVHARSVTAVALDSITGEVRSQKFGYSPAEIAGWILQLDSPKAVYESGVTGFHLVRELREMGVDCIVGAVSKMHKPASDRRKKNDRNDAEFLARQLMAHNIVEVFVPDVETEGARNLSRALEDVRDDLTRAKHRLTHLLIRWGYIWNEFNEDGKRRGSWTHAHWEWIRGIELPDAAARESLDYYISEVRHIESQKKAIEKRVAQCASRPRWRDRVEALRCMKGIETVTAFALTVEAGVFSRFDSARAFASWLGLVPSEHSSGERASRGGITKAGNSHLRKLLVEASWHYTRATKERKRSLYDESVPASISNHAAVGVKRLVERRRHLSCELRKRPVVANVATARELACWIWALGRMSEGALA

SEQ ID NO: 394315 - protein, 366 aa, unidentified
MDTIYIGVDFHARQQTVCYLKTETGELVTCELKHQDKEVVRAFYAQFRGRVIVGLEASGYSPWFERLLEKLGCEVWLGHATEIRRRARWRQKNDRRDAELILELMLHDEFPRLHRPAMQSREVLRMLRYRQKLIKIRTMSKNSLQAIALQAGLAKRSRLFTKEGQQQLGAAEMSPVMHWQREHWLQLMEPLNQQLLETMGWFKAQSKGDVCITRLRTHPGIGLLTSLCIVHTLQPVSRFRNTRKVAAYAGFDPVERSSAERKCFLGISKAGSRLLRYLLVEAAQTAVRKDADLKRFYQRLADRRGRPKAKVAAARKLLIRAYIMLRDEIDYAEFRHRAVAARLARRGQGPTNVPEVLIGQPASPEQ

SEQ ID NO: 394316 - protein, 341 aa, unidentified
MTDVSIVGIDLAKQAFQLHAAAPDGSVIFRRKLSRSKFVEVMAKLPRCVVALEACATAHHWGRVLGAQGHEVRLIPPVYVKPFVKRQKNDAADAEAIVEAAQRPTMRTVAVKSVDQQARAMLFRTREMLIGQRTQLANALRGHLAEHGHLVPQGLGNVARFAAIIASAENNLPDLVRDLARLYLDQIAHLSERIKTLEARMAAEAKKSAVAARLRRMPGIGPVTAMAIETFAPAMANFRRGRDFAAWLGLVPRQHSTGGKQRLGRTSKMGQRDIRRLLIVGAMSVVTWKGRNSSPGSWLARMLARKPRMLVAVALANKMARAIWAMITYERDYQEPAAAVC

SEQ ID NO: 394317 - protein, 417 aa, unidentified
MNAITRGYFKAYVGLDWADSKHDICIQAADSSHREFECVPHRVDKIDEWARSLYSRFGGPIAIILELTRGPVVYALQKYDFLELVPVNPSALAGYRKLLHPSGAKDDPSDAELALDLVLRHPDRFQTLAAQSARLRQLHLLVEHRRQLVADKVRLTNRLCAALKQYYPQSLEWFEKLDTVLFCEFIKQWPTLRKAQSARSTTLVRFFNENHMYRQSVQQRRLEGIRKAMPLTLDEALIEPFSLKAQLLAEQLRLVLAAIQQYEQKISELASEHPDYELFASLPGAGASLAPRLLVAFGEERERFQSAGELQMYTGIAPVTERSGQKCWVHWRTQCPRFLRQTIVEWAGHSIRYSFWAEAFYQQQRNKGSHHQAAIRALAFKWLRILYRCWQTRTLYDESKYLKALQMRGSPLVAAAA

SEQ ID NO: 394318 - protein, 489 aa, unidentified
MKAKSKENNKAVRKVKKAIQPATQPQWHQMNRKQRRELTRTIQSEEISLEVVHPDAAGIDIGNEVHYVSVPPSRDNQSVRHFACTTAELKAMAAWLKQCGIRTVAMQSTGVYWIAVFDILEEAGFEVFLVNARDTKNLPGRKSDVQESQWLMKLHTYGLLRNSFRPGQEIRRLRTYWRQRNDLVRSASRYILRMQKALTQMNVQLANVLTDISGMTGQAIIKAILAGEREPRELAAYRDCRVKATAEEIAAHLEGNWQEDLLFVLKQEQDGYEFSQKQMIECDRQIEQYLAKMEDRSQGTDLPAETRKTRLRKAKKGNAPQFELRQELFRMTGTDLTQIDGVDVMTATTILSEVGWDMSKWRTENHFVSWLRLCPDNKISGAKIIGKGRLPTNNRATNALKMAASSLRLSNTYLGAQFRRLRTKLGAPVAIKAMAAKLARLVYRMLRFGLEFIDRGAEFYEAQMHDMQIRHLKWKAAKLDFQLSEIPAA

SEQ ID NO: 394319 - protein, 445 aa, unidentified
MQKRKSALRLTYPNAAGIDVGSESHFVAVPPDRDDEPVREFRSFTEDLHHMAEWLSSCGVDTVAMESTGVYWIPLFELLESKGFTVYLVNARHVKNVSGRKSDVLDCQWLQQLMSYGLLSGAFRPADEICALRAVSRQREMLITYQSRHVQHMQKALTQMNIQLANVIADIVGETGQKIVRAIIAGERDPQKLARMKNYRIKASEEEIVKSLQGNWRQEHLFALKQAVALFDAYSEQLLQCDLQLEQMLGELKKYDSEPIKGRSRRKNDPQFDLRTYLVRMCGVDLTRIDGIEVTTALKVISEVGPNLSRFPSVKHFTSWLCLCPGTKISGGKKLSGKSRSGANRAAQALRLAAAALRKSKSALGAYYRRLCSRLDKAKAITAVAHKLARLIYTMLTRGTEYVDKGQHYYEERYRQRVVHNLSKKAAAMGFVLTPVQEKTMEMQS

SEQ ID NO: 394320 - protein, 321 aa, unidentified
MTYVGIDVSKVTFVVAYSSVKTNKTRTFKNTVNGVHEFVQTISASEHNCVLEATGNYSALLVYLLSEAGITISLENPLKIKNFARVMLTVTKTDEIDARLIALYGEKMQPAPYKLRSDAILVLKQKRTVLRQLKKQLVATRNLKGSMEVLPFFDPKCKKTIEKTITFLEKQIKEMEEELASLAQGEYKKQMDLLTSIKGIGVTLAAPLIVATGRFSYFDNAKQLTRYLGLSPTYQQSGTSVNVKGHINRNGDSSLRSQLYVAAFSSLRCNTECKACFDRLRSNGKPGKVVVIAVANKLVRQAFAVVTQGKPYVDGFKSEKQ

SEQ ID NO: 394321 - protein, 357 aa, unidentified
MPTLAERVDFVLGVDTHKHTHTAAVVTPSGGLVVHISVSADADGYDRLLAFAREHATGRRIWAIEGTGSFGAGLTTHLLEHAEWVVEIDRPKRPARRNGAKTDELDAVRAAREALSREHLAQPRRRGDREALRVLLATRKEVVQTRTRGINHLKALIINAPEAMRAELRPFKTGALIVHCAALQTCSAPSSEQAATVLTLRLTARRIQALEIEAALLEAELEPLVQALAPGLRAEFGVGPISAAQIVCAWSHAGRLRSEAAFAALGGVAPIPASSGQVQRHRLNRSGDRQLNCALHTIVICRLARHAETQAYAARRAAEGKSSREITRCLKRHLARRLFKLLEAGVRQNRSDLELAA

SEQ ID NO: 394322 - protein, 403 aa, unidentified
MKYTVGLDWGCYAHAVCVVDDTGAVRTRFEPEHTAAGLADALRRLAKIAPPESMPIAIERPTGLLIDTLVAAGHPIVPIHPNVVKACRPRYSAAGAKSDPGDAYLLADVLRTDGHRFEPLKPASDAVRALRVRVRTRDHLLAERIALSNQLRALLERFWPGAAGVFSDLHSPIALAFVRRYPTPSSAARLGVKRMQGFIDAQHYSGKRSAAELLERLRAAPAGCVGEAEASALGELVTALAEVLSVLVERTARITRDIERDVQGIATGKLLMSLPRAGRLNAAQILAELGEDPARFATEARLAAEAGVAPVTYASGKSRGVTFRYACNKRLRRALTGWANNTRFSSPWAADVYARARARGKSHPHAVRILARAWLRVVWHCWRSGTDYDPARHGAAAALPDPA

SEQ ID NO: 394323 - protein, 338 aa, unidentified
MDYYIGLDVSLSTTFISIVDEKGKIIEEQNMTTDSDVIADFLNKKGLSYKKIGIESGQLSISLCKKLLSKGLNVICVDARHMAAALSARINKNDKNDARGIAQMMRTGLYKEVLVKSDEACRVKILLGSRRQLVRVRQQLNGTIRGLLKIHGIKIGPRSDRNIFNERIRQEIKGLDNISRSSIEELIINVESLEKSLAQLNKLATELCKKDEDCRLLTTVPGVGEITALTYKATIDDAARFNKSEVVGAYIGLSPKQYSSGEIDRRGSISKMGPKECRTMLYEAAQSIITVSKRNSKLKSWGLKLAKKKGTKKAIVAVARKLGVIMHKMLVDRKEFVY

SEQ ID NO: 394324 - protein, 494 aa, unidentified
MVGLPADADYPLVCEPVYEPGVGASTWKGHALLLRARRSEFRFPRPMPPGSPPLECWIGWRTNELNNEPEIVLDDEHELVIERVAAIDVAKASGKVCMRMPHPSRPDRRMSKVRDVDATTRAVTELANDLLGEGIERVTVESTSDYWRIWFYLLEAAGLRVQLVNARDVKNVPGRPKTDKLDAVWLAKLTEKGLLRPSFVPPAPIRQLRDYTRFRVDLTRERARCWQRMEKLLEDALIKVSAVVSRMDSMSVRDMLEALIAGERDPRRLAGLARGKMRPKYKALVEALSGRFDEHHAELARMLLDQIDALGAQISTLTIRDGDGEVELMVTGLDAAERLAEITGIGPVSAQVIIAEIGLDMARFPTAAHLVSWAKLSPRTIQSGAIQRSGKAGKGNPYLKGALGEAAAVAARTDTFLGERYRRIVKRRGKLKALVAVARSILVIVWNLLSDPTARFHDLGPDYYTRRIDTERRARNHLAQLAALGYRVTVEPAA

SEQ ID NO: 394325 - protein, 436 aa, unidentified
MASHCQFYNYKFQEVILLSFKILKFKCCGLDVHKTWIYACIGITDSNNRTEYKQARFSSFTKGLNELCDWLAKYNCTDVCMESTGKYWIPVFNILEQHNLWVTLSHPKYTKPMKGNKTDRKDAKWICDLYMCGMVKPSFIPPADIRELRDLVRYRYKLTCMITGEKNRAQNCLTVSNLKLDDVFSDVFGKSSRSITEQILQHPGEKFDVAPFVHGRCKTPIEEIQAAVDGAISKEQAVKLRQCLDHIDELNKHISELEQEILRLSDKYEAALNLIRTVPGFDKNPLTAIQVLSEIGGDMSVFPTAKHLVSWAGCCPRNDQSNQKIKSTRISRAGSYFKPVLVQVANALIKSKKHLEFTNRYKRIKARRGHKKAIIAICRMILTAIWHILSDLKPYTPEGFLESHPVKEGKVLSSSQALNFFKQRGYIIKDEPLSVS

SEQ ID NO: 394326 - protein, 379 aa, unidentified
MPADNIVYVSIELSVSSWLVAARLPGVEKSRLHRLEGGDATALLKTIADLQLKASAKLGCSADVACCFEAGRDGFWLHRLLTANGISAYILEPTSILVNRRARRAKTDRLDAEGMLRVLVTWLAGDRQVCSMVRVPTPDEEDAKRPHREREQLVHDKQRIENRIEALLFTQGIRGRPSLRSWERDVAALRTGDGRALPPLLQAELNRLRRRLVLVLELIRELEDNRARAMEEAEVADKMIGKITALQRIRGIGENFAAVLALEVFYRSFDNRRQLASYVGITPIPYQSGGMDRDRSISRAGNPRARTTMVQLAWLWLRYQPDSALAIWFRERVGTLQGRTRRIAIVAMARKLLIALWRYVETGVVPDGVALRTDSVARA

SEQ ID NO: 394327 - protein, 324 aa, unidentified
MAKRTTICAGIDTGKRKLDVALDGGSAQLQVDNTAEGHKALLDWLRCHRVKRIGIEASGGYEQVVVAELRRKRFVVVVFQPAQVRAYAKFQLQRAKNDKIDATLIAACTAAVKKIHAPPDARLLPFAEQLTMMDQIKEDIARFKNRLETCRNPRIQQAWKEDIARLEKREKIELKALVAAIREHRDLADRLELIYSVGGIGMPTAVAILIRMPEVGQFPREQASALAGLAPYDDDSGEHAGARHIDGGRKRLRRALYAAALPASFRWNPQLIALYKRLIAAGKGHKRALIACARKLLIFVNTVGARGTPWQNQPPPCAAMTMTG

SEQ ID NO: 394328 - protein, 438 aa, unidentified
MATNLINLNAAGIDISSREHVVAVPEDRAKESVRTFQGFTRNLHELSKWLKQCNVETIAMESTGVYWYDLYTILLDYGFEVYLVNAYHVKNVPGRKSDVSDARWLQELHTFGLLRSSFQPDNLTRSLRNYVRQRKNIIRQMTKETQRMQKALEMMNIKLNLVIRDLTGKTGTAIITKILEGERDAKVLSQYRDARIKASRETLIKSLEGNWRSEQIFNLQIAYEHYHFLQKQLDKCDSESKKVIIKMAKSTNQKKQVTKIRKSKNNPKFNVSQYLYDALGVEITKVYGLKQITALTVFSETGLNLKEKFPTEKQFLSWLNVVPNNKITGGKVISSKVKRKKNKAGQAFREAASALWKAQNPIGDYLRRKKAKSGGRKAVVSTARKIAAIYYKMVTEKVEFNPDHLIKNKEEYLLKKLKQLEKDKKRTERLLIDYQSVM

SEQ ID NO: 394329 - protein, 282 aa, unidentified
MKYYSSTTRFNCGIDLHARQMYVCLMDRHGRKLVHTNIKNNDFDYFLKLVAPYRHDLTVCCECMFGWYWLADACHAAGLTFVLAHALYLKCIHGGKNKNDRIDSEKLAHLLRSNLIPPSYVYPAEKRPLRALLRQRIFYVWSRAQLLARIHSHQLAHNRFTPRQTRRRDREPWASELLSSEDHPLRQLALQNDLAMIRHYDAQITAIEEQLHNLTQQRSWREYALLQTVPGIGEHLGMTILYEIGDIERFPTVKDFLSYCRLVKGTVASAGKIKGLRGKAEP

SEQ ID NO: 394330 - protein, 314 aa, unidentified
MNIQVIVVGIDVSKDWLDVAIGSESLRVTNESAGIQELLERLREVGAQSVVMEATGGYETQAASAIAGAGLRLAVVNPRQVRDFAKSTGRLAKNDRIDAQVLAAFGAAVQTKITRIPDEQMLDLQALIARRGQLVGMRVQELNRLGQMKGAMRKQIKAHIEWLDKAINEVNTDLTARLRTSDAWREKDELYRSMKGIGPITSGTLMASLPELGALDRREIAALVGVAPFNRDSGTWRGRRSIWGGRAQVRHILYMAVIAAIRHNPVIKSFYHRLIARGKPHKVAMVACMRKMLTILNAMARSNTPWTPALVTGN

SEQ ID NO: 394331 - protein, 337 aa, unidentified
MNSIGIDLHKASISVCVMSPDRQVLARQRMLCSDPVAIVAFLERWSPFQAVIEATASYEWLFQLLEPLAHRVLLAHPKKLRIIAESARKSDRLDAQVLAEFLALDMIPSAFRPTPRQRQHRRLVRHRSYLNGRITSLCSKIRAILADYNADRRDLFTPSGLKYLARVKVSDADRFVLDQLVAERQSLRDQLAALNQQLREFAKTAPVAEAEARAVVQSIPYVGPVTVDVVISELGDIRRFRSQKRVAAYAGLVPGQRESGGRKRELSISKEGSPLLRWAMIQTAWRLVQRTQRWRNIFEALAHRRGKKRAIVAVARRLLCMMVALMQTGQGYRHAMT

SEQ ID NO: 394332 - protein, 358 aa, unidentified
MQRNKISFKGQKIFIGIDVHKRNWDVAIAPEVGNVKRHTQKASAKELFDFLKKHYPDGDYLAVYESGFSGYSTYYALKEVGIECMVIHAADVPTTQYEEVMKTDRVDSVKLVRSLKAGLLKGIYIREKENIDDRSVVRIRKTIQKQLSGYKARVKHMLHCNGVLLPERFEKPGSHWSKAFIRWLKEDVRLLSSTRNSLDLLIRQVETIRMTLLEATKMMRLLSQTERYKRKFDLLMTVPGIGVAVSMCILTEVYDVKRFHNENEFAAYLGLVPISHSSGDKIAHGEMTFRGNKQLGPMIIEAAWITICKDAGLGSLYLRYKERMKPQEAIVRIARKLSNIIFAILKNEKEYVPYHTGK

SEQ ID NO: 394333 - protein, 412 aa, unidentified
MKRVSRRVGIDWGSESHQVCRIDGEEQPKQRAFPHTREGLSALVAFVVEGEIDPEQVAIAIEVNHGAVIEALLAKGLRAYSINPKVLDRLRDRFSPAGAKDDRRDAFVLASCVESDAHVFRRIEVGNEENTRLQAATRLREDLKSDLRANANRLWDALREYRPALLALCPGADEPWLWVLIEKAPSPSEGAKLTRASIGAVLKKHRIRRLTAEEVRTVLRGDILPLSSIYIESHVARVLVLIARLKLAQAQIATIERQIQTALAERVKSEEQTERRDLTILLSLPGVGPFTVATALGESGDAFERRDYNALRSASGAAPVTKQSGGTRHVVMRQVCQPRLRVALHISALQAIRIDPKFHDLYVRARARGQSVGRAIRNIVDRLLFLAVQLLRKNQLYDIELRQLAPEVVAAS

SEQ ID NO: 394334 - protein, 407 aa, unidentified
MDLQHPKCAGLDVHQHTVVACARVVAGSTVTHERRTFGTTTAELLALSDWLTAHDCTHVAMESTGVYWKPIWQVLEGQFALVLANARHIRNIPGRKSDVNDATWIADLLAHGLIRGSFVPPAPVQELRDLTRTRKQLVREITQHTLRIQKTLETANLKLTGLLSNILGLSGRAILHALVAGETDPERLADLVQGRLKASRAALVAALHGRLTAHHRFLLQLHLTQVDALEQAVHDVEERLGHALVPFRTALDRLITMPGVSETVARVVVAEIGFDMARFPTAGHLVSWAGLCPRLDESAGKRLSTRTRPSNPWLKTTLVQAAWAAARTKNTYLRAQFLRLKSRRGPKKAILAVASSMLIAAYHMLKHDLDYRDLGADHFDRRDKTKLAHRLLQRLQELGLTVEVRAA

SEQ ID NO: 394335 - protein, 336 aa, unidentified
MQHVAIDLGGTKSQICIRKKDETIVREVLWETRHLGRFLKDQEHSRVIVETCTEAFGVADQALALGHEVRVVPASLVRSLGIGSRSTKTDKRDARILSEVSCRIDLPSVHIPSEVSRRRKSMCGMRDRLVGARTQLINCVRGWLRGQTVRLRRGATASFPKRVRAAIPEIPIFVERLLLSIEELTSQIVGANKELAQLVKTDPLLTRLTTCPGVGPVTAIRFVGAIDDVGRFPNAHKLEAYLGLTPGEKQSSNKQHRLGITKAGSSEARQALTQAAWATRRCKTIEPIVLWSLEIEKRRGKFVAIIATARKLAGILFAMWRDGTTYKSSLSAATQT

SEQ ID NO: 394336 - protein, 315 aa, unidentified
MYHNFIDIDISKNDFVVAIHGKKKTFKYLNNLTGFDELLSDHPILKDKSFVVVETTGGYEKALLEYLITKNIVVHRANTRIVKHFIRSTGQLGKSDNIDAFGLAKYGYERHRDLEFYQPNDDKMQKLIKYILRKQDIKKQLAAEKNRYQAPDQKYTKDSHQRMIEFYKQEIMIIESLINELVDDCQYLAKARDLLVKEVTGLGNATATSLLALMPELGNLNRKQVASLAGVAPYPYESGKKVGYRKTYGGRADLKPILFMSALTAARSKGKLGIFYRDLVEKGKKKMVALVAVMRKIIVIANAKIRDLKRDLKIL

SEQ ID NO: 394337 - protein, 361 aa, unidentified
MERTVQGRGNGEEHWVGLDVSKATFDAALALSDQRFPSTPVRALPWKAFPRTREGVAAFLAWLNEQVPKAKVRVIMEATGKYSVELTTWLLARRPTLRPAIENPKNTKAFIDSLNQRNRTDGLDARGLAFYGVERRPAPYEPLSKARQELRELSRCRDRLVAQRTALKNRLREKSSSKIVRRMQTRQRRQLDEDIAKLEAEMKRVINEDEDFKRDFELLNTIVGVGPITAMTILAEIGDLRRFERARQLTAYAGVTPRVIESGTSVRGKTRMCKRGNERVRHALYLSAMATLNTKGPNSLSIVHQRLCEEGKEGKAALGAVMRKQLTVMRAVLISGKPYDPAFRGCGKPSGDPARERTISS

SEQ ID NO: 394338 - protein, 424 aa, unidentified
MKVTYQTCCGVDVHKSFLVATIVKTTGGIEPSYQKKRFSTFNNSILEFKQWLLDNHCHDVCMESTGKYWVPVFNLLEDKINVVIANPKWVKAVKGNKDDTKDSKWIGDLFRLGLVRGSYIPCKKIRILREFTRYRYKLVSCRSSEKNRYQNALTVCNVALDSVVSDIFGKSSTSIIDYLLQQSDTSINHEEIASKLLRSLKSKEDSVIESIEGYQMTDSQKYRMCLVRAHMNYIIAEINDVDSMIENLISSDPDYENAIQFLSTIPGVKRDSAITIISEISIDMSQFSSSKRLCCWAGLTPGSNESAGKKKSVRITRAGVYLKPALIQCAHAAVKSDKSPYRKKKYESLAKRRDKKRAIIAIARMILTAIYQMLSTGEVWNPSDLYKIDMPIPLVEKQKAKAIKQAKPCLPICNTVNHKWKILL

SEQ ID NO: 394339 - protein, 332 aa, unidentified
MQTVQQIFVGLDVSKDELVSAHPNKNTGSGWSKAKIINEVAMIKKWLMEVGVANKHFVLEHTGNYSQRLIHCLDELGASFSVVNPAQSRAMAKVLMKTSKTDDQDAQTLSRLGQNLLTKPYQMPPKAKRMRKEAFNALCALQKQERQLQNQLHAVEFLVDPNPAVLEAFNSVLTVVKTQIKHLQTQLRPEVDQVQEKQLVERIRSIKGVGKATAEAVVALFGNLSAFDSAKAFTKFIGLAPSEFTSGKSVRGRSFITKKGNAKIRALLFNCARSAMNYNTFCKALYHRIIAKGKSGSIALTAVMHKLARQIFGVVKSGVDFDPKFTIQKKCV

SEQ ID NO: 394340 - protein, 440 aa, unidentified
MAAGFSRLWLLVGYSGKFFFLTGYKEPGYMGKVAQGAPGLLLYSRRAVMIIVGIDVASEKHDYFMLRKETGEVFSSSAITIPNNEAGYKKLHTDIQTFCGAMGDSKVRIGLESTGIYHTNITAFLLEQNYETMMINPILTNMTRKVSKVHTPKNDNLDAQTICKYLVDNESKFAPYTPTLYHIQSLKTLSRKRFYIVEDLRKAKLAVSNLIQLIFPEFKMLFSNIYGDSALSILKAYSSTQRLAKAHATKVAALLHGRCKCTADQLIEAAKHTVGLKYDCYSFELQDAIEELEHIQRRVDNYDTQIRHYVDELCPNLLSIPGVGYITAGLIAGEIGNINRFHSTDSLVSFSGVDCTVYESGKYKAQHCIPSKRGSKYLRYALFQVSRVIWQWDPIFREYYNKKASEGKHYYVILGHIQKKVIRVIYSVMKSGVNYVTPAI

SEQ ID NO: 394341 - protein, 359 aa, unidentified
MGWTVPHPAVKLIAPTKEVVMANVAVLGIDIAKNVFQLHGVDADGQVVLRRRVMRDQLLQVTEAIPPCLIGIEACTGAFHWQRHFEAQGHTVKIIAPQYVKPFLKGQKNDGNDAQAICIAVQQPHMRFVPKKSIIQQDIQGLHRARQRLVNHRVALISQMRGLLLERGVAIVKSASIAQRTIPEIISNPRIDITELTRDIIGTLHAFLLQINEKIRYFDKQIEAVFRESEVCQRIAKIRGVGPKTATAVVAAVGDGADFKNGRHLAAWMGLVPRQHSSGDRRVLLGISKRGSQHLRTLLVHGGRSVVRTAQRKSDPASEWVNELRERRGYNRAAVAVANKNARVIWALLHHGGEYRANP

SEQ ID NO: 394342 - protein, 397 aa, unidentified
MSAVVGIDVGAYKHVAAVCPEGGSEAERKVFRFTSNRAGFRQLDDWLGCQGEVARVVVEASGHYYWPLASHLHRGGYPVAVVNPLKAKYFAKSRMQRSKSDPADARTLAVLGMRDQPRTQDPLLGAEAREAARFWGNLVREQGQIRQRLQRLVEIGFPELKECFDDPTCETALAVLREAPTARSAVRRHLSSLAGAMRPGGKRRLGIGRAGKLQAMAAETVAPPELDQQVAFEVKLLIQQHDLLAKQIELAEHRVAAVLDSELARRLQTIPGVGAALAATFISEIGDIWRFDDFDQLAAYAGVHPMEKSSGRKGQNPETSWHMAKTGNAYLRSAAYVLAVVGIQHNPIIKAHYQRKREQGKKPMVAVGHCMSKALAIVWGVWRSGGVFDPTKGGLGS

SEQ ID NO: 394343 - protein, 350 aa, unidentified
MQTIYIGVDFHARQQTICYLTTDSGELLFHQLKHEDKTLVRAFYAQFNGHVIVGLEASGYSPWFERLLEELGCEIWLGHATEIRRRARWRHKNDRRDAELILDLMVHNEFPRLYLPPLQSREVLRMLRYRQKLIKMRTIGKNSLQALALQAGLAKGPHLFTKAGLQELRSATMSPAMQWQCEQWLQLLEPLNERLLETMRWLQQQSQADQRISRLRTHPGVGLLTALCLVHSLEPVSRFASTRKVTAYAGLDPVERSSAERQRFLGISKGGSRVLRFLLVEAAHTAIRREADLRRYYQRLAARRGRPKAKVAVSRKLLIRAYIMLRDEIDYAEFQRRAVPARSAPPAHGP

SEQ ID NO: 394344 - protein, 357 aa, unidentified
MPSITPEEAAIFDIAGGVDTHQDTHTAAVIDLVGRVLGTQQFPATAAGYAALLAWMRGFGQRLRVGVEGTGAYGAGLARLLRDEAVDVIEVDRPDRKTRRFQGKSDPIDAIAAAKTALAGERTGTPKQRDGRVEALRNLRVARRSAVDQRADAQRQIKALIVTAPDELRARLRGLAVKDLITTCANLRPDRADAATPATATRIALRSLARRHQQLTTEIADLDELLEPLVAAINPGLLAANGVGADVAGQFLVTAGENHDRLISEAAFAMLCGAAPIPASSGKTNRHRLNRGGDRQANKALYRVALCRLRWDPHTRAYMERRTKDGLSKKEIIRCLKRYIARELYQLIAPNDLETAA

SEQ ID NO: 394345 - protein, 349 aa, unidentified
MAMTIVEAPPGITGGVDTHLDKHVAAALDPLGRLVGTESFDADAAGYKALLVWLEDFGEVTKVGVEGTGSYGVGLSRFLRRKGIEVVEVNRPNRQSRRNQGKTDSLDAVEAARAAISGRASGVGKTKDGPVEAIRVLVVAKRSARQARVKAIVQMRHLGFTAPDQLHSRLKGLSVTALVAEGAKLRGAKSADTVTAATKASLSSLAHRIQGLDLEIAELDEKIESLLLATAPDLMARFGVGPDTAASLLVAAGDNPERLHSEAAWAHLCGVSPVPADSGKNAGHLRRHTGGDRQANSALWRIAMVRIAHDPETTQYFERRVKEGRTKRDVIRILQRYIAREVYRYLPRG

SEQ ID NO: 394346 - protein, 423 aa, unidentified
MAYRIAGIDVHKKKLAVVVADVEVEEEYEFERRWYGSVPQQLQLLCEWLIEQQVDEVVMESTAQYWKPVWGALERCWKPICEKREGAGRMSGSLHLAQALSNRGRRGRKRDFRDAERLVKRLVSQELNLSFVPDTEQRLWRTLTHTRYQRTREKVRLQNQLEALLEEAHIKLSSLVSDLLGASARRMLKALAEGETNPATLATLGDRRLRATPAELHDALGACTELNPVYRRLVKMTLEELHLIEEQIGQIDQDMASLLREHQDAVQRLAEVPGLGVNSAQMIIAEVGAKAAAFASAKHLSSWVGASPGEEESAGVNRSKRSPKGNRQMRRVLNQAANAAAKHKGSIFEIVYRRLVLRLGHYKTIGAIAHRLCQLVWIILHKGVRYEERGPAVREKSKRARTVRMIRTLRTLGYRVEPLENPA

SEQ ID NO: 394347 - protein, 389 aa, unidentified
MYFCGIDIAKKKHDAVIVDGEGNVLGKPISITNTAAGFEELLTRLESLDQNVLIGLEATGHYWLALYERLSEAGFKNVVLNPLQIAAYRRSGIRKVKNDRKDAWWIADYLRIANLRPTDRQLPILLKLRELTRFRYALMGQVGDLKRKVLSILDRVFPEYETLFSDVFIKSSRALLKEAVTAEEIASFDLSELTTILKTNSQGRFGQEKASRIQDLARQSVGVGFLTDAVYLEMRCLLEQLDLLLSQIETLENAIDEMMDQIPQFITSIPGVGKVTGSAILAEIGDINRFESSEKLVAFAGIDPTVYETGQFIAKRTRMSKRGSPHLRYALWQAASMAIQYDPELKAYYQAKRAEGKHHGTALGAVCNKLISRIYIILKEQRPYIVRET

SEQ ID NO: 394348 - protein, 340 aa, unidentified
MPLYVGLDVSQKETEICVVDEEGRRIWRGRCLSQPESITEALRRHAPEPARVGMETGPLAIWLWHSLRALGVPVDCLHARHVAAALSLQVNKTDANDAHGIAQVVRAGWYRAVAVKSLQSCRVRAVLSARSQLVSMRTGLYNQIRGLLKTFGVVLAPGKGATFEAAVLAGCPTDPLVRSAIAALLAAWRVAGERKSALELQLVRLARRSDACRRMVTVPGVGAITALTFATAIDDPERFRRSSDVGAYLGLTPKRYQSGEVDLAGRISKAGDRAARSLLFEAANALMTRVRHESSLRTWGLKLSAKIGSRRAKTAVARKLAVILHRIWLDETEFDPAPAA

SEQ ID NO: 394349 - protein, 405 aa, unidentified
MRRVIGIDVHRTFGEVVFWEDGRLRHAGGIDMTRTALEGFGKTLLASDEVVLEATGNSMAVSRVLAPFVARVTIANPLQVKAIAQAHVKTDKIDAGTLASLQAAGYLPQIWTPDAATERKRRMVARRYQVVRHRTRLKNEVHSILHAHLIPKCPHADLFNARGRAWLAAQQLPDDERAAIDRHVRELDRLAEDLALLDREIAQDAIEDSAVNRLMTITGVNLAVAAGIMAAIGDISRFNSPQKLVSYFGLNPRVRQSGLGAAHHGRISKIGRSHARAMLVEAAWAAAKAPGPLHAFFVRIRARRGHQIAAVAVARKLTVLCWHLLTKAEDYLWARPALVANKTRAMQLQAGHPQQKGSRRGPAYAYNIKALRDREMLIAAQAEQSYERFVSQWKPRRPKTGARAP

SEQ ID NO: 394350 - protein, 425 aa, unidentified
MHFKWNNKINQVTENTLVVGMDIAKHIHYACFVDERGRVIEKAFAVHQSKEGFENLYEKILQTMKEAKKTEVIIGIEPTGHYWMNLAYFLDQYGIPLVMVNPMHVRRSKELDDNLPTKHDKKDALVIARLLKDGRFSYPRILKDIEAELRIGSTLRSKLTEDLASIKNRIIRWLDRYFPEFTQVFPNFGKMALATLEMTPLPKDIKEKTAEELVFLYRQVKGMRAPQLPKAKLLIEAAKNSIGLTEGTQMAQHEIATLLRQYRLLETEIETVNNQLAEMAQTTIEYEILASVPGLGDATIVDLLSEVGSFSLYENPRQLIKLAGLTLRESSSGQHKGQKHISKRGRKKLRNTLFKVIVPLIRHNEAFKKLHEYYTTRQQNPLRGKQSMVILSGKLLKVLHGICKKKVFFNEQHMMKDLYCLVEAA

SEQ ID NO: 394351 - protein, 366 aa, unidentified
MNQSSTVYVGMDVHKDSIDVAIADAKEARLFGRIGGEAAALDRAIRKLRAVHCKPVFVYEAGPCGFWIYRRLRAQGLRCMVVSPSMTPRRAGDRVKTDRRDALQLARLARAGELAPIYVPDHRDEAIRDLVRAREDAVNMQRQARQRLQALLLRNEIRYVGKTAWTAAHRRWIAHLKLPDPAQQIAFEEYVAAVEEAGARLERLGAAIAAQLEPWRWRPLVEALQALRGISAIHAVRIVAELGDLTRFDSPRKLMGYLGMIPSEDSSGRRRRQGRITKAGNSSARRALIEAAWAYAHPARVSWPIARRQTGLAKRVTDLAWRAQLRLCARFKRLAARGLNRNKIVVAIARELSGFVWAIAQDIKPL

SEQ ID NO: 394352 - protein, 295 aa, unidentified
MNKVNANFENQKVFVGLDVHKRSWNAAIFLGDYFVRNIHQPPSPQALQHFLTRNYPGAHYTCAYESGKFGFWIQRHFKQMGIDCLVVNPADIPSTQKDNVYKTDARDARGIGQALSSGQLKSIFVPHQEQEADRQLVRQRKKLWADLVRCKNRIKAFLDYRSKKYNQLYYLLRTVPGIGPLTAASLITEIGDINRFKDFYNLNSFIGLLPMEHSSGEKEIRSRITIRKHRQLRSDLIECAWTAKRTDPALALYYTEQVKKGKNGKAAIVKVARKLVSRIRYVWRTNQPYQCAVVK

SEQ ID NO: 394353 - protein, 354 aa, unidentified
MNNGIRYVGLDVHRDSISIAVRDGRGKVIQERVLPTSEAAIVGWVREQRGILHVTWEEGTWAAWLYELLVGRVTRVVVCDPRKNSRAGNKNDRIDARELSDLLRCDRLSPVFHGETKLRSLRELARTYVVLTKEQTRTMNRIKALYRSYAIACAGQACYGPKQRDTWLAKLSHTSIRERAKTYYQLLDSLRQLRQGVRQQLLTEGKKHSAYRKLKGIPQMGPVGTVLLIAFVQIPERFRGKRQFWAYCGFALETQSSGDHRWVNGKRERSKKAALVRGLNSNHHHVLKWIFKSAATRACANPGPLQDFYCGLLEQGTRAEMARLTVARKMAAIALALWKKGESFDAQKLNPQAA

SEQ ID NO: 394354 - protein, 315 aa, unidentified
MTQTNMTTAGIDTSKLKLDIAVHGRTERWQVANALPGWRALAASLAQAGVTRVGIEATGGYECGVVKYLRAAGLTVLVLQPMQVKAFGRVHLRRAKNDVLDAVLIAACAATLDQPRIIPDPRLAELARYLTFLEQIEEDIARFKTRLEHIDEPDLRRIVSSDIRRLKARRTAQIRTIAKHLRGHADLAGRLELVLSIPGIGERTALALIIRMPELGQISREEAAALAGLAPFDDDSGKYKGQRHIAGGRGRLRRSMFAAALPAAFRWNKALIALYARLRASGKTHKVALIACARKLLIYANTVVQRGTPWTENAA

SEQ ID NO: 394355 - protein, 387 aa, unidentified
MMSTIIGIDVSQKSSSFCILSDGETQVIHGSFSMDRNGFDSLLKTTSHFESPRFFMESTGRYHIPLAHHLLQNGHTTTIVNPVLVKQFSNANTLRKTKTDKIDAQLVARYGQQVPKERKVNQRAMDDQRLSIARRREQVAEDVAKVKTQLKADLTVAWPELLAYNVFTQTMLRLLTQFPCAQDAQEATDERLALALKSPKGRGRTIGLSVEKLRQLANESIGIASYGPLVANSAHNLLFLEQSLSQLTETLVALVRETQDEEMEIITSIPGIGEITAAHFLAEIGSIDRFERYQNLIAFCGTDPSIYESGNILKRGRITKRGNTSLRKYLYLMATGVIRCNAHLKAYYDKKREEGFPHRKAMVALMNKIIKTLFAMLKKKEMYIVPS

SEQ ID NO: 394356 - protein, 446 aa, unidentified
MSNGSGLSRGDRNRNARLARLRELVPLSNAIVGIDLADDTQAAVVTDHDSRVIARRRVSARAWELGELLDWAVARAREAGFAPVTVACEPTGHRWRVLDQLAAGRGLALVCVQPLLVYRAREGEDLTRDKSDPKDAVLIARLASELRCYEPERADAVWARLRHLGARRRQLTTAATAAVNQIRDLLECAWPAVLAASGSPFRSVSWCASLAVVLDRCAGDLSRVRRLGLDRFTAAVRRELPRWGGIRPRLRIIRAVFAALADPAGVTAHRPGALERAHLALGDWRETRARLADTETRMAAVLDDLGLAELVTTIGGLTVTGAAAILAETGDPARFTTPRSLDGHAGLCPRENASGAHQGKTPISGRGRPALRLAAWRAVWAAMPNNPVMAARFAHLTTRQDNRLARQQARTACAAALLRWIHVVVTRRVTWDPAIAAGGTPLRQAA

SEQ ID NO: 394357 - protein, 405 aa, unidentified
MVLEEEAASGLTESPFVAGWRRRHQSRIRKEPVVNERITFVGMDVHKNSIHVAMLLPGSDEPVGWSQGTDADAIGKLMVRLVKKAPGPVRCCYEAGPTGYALQRTLTRQGIDCMIVAPSLISIRPGSRVKTDRRDAAKLAELFRAGLLSEVHPPDEMDEALRDLFRCRDDARGNLVQARHRMGKFLLRRNIIYRETKHHWGTRHMAWLRALSFEDRPSQAVFESYLLSIDQLSERLARLDAELAEAAQQERYRESVAHLRCFRGIDTLTAAGIVAELHDFRRFDSPRRLMGYLGLVPSERSTGERERKGPITRSGNRHVRRLLVEASWHHRFKPRVTGPLLKRREGQPAHILALADRAQERLYARYLRMSSRGKEHNKTVTAMARELAGYIWAALHPDAAPMRNG

SEQ ID NO: 394358 - protein, 367 aa, unidentified
MFTERTAVGLDVHARSVRAAALDTVTGEVVQARLGADTALVVGWVLGVQERFGVAAAAYEAGPTGFGLARAIDEVGVRCTVAAPSKILRPAGDRIKTDARDAILLARLLRMDELTPVRVPTLAEEAARDLVRARDDARTDLMAARHRLSKLLLRHGLVYDKDAWTGIHDVWLRRVRREGLQGAGRGTLTAFDTAYDAAAGIQARKKRLEDTIEEMAETSQFSEVTTRLCCLRGVSTLTGFGLAVEIGDWDRFTGATIAAYLGLVPCEHSSGGSRSLGPITKTGNTHARRLLIEAAWHHKGTYRPGKTMLARWAKAPAPVAARGDAGNRRLHHRWQALAAKNKKHTVANTAIARELAGWCWSLATMDT

SEQ ID NO: 394359 - protein, 309 aa, unidentified
MGVDISKKRLDVSYNANETAFYANDLQGFKKLLNSISDKKVTRVAMEATGGYERPLVQFLQEKGVAVSVVNAKRVRDYAKALGKLAKTDKIDSHVIRLFSEAINPKITEKLSDSQQSLDGLNLRRTQLVKQRSMEKQHVETVTNKDSKRSINRTIKFLDEEVKRIEEKINQLIHSDKTIQEKVNRLTSIKGIGPVVALAFVAELPELGTLSNKAMSALVGVAPFCRDSGSMRGKRTIWGGRSQVRSVLYMATLSAVRHNPAIKVFYDRLVNKGKPKKTALVACMRKIVTIANSMIKNNEDWNSDHGKLA

SEQ ID NO: 394360 - protein, 364 aa, unidentified
MTGMADVITGEAPGPQISWKGMTVGLDVADQYSALCLLDPLGEVIEEGRVRTSSPALTQRFRSISPCRVILEVGTHSPWMSRLLADLGHEVIVANPRKVRLIAERTQKKNDRSDAETLARLGRIDARLLNPIAHRSAQAQTDLAVIRARRGLVAARTLLINHVRGAVKSTGARLPACDAHYFHRKVAGSVPRDLLPALVPLLTTIAGLTAEIAAVDKRIVALIRDHYPEAGRLRQVPGVGPLIALTFVLTIGDPSRFPKSRQIGPYLGLVPRQRASGDRVPELGISKAGNVYLRQLLVNGAQHILGYRGADTDLRRWGLARAASGKSAKKRAVVGVARKLAVLLHRLWVTGEAYMPLRQEVLAS

SEQ ID NO: 394361 - protein, 381 aa, unidentified
MNRIIYVGMDVHLTSFSVCCVQPEIFEEDKVFGHMKLKPEVRSVQRYIDKISDHLEKAGVSAHFIFGYEAGFSGYSLYHDMTAVGLECIILAPSTMKQRPKHAIKTDKRDAEHIAKCLAYGDYQPVYIPTADDEQVRDYLRMRNDHQQAWKKVKQQINAFCLRLGKYFTGGRNKWTELHLDWLHDLVLDPLHREILDEYLITYDLHVTRLAAFDERINELAALDCYRERVHQLSCFLGIKTYTGLSLLVETGDFTRFSRADCFASYLGLTPGEQSSGETIRRGGITKAGNKELRRLLVEAAQSIGRGRIGYKSKALKARQKGNDSKVIAYADRANERLRRKFYRMTRQGKKYNVAITAIARELACFIWGMMTNHLDVRQAG

SEQ ID NO: 394362 - protein, 347 aa, unidentified
MGQRPRIRQIPAGAVRALVTEIERAKKRLGLSADAPVTSCYEAGRDGFWLHRYLVAHGITNYVVDSSSIEVNRRARRAKTDRLDLAGLLSLLARYVLGDRRAWRVVRVPTVAEEDARHVPRTLEALTQDRTRLMSRLKSLLATQGVSLAIDAQFLHRLEGAHLWDGAPLPPGLQERLTRTWTQLQEVDRQIRDVKVLRLTRPENLTPATSRALAQLLTMRAIGPIGASVLATEIFGWRRIRNGRELGALVGLVPAPYQSGETDYDQGITRAGNAHVRRVIVQLAWGWIRHQPDSALTQWYQQRFGAGGKRLRKIGIVALARKLLIALWRYLETGVVPDGAQLKPMAG

SEQ ID NO: 394363 - protein, 319 aa, unidentified
MSVCTTTPSRFVGCDVSKTSIVVFDTASSQTRVIPNRASDLARFAHSLDQSCLVICEATGGYETRLLDAMLAAGRAAHRADARKVKAFIRSFGTLGKSDAIDAQALARYGAERHASLAPWQAQDPARRTLQALVLLRIDLVAMRQAQLNRLAAPQAGDIAPLLRPILRHIETQIRAIEARIAALIRVHPTLRQALAILRTIPGIGDVSAAALLALMPELGRLSGRQAAALAGVAPHPYQSGSREGYRSTRGGRTDLKRALFMPALVASRAKGSLSIAYQRIIARGKKPIVAITALMRKIIVIANAKLRDAFLSLPLSVS

SEQ ID NO: 394364 - protein, 374 aa, unidentified
MDTIYIGVDFHARQQTICYLKTETGELVTCELRHQDKEQVRAFYEQFAGLVIVGLEASGYSPWFERMLEELGCEVWLGHATEIRRRARWRQKNDRRDAELILELMLHDEFPRLHRPAVQSREVMRMLRYRQKLIKIRTMSKNSLQALALQAGVARGSQLFTREGKQELTAALMSPAMQWQREHWLQLLQPLNQQVLEAMVWLKAQSKGDVCVARLRTHPGIGLLTSLCLVHTLAPVDRFRNTRKVAAYAGFDPVERSSAEHKRFLGISKAGSRLLRHLMVEAAHVAVRKDEDLKRFYQRLADRRGRPKAKVAAARKLLIRAYIMLRDEIDYAEFRRRAVAARLARLGHGPKGPEVVIGQPASAERQESTHNRKK

SEQ ID NO: 394365 - protein, 401 aa, unidentified
MEAIVQRSAGLDVHKKLIVVTILLEQLDDTVSEETREYGTTHQACEELSDWLFSHDIQLSVMESTGIYWKNIYAALEKRGLRVSVVNARHVKQVPGRKTDVKDSQWLARLARYGLLKGSFIPPKDLRELRLIARYRTKLKGMLASEKNRLHKTLDDAGVRLGNVVSDIGGVTATEIIAGLVEGKSMDELLACTRGQLKNKKDDLRAELEGELSARHLFLLKKLQEHITHIETELREIDDYLFTAMKPYQKQWEILQTIPGIDAVGAALLIIEMGIDMEQFGSREQCCSWAGMCPGNNESAGKKKSGKTPKGSKQLRYLLCEAANAASKTECQFKHKYKSLMIRRGHKKAIVAVGHKMLRVIFSRLKTGEVYQDPKISYEQLVVKKNAPRWIRMLKQYNYAM

SEQ ID NO: 394366 - protein, 381 aa, unidentified
MKKDNTVKTGKKQERTIGMDLGDRSSRYCRLDSRGEVLVERSVATTKKGLRQVFGALARSRVAIEVGTHSPWVSRLLRELGHEVIVANARPSGRPVRFVVTGRRRVRLITQSSRKNDKLDARTLARLARIDPELLSPIRHRSEQAQAHLMVIRARAALVEARTQLVNAGRGLVKSFGERLHSCDADQMRPEVLAAMPEPLRGALEPLLAEVESLTGRIREYDAAIGKIAHTHYPETELLRQVKGVGPLIALTYILTLDDPQRFARSRDVGAICGLATPAARIGEQPAAVVHQQGGRRVFAEAAGTGGALHSGPVRAGHRSAALGPAAGRARRQECQKAGTGGGGAEVGGAPAPAMGDGRSLCALRVPPGASGRSLNTWEGA

SEQ ID NO: 394367 - protein, 354 aa, unidentified
MACSSIIEGTTMEQYAGIDVSLESASICVVDSAGRIVREAKVACESEALIAWFSKLGVSMTRIGLEAGPLSQWLYARMREAGLSVELLETRHVRDAFKAMPVKTDSTDARGIAQLMRLGWFRSVHCKSLPAQELRAILTARKLVQSKRHDLEMSLRGILRGFGLKVGQTTPRNFEARVRELVDGHPTLLVVADAMLLARAVLVEQLGKLQKRLVSLARQDMRARLLMSTPGVGVLVALTYAAAIDDPARFRSSKAVGAHFGLTPKKYQSGATDVTGRISKIGDASVRTALYEAANVILTRPVRGSSLKSWAMRVAKRAGMRKAKVALARKLAVVLHRMLANGSVFVAGKAAAKA

SEQ ID NO: 394368 - protein, 369 aa, unidentified
MELYVGLDVHSKQSVFVIEDADGNVVARGEVPTSREGMERLRNEHALPAGTAVALETGTTSFFVARELSRVELRPVVVDAHEVRLKAHRPTQKSDRRDARELCEGIRRGIYRTIVHVPPLEVSRLRETLSRRRHFVRLQTAEVNAAKRLLRSAGLGQLARSLGTEAGWAKLESSLKEKDEVLAMYVGQHRAMWRSAREQVKALDRVLEVQGAAFAEPLGRLQTVPGVGPIVAATAVAVFSDIHRFPTAKHAASYAGLIPCTHQSGDRNAQGRITKRGSGELRTMLCEAAHHAARANHPLNPYFRKLCAKRGYRMAVIAVAHRLCRILYSMLKNRTNFDIGKLGVERGPFRRTAQHLYRLKVVPIATTNA

SEQ ID NO: 394369 - protein, 414 aa, unidentified
MGEGYRWFVGVDLGGELHQVMVVDAAGKVVGERVVQHEGESLARLSAWLVEVAGDPDSMAVAIESPRSVVVEMLVERGFPVFTVNPKQLDRFRDRHTVAGAKDDRRDAFVLATSLRTDESCFHRVRLDDPVVIQLREVSRLHDTLNEELRRLANQLRDQLHRAYAAVLTLSPAADDPWLWALLEVAPSQGAGAKLKYATVGRLLEKHRIRRFDRAALVAALRGPRLPTAPGVAEAAAEHIQLLLPRLKLVHQQRLTVQARITRLLKQLSGNEEEGPPEKRGEHRDAEIILSLPGAGKIVAATMLAEASQPLEERSYHAIRAHAGLAPVTRRSGKRHQVLMRRACNARLRNALYHCARGAMQGDQACRAYYAALRARGHSHGRALRSVADRLLRILMAMLRTRTLYTPAEPVAAA

SEQ ID NO: 394370 - protein, 340 aa, unidentified
MNHYAGIDVSLEASSVCVLDGTGKIVREGKVASEPQALIAWFSSLGLSLTRIGLEAGPLSQWLYAAMRDAGLAVELLETRHVRNAFKIMPVKTDRKDARGIAELMRLGWFRPVHCKSMEAQETRAMLTARKLVQKGLHEVESSLRGILRGFGLKVGKTTAVQFEARIKELVAGHPSLEALATSMLAVRAALRREFNGFQRQLRAMARRDTRAQLLMSTPGVGTIVSLTYACAIDDPARFKSSKIVGAHFGMTPTKYQSGETDRCGRISKIGDASVRAALYEAAHVILTKPVKGCTALKSWAMRIAKRAGMKKAKVALARKLAVIMHRMLADGTPFTTQKA

SEQ ID NO: 394371 - protein, 357 aa, unidentified
MNKVNELDFSGTTIYCGVDVHKKQWRVNIHDGNFELEDFSQDPKAETLYNHLSRKYPKANYKIGYEAGFCGFGAQRTLKKLGAVCYVVNAADVPTTDKEKKQKKDKVDARKLCDYMQSTKSKSIYIPIVTWEHGRSLVRTRDQVVNNQTRCKNRIRHLLHFSGIDLPERYAAGNYWSKAMITYLEQKDYGSGELRTAMLLLIKDYTQTRSLLLEATRAIRKLCNELAYAPRIFWLRSIPGIGWLNAATILFEIQDIRRFKTLDHLYSYAGLVPDTADSGDTKVTRGITERRNEYLRTALVESSWTVVRKDPALLMKYNDYCKRMNKNKAIIRIAKHLLSRIRFVLLNEKEYVIGVVA

SEQ ID NO: 394372 - protein, 452 aa, unidentified
MTPVHHRAAGIDVGATEHWVCVPTECDEQPVRRFGAFSCDLRAIADWLTACQITTVAMESTGIYWIALFELLEARGFEVKLVDARAVHHVPGRKSDALDCQWIQQLHTFGLLSGAFRPADDVCKLRVYLRQRSMLTEHAAQHIQHMQKALSQMNLKLQHVVSDITGVTGMAIIDAIVDGERDPKALARHRHCRCARSEEEIAKALDGAYRDEHLFALRQALELYRAYRQQIQACDEQIDAYMVTMDRKTEESPPDDREYKRKRKGRIQKNSVRIDARGHLYRITGVDLTRIDGIDATTALKLIAEIGTDMTRWPSAKHFASWLALCPGVKKSGGRIMSSRTKPSANRAAAILRMAAQTLVHSKSALGAYYRRMRSRLGAPKAVTAAAHKLARLVYSMLRYGQEYVDQGEQYYEQQYRVRVQRNLARRAHELGLKLVPINGLGADANRDGGGG

SEQ ID NO: 394373 - protein, 352 aa, unidentified
MKEYFGCDAHKHYSLFVSVNEVGQRGKFVRVEHDRNTLRAFLSKLPPKSPIAIESVGNWYWIIDEMEKAGHIPSLVHAAKAKLMMGQINKTDKIDTEGLAILQRNGTLPSVWIPPGEIRDQRELLRMRMALVHVRTMLKNRIHATLAKYAIQITEVSDIFGVRGRELIQKQSNELPLQTRACVETQLKILDQIEEQIKLCEEKIETLIEKTPVMKILMSLPGVGPILGTVIALEIGDINRFPDASHLASYAGTVPRVHSSGGKTFYGRTRSDVNQYLKWAFIEAANVIVLNQNQWVNRHVVQLYKRIKTRKGHGKAVVALARHLAEASYWVIKKNEAYREPKVNRPVLSIQK

SEQ ID NO: 394374 - protein, 513 aa, unidentified
MELTPIYKRVIGLDGHQAKISACAVAEQADGKVTVESREFGGFKRDRRALAQWAKSFGPEVVVMESTGIYWKSPYATLESVGIAAWVVNARHGKTVPGRKTDVADAQWLATLARAGLLRASFIPQADIRYLRLIARQRQKLGGMLASEKNRLHKLLADAGIRLNVVVSDIYGQAARAMVKALIEGQSITQILDLAGRLSASRADLFEALRPEELSGAHLFVLTEIMAHIEELEARMGRFEQALLAGLSPWGPQLVLLQTIPGIDVMGAAMLLVEISADMQSFGSAERMVLWVGICPGNNESAGKRKSGKTRKGNAWVRRLPCEFAQAAARSRCALKDKFSTLSIRKGHKKSIVALAHKMLRMDFAVLKSNPPYRDRVVDYEALSVQPSFDAAKYKNAQREQWTRMAPLGDAGLPLWIVGMAERPARCSMSRAFSLASASWTSLPVQANRLSVPPSEWGPAATGWRPTSRKESSSLRGKSPVNVDLNRSRPAQWTARNWIFPTLPLMQCCVGLV

SEQ ID NO: 394375 - protein, 341 aa, unidentified
MTEVSTIGLDLAKNVFQAHGASASGAILFRKKLRRDQVLAFFAAQPRCLVAMEACASAHYWAREIAKLGHEVRLIAPTYVKPFVKRQKNNAADAEAICEAAQRPTMRFVAVKSEAKQASAVVFRTRDLLVGQRTQIINAIRGHLAEYGLIAPQGPSHVDQLIAQIEDPSSGIPDPARSCLAVLVETLRALQGKITALDTEVAARAKRDDGARRLMSIPGIGPLIATAIEALAPPVETFRSGRDFAAWVGLTPLQRSTGAQERLGKISRMGERTLRRLLIIGASGVVRWARRKGVPAGSWLARMLARKPPMLVIVALANKMARIAWALIAKGGSYRAPAVAA

SEQ ID NO: 394376 - protein, 320 aa, unidentified
MMAQNDLVVVGIDVAKDKVDACIRAFALRQVFPSTAYGNRKLVGWLRKHKVNKAVMEASGGYEREWRKVLHNAGIEARIVDPKRVRSFALSAGRLAKNDAIDAEMIAWYAETFSEAPSQTLDVAHEELRALVKARKGLLDVKTRLQSQNEHAAPGPVQKAHARILKSLTAEIAKLEAAISAKIKATPHLAERAEIIESVPGLAETASATLLAGMPELGQVSDEIAAALIGLAPYDDDSGKRRGERHIKGGRRWVRNAIYMPCLGAATQNNPVLKAFYQRLIAKGKPPKVALTACMRKLIIILNAMIARRQKWHPTRYAVA

SEQ ID NO: 394377 - protein, 372 aa, unidentified
MNTNSITWVGLDAHKNSIKVAAYFPEHSEAVEWSEVTTAEAIRRLGRRLQREATGEVRCCYEAGPTGYGLQRQLGAQGITCTVIAPSLTPVKPGSRIKTDRRDARKLAELHRAGLLTEVHPPSESEEALRDLCRCRDDVRVDLLRARHRLSKFLLRRHMIYRLTKHHWGTRHWAWLEQLRFDDPISQATFDSYMLAVRQLEERQQQLDVQLGVFGAEEPYREPVAWLRCFKGIDTVTAVCLVAELHDFRRFRSARELMSYVGLVPSESSSGERERRGSITKAGNRHVRRLLVEAAWHHRHRPMISRPLQRRREGQPARILAIADRAQERLCARYRRMTMRGISNPKTIVAMARELTGYIWAVLHPAAVTTRA

SEQ ID NO: 394378 - protein, 333 aa, unidentified
MAKRVFQLHGATMTGHVTFRKKLTREQFRRFMAEHPSCMVVFEACGSASYWAREMAKLGHDARLIAPQYVKPFVKRQKNDAADAEAIVIAARQPEMRFVSPKTEDQQARAMLFRGRERLVHQRTELVNALRAVLYEYGHVFPAGIGHLKRIEALVEDPACDLPVLVVAECRDLLAQIAEKTDRIDAKRKALKELAAGTDTARRLQTMPGVGPLTALAVEAFAPDMAQFRCGRDFAAWLGLVPRQHSSGGKERLGRISKAGQTDIRRLLIIGAMTRIMGRARHKIPPDSWLGRMLARKPKMLVAIALAGKMARQIWAILTKNEDYRDPVLATAA

SEQ ID NO: 394379 - protein, 369 aa, unidentified
MKTLVRTQPKVNAEFIGLDVHRDTIVFERLTRSGANAGGGVFATRRADLAKFLDSTIGRKRSHLVLEASGSTEWIYDELVSRYGVQRVHVAQPKKMRMISRSTQKNDANDAWWLAYMGQEGRVPEAVMPSAAYRELRFATRHRAATVQVRTSAVTALRADLSAQGERLPNVAFGTPANEAALNELAARWQGSRRLALSQARARIASLDADIVAWDAQIEVLAQEFPEIEVLRREIPGVGPVLSATIAAEAADIRRFTSAKAFGRYTGMTPSDRSTGGKTLHGSMTREGSPHLRWALIQAVVHCARSRQGPGFSIGEWLRAKQRRMGNKAKARVAAGRKLAEAIWRLFQLGEAFDVKKPFGSHEPPVSAA

SEQ ID NO: 394380 - protein, 459 aa, unidentified
MCPATERLGWTCTSPTRTVKHVPWGVRAKSASTGPMKHHGWPSREGILTESYRFFVGIDWAWERHTICVLGSDAEVIDRRTIEHSGTGLTQLADVLEKLSSGDPFCVAIAIEMPRGAIVESLVERGFAVYSLNPKQMDRFRDRHTVPGAKDDSRDAFVMADALRTDLHLFHRVRLDHPDILRIRELSRSEEDAQQDQVRAENQLRSLLNRYYPQMLQLCPAVDQAWFWDLLEMASLPAQGAKLSKSRIEKLLRSYRIRRLDADEIHQTLSVPALQLAPGAAEAASEHVLLILPVLRLLDRQREEIARRMQLLLEKMSEDEQVVEHRDVKILLSLPGVGRVISATMLAEASQPLAERDYHAIRSYAGAAPITRRSGKRKMVVMRRGCNPRLRNALYHWSRVSSQNDPRSKEHYAALRAKGHSHGRALRGVADRLLAVLIAMLRSGTLYDPNHQTAAMPLK

SEQ ID NO: 394381 - protein, 408 aa, unidentified
MVVGVDPHKKSHAAVAITQDFTTQAKFKFDNTREGLEAMLDRARVEMVKSGCRGVMFAIETGGHYWRNVAYFLDEQGIPFRFINQFTLKRRREGKDLNRRKNDYRDSEVAAQLLCTGEFTESKLPKGVYAELRTAHNAYRRLVKERTRITNLVKGLLDGLFPEFTQVFKDPCALTALSVLSTCPIPRVIAGMTEDEFEATIEARHKGRRLMRKKLRALHYLARTSIGIHAGSCSLSSEIAFLVDKLELIRQHICIMEGRLVRLVDETEEGKYLLSIRGLNYIAVAGLLAELGCFKAYRSARQMIKMAGTNPTESESAGKKRSRTPMSKQGRPVLRYCAWTSVIPMLRFNSDFRAWAKQRRERPVHANPLGGREVVGAALNKLFRLAFAMVKNQTYYQVSKAELTLVAV

SEQ ID NO: 394382 - protein, 346 aa, unidentified
MTMLSESVDVIIGVDTHKHTHTAAVVRAATGAELDHQTQSANKAGYAELVAMADQHSTLRVWAIEGTGGYGAGLARHLAERGEVVIELDRPKRPARRQGAKSDPLDAVRAAREALAREHLGQPRSRGQRAALSVLITVRAMAVEAAGDAQRQLQSLIVAAPDHLRERFTGMTAHAIVTAAGKLRINDNWDLESRVTARALRAVARRCGHLTSEAAEHEREILSIVRDWRPDLLDKRGVGPIVAANVLCAWSHQGRCRSEAAFASLSGTAPIPASSGLTTRHRLNRSGDRKLNRAIHVIVIARLRTDPATRAYAERRRSEGKTNREITRCLKRYVARQLFKQLERAT

SEQ ID NO: 394383 - protein, 409 aa, unidentified
MEVLFARCAGLDVHQKTVVACIRLHGPDGRAKTETRTFATHTAALLELSAWLEENGCTHAVMEATGVYWKPVWHILEEGFALVLANAHYVRNVPGRKTDVSDAAWLADLLAHGLVRSSFVPDRPIQELRDLTRTRKQLVRQRAQHVNRLHKVLEDANLKIGSYVTDITGVTGRAILSSLIAGETDPAKLADLRNPRLKTPRDELVLALNGKVTQHHRFLLQMHLDQIDGADRSVALLDAQIEELTRPLAEAVGRLADMPGMSETSARVVLAEIGADMSRFPSARHLVSFAGLCPSLNQSAGKSRSAKLKKGSVWLKTVMVNCAWAAARAKSTYARAQFHRLKARRGSKKAVVAVAASMLTAVYYLLRDAVPYRDLGANYFDRRDQTKLANRLRRRLEALGFSVQMQPAA

SEQ ID NO: 394384 - protein, 323 aa, unidentified
MQGKVSFQEDAMPVVYAGVDVSKEWLDVHLHPLGESRRFSNDKTGIRQLKRLLARHQPKSIVMEATGKFHRPAHRSLWLDGFAVAVVDPLRARMFARACGYLAKTDRLDARFLALLAESLRPPADTPPSPHVEALQELVNARSAAKCDITALQNRSKTATTALLRGELNRLVRRLEQHVERLDKEIERRVGEDPQLYRKAEILTSIPGIGRVTALALMAGMDELGSCSGKQAAMLAGLAPIANDSGARTGRRSIRAGRPAPRRALYMAALSACRYNPALARFADTLKAAGEPAKVILVAIMRKLLVLANCLLAHDRIWTPNPP

SEQ ID NO: 394385 - protein, 371 aa, unidentified
MKDTIKYVGLDVSKEKIAVAIADEGRDEPRYWGMIPNTPESIRKLVKKLGEKENLRVCYEAGPTGYGLYRVFLSLGIECEVIAPSLIPKKPGERIKTDRRDSIKLAKLFRAGELTSIYVPTEDDEALRDLVRAREDAKEDELRAKHRLSKFLLRNDIHPPFKGKKWTRRYREWLNTLKFERSTSKAVFQEYLHHLHEVEQRVKRLEEEIKLQSIEGYHAPMIQALQSLRGIATITATSLVAEIGSFKRFDSPKKLMSYVGLIPSESSSGEIRRQGNITKTGNRHVRRLLVEAAWSYRFPPAIKGDLKKRLEGQLPNVQMISWKAQNRLHKKYFRLLSRGKSFGKALTAVARELAGFIWAVTQEIENNTIAK

SEQ ID NO: 394386 - protein, 420 aa, unidentified
MSNPLTTLYVGIDVSKDSNVVCCLSFEGKKLFSGSFKNNNDESQNLQSKIVEIQKNNSFDSIQIVLESTGVYSFHIGLFLSSSELLNAVNTTVFVVNPKMTKNYSKSYIDMTKSDPSDSFMLADFARCGRTKMLRPFRGKQRLALQRLTRYRKHLVDLLCQEKMYVLNNIFIKFSEFNNKSHDFKTFSDSFSTSAIEILTNYYSPETIANTPVDKLADSLRKYSKNKFSDPEAIASKLQSAARASYRLDKIMYEPINACIASSFCLIRAYEKQIKDVEEQIGSLIKGLDNQNEYNSLISIPGIGPVYASGILSEIGSISDFNSDDALANFAGLTWKKTQSGSFDASDTPMQKNGNSYLRYYLIEATQNIISNIPSYKEYFDKKKSEVTTHAYSRARVLTARKVLRLIYSLVSQNKLYQPK

SEQ ID NO: 394387 - protein, 340 aa, unidentified
MSKDIALVGLDIAKLIFQVHGADREGRPLLRRRLRRDEVEAFFQKLAPCIVALEACPSSHYWARLIRSHGHEVRLVPAQFVRPFVKSNKHDAADAEAICEAMVRPTMRFVPIKEREQQEILVIHRVRETLMRQRTQLINAIRGHLAEFGVIGKTRAHNIGALTTRIEDPDDPEIPDLVKSALGHLVVQLRRVEASLAEIEIKLGAIARHVDACRRLMTIPGVGVITATALVSSVRDPADFKSGRHFAAWLGLVPRQHSTGGVDKLGGISKRGDSYLRRLLIHGARSVMRWRRKSWTWLARIRDRRPANVVAVAMANKTARVVWALLRHGGAYRPPQLQAA

SEQ ID NO: 394388 - protein, 467 aa, unidentified
MTPHKDYCLDPPPPAPTPLLPPSPVLSDALQVYHPHAAGIDIGEAEHWVAVPPGCDPQPVRRFGTFTADLDTLADWLIDCGVTTVAMESTGVYWIPLFELLEARGVQVLLIDPRQAKRVPGRPKTDRLDCKWLQRLHTYGLLAGAFRPDAHVCVLRSYLRHRQMLLTYAAHHIQHMHKALEQMNLKLTQVVSEITGVTGMAILKAILAGERDPQRLAKLRNPHCHHDEEDIAKALQGTWRAEHLFALRQAIALYDFYHQQMTQCDQQIKAHLATFDDQSAGRPLPPKARRHTKTNEPRFDARTPLYRLAGVDLTTIEGIEEGTALVILSEIGTDMHRWPSVKHFCSWLGLCPQHKISGGKVLSRRVRPGAHRVTVALRLAARTLHHSQSALGAFFRRMKARLGTPKAITATAHKLARLVYSLLQHGSAYVQQGLDAYEAQYRERKVTTMAKQAKALGYTLVPLAAQG

SEQ ID NO: 394389 - protein, 330 aa, unidentified
MGKFINAIGIDVSKKTLDIRDHVNELTHQVSNTGDGFKQMLKWAKKNNADLSAVLICLEHTGMYSLPLAVYLTEQKCAFAMLPGLQIKRSLGIQRGKSDQADAQAIARYAYLHREEVKTYNLPSAQILEIKGLLSLRERLVGQRAGYQATKKEAKSFSIGNSKLILEIQMKLIREINAQIAKIEKQIKLILHSDAELKKIYDLVTSVKGVGLILGTTMMVYTNCFTAFDDWRKFACYCGIVPFPFQSGTSIRGKKKIHHLANKRLKALLSNAACTSIQFNPEMKAYYQRRLQEGKNKMSTQNIIRNKIVARVFATVQRGTPYVDTFKYAA

SEQ ID NO: 394390 - protein, 323 aa, unidentified
MAVVVGIDIAKRTFDLAMLQPNGKYRTKGKLANDKAGFTVLADWLQRHAEPEAWIVVEATGIYHEALAEYFHALGYRIAILNPAQVARYAQSQLQRSKTDKLDAKLIATYGQLHRDQLRAWQPEPLSVRQLRALTRRLEDLRSLRQMELNRLEVSPENVQDSIRAVLQRLDEQIAWTLEQIKRHIDDDPDLRGKRDLLVSIDGIADKTAALILAELGDIDRFTHARAVTAFAGLDPRLQESGTFHGRTCISRTGSARLRTALYLPAVVALSHNPAIKAQAERLKARGKKCKQTVCAAMRKLLSIAYGVLKSGKPFDPALAVAR

SEQ ID NO: 394391 - protein, 320 aa, unidentified
MAEITTPTNIGIDVSKDWLDIIVLPSGETFRIANTEEKMGALVGKLESLKPERVVLEATGGYERLVTSKLYLAGLPVCRVNPKRVRYFARSLGQLAKNDKLDAKVLARFGEVVKPALTQLPSEHEQRLSALLTRREQLSAMLVAEKNRLGTAPTHVRSSLTEHVTWLKKQLKHLDKEVDAFINTTPDLKEKDDFLQEVQGIGKKTAAKLIADVPELGSCDRKQIAALIGTAPYDHDSGYKKGQRAIGGGRPDVRKVLYMATLAATRFNPVIQEFYRRLVQAGKKKKVALVACMRKLLTILNAILRDRKHWNPTRACPAVP

SEQ ID NO: 394392 - protein, 348 aa, unidentified
MRFYTDQHKFYCGIDLHARSMYLCILDQEGKTMLHRNYRTTPDDFLRAIQPYREDVVVAVECMFVWYWLADLCTQEAIPFVLGHALYMKAIHGGKSKNDKIDSKKIAALLRGGTLPVAYVYPMNMRSTRDLLRRRNHLMQKRSELLAHIQNTNSQYHLPEFGKKLAYKSNRDGVTDHFPDPSVQKSIEVNLQLIDVYDRLLTELELYIVKQAKGHNVRNLYLLRSIPGIGKILSLILLYEIYDINRFPRVQDFVSYCRLVKCTRESGGKKSGAKNSKIGNAHLKWAFSEAACLFLRGNEQAQLYHNRLVSKHGKGKALSILAHKIGRAVYFMLKREEPFSMDTFFART

SEQ ID NO: 394393 - protein, 343 aa, unidentified
MQTVTTVGLDIAKSVFQVHGIDAKGDVIMRRQLKRRYVLAFFQKLPSCLVGIEACASSHHWSRELTALGHTVRLMPPAYVKPYVKRQKNDMADAEAICEAVTRATMRFVPTKTPEQQSCLVLHRTRHLFIRQQTAVINSIRAHLAEFGIVAPVGRKGVEELLHVIADPSDKRVPEIARACLAALGTQLLSLKEQIVKFDRMIMAWHRSNETSKRLHYIPGVGPMLATALVASVADPRTFRSGRNFSAWIGLVPKQHSSGGKDRLGGISKQGDRYLRSLFVAGALAVIRYAKIHGTKHRPWLVALLARRPAKVAAIALANKIARMAWAMMARGERYKQPVALAA

SEQ ID NO: 394394 - protein, 444 aa, unidentified
MLRFVGCDVHKRTAVFTVLLPDGTLFGTYTVPVTREALAAFAERQLAREDRLAMEATTNTWAVAGVMRPFVKEIVIGNPLKVRAIAEAKIKTDKVDSRVLAELLRCDYLPMVWQPDQETQRLRRLTHRRAALVSDRTRLKNRLHSILHHTLVPLPDCDLFSKRGIAWLRQVPLAQEEALARESDLRLLELTELEIAQLDDLLVREAWQDEKVRLVMSIPGIDYTVAQTCLAAIGDISRFANAKKLSAYLGLNPSTRQSGAHCYHGPITKQGNAHARWLLVQAAQHLAQYRGPLGQTMRKIVKRKNRNVAVVACARKLAVLLWHVLSSGEPFRYAQPKSLQAKFSRLRVRATGQRRRGGVAKGTPRSPQYGHGRTRAVPSLPQVLAENGLPDVAPLAKGERVMLERKRLDTFYSELQTPSRIQANTPTPQVEETEEDFKSELTQS

SEQ ID NO: 394395 - protein, 402 aa, unidentified
MDKNKRYLRFVGIDIAKNKHVFCVIDRDGKAIHKSQSFTNNKQGYHLLRETLKNIGQTRTFLIGMEATAHYWYSLYDDLTRHGYQGVVLNPIQTSQQAKKAIRKCKTDRVDAWHIATLIKNGDYKPALVPGPLAMTCRQLTRLRMRLIQQNAMLKQLIWSRLHPIWPEYEALFSNPFCATGRKLLSVAPSPADILAMDSHELSELIRKTSRGKYGVSQAQKAWQAAADTVGMQRGLDGARICIRTLLSQMEATKPVHEQLKQEIVQLSQHLPTYLFSLPGIDPIRAVSLFGETDPIADFKRPSQLVAFAGLDLTVFQTGQYEASHRRISKRGSPFLRYTIWRMAYQAVYQEGDLRSYWLRKLSDGLTHKAAVTAAAIKLCRITWRILTDKRDYLTQGCPNQS

SEQ ID NO: 394396 - protein, 414 aa, unidentified
MDIVHDRAAGIDISKRDAKVCVRIPGARAGTFSKTVTTYGATTNEILRLRHNLEEAAVTVVAMEATGDYWKPFFFLLDETLNVELVNAKQAKNIPGRKTDVSDATWLAELAAHNLLRASFIPPEEIRQLHDLTRLRANLIHERTREYARMEKTLEGSNIKLSSVTSTLSTVSARRILDALVSGERDPQILASLAHTSMIKKSAALTEALTGRFTDHHAFMVKMHLDRIDQIDQAMTVLETRIDEVMEPFSLARELLMTIPGISKNVANTLIAEAGADMTAFPTAGHLASWAGVCPGQNESAGRVSSAHTRPGNHYLKAALGIAAMSISRSKTTYLAVKYRRIQSHAGAMRAVVAIENSLLVIAWNMLTKGVAYEELGVDHYDRTNPERARRRLLHRMESLGYQPILTPLPTGTT

SEQ ID NO: 394397 - protein, 400 aa, unidentified
MGQPLWAGVDAGKSDHYCVVIDADGKRLLSRRVANDEAALLELINAITALADGGELTWAIDLNAGGAALLIALLIGAEQRLLYISGRTVHHASGGYRGEGKTDAKDAAVIADQARMRRDLQPLRPGDDIAVELRILTSRRTDLVTDRTRAINRLRAQLLEYFPALERAFDYSASKAALILLSGYQTPEGLRRAGAARLAAWLRKRKARNADAVAAAAIEAAKSQHTVVPGQQLAAAMVARLAEEVMTLNTEIGDTDAMIEERFRRHRHAEIILSMPGFGVILGAEFLAATGGDIAAFGNTDRLAAVAGLAPVPRDSGRISGNLKRPRRYNRRLLRACYLASHNAIRTDTASRIYYDRKRAQGKRHTQAVLALARRRLNVMWAMLRDHKPYQPTAPNAAAA

SEQ ID NO: 394398 - protein, 340 aa, unidentified
MTVIIGIDPHKATHMAVAIDGGEQSVARFEVRAQRDQTERLLAWAAPFPDRRWAIESADGLGKLLAQQLLAAGEDVVDVPPTLSARVRLLGSAKAGKNDGNDALSTAIAGLRHCALRAVRVDDHATVLRLLVSRYDDLIALRTQAACRLHALMRELVAGGAPLRLSADRAAKLLRGAHAVGLVALERKRLAGDLLSDIRRLDRELTAIKVRIGDAVAASQTSLVELHGVGPIVAGLILGYVGDPTRFPTKERFAAYNATAPIEASSGPRKRHRLNPRGNRKLNHAMHLIAVTQIAHDTPGRAYHDRKIAEGKTKKEALRALKRRISDAVWRQLQADLAHP

SEQ ID NO: 394399 - protein, 451 aa, unidentified
MSPRKSDATLSLAHPDAAGIDIGSASHFVAVPSDRDEQPVREFKSFTADLYRLAQWLKDCGITAVALESTGVYWIPLYELLDSQGFTVYLVNARHVKNVSGRKSDVLDCQWLQQLMSYGLLAGAFRPSDEICVLREFSRQREMLLASQVRHVQHMQKALAQMNIQLTHVLSDVVGVTGQAIIRAIVDGERDPHVLARLKKRQVKASEDDIAAALQGNWRHEHLFALRQALALYDTYQQLLNECNQHIQAELQKLHRHDGDPGKSQRRWPKKAMAFDLRTHLFAMCGVDLTRINGIDEMTAFTVLSEVGPDMSRFPSAKHFASWLGLCPGTRISGGKVLNGATKRSPNRAAQALRLAAMALRHSQSALGAYYRRLCARLDKRRAITAAAHKLARLIYTLLAKGAEYVDQGELYYEERHRQRVLHHLTKRAETMGYSLVPLATPEKANEISTA

SEQ ID NO: 394400 - protein, 412 aa, unidentified
MQIVYERCAGLDVHKKSVMACLITPAPNGERRKERQTFSTMTPDLLRLRDWLREQQCSHVAMESTGVFWKPIFNILEGHLEVIVVNAHHIKTVPGRKTDIKDAEWIADLLQHGLLRPSFIPPAWQRIVRELTRSRASLSQERTRVIARLQKGLEDANIKLASVASDLMGQSAQDMLHALLEGERTPEEMAAFARGKMRPKRDLLVQALTGHFQAHHRFLVAEHLKHLSALQEAIDRMSVEIAERLHAYEDLLTRLETIPGVGRRLAEIILAEIGPDMSRFPSAAHLASWAGMCPGNHESGGKRLSGKTRKGSQWLRTALVEAAHAASHCKECYLSAHYHHLAFRRGKKRAAVALGHTLLIIIYHVIADAKEYQELGADYLEQLERQGKEQRLVHQLEKLGFEVALTPLASQA

SEQ ID NO: 394401 - protein, 476 aa, unidentified
MGKGSGTTRGDRRRNARRERLRAMLPREGAVIGIDLAEDKQAIAVIDHDVRVVARKTVRVKAFRLGEALDWAVAQARAKGFDRVTVACEPTGPRWLQVQRLCAERGLPLVCIQPLVSHIARQQQDYTTHKSDESDCVMIARLAIELHCYIPEELDEAWAQLRQLGRRRAQLITSATASVQRVRDFLSVAWPVAPEACAHPFESVTWLSAMQVVTSRGGGQPEKLAAIGLAEFTALVRQAVAGWGGQRPAGPVCRAVFAALVSTEGVVVSHRRGLMRRCADELGDLQRTRAQLRAVEADMAAVLGELGLSRLADIPGLTAVGAAAILAETGDPRRYDSSSSLVKHAGLSPSGNASGAFEGQAHISRRGRPGLRLTVWRAIWPLLIHNSVMAAKYAAMIAAADAAAAQAAQAPSGTGSRQASAAAAAQARRAKARVACAASLLRWIYSMVVHDTGWDPDLASGAASCQPAPRRQAEAA

SEQ ID NO: 394402 - protein, 343 aa, unidentified
MHYIGIDVSVKESALCILDGKGKIVRETKVPTDPEIINRFIADTGLAIERIGLESGSTAAWLFAGLQRHGWPVICIDARHAAAALQAGFRNKNDRNDARGIADLMRVNKYRPVWVKSPQAQRQGRLLTARATLQSQLVALENTIRGLLRQEGIGLTDRRIAFEAAVREVIADDYLLQAAVLPLLETRAAVLQHRATLDRQILRIVRVDPVCRLLMTAPGVGAFVSLAFKVGVDDPRRFSRSRDVGAHFGLTPREYSSGQVSYRGRISKMGDSEMRRLLYLAAARILRRDAAMWCPLKVWAVRLAQRIGLRKARVALARKLAVVLHAMWSDGQVFQWRRAATSA

SEQ ID NO: 394403 - protein, 388 aa, unidentified
MFFLGIDIGKNTHVASLLDEKAKIIFKAYSFANTLDAAEALLVKLEPYKDSLEIGMEATGHYWLSLYSFLAEHKFIVHVLNPIQTDGWRKGIEIRKRKTDVIDSVLIADLIRYGNFLETSLADEDILSLRNLSRFRVYLVNSVSDLKRKAIAVLDQIFPEYTSVFSNVFGQTSKELLKSLSLPSDYENLSATKIEEVLSNITQKKKASKTISTLSDKASRSFGISFCKDSFAFQLKLIIEQICFIEEQIASVELEIDQLMSKLGTNIKTIPGVGSVIGAVILGEIGDIERFDNPSKLVAYAGLDASVSQSGEYEASSGKLSKRGSPYLRKALYMAAQRAEFCDPVFHAYYEKKRNEGKHHLVATNAVARKLCHTIYAILKKDVPYEVQ

SEQ ID NO: 394404 - protein, 341 aa, unidentified
MERTVIAVDIAKKVFQLHWVNVETGCIERVQLKRARLLEWFANRSAALVVMEACGGAHDWGRALAQLGHEVRLLSPRKVRPFVQRNKTDAADAQAIWTASQQPGMRFVPVKTEAQQVILSLHRLRSQLMKMRIMQTNELRGLLCEFGIVLPEGHAALLRALPSALSEAKTRLPAMLTESLDEQVFRIQSLQADIGTIERRLSQQMREIPACKAAAEIPGVGLLTATAIVASMGTPTAFKNGREFAAWIGLVPRQTGTGGRIRQLGISKRGDSYLRTLLMHGARAIVLRWKDAAAWPWLAELLRRRPYSVAVAAVANKLARTIWAVLARGQAWRPEAWQASH

SEQ ID NO: 394405 - protein, 412 aa, unidentified
MFKIFRNNCCGLDVHKTWIYACIGITDPNGRTEYKQARFSSFSKGLRKLAAWLAKYSCTEVCMESTGKYWIPVFNILEKSCLVTLAHPKYTKPQKGNKTDRKDAKWICDLFMCDMIKPSFIPSPEIRQLRDLMRYRFKLTNMLTGEKNRARNCLTVSNLKLDDVFSDVFGKSARSITSYILEHPGETFDVSPFVDPRCKTPVSEIQAAVDGAISPEQAVKLRQCLAHIDELEAHRKEIESEILQIAEPFSAVLDLLSTLPGLDKNPMTAIAILSEIGPDMSVFPSSKHLVSWAGCCPRNDQSNQKVKSRRISRAGSYLKPLLVQVANALIKSKKHPEFKERYHRIKSRRGHKKAIIAVCKMLLTAIWNMLGKLEPYNPEGFLEHRSVKQEKTLTVSQALELLRLRGYTITNQ

SEQ ID NO: 394406 - protein, 353 aa, unidentified
MSPVNSRIAAIGIDIGKNSFHVVGQDERGAIVLRQKWSRGQIDARLSNLPTCLIGMEACVGAHHLSRKLQALGHDARLMPAKYVRPYSKGQKNDFRDAEAIAEAVQRPTMKFVATKTAEQLDLQALHRVRERLVGQRTGIINQIRAFLLERGIAVRQGLRFLRAELPTILATRGDALSPRMLRLVEDLAGDWRRLDARIEAISGEIEELARQDQACERLMTVPIGPIISSAMVAAIGTGDAFSKGRDFGAWLGLVPKQISTGDRTILGGISKRGNRYLRALFVQAAWVVLVKLGKKWERYGLRSWIEAAKKRLHHNVLAIALANRLARIAWAVLHRGRAFECVKMDEIAPRSA

SEQ ID NO: 394407 - protein, 343 aa, unidentified
MESYVGLDVSLRRTSICVVDKAGKLLCEGTVNSTPEAIIEFVKSKAAGAVRIGLETGPTSTWLWTEIKALGLPVICIDARHAKAVLKMQINKSDRNDAFGIARIMQCGWFKEVRVKRIDSHVVRALLESRALLVKMKRDLENQIRGLLKNLGLLIGTARGQAFHARVQELVEGKPYLAVAVLPLLETRNNIVRQITDLDRKVLMLARNDNRARSFMTVPGIGPVTALCYRATIDEPSRFKRSRSVGAYVGLTTRRYASGEVDWTGRISKCGDAMLRSYLFEAAGVLLTRVHKWCALKSWGTRLAKRVGLRKAKVAVARKLAVILHRMWMDGTDFQWSADKVAT

SEQ ID NO: 394408 - protein, 337 aa, unidentified
MCIVTVGIDLAKNVFAVHGVNAAGQALLIKPEVKRDKLLALIASLPPCLIGMEACSGAHYWAREFQKFGHTVRLIAAQFVTPYRKSSRIKNDAADAAAICEAVARPNMRFVPIKTVEQQSLLFIHRARQGYVEHRTALINRIRGLLSELGIVLPLAHAQFCKGVHTVLEDLPGYSNRVIGDLMSELDQIEQRMAQYDQLIAQMARQDAQAKRLMQIQGVGATTATAIVASIGNGLDFKNGRQLSAWLGLVPKQYSSGGKAKLGRITKAGDRYLRTLLVLGARALLRYAKDKDDPISRWALALQQRRGYGRALVAIAAKNARMCWAALRLGENFKLPA

SEQ ID NO: 394409 - protein, 317 aa, unidentified
MTPTAIFVGIDIAKADVVVACRPDGTTWTATNDPKGIAATVDRLGALAPNLIVLEATGGYETPLVAALAAAGLPVVVANPRQVRDFAKATGQLAKTDRLDAHLLALFAERVHPTPRPLPDAALQQLEALMTRRRQLLDMLTAEGNRLEHAAAPIRREITRHIRWLERRVAAVDRDLDDTIQKSPVWQAKENLLRTVPGIGPVVSRTLLADLPELGRLNRKQIAALVGVAPLARDSGTLRGTRVVWGGRAPVRAVLYMGALVATRRNTVIRAFYLRLVAAGKPKKVALIACMRKLLTILNAMMRTNTQWQQISQPETA

SEQ ID NO: 394410 - protein, 412 aa, unidentified
MEVVVERCAGLDVSKDEVVACIRRPDDQGGRSKQVRSFATFTDDLEQMAAWLESEQVTKVVMEATGQYWKPVWYVLEERSFELILVNARHVKIVPGRETDVMDAEWLAELLEHGLLRGSFVPPPAIRELRDLIRYRKRLIQAHTSECQRVQKVLEDAGIKLDSVASDVLGVSGRAMLKALVEGERNPKVLAELAKGRLRAKIPQLHKALKGRFRQHHALMIRVALDHIEHLESSITTLDTSVDEVMSPFTIARDHLDTITGVGKRAAECIIAAIGTDMGVFPTAAHLASWAGLCPGNNVTGGKRKSGRTNKGDRWLREILVECAWAAARSRDTYLSAQFWHLARRIGKKRAAVAVAHSILVIAWHLLKDDCNYEDLGGDYFVRRDQSRHKARLVRELQELGFYVTLEEVPAA

SEQ ID NO: 394411 - protein, 410 aa, unidentified
MSDQTQRYVAFDVHKSYLMVAAVNAAQKVVLPPRRIDFSRFEGWINKHLKATDQVVLEATTNAWYVHDLLEPKAARVVVAHPYQVKLIAAAAVKTDKRDTLALAKLLAANLIPEVWVPPTHVRELRALITHRRRVVSQRTAAKNRLGSVLHRNNIVPPAGKLFNQENRAWWLSLDLPPSEQLRVRQDLDTLLHLNPQVGEIESELARLSTLDPWADPMTYLVQLPGIGMLTAMTILGAIGDISRFAFAKKLVGYTGLGARVYASGQTQRGGRITKQGRRDLRSVLVEAAWSAVRFDPYWEETFQRLAHRIGKKKAIVAIARKLLVVIWHVLSAAETDRRANADKVAGKLMLWAWQIGQEQRPLSPGQFIRYNLLKLDLGHDLDFIVRGGVKRLIPSLDQLKADRPDLFVD

SEQ ID NO: 394412 - protein, 369 aa, unidentified
MRIAIGMDLHKKSAVCFAVYAGEGQPAEDEMEFLERFNREHRTQPSEPEDIAVIARALEGHEAHFLIENSTKTFDTYWVLTNLGCHVTVAQSRDLIRITHSVKKNDNNDSMELAFYMRRRLHGENEFSVCVMPSKEWMQLREICRTVFKEKSHLADLKRRTRSHLLLHGIKLSREYENIFCKKAIAEMESTCDICLRIFANEAKSVLKRTDMETRTIELLFKDIRIYGLILSIPGFGRVSAAYLASMIMDITRFDTCNQFTASFGIVPKQRESSDVSHNCATTHRGDEEARRLLKQAAWVHVNNCDSVVTQMFKRLKKKGKAHNEVLVACARKLLTVVWSVLRSDRPFTTDQRLLARSAAMAQEVEDQD

SEQ ID NO: 394413 - protein, 363 aa, unidentified
MEEERRRYVGIDLGKREYTMAIIRKDGKMNIHQGKTSIQGRGALYRRLERTDKVALEAGNLAFIMATEIQERVGCEVRVLNSAKLPFIWAAPTKTDKEDAMKLAHLVEERRDEKLPIVPLPSKQEMERRKLLAEYRREMSGRTKLINLLHALFVHQGHTMVVRSNLATDVKRIQAIELLGGQEREEAEWLLRHLALYEQRIQELKVKIHQEAKTDEDMKRLQSIAGVGPIVAFGYVAHVGDGSRFSKGSQVSNYLGFVPRLDYSGIIRRQGHITKHGNGFVRGLLVQAAWSMVRSRQGGSLKERFVYATGYQGKSKKKMIVSIGRRLAEIMYSVLKNKTEYEPRPWGGPMDKTAMLAEKALCA

SEQ ID NO: 394414 - protein, 370 aa, unidentified
MEFNAYIGLDVHKETIAIAIAETGRTGDIHFHGEIANTPDAVGRMLKKLGGRYGKLHFVYEAGPCGYGLYRQINSAGHVCEVVSPAHTPRRAGDRVKTDRRDSVLLGRLSRAGELTSVWVPDEAHEAMRDLIRAREAATKELRQVRQRIQGFLLRHGRRYAGAVWKKQHRVWLANQTFNHPAQQIAFQTYLNAMDQAIERKDLIQTQIEALVPEWSLGPVVDALQALRGVALVVAAGVVAEIGDMRRFEHPRQLMAFLGLVPGEHSSGSKRKLTGITKAGSIVARRLIVEAAWAYRMPAKIGQTIMLRQQSLATPIRDVAWKAQVRLCARYRRMLARGKKAPIVITAIARELVGFIWAIGQQVKLKAFNE

SEQ ID NO: 394415 - protein, 465 aa, unidentified
MQNGMKAINLPSCGLDIHKDIIEACIIDEDGNRHLKTFDTMRKTLHDLKAWILSLKCLHVLMESTGVYWLPIYEILEEVDGMNVGVGNARHMKNVPGRPKTDREDSKWIARLCMVGLILKSFVVGRRFRELREYTRYYKKLTQDRARHKNRIEKLLQLNGFKLSSVISDIYGVSGFKLLNTLRAYGSVTLSQVKGALHKKIKKSPEEIERAINGRMKYTSQLLLGKMITRLDNCNKEMDEIYGMMSDISSDFEPQLRIIESIPGMGRLSGIYIIAEIGTDLSSFRSSGHLTAWAGLAPKDHESAGKLKFSKTKKANIYVKSIMIECAWAAVKVRNTRISNWYWRNVKRLGEKKAITAVARKLLVYIYAMLKNGELYDGSLDVTDTETRKAEKLASAHKTVERQSFSSNEKKQRNDVTHKGSTNALLPAQASLRPPNIADNSEPSSKRGQPSKKPCVKGLTVNLQT

SEQ ID NO: 394416 - protein, 479 aa, unidentified
MGWSAAVDADSNLVLKVSLWGSVAWRTSTGTVDCCVWSTSVRFLNLIPFPPRGRHQPTVFRVSGVTVMDIVHDRAVGMDISKRDAKVCLRVPGQRAGTFSSTVTTWGATTQQILALRDFLEQEHVTTVVMEATSDYWKPFFYLMEETLPVMLVNAKSARNIPGRKTDVSDAAWLAQLAAHGLLRASFIPPEPVRELRDLTRARAIATRDRSREIQRLEKFLEGSGIKLSSVVSDLTGVSSRAMLEALVRGERDPQVLAGLAKGTLKSKVPELVDALTGRFREHHAFMVRLHLDQIDAQTRILDELTERIEAAMAPFRTIREFLATIPGVSLRTAEVIVAETGADMSVFETPGRLASWAGVCPGNNQSAGRVKSAHILPGNKYLKAALGTAALSACKGKTTYLGAKYRRITARRGSKRALVALEHSIITAVWHMLADGECYSDAGADYFTRLDPIKARNGAIKKLNSLGFDVTITPVTAA

SEQ ID NO: 394417 - protein, 450 aa, unidentified
MMREAQEIEDEEHEQILERVCAIDVAKASGKVCTRVPHPSRPGARRTRVWDVDATTNAILELGEHLAGEGIEKVTLESTSDYWRIWFYLLEAGGLDVQLVNARDIKNAPGRPKTDKLDSVWQAKLTERGMLRPSFVPPAEIRRLRDYTRLRTDLTRERTRYWQRLEKLLEDSLIKVSAVASSLGTLSVREMLEALIAGERDPKTLAGLARGRMKAKHAALIEALTGKFDDHHAELARMLLDQIDALNAQIGKLTTRIEELIEAIPAAQGIDADGTTGPSAGTGAGAPVLPAIDRLDEITGIGRDGAQEIIAEIGLDMSRFPTASHLVSWAKLSPRTIQSGASSRSGRTGKGNPYLKGVLGEAAAAAARTDTFLGERYRRIVKRRGKLKALVAVARSILVIIWQLLTNPAARYADLGADHHASRIDRGKKVRNHVRQLEALGYTVALTEAA

SEQ ID NO: 394418 - protein, 341 aa, unidentified
MGIVGGFDIHRRQITFDYVDTGTGEVSRGKIAPADRAQVRSWLGRFDGRGDVAFALEGCTGWRFVVEELARVGAKAHLAEPADTAKERGRKQRAKTDRTDARLLRELLAMGRLPESWIPPDHVLEVRARVRLYKALADERRGWMQRIRATLFHQGVPALACHLLDADGQAHLEAAELSSSGRQAVEVALRQIEHLEGELSALRRELVAFAHHQMGCRALQGHYGIGALLSVAIWEELGDCRRFRSSSDAVRHSGLDVTVWASDSQRARGHLARQGPEILRWALYEAGMSAAKRTSPDHGYYLQVRDRLGPNRAALSVGRKLGRRCYHTLRELGDHALAPVA

SEQ ID NO: 394419 - protein, 463 aa, unidentified
MDRHRRRPPKPRPPSVLERINPNAAGIDCGAAEHFVAVPPDRDSTPVRSFPSFTGDLKRLADWLTACGITSVAMEATGVYWIPLFEILEARGFTVLLVNARHVKNVPGRKSDVSDCEWLRDLHMVGLLRGSFRPTDGIVALRAYLRHRASLVESASAHVQRMQKALVQMNVQLPLVVTDITGVTGLRILRDIVAGERDPHHLAQHRDYRCRASEAEIVAALTGNYRPEHVFVLHQHLQLFDTYHQRLAACDQAIEAHLTTLVNQTMAPTTPLPPARQRQKPRANEPRFEVRTPLYHLTGVDLSQIEGIGPYTALRLLAEIGTDMHRWPTAQHFTSWLTLAPRNKISGGRLLSSRTQPSANRAAAILRLTAMSLGRTQTALGAFYRRLAYRVGKAKAITATARKLAILVYRMLKGELAYQDPGADAYDAHHRTRILHRLRKRAAHLGFGLVDLATGELIEAAVS

SEQ ID NO: 394420 - protein, 350 aa, unidentified
MSVKHYIGLDVHKKSVSYCVKRGDGQIVEEGKLPATRETLRQWALERNQPWQAAMEATLFSGWIYDTLQPYASQLQMGHPAMMKAIAASKKKNDRLDARKIADLVRCDLLPACYVAPTQIRELRRLLRYRNLVVRQAVRQKNKIAGLLMEVGASYNKRRLHGAKYFGELLEGLEEVPPSVKDLLRLSRGALQMFEVTQRQLLGRLRNDARLAQRVQLLSSIPGVGEVTALTWALEVGEPERFGSIAHAVSYCGLTSALRSSAERQQRTPLSKQRNVHLQTVLIEAAKLAPRWNEQLAAVHARELERGHRNRATLVVARKLVAYLLAVDKSRQPFQMRSPAVEATPSDQAA

SEQ ID NO: 394421 - protein, 466 aa, unidentified
MRQVEISTRCQRRAATRAVARGEVFPLVRPGAAGIDVGSRVHYVAVPPELGKPVRSFDCMTADLTEMAVWLKACGVRTVALEATGVYWIPVVEMLEDHGFEVYLVDARQTRNVSGRKSDVQDCQWVQRLHSYGLLAPAFRPDKSITVLRSYWRQRQGLVTSCSEQIQLMHKALEQMNVQLHKVLSDVTGQSGLRIIRAIVAGERDGEKLSALCHHGIKCSRAQVARALQGNYRPEHVFALAQALEAHDFFQRQLQACDQVLESEIATVPSRHTQPSSQHPDRPTRAKRRKNQPYFDLRAQLHRLVGVDLTRIEGIDAMTAFSVLSEAGMDMTRFPSEKAYSSWMHLCPNNRVTGGRVRSRRVMPGVNRAGQALKLAAQSLHHSKSALGAFFRRMKARLGPQKAITATAHKLARLIYRMLKYGEAYVAQTEAQYHELTRKRALRNLTSRARRLGFALVNTASGEVVS

SEQ ID NO: 394422 - protein, 384 aa, unidentified
MNKHSMIFIGLDTHKEFHEVAYCEEQRGASPVHFGRIPSSKVSVKKLLRQFESKYPGATLHVVYEAGPCGYWIYRLITSLGHCCYVVAPSLIPKKPGEHIKTDRRDALKLVRSLKSEDLTPVYVPEPEDEAIRDLARAREAAMKDLKEAKYQLKALLLRNNIRYEGTANWSKKHLRWLTELILPHPAQQIVLQEQLQTIDERIRRLERLDNELTHHVHQWRYYPVVKAIQAMRGVRLLVAVGVVAELGDLQRFDHPRKLMAYLGLVPGEQSSGGKRRLGAITKAGNGRARRLLIEGAHSYRYPANISTELQLRQEGLPKDIVDIAWKAQLRLCKRYQRMIKRGKHYNLIITAIAREMAAYIWAIAKEVVLTPVNPKLRLSRVPT

SEQ ID NO: 394423 - protein, 352 aa, unidentified
MALPTLPHPQVLVTLGVDTHADSHVAAALDQAGRPLGTRTISTTPGGYAALLGWARRFGTVDRIGVEGTGSYGAGLARWLRAHGQLVIEVDRPDRAARRRQGKADDLDAHAAARAVQAGTATGQPKAGDGTVEMIRSLRLARRSAVKARTQAANQLKALLVTAPDGLRAQLRRLPPAELVTTAARLRAATKPATPTDAAKLALRSIARRWLLLTQEITALDTQLERLVAMAAPALVAVKGVGTETAAVLLVAAGDNPERLRSEAAFAHLCGVAPIPASSGKITRHRLNRGGNQEANWALYLIAVGRMAWHGPTHTYVERRTKEGKSKAEIIRCLKRHIARELYGILASRPAT

SEQ ID NO: 394424 - protein, 408 aa, unidentified
MNAVGIDVSKGKSMVAALRPMGEVALLPQEFLHTEVGLEQMAYAIIALGEDTRVIMEATGRYHEPVAAALHEYGIYVCVLNPLFIKQSGGGSIRKVKTGKADAMKIAKYGLDNWVDLREYTPMDTVRQQLKLCSRQYNLYMKTVVSLQNNLISLTDKTFPGVNELFSSPERADGHQKWVDFVMTFYHCDCICRVSENAFAERYQKWCKRKGYHFSAEKAQDVYLGSCGHFTTLPKNDNTKLLITTAAQQLLAGKMTLAALRTEMTRLAKQLPEYDIVRAMYGVGETTAVQLMAEIGDVRRFPRRSSIVGFAGVDPAVDQSGKHSAKSVPTTKRGSPHLRKTLYQIACTYLKKSPVDEPVYQFLDKKRSEGKPYFVYMTAAQNKFLRIYYARVKECLEAFDAQQDTSQR

SEQ ID NO: 394425 - protein, 313 aa, unidentified
MQQSFVGIDISKNSLDVHVLPEGTSYSFGNEPQKVKALIRKLKKLKPTLIVMEATGGYEISLAVELSGAKLNAAVVNPRQVRDYARAIGKLAKTDAVDAYVIARFAQDVRPEAREQLNLKERQLKELVMRRQQLIDMRTAEKNRLSRAYTSQVQEELRCHIAELTVRIKAIDEQLHNEIKNDPNWNQKLKIITSVPGIGAHTAHSLLMCLPELGTLNRRQIAALVGVAPMNRDSGMMRGKRTITGGRAVVRRMLHMPTLSAVTRWNKRLKTFYDHLRQQGKKHRVALTACMRKLVIMLNSMLKNNQPYSENYC

SEQ ID NO: 394426 - protein, 318 aa, unidentified
MNTNTLQNINVGVDTGKLQLDIYIRPLDIYFNVLNTDKGIKEAIKVIKKHCPKRVVIEATGRLEMPFILACDTAKLPYVIANPLHIKRFAGAIGKRAKNDRLDAALIAHYAKAIEPKLTQLKSENIRLMSDLVTRRNQLISMQTMEKNRLQVLPKTIASSIKPILTALKNQIERTEIKIAKLIDTCPEYRDKNTFLQSMPGVRKIVAVSLISNVPELGYITNKQAASLIGVAPITKESGRYKGKRIIQGGRTQVRTVLYMAMMSAIQCNPVFKMTYERLLAVGKPKKVAIVAGMRKMVVILNSMLRDGVMWDNNSARN

SEQ ID NO: 394427 - protein, 448 aa, unidentified
MKILALDLGKFNTMCCFFDSKTRKHSFLNAATDRQFLDNLFKKHKVDLVVMEACGPSGWICDLAQNAGHKTIVCSTNEDAWKWSNVKRKTDKDDALKLARMASMDELKPVHMPSESHREFRSLVKYRKTLDQRINKMKCTIRAWFVNHGIAIDTGEKAWCTGRTRINSFRKPLVDCEPHELWKGELDLELTQLDALSEQLNLVVKKLEAIGKQDSRIQRIQTIPGVGPRTAEILVACLDDPHRFKNGRQVSAYFGLVPRQFQSGETDRNGRITKRGNPLARTILVECAWASLRYNSWAKAVYERICGKQKTRKKKAAIALARKLAVLAWAMLRDKTDLKPSHMLQVTKSFGKTTEAIQSVLDEMKPKENSDQRKKRLRKEAREAKQAHPSTESSKATDVAKKVPKKSTSKESPEKPQIGKRILQKDSMRNKSATTRKPRRARESAAAV

SEQ ID NO: 394428 - protein, 413 aa, unidentified
MEVFCGIDWAEDHHDIALAGRDGQLLARRRISDDAAGLAALLGLLAEHGDSAGDPVPVAIETPRGLLTACLRATGRKVYPINPMAVARYRDRHSVAGRKSDHGDAVVLANILRTDLHAHRPLPDDSELAQAIAVLARAQQDAVWERTCAHNKLRSHLREYFPGFLAAFAEARAASCGPKPAPSWPPRPPRPPPPSSPWPSCAPCCARAGRSRGIDAEAARLRDAFRAEQMRQPPLVEQAMGRQALALLRCLDAACASAGDLEQAVIASFDQHPDAGIITSFPGLGSLTGARVLAETGDDRSRFADAKGLKAYAGAAPVIRASGKPIAVLHRRVKNQRLAAAGYIWAFAALTASPGARAHYDRRKTAGDRHAAAQRNLFARLPGCLHHCLATGQHYDETTAFPAPSQTTRKVAA

SEQ ID NO: 394429 - protein, 342 aa, unidentified
MQISTIGIDIGKNSFHFVGFDARGAIVVRRQCSRTQLIRALANLPPCLVGMEACCGAHHLGRILIAQGHDVRLIPPQYVKPFVKSHKNDLLDAEAIGEAVQRPTMRFVPVKTMEQLDLQAIHRLRTRLVGRRTAVINQMRGFLLERGVTCPIGREALVKRFPEVLDNPALGLSVRFCRLLKQLRDEWRLLDDDIEDVDQEILSLARNDEACDRLMQVPGIGPLTATALVAAVGNGAAFAKGRDLAAWLGLVPRQHSTGGKTVLRGISKRGNAYLRCLFIHGARSVCRYHHQKPHRLGRWLTNLEARAHPNVVVVALANKLVRTAWAVLQRNTHYDGRLLANT

SEQ ID NO: 394430 - protein, 358 aa, unidentified
MRIIGCDLHARQQTIAMLDSDTGELEEKTLEHEGDTVREFYSALPGPILVGIEATGSMQWFLEMMEELGIECRVGHPAKIRKAETRKQKHDRRDARLLLTLLAENRFPTIWMPSTEQRDLRTLLRHRHQWVRLRSRVQHTLQSMALNHGLRRGHALWNQAGQHALRALPLAPYASERRSALLTLYPRLQGSIEELDKEVCEEVQQHPQARRLLTHPGVGPITALATEVFLGDPMRFSDGKALASYIGMIPSEHSSGGRQRLGAMSKQGNTLLRYLWCEAAMHAVERDPELKRFYRRKLVQKGLGKARVAAARKLGIRLWIMMRDQIDYQEFCRRGQARQESGSVRAGMPDLNSGPAEA

SEQ ID NO: 394431 - protein, 403 aa, unidentified
MIFVGDDWAEEHHDVYLMDEAGRRLSSRRLAEGLAGIRGLHELIAQYAQEPDQVVVGIETDRGLWVGALAAAGYRVYAINPLAAARYRDRHHVCGAKSDASDAKLLADLVRTDRHNHRPIAGDSADAEAIKVLARAHQSLIWTRTRHTNALRSALREYYPAALVAFEDLTHGDALGVLDRAPTPAQGAHLAPTAIQAALKRGGRQRNIAARAREIRAALHTEQLAAPAPVAAAFAATTRAAVGIITELNRQIGELEATLAQHFETHPDADIYRSLPGLGVVLGARVLGEFGDDPNRYTDAKCRKNYAGTSPLTVASGKKRAVSARHVRNRRLYDAIDQWAFCALTNSPGARAFYDQHRDAKQTHHQALRALGNRLVGILHGCLRRQQPYNEHTAWAHRTTAAA

SEQ ID NO: 394432 - protein, 337 aa, unidentified
MRSIGVDLHSNSLTACYLSEDGTEQFCTFSLRALAAFQEGLHAEDQVAVEATGNTRWFVKQIKSRVSGVTVVNPNQFAVIRQSVKKTDKHDARALALFLSKGLLPEARLKSDACAALSSLCQTRQKLVELRTTLVNKLHAIHRSHGIESKKSEFGSEKGLEQALAREWSIVERVEIEVIVSQIRSLNESLKKLDKQLAESGADLEGHQSLVSIKGIGARSAAILLSVIGDVKDFENEEKLSSYFGIVPRVSDSNQTQHHGRITKRGSKLGRTTLVQCTLVAIRYSEYLKSYYTKKKSEKGAGKAIIATARKFLGIIYRTLKNKWVFADFPNFVLAEG

SEQ ID NO: 394433 - protein, 400 aa, unidentified
MNNNIHIYIGIDVSKDKHDVCLKNNYGDVLKRIQIRNTKGDLKKLYTTVNKLNSGSDDNTGVLFGMESTGVYSLPLSSALKRDGYLVKLYNPIQTSGYRKMEIRKTKTDSIDAAIIADMLRHQEPPVSSAIDNLTLYQLRELCRVRQRNIEKRNKCKVQLIRDTDTVWPGYQSVMKSVYGKTSIALLKEYSVPSNVTVKSFEEIYKMIKSVSRSQITKERAEEIYKHADNTLTVPEIDSIVSIEIKGLISEIELYNEQILTIVTMMKQTMKKINSKITTIPGIATITGATILGEIGDIGKFSSAKKLVAFAGLDPITNQSGKFENKTGHISKRGSPQLRSALFMAANVTRQNDENFMDYYNDKIERGKHHYSAVNATAAKLLRVVYWVLKNDKEYKVKSV

SEQ ID NO: 394434 - protein, 343 aa, unidentified
MKLFVGLDVSLEKTAICVVSEHGKIEREAQAASEPEALTRWMGNLDGAIAAIGLEAGPLSQWLHRGLTEAGLDVVLMETRQVKGALKAMPIKTDRRDAEGIARLLHLGWFRPVHWKSVSAQEVRAVLNARKAVQQGFTGLEMSLRGLLRNFGLKVGCISRGRFEQRIRELTTGNPMLEAATEPMLRARLSLRQDLAGLERHVRQLAQGGPACRRMMSMPGVGAVVALTYRPAVDDPRRFTSSKKVGPWVGLTPSRNQSGERDVSGGITKAGDVNLRRALCHAATVMMHRGRSTWLRTWAAQVARRRGTKRAMVALTRRIGVVLHRMWVDDTEFRPDSAVPYAA

SEQ ID NO: 394435 - protein, 357 aa, unidentified
MRFYTKQHQFYCGIALHARTMYVCILDQHGEILLHRNMSASPETFLKAIAPYRDDLVVAVECIFTWSWLADLCTREGIAFVLGHALYMKAIHGGKAKNDKIDSQKIAVLLRGGMLPQAYVYPAEMRATRDLLRRRMHLLRTRADLLAHVQHTNSQYNLPEIGKKIAYKANRTGVAERFPEPAVQKSIEVDLALIAYYDRLLSDLELSIVKTARQHDANTLSRLQTVPGVGKMLSLVLLYEIHDIQRFPRVQDFVSYCRLVKCAKESAGKRYGTAGKKIGNAYLKWAFSEAALLFLRNNAQGQKCLARLEKKHGQGKALTILAHTLARAVYYMLLRDTVFEMDTFLNGYGSRAGEPAA

SEQ ID NO: 394436 - protein, 337 aa, unidentified
MSIIRIGLDTAKHVFQLHGVDEKEQPVLRRRLSRKEAEPFFAKLPPTRIGLEACGAAHYWARVLRVLGHEAVLLPPQYIKPYVKRGKNDALDAEAICEAMSRPGMRFVPVKSAEQQAALMLLRTRELLVKQRTMLINAMRGHAAEFGVVAAKGLGKVSELLQRAHAEGAGVPTLALEMLSVLASQLDALELRLKTIEAKLMAWHKADPVSQCLATQPGIGPIGAVSFALKVTDPKAFRSGRHFAAWLGLTPKENATGGRSRPGRISRQGDESLRRLLVLGATTVIQFAKPGRAAPWLIQLLARRPRKLAAVALANKMARVLLAMMVSGELYRRPQPA

SEQ ID NO: 394437 - protein, 341 aa, unidentified
MGEVSTIGLDIAKSVFQVHGVDVAGVVVIRKRVSRAKVLEYFGELSPCLVGIEACPSAHHWGRELQALGHTVRLIPPSYVKAYVKRSKNDANDAAAICEAVTRPSMRFVPIKTKEQQTALMLHRARQLLVRQRTMLSNALRGHLAELGIVSAKGRNGTAELLRIIADGRVSPAVCGILKVLTRQYGAIGTEIASIDKSIMALHRGCEASQRLAEIPGIGPIGATALVAEIGDWNTFSSGRSVAAWIGLVPKQHSTGGKDRLGSITKQGNRYLRWLLVVGAMAVIRHACKHGTARRPWLGRLMERRPTKVAAVALANKIARMAWAIMVRGERYKEPKLLLAA

SEQ ID NO: 394438 - protein, 370 aa, unidentified
MSNATTFVGLDVHARSVKACAFVPETGETIRKSFGYEPGEIASWVSSLPQPARCVYESGVTGFHLCRELNAMGAACVIGAVSKMHKPAADRGRKTDRRDAQFLAVQLALGVVTEVHVPDAECEGARDLARALADARDDAVRAKQRLSKFLLRHGLVYDERNAAGQRRNRWTGDFWAWVGRIDLGDAAAMATLDHYCERVREADAAKAALEAKVKSLAQQPRWKPTCDALKCLKGIDAVTAASIACEADGFARFATASGFAAWVGLVPSEHSSGESRFRGGITKAGNKHLRKLLVEAAWHYKGASRSPKDLAKGQAVDAATRRHANAGVRRLVDRRRSMDDAGKQSSVANVAVARELACWCWAVGRMAEGA

SEQ ID NO: 394439 - protein, 347 aa, unidentified
MKITTVGFDLAKNAFQVHGVDQHGKVVLKKQLRRHQVAEFFAQLPSCLIGMEACGSAHYWARRLQGLGHTVRLISPQFVKPYVKTNKNDAADAEAICEAVGRPNMRFVPVKNVAQQGALALHRVRQGFVKARTAQANQIRGLLAEFGVVIPQGIAQLFAKMPEVLEDATNELPDSVRALMLRVLEHLKELARQAKEIEAQIAAWHRDNELSSKLAAIPGIGLLSASALAATVGDAKNFSSGRQLAAWLGLVPRQCSSGGKNVLLGMSKRGDAYLRTLLIHGARAVIHRTRQNPDGSTWLHKLIRRRNVNVAAVALANKNARIAWALLARDRQYRTDHRAPGMIALAK

SEQ ID NO: 394440 - protein, 365 aa, unidentified
MQKISTMRTSGKNIFQGQLTMGVDLGDRSSAYCVLSEAGAIVLEHKLATTPETMKQVFGGMPRCRIAMETGTHSPWVSRLLTALGHEVIVGHAQKVRLITKSRRKDDRLDARTLARLARIDPELLSPVKHRSAQAQLHLTEIRARAGLVSARTALVNAARGLVKSYGERLRKCGTQQFTREITSGLSAGLREALQPLLREVESLNEGIQEYDRRIAKMAKQTYPETALLKQVKGVGDVIATAYVLTVEDPHRFRKSRDAGCFVGLQPGRRNSGDSEPQMHISKEGNEYLRTLLVQGAHYILGPFGEDSDLRRWGQKLAARGGKNGKKRAVVAVARKLAVLLHRLWVSGEAYEPLRNSQKAMSAAA

SEQ ID NO: 394441 - protein, 386 aa, unidentified
MQKLNDLSRSLTALEPDGTLIAVIEMSLSSWLVAGIVPGVERQPLKKLAVDESALLKLLHRWRDEAEKIGHRITRITVAFEAGRDGFWLARWLKGRSIEAHVIHAASVAVSREHRRAKTDRLDTELLKRSFLGWLRGERDHCKMVSIPTIKDEDAKRPNRERESLVGEQSRIVNRMKAALVRLGIRGFNPKLKRAARRLEDLRTPEDEPIPPNTLAELRRDMERRRLVRDQIRQIEEARLERFDHAPGDGPHAMVRLLARVIGVGIETADMLVHEVLSRNMRDRRAVARYAGLTGSPDESGRKRREKGLARSGNGRVRRGMIQLAWRFLMHQKGSALAQWFRARTENARGTRKPMIVALARKLLIALWRLVRQGVVPDGVVLRPAQ

SEQ ID NO: 394442 - protein, 335 aa, unidentified
MEEITTIGLDTAKSVFQVHGVDCDHKPIVRRQLKRRQVLPFFAKLPPCLVGIEACSASHHWARELSKLGHTVRLIPPRYVKPYVKSQKNDATDAEAICEAVTRPNMRFVAAKSREQQAMLMLHRTRHLFVRQRTATINAIRAHLTEFGIVAGVGRNGVDALLKTIADETDERIPELARGCLLALGQQLESVKRQIKDFDVKIIAAHRNNELSRRLEAIPGVGPRIATALVASIADPKAFRSGRHMAAWIGLVPKQNSSGGRDKLGGVTKAGDRYLRSMLMIGALSVVKRVKQLGYTHRPWLAELMARRPVKVAATALANKIIRMVCHDGAWRTLP

SEQ ID NO: 394443 - protein, 310 aa, unidentified
METKVFVGVDVSKDSLDVAIGLGKEIITFTNDQKGVDALIKKVSRIVPELIVLESTGGYERLATSSLVEARLPVVIVNPRQVRDFAKSAGILAKTDAIDARVIARFAAAVKPDIRQLKDRETSELTALVTRRRQIVEMIVAENNRLKLANKRNEKDIKDHIRWLEKRIDKIESDIGKMIKNSPIWRCKDDILQSVPGIGPTTSAVLICDLPELGVLSSKKIAMLAGLAPLNCDSGKYKGRRRIWGGRASVRSGLYMATLAAIRCNPAIKGFYQRLIAAGKCHKVAATACMRKLLIIVNAMLRDQTLWEQN

SEQ ID NO: 394444 - protein, 353 aa, unidentified
MSNDKYVAMDVHKASVSIGVRDAAGKMISRAVVETKAQTLKDYIRGLSGTIHLTFEEGTQAAWLYDLLRPLVAECIVCDPRRNKLLESGNKSDEIDVDKLSELLYLGRLRAVYHGAQGTRALKELAHNYDALVKDNTRIKNRLKAIFRGRGISYEGGEIYDNEQREQWLVQLPERGVRERASQLYEQLAQLDEWVNKARQQMLRESRKQKARKILEQIPTLGEISVAQLIATIDTPFRFRSKRQFWTYCGLAVVRHTSADYRFEQGEIRRRTKPGPTRGLNRNYNRRLKRIFKTAALAGSLKGPFKPYYERLVARGLDSELAQVTLARKIAAITLTLWKRGASFDREKLITTE

SEQ ID NO: 394445 - protein, 402 aa, unidentified
MNPVIGLDISKEESHGQAFLDRGKPLKGTFQFEHTREGLRKLLQVLQDVEHLSGLRPTLILEATGHYQSPVVQFLEEHHYLYIVINPLISNRLRKSNLRKVKTDAADAYLLGDLHYKEEFQPFKKRGVQLLNLRYLTRQFDSFSKMCVQTKLQFQAVLDQVFPAYKGVFGAMYSSISLRFLNEFPTSYSVLQTDEETLKSKIRVLLSSKRGRSESWISERVQRLLDAAKQNPFQQTLYSSHLINLKILITLILQYQEHLAELEQNIDALAKEIEEYDFIQSIPGIGHKIAATILSEIGEFDRFDHPKKLVAFAGIDPSVFASGKFTATRNRITKRGSRQLRYALVMAVQCGLIRSRNTRLKEFYDRKRAEGKPHKVALVACANKLVHWLFAIIKSKKTFRLT

SEQ ID NO: 394446 - protein, 347 aa, unidentified
MEKYSRIGMDTSKQIFQLHGVDEAERVVLRRKLRRREVLSFFGGLAPTIVGMEACGGAHYWARELARLGHEVRLIAPQYVKPYVKRGKNDAADAAAICEAMSRPTMRFVPVKSAASQAALMLAGLRERLVRNRVQLANAIRGYAAEFGLVAAKGRAHLEPLLARLSTDESLPDLARELFAAQAEEYAQLQAKIAAIDAKLMAWHRGNATSRRLARIPGVGPVIASLLVMKTADPQAFRSGRQFAAWIGLTPKDHSTAGKTRLGVITRAGDETLRSLLVVGATAVIWQARRGTGRCASPWLLALLERKPPKLAAVALANKIARIAWKLMTSGESYDARYALAAAPVKV

SEQ ID NO: 394447 - protein, 342 aa, unidentified
MKEASIIGLDLSKRSFQAHGALADGSVAFRKKLTREKVLGFLAEQPRCTVAMEACGSAHHWGRAIHDAGHEVRLIPPAYVKPFVKRQKNDAADAEAIAEAASRPTMRFVAVKTAEQQARAMLFRTRDLLVRQRTQLINALRGQLSEHGVVAPQGPANVAILAQAIDDMTPSLPLLVVELARVYLDQIDRLSEKVAGLEKAIACEAKRGAMTRRLQTMPGVGPITAMAIETFAPPMEVFRRGRDFAAWLGLVPVQHSTGGKQVLGKTSKMGQRDIRRLLITGAMVIVRWACRKAAQEGTWLHRMLGRKPRMLVAIALANKMARSIWAMLTKGEDYRGPVAATL

SEQ ID NO: 394448 - protein, 346 aa, unidentified
MLYAGLDLSRKRLDFHLLDADGATVEVGAAPPDVDGLGGLTQRVARHGEPIRAAIESMNGARFVHDRLELHGWQVEIADAQKVKGLAPLACKTDRIDAWVLAELARRDLVPAIWLPDPQVRAERERARWRLHLVRHRSSLKQRVHAVLLTHGKPCPVSDLFGVRGRQLLAKLGLPEPWQGTIEASLRLIDELDREIGECERELRRLGADHRYVPLLCTVPGISWVLAYTIAAELGDIGRFPTPRKLAGYSGLCPRVYQSGERDLRGPLSKQGPRYLRWALVEAATHACTHPTYRDRYQQTKARIGKQRGAKVAQIDLARRLSEAIWHMLSRGEAFAPKGATDPLAA

SEQ ID NO: 394449 - protein, 319 aa, unidentified
MFVGIDVAKAELVVAVHPSAARWTVANDERGVRTLVERLREPRPTLIVLEATGGYELLAVAALAAAALPVVVVNPRQVRDFARATGQLAKTDRLDADILARFAEKVRPALRPIPNAEAQELDAMLTRRRQLIEMLGAERNRLGQVFGKGKRAVKKSLKTHIAFLERELRIADSDLTDAVRRSPVWRAQDDLMQSVPGVGRVLSHTLLADLPELGRLSRREIAKLAGVAPLSRDSGTFRGRRFVQGGRGPLRGVLYMGALVAARYNPVIRVFYRRLVAAGKPKKLALVACMRKLLTILNVMVRTGTRWLAPAVEQVLVEA

SEQ ID NO: 394450 - protein, 370 aa, unidentified
MQFIGIDLHTNKFTCSYRDEHSPPDARKGDRTETFELTDRGLAAFYRTLTGDAHVLVEATITTFAFVRLIQPMVKEVIIANTYELKQVSQARNNTDKIDANILSRTIKMQVLGREQAVSPVVVPPVGIQELRGLFTTYRLYRKQTTQIKNRIHSLLKEKLYGFTQEEIFDRKSREKIRAIESGTPLAFQLNELFGVLEYVESRIDPLKGEIMMRAEPYMREIEILTSMKGISVFIAIAVIADIITVNRFRNSKSFTSYLRSAPRVSNSNTSVSIKGINKKGRKMSATLITQSLNHVLSASEKLYRWYTRLTQYKKPGLVRTGLRRRVFAEMYQMLKKGEYHYARDERNHEAKLLQYRRFLKKGKILQEIA

SEQ ID NO: 394451 - protein, 336 aa, unidentified
MNEAVCSVGVDVSKRKLDLALLLNNKLKTKVVENSQSGYSQLHQWLLDRGAVIESTHICLEATGPYSESVALALVELGWTVSVVNPARVKGFAQSELSRNKTDALDAALLARFCAAMHPAPWTPPPAEYRELRAWVDRLQALKGIQQQEKNRQEAYDASGQSALVASVQVHLDWLQQQISQLEHDIDDHINRHPGLKHDATLMLSIPGIGDTTVAKVLAYIGDVRRFDSAKALAAFIEVTPRQKQSGSSVRGRTMISRTGHSALRTALYMPGLVALRHNPTLKAFGERLKSNGMAPKAVVGAAMRKLVHLIYGIVKSGVPFDAHFGAKNLDLQDGI

SEQ ID NO: 394452 - protein, 398 aa, unidentified
MLTKVMINNNLTPKTDIIEACGAKPLSERSAAGRTNTVRRREFDRAMVVKADTEREPRRHNGISPNSRLSRRQSASSYLQVRENTMSEPVYVGIDVSKDTFNVASCPNVLKTSLPNTPQGHNQLCKRLKEHPVAIIVMEATGGYEKPIIAELLEAQLPAVVVNPRQVRDFARGLGQLAKTDAIDAEVLAKFAQLVQPAPRPHKTAEMTDLAELVHRRRQLNNLRTQESNRLAMAHHQKVRKSVQSVIKVLDHQIEQIDELISEQIKSDDNFSQKDKILRSTPGIGPQTSAMLLSQMPELGELNRQEIASLAGLAPFDRSSGKWIGRGHIWGGRSEVRSVLYMAALSARNYNPVIRRFANRLEGEGKAFKVVITACMRKLLIILNTMIRNRSLWTAEII

SEQ ID NO: 394453 - protein, 355 aa, unidentified
MDSAKYIGLDVHKESISIAVLNAAGKIVMESVIETNATLILQFFRGLRGELQVTFEEGTSAAWLYDLIQPHVTEVVVCNPRQNALLNAGNKSDRIDARKLAELLRGNQLKSVYHGEHGVRTLKELVRSYLTISKDAARVMTRVKALYRSWAIPCTGKQVYAPQHRAEWLAKVTVPGVHRRAEFYFQQLDALRSLRQQVRRELLSESQKHPAWKLLCQIPSMGPIRAAVLIGIVQTPHRFRTKRQLWTFSGFGIETHSSADYRYVEGQLRRTNRPVSVRGLNANHNHDLKNLFKAAAIVAAHKPGPFQEFYAALLVKGIRPEMARLTLARKIAAITLHLWKKGVRFDAQYLTSQAA

SEQ ID NO: 394454 - protein, 347 aa, unidentified
MRFYTRQHRHYCGVDLHARSMYICVLDQSGAILLHKNLPSNPHAFLDAIAPYRDDLVVAVECIFTWYWLADLCARESIPFVLGHALYMKAIHGGKAKNDKIDALKIATLLRGGTIPMAYVYPREMRSTRDLLRRRLYLVRKRGQLLAHIQNTHHQCNLPEPSRKIIYKANREGLAERFTDPAVRKSIAIDLELAEHYDLLIRDLELDLVRSAKLHAPHTFHLLRSLPGVGKVLALTLLYEIHDIQRFPRVQEFASYARLVKCSRASSGKTLGTGGAKIGNVHLKWALSEAAVLFLRANPRAQGLLQRLRRKHGRAKALSILAHKIGRAIYHMLRTETVFDMNKFLAA

SEQ ID NO: 394455 - protein, 482 aa, unidentified
MKKPTIYPDRSQELLALFEQAGNNKKVMCVPIDYAKKDHLVMFCNGYGEVLQKPFSVKNNSAGIKYLLNQVDRACRHRHIRPEHVFFGGEDINSYAENFANTLRANGWLVANVNAHDAKKQRENLQASTDRIDLMGIATMLLNRRANCCPAQSGIYRNLRTLVRHRKKLVKMKTEVRNRIHTIVDRLFPGFLNEKKSGIIPFSSSSLYLMQERFSAPQIRRRQRQALIRNLEKRGTKKAEQIAAKLQEYATQVLTTPDEYTATLQISLSSHVYHYRCLLDNSQQLVKEMALLLAQTQGAFLTSIKGIGIVLASGVTAEIGDPLSQRSTGRLASYAGIIPKVKQSGGSQGSSITGRVSKRSNHLLKDFVVQSAYHIGRYGPKDLQNDYSRREAAGQHADFGIARRFIRMAMSLMHTSQVYLPPYLRSTHIEPERRADYYLSMWPYLKDKWSKIGAIDMAFEKDKPLGQWRYIVKELYGITLKL

SEQ ID NO: 394456 - protein, 412 aa, unidentified
MDPIIERVAGVDVGQAFVVACVLVGGPHERARKEIKTFRTLTKELLGMRDWFSEKGVTHVAMESTGVYWKPIHALLEDGFEVVVGNAYHIKAVPGRKTDVKDAEWLADLLRHGLISKSFVPPRPIRVLRDLVRYRRRLVGSRTAERNRLLKLLETANIKLSSVVCDVFGVSGKLMLRALLEGRSKPEDMAQLARGRMRRKIGDLELALDGRLDEHHRFLLALQLRRLETLETDIAQVDARIDEQLEPYRDKQVLLAQIPGVDRVLAATLIAELGVDMSVFRGPRAVAAWAGVCPGNNESAGKRLGSRRRRGNVYLTTALVEAALGASLKHGSYLRDKFFRLKARRGHNRAAMAIAHKILIATYHVLSTGADYKDLGAGYLDHLDKTKVANQLVRRLNRLGYQVTLTDNETAA

SEQ ID NO: 394457 - protein, 319 aa, unidentified
MAQNDLVVVGIDVAKDKVDACIRRFTLRQTFPNTAQGRRKLVAWLRKYQVGKAVMEASGGYEREWRNVLYNSGIEVRIVDPRRVRSFALSAGRLAKNDPIDAEMIAWFAETFSQAPSQIPDAAREELAALAKARKLLVDGKIRLQAQDEHAAPEPARKAYARVLKSLAAEIDKLEAAISAKVKATPEFAERAEIIESVPGLAQATSAILIAGMPELGQVSDKVAAALIGVAPYDDDSGKRRGERYIKGGRRWVRNGIYMPCLGAATQCNPVLKAFYQRLLAKGKEPMVALVACMRKLVIILNTMLARRQKWDPGRHAMG

SEQ ID NO: 394458 - protein, 350 aa, unidentified
MDHITKYVGMDVSKEKIAVAVADSDSREGARYWGEIPHRIEDIRKLIGRLGDVKQLRVCYEAGPTGYLLERQLVSMGVACVVVAPSLIPKQPGNRVKTDRRDAQRLAELLRAGELTPVWVPGEEDEALRDLVRAREDAKEDLLRAKHRIGKFLLRRGIREPVGVRPWSAKYRVWLKGLKFDSSALQTTFDEYRLSIEEIESRIERLESEIHAQAQESKHAPVIKALQAFRGIKEIAAATIVAEVGSFLRFRSPRQVMGYSGVVPSEYSSGMAVRQGKITKTGNSHLRRIAVECAWSYRYPPAMSAAIKKRQEGVPANIQAIAWKAQIRLHKSTVTSFSIKARAPRSQSPR

SEQ ID NO: 394459 - protein, 409 aa, unidentified
MDQQLERVAGLDVHRKTIAVCVRLPGEHGERVQHVRTFGTTAAELLTLRDWLEAHRVTDVALESTGVYWKPVFYVLEEVVQCLLVNAQHVQKVPGRKTDVQDCVWLAQLLEHGLLRGSFVPPPPQRELRDLTRYRKVLIQERTREANRLHKVLEDAGIKLATVATDILGVSGRAMLHALVDGTTDATVLADLARGTLRKKLPALRHALAGRFRPHHGFMVSQHLGYLDYLDEAIDTLTTRIEEALAPFAAELTRLDSLPGVGRRTAEVMLAEVGVDMRRFPTAAHLASWAGLCPGQNESAGKHKSGRTRPGNRWLRMSLIEAASMAARTRHTALAARYHRIARHRGHKKAVVAVAHALLVTAYHLLDRQLDYRELGADYFDRRHAERATRRAVRALERQGYRVTNEPAA

SEQ ID NO: 394460 - protein, 390 aa, unidentified
MYIVGIDIGKNNHEATIIDETGVIIGKSIKFTNSHSGANKLIEQVTKSIGDNDVVFGLEATGHYWLSLYSFLLEKGYVINVINPIQSDSFRNLYIRQTKNDTKDSFIIAEVIRFGRFTTTQLADEKILSLRQLCRFRLSLVDSVSELKCRIITVLDQVFPEYEKLFSDTWGISSKKLLEKYQTPEEILELDTSKLAEFLKEHSRGQLGLAKAEKIQEAAQNTFGIKFAQDAFKFQLKQLIKQVLFIEDQIKDLDSEIEIYYNQFDCHLESIPGIGKVTAAIILSEIGDVTRFKSAKALVAYAGIDPTVKQSGQFLANNNKMSKRGSPYLRRALFLCASTCTLHESPLNNYYTKKRSEGKHHLTAVGAVAHKLTHIIFAILRDNKDYEPVS

SEQ ID NO: 394461 - protein, 393 aa, unidentified
MTATHSVNSTASVSPVLYVAFELSNGQWKLASTTARGQRARLVSVPARDTARILTEIARAKSRFGLPQSAKVFTCYEAGRDGFWLHRFLHQQGISNAIVDSSSIEVNRRARRAKADSLDAVSLVGLLVRYREGETDVWSTVEVPDPVDEDQRHLHRELDQLRRERTDHSNRVRGLLAAIGIKIPSKCTLPCDLDSLRQWNGEPVPTGLKRRLTHEFERMELLARQIRAIETEQAEEINNDQTRHVDKVRALMGLKGVGQTSATILVYEFFGWRQFANRREVGALAGLTPTPYQSGESNHEQGISKAGNARVRWIMGELAWSWLRFQPESSLSQWYYRRFGRGTARMKRTGIVAVARKLLIALWRYVEQGEIPEGARESDWKAKLKRVLGRRSA

SEQ ID NO: 394462 - protein, 392 aa, unidentified
MIYVGIDVAKDKHDCFITNSDGEVLFKPFTISNNRQGFETLFQRILSVSDDLTKVKAGLEATGHYSYNLLGFLLDKGLTTFVINPLHTNLYRKSLSLRKTKTDKVDSRTIATMMMSDVNLKSCSDTSYHNEELKSLTRYRFDKVKERAKLKSSVSRLVCILFPELEKLVPTLHMASVYAMLCEFPSADAVANAHLTRLSNLLFESSKGRYGKDTAVMFRDAARSSIGSHMPAKSLELKHTIKLIRELTVEIDEIEAAIKQIMDEEIQSPILTIPGISYRMGAMILAEIGDFSRFDSADKILAYAGMSPSTYQSGQLDNCYSHMEKRGSRYLRYALYNATKYVCHWDESFGSYLAKKRSEGKHYNVAISHATKKLVRLIFAMEKSGKAYLPTA

SEQ ID NO: 394463 - protein, 315 aa, unidentified
MDVLLKNCAGLDVHQKEIVACVIREDSDGNSVTEIRSFPTMTKDLYVLLKWLEQCNVTHVALESTGIYWKPIFNIIEDYFDITLANAQRIKNVPGRKTDVADAEWIAKLLQHGLMEKSFVPPTDIRELRDLTRLRKKWIGNITAEKNRIQKTLECSNIKLGSVISDVFGVSGRKLLSKLVEQGYVDPKDVQETIHFKMMPKAQQISDSLFGTLNTHQIFLIRQSWNHIIFLEEQLEQLEKRIQELLIPYKEQVDLLLTIPGVKENSIASIIAEIGMEMSQFPSAQHLASWAGLAPGNHESAGKKKAPEQPKGILT

SEQ ID NO: 394464 - protein, 315 aa, unidentified
MQVGKLIVGADVAKAELVIHHDDRDEIIKVKNTKPEIKKWLKQQPLNTAIAVEATNVYHLDLVELAHSLGFEVYVIDGFQLSNYRKSVGVRVKTDPTDARLLSRFLKNEGEDLRPWTPPPAVYGKLQSLLRRRAALVTARTAMTQSWANEALLKAAFTAFVKSIDRLDLLIQKKIKEVLREAGLHEQVARCQAVEGIGFLTATALVMAFMRGEFKSSDSYIAFLGMDLRVIDSGQKNGRRRLTKRGCSEIRRLLHNAAMSASRTATWKGVYEQHRNAGKATTQALVILARKLARVAFALMKNQDEYVTKGGKAAC

SEQ ID NO: 394465 - protein, 412 aa, unidentified
MQVRYERCCGIDVHKETVVACVIVPDQDGQPLKETRTFTTMTGDLNALAQWLKEKGCTHIAMESTGVYWKPVYNLLEGQFEILVVNAQHLKKFGDKTDVSDAEWIADLLRHGLLRGSFIPSTQQRALRDLTRYRTTLIDERSRAVNRVQKVLEDANIKLSSVASNVMGVSGRAILEQLIQGESDPTVLAELAKGRLREKRDLLEQALVGRFQPHHRFMLIQHLGHIDFLDEQISKLDHEIEEQMHPFQAAIDRWDQLPGINQRNAQVIVAEAGADLKAFADAAHLASWGGMCPGNHESAGKRKSGKTHKGSVWLRRALIEAAHGAARTKNKYFSSLYHRLVGRRGKKRAIVAVGHSLLVTGYYMITRNRDYQDLGPNYLDERNKESVKRRMVKRLEQLGYQVELKPALPTAV

SEQ ID NO: 394466 - protein, 346 aa, unidentified
MEHYVGLDVSLKLTAICIVDRTGKIEREGVVASDPETIAAFIKSHAPHVARVGLEAGATSTWLWTELNKLGLPVICIDARHAKAALKLQINKSDRNDAVGIARIMQCGWYKEVRVKDLDSHAIKALLVSRALLAKIKRDIENQARGLLKNLGLVIGQAKMNVFAVRAAELAGARPELAGAVEPLLKAREAVGRQIADLDRKVMRLARNVAQVRQFMTAPGIGPITALCFLATIDDPTRFRRSRSVGAYVGLTTRRYASGETDWTGRISKCGDKMLRTYLYEAANVLLTRVAKWSALKAWGIRLAKRSGLRKAKVAVARKLAVILHRMWIEGSEFKWSSKEAANQPA

SEQ ID NO: 394467 - protein, 417 aa, unidentified
MNHPKVQFTYVGIDSHKGTHTAVFLNCFFEKLGEITFDNLPSKFGAFLAKAEKLRLDGTTLLFGLEDISMYGRLLAVFFRDNKQKMKHVNALLVAQERKNQNVTQKTDSVDAECAARVLLSKFDHLPDAQPDDRYWILQSLVTRRDFIVKNNISLKNHLHSLITQHYPNYRQWFPSIDTMASLAFLMQYPSPSALAGITHEQLAGFIREASNNRVGAGVNPMVRAQKILDTLQDTTMPFQEIRDRSVQSTLRQINVNGQEIKQLEQDIANFMGNFDCTLTSMSGVDTIAAAQLLTLIGDIRRFPTAAKLARYAGIAPVPYASGQSEKHYADRRGNRVLNSALYLLAVRLISTASNRIFNPFIHGYYHRKLSEGKTKRQALKCVQRRLVNIIWRMLMYNEPYINPPLGNKGIDPAEKS

SEQ ID NO: 394468 - protein, 430 aa, unidentified
MGSRKMASQKEETVAAYVGLDWADREHEVRMLVVETGQVESLKLKQESEALAGWVQNLRERFSGRKVAIVIEQRKGALIYALMCYDFLILYPVNPKTLARYREAFNTSGAKSDPGDSEMLLDLIRLHRDKLRPWVPEDADTRLLQMLVEERRALVDEVTRLTNRLKSTLKQYFPQALEWAGKLDSKQALDFLTRWQTLESIRKAGALAVEKFYRRHSVRNQDKIEQRLKAIKEARALTTDRAVLAASRMKALAIVRQLRALGKSIAEMEARIQELFEQHRDHQVFSSFPCAKKVLAPRLLAAFGGDRTRYESAIELQSFSGIAPVTRASGKSKTIHKRMACPKFLRQTFHEYAAQSTKKAGWARVYYQRHRDKGVKHHAAVRALAYKWMRIMFRCWQEQAPYDEAKYITSLKRRSSPLVSELPPAQKCSG

SEQ ID NO: 394469 - protein, 317 aa, unidentified
MLDPDSGEVVEERFSADRESLGRWAEQWRGRVEAVAIEATSGWRWVWRELVTRGFEVRLAEPLQARALLGRRRSAKTDRLDARWLARLLAKEMLPESWIPPEETQQLRDRTRLRKALAEDRRRWGQRLHAYLLHEGWPCSRSNLLRPPGLRWPGSLRLPAHARLQVESLLSVMAALETQLDTVDAELRRFARNDARCQALQTIYGIGPILACHLLAEIGQARHLQRADQITRLAGLDPVVDESGDTRRRGKLAKAGSPHLRRARNEAAVHAHRPTAPDLALSRATRERRDTTVARPTVARKIGKRAFHTPRELELAA

SEQ ID NO: 394470 - protein, 369 aa, unidentified
MRESMSVAALSELKKRTIVGRMTIGIDLGDKKSHFCVLNDQAQVIARGFLPTTITAFRREFEGLPPSLVAIEAGSHSLWANQVLKVCGHDVLVGTPRKIRLITESDRKSDRVDAESLARLARADRLLLAPIQHRTQEKQVQLAVIRARHVIVRSRTALINCARGLVKPMGLRFRACSADAFAKRAAATPLPEVLRIALAPLLKQIEAVNESIREYDRQIEQIAATEYPETSLLKQIKGVGTLISLTYVLTLEDPHRFAKSRDVGAFLGFLPRERQSGERAPRLGISRAGNEYLRTLLVQGAHYILGPLGPDTDLRRWGLQLASRGGGGAKKRAVTAVARKLAVLLHHFWKTGEVYEPLRKNPVSDVAAA

SEQ ID NO: 394471 - protein, 380 aa, unidentified
MKKDIRYVGLDVDSERLVVAVADSAGGEVRSLGPIPNAAESVRRLVKKLGPASRLRFCYEAGPHGYGLYWQLTRLGAHCDVVAPTLIPVKSGDRVKTNRRDAEKLARLLRSVELTAVWVPDAAHEALRDLVRAREAAKRDQLRAKHRLGKFLLRRGMKAAVGVKSWTLKHLAWIKTLHFEASAQEAAFLDYLHEVEHAAGRIARLEHALDQAIESAPSAMRALIAGLQALRGVSSLSAATIVAEVGPPSRFARPKQLMGYSGMVSSESSTGKSVRRGAITKTGNAHLRRVIGEAAWAYQRRPSLYRALEKRQTGLSEEIKQIAWKAQYRLHDKYRRLVAKGKLHQKAVIAVGRELLGFVWAIGMQVEKEQRALAARGRVA

SEQ ID NO: 394472 - protein, 347 aa, unidentified
MNEATLIGIDLAKNIFRINCLDKNGKRIMNKNIHRDSLIKFFAQVPACTVAMEACASSHYWGRTIESLGHTVRLIHPRYVTPYRLGDKNDANDAAAICAAAQRPDMRFVRLRSQSQSDVQSLHRIREGLVVEQTATVNRIRALLAENGIVIKQGPTNVFTLLPAILDDTQNDLSGVMRQLLRLQFTHLLGIREKLIELGKILKTLAAEEDAYKRLQQIPGVGLITSTLLGSELGNGSAFRNSRAFAAYLGLTPRQHSSGGKNTLLGISKRGNRYLRTLLIHCARTALRSLIIGKLPFGESSLDQWLRKLIERRGKNKTIVALAAKMARIAWAMLARNTTFQKAASVG

SEQ ID NO: 394473 - protein, 416 aa, unidentified
MKQWQEITHYAGLDWAKDHHAVVIVNSEGSIVADFEFEHSLEGWKSFVEKTSAWPRLGVAIETSQGAAVDQLLQRDYTVYPVHPVAAQSYRERKAPTGTKTDHIDGWGLADALRVDGHGWRPLQPMDPMTQQLRLLCRDEVVLIEQRTALVNQLQQALVEYYPAALEAFDDWTDAFTWEFILAFPTPQALVQAGKRRWEKFLHTHKLWRPETAEKRLKLFAQADQFKGSEPIVRAKSQLAVSLAKLLCTLGQQLKLYRKQIEALFRDHPDHDLFGSLPGAKKVLAPRLLAAVGGDPERYGSQEVLQCIAGTAPVSFQSGKLNKVRVRWACDKFMRYTVHLWADCFRKASAWGQTYYEQKRQEGMTHACALRCLGQRLLKILFRMIATKTPYDAELHARNQQKHGSWVLKLVKEPAA

SEQ ID NO: 394474 - protein, 338 aa, unidentified
MELKRIAIDTSKHVFTVHAIDEKERAVLRRDLRRRQVEGFFAALPPTEVVLEACGGSHHWGRRLSALGHRVKLIAPQYVKPFVKRGKNDRIDAEAISEAAARPTMRFVPVKSAERQAQASVLSVRELLVKQRTQLINALRGQAAEFGIIAAKGAGNAAALAARIASNGELPIVVKEMLARLGQEIARLNQTIAALDSQLAALHRASPVSRRLCEVPGVGQITALTATLTVDPDQFKSGRHLAAWVGLTPKERSTGGKRRLGAISKQGNERLRQLLVLGAMAVIKVAKPGHRYATPWLLRLLERRPRRVAAVALANKMARILWAMMTSGESYRHPPVAA

SEQ ID NO: 394475 - protein, 311 aa, unidentified
MSSSVGIDVSSATLAVHIRPEGVNFSVSNDLKGFQLLVEKLGGYAVSMVLLEATGGYECNVLKALQDADFPVCRINPSRARDFAKSMGKRAKTDPIDAAVLAHLAEVMPPRPCQVMTPERALLRELLMQRDRFVQQRDDDKRRLKQARAISVCLRLEQHIAYLKGEIRALEQEIAQQAAALPDDRVKQLTQVKGIGLITAGKLMAWLPELGQVDKKEIAALVGVAPFNQDSGKQSGKRSIWGGRSQVRRALYMACWVVIRHNKDFSERYNALRAQGKCAKVAVVACMRVLIVRLNAMLKTGTPWQEQVVHS

SEQ ID NO: 394476 - protein, 359 aa, unidentified
MLTQKKELNFSGQNIFVGFDAHLKSWKVSIMIEDLFYKTFVQPACPKTLYNYLDKHFPKGTYHTAYEAGFCGFWAHYELSKLGIKSIVVNPADIPTTGKEKVQKEDGRDSRKIVRSLQAKELVPIYVPSIENINDRSLIRMRATLTKDLSRNKQRVKSFLYFHGISYPECLSVKSSHWSKRFINWLKEIPLSESTGKEALSMLIIQVESLRLNLLSVNRKIRVLSETEKYKKQIEVLRSVPGIGLTTAMTILTELENINRFTSMDTLCGYIGLIPSTHDSGDKRSIRNITPRGHQVLRRMIIESSWIAIRTDPALSKSYLEYCKRMEPNNAIIRIARKLISRIKYVLMNNKKYEYCKVI

SEQ ID NO: 394477 - protein, 368 aa, unidentified
MDKIITSFVGLDVHKDSIAVGIAAAGREPPRFVGTVGPQWAPLCKALGRLGRPRELQIVYEAGPCGYTLARQLLSHGYACEVIAPAKTARRPGDRIKTDRRDALLLAHAGRAGELVNVTIPDERDEALRDLSRSREDAVRARLKARQQLKALLLRHGHRYTGKTSWTAAHERYLSDVSFAQPAQDIAFAEYRSAVREAHERVERLTEALRAQLEHWRMRPVVEALMSLRGIDLIAAVTLVAEIGDFHRFARPRELMGFLGLVPSEYSSGSKRRQGEITKTGNSHARRVLVEAAWNYRFAARVSRVLQVRQEGQPKAVRDIAWRAQLRLARRNRHLTARKLAVNKICVAIARELSAFVWDIARQVKPLA

SEQ ID NO: 394478 - protein, 370 aa, unidentified
MLDTTTFVGLDVHARSIKAVSLDVMTGEARCATFGYDAGAVAGWVRSVDPKARCVYESGVTGFDLQKRLSGLGVDCVVGAVSKMIKPSADRRRKNDRNDAEFLARMLSVGNVVEVWVPDDECEAARDLTRALEDARDDLSRSKQRLSKFLLRHGLVFDERTPTGRRKGNWTRAHWSWIESIRFAERADNDVLAYYVDAVRRAAEERARLEGLVEAEARKPRWRRRVDSLRCLKGVDTATAADLVFEAGEFSRFRNARSFAAWVGLTPSEHSSGESDRRGAITKAGNKHLRKALVEAAWHYLTCSGRPKDLARGQAPDRVARRHAAKGVRRLAERREALLARGVHGNKANVATARELACWVWAVGLMAEEA

SEQ ID NO: 394479 - protein, 277 aa, unidentified
MSATSVVVGIDVAKASVDVAVLGGKLEARRFDNEAEGHSALAAALQPQGVALVVMEATGGYEAALACALQAAGLPVAVVNPKQARDFAKAMGRLAKTDRIDAAMLAELAAVLVRRDDLARFIRPLTDAQQQALAAWVTRRRQLLTMLLSERQRLQLAIPMVRPSIEAMIRAIRAQLDDVEAQMTGHVRTHFAELDTLLRSTRGIGPIASATLIAELPELGRLNRREIAALVGVAPIANDSGATRGRRRVQGGRFETRRVLYMAALVATRHNPVIQTF

SEQ ID NO: 394480 - protein, 414 aa, unidentified
MALPESEHYVGIDWGSAEHAVCVLDEAGRARAEFTIAHTAAGFAELARKLGKFGEAENIPVAIERPDGRLVDVLLEAGHPVVPVKSNAIKAWRDAEVLSGAKSDPGDAMVIAGYLRLRHHKLSAARPFSPQTKALRTTVRTRDDLVRLRVMATNMLSSLLDVFWPGAKHVFADVESPIALDFLTRYPTPASAAHLGEKRMAAFCVKHGYSGRRSPLQLLERLRAAPPGVTSEPETDAGRDAVTALVTVLRTLGTVKKDLDRSVDAHLTQHPDGHVFASLPRAGRVNAAQILAEWGDSRTAYEGPDAIAAFAGVAPVTKASGRHRAVSYRWACNKRLRTAMTNFAHNSRFDSPWAADIYQRARKRGMDHPQAVRVLARAWIRVIYRCWLNHEPYDPAKHGGATRFTTSPPLTQAA

SEQ ID NO: 394481 - protein, 356 aa, unidentified
MVILAIDLAKAKSLFCWYLTSDQTHVFKSVPSTPAAFHDALVEQKVERVVIEVCDMAGWVKDLCQTLGIPIQVVNVNVEGWRWKHVKDKTDKKDALKLGRLSAANDLKLVHLSQRQARHWKSLILYRHKLIERRTAIKNSIHALLVSEGRAMKAGRDAFGAASLSKLRELARPIEQCGKDDLWAGHLSMELDSLDRLMEQTESLDKKLDELGEADARVIRLQTIPGVGPRLSELVVAVIDDPRRFKNAREVGAYAGLTPRRYQSGQMDRSGRISKAGCGKLRKLLLEIAWGMLRYNPRGQRVFTRISKGQKTRRKQAAVALARRVLSWCWAMLRDGTDWKEPAPPRREAVTSICST

SEQ ID NO: 394482 - protein, 342 aa, unidentified
MPRPKNPNSRQGPRARIYKEGCSDHVYRFYNRYRWHRYFERICRFFVLNRKENPSGRRPRRVKDLAGLAAELAEFEPQLVVIEATGGLELMLWAALESAGLTVAGVNPKRVRDFARSLGWLAKTDKLDAGVLAHFGELLRPAPTRLPSPATRAGRELLRHLDSLVVMRAQQRTRKRQLESTLVLESVERVIASLSEEIGRLEEQVEQGLRELPGEHERAAQLRTAPGVGPKTAWALVAELPELGQRTGKEVAALTGLAPVARESGNYRGRRAIAGGRGRVRKALYMAARAAVRCDPHMAAFRQRLLAAGKPKQVALIAVARKLIVALNAMIRDNRTWVPQSA

SEQ ID NO: 394483 - protein, 376 aa, unidentified
MRNDSTLYVGLDVHKESITVAYAIDAGELESLGKIGTTKTEIDRLCKRLQSKAPHVRIVYEAGPCGYGLYRQLVERGFECMVCAPSLIPQKPGERVKTDRRDAVKLARALRAGDLSAVHIPTVEDEAFRDLARAWATAREDLRQAKQRVKSFLLAHGVRYAGRGDWSGAHKRWLSGYSFSNAWQQLAFEELRRTIDDRLAQCERLEATLREAAVNWRFFPVVQALQAMRGVQFLTAVGMVSELGDLSRFMHPRQLMAWFGVTPSEHSSGGKRRQGSITKTGNSYARKLLVEAAWSYRHAAKVGREIELRHEGLPKTIVHRAWDAQVRLCQRYRKLVSRGKSANIAVVAIARELVGFIWDIARLAMLPKSSADAGRA

SEQ ID NO: 394484 - protein, 342 aa, unidentified
MTFVGCDLHTRMQQVAVLDTGTGEVSERQLPHDGMAVEEFYAALPRPVTVGIESTGYATWFHTLIQRLGHTLLVGDAAKIRAMVVRKTKTDGRDALHILDLLRHDRFPTIWVPDPATRDLRALLTHRMRLVRIRTMVKNGLHAIALNYRLARGAQLLRQAGLAQLHALPLPPHTAQRRDQSLELLAGLTAQIRALDEAITTAALAHPDAPRLITHPGVGALTALATIVVLGPVARFHDSKHVVSYVGLAPALNASADKYHLGHITKQGSPLLRFALGQAAAHAARMDADLKRTYFTLVHRRGRPKAKVAVARKLLVRLFIMLRDQIDYDEFRRRGRPAPASA

SEQ ID NO: 394485 - protein, 373 aa, unidentified
MKKRSSSQKSPKPTVKNKGTKERVTIGMDLGDKTSRYCMLSHEGEILREGQVPTTKAGMVEAFGSLGPARIAIEVGTHSPWVSRLLRSLGHEIIVANPRQVKLITESTRKDDRLDAQTLARLARIDPALLRPIQHRSEKAQTALMVIRVRAALLSARTSLVNTARGLAKALGERLPKCDADQMGVPQTESLPPNVRQVLKPLLKEVESLTEKIKESDHEIEQIARRDYPETALLEQVSGVGPLIALTFVLTVEDKDRFQKSRDIGCYVGLRPRRCDSGQSQPQLRITKEGDPYLRTMLVEGAHYIISRRGPDTDLKRWGLHLAESGGKRGKKKAVVAVARKLGILLHRLWVTGEVYEPLRNHNLRQERKKIAA

SEQ ID NO: 394486 - protein, 350 aa, unidentified
MTIVGGLDVHRQQITFDYIDNDGLVHWGQVRPATRKTLRGWLAEQCPDGDGEFALEGCTGWRYVSEELAAAGVGVHLGDPAETAALRGPKKRAKTDRADARLLRTLLLEGRFPESWIPPAHVVELRTLGRLYCTLMDERRAWQQRIHAQLFHQGCPPIKALLTEAGREALAGVELSAAGRQYVDTALRRIDELSVEIQPLRAQLVDFARRQCGGQALQRHYGIGWLCAAIIWAEIGDARRFSSSDQLVRFAGLDVTVYSSDGKRSAGHLSRQGSPALRWAAFEAAKSAARRGSPDYAYYHKLAAKHDGHNGKNPTLAVERKILRRCYHTLCELGDAALALPNTPPQEVAA

SEQ ID NO: 394487 - protein, 410 aa, unidentified
MEGTIFIGIDVSQQNNSVHVMDQSGNKLWQRSFANSLTGSHELVQQLLETRRTRPVSFFNFGLEATGCYGDQIAMFLRETDQIPRSEKVVRLLNPRQVSRFKKSYSELPKTDSMDAFVIADSLRFGRIGLKGTVVDEKYLALQKLTRSRFQVAKDLSREKNRYLQSLFLKFSTMAQDSPLSDNFGTTAIELVNEFESVDEIAYTPLEELAAFLNQKGKGHFVDPQSLAGEIQKAARSSYRLPKAVQDSVNQVLAMQTQTIRFYSQQLKDYDKLIEAQMTGIPNTLTSIKGIGPVYAAGILAEVGDVTRFKDQAALANYAGLSWSRHQSGKFEAEQTHLVHGGNRFLRYYLIEATNHVRKHDPELKAFYARKYDETPRSKSKRAPVLTARKFVRVVYALLRDNRIYIPRQD

SEQ ID NO: 394488 - protein, 397 aa, unidentified
MFYLGIDIAKHKHYASIIDQTGKPITKPFPFQNHKEGGQTLLNQIYQYIESPTEILIGMEATGHYWLAVYSFLLDHGFSVIVLNPIQTNAWRKGTEIRKRKTDAIDATMIADIIRFGRFVETPLVDEKMFALKQMSRFRNALVSNMSDLKRKALVVLDQTFPEYQSIFSDVFGKTSSQILLEYASPSDYEQISIDDLTQIIEQTSRNRLGKKTANKLMELASNSFGVTFCKNAFSFQLKMLMEQISFIEDQIKECEDEMSQLLIDLDTPIMTVPGVGPILGATILSEIGDIHRFDKPSKLVAYAGIDASVSQSGQFESSGMSISKRGSPHLRRALFQAAITAHKHDPVLKAFYEKKRKQGKHYYVCIGAVARKLCYIIYAILKNNKPYEIPQYSKEV

SEQ ID NO: 394489 - protein, 349 aa, unidentified
MEQNEVILGVDTHLDTHVGAVISDTGRLLGTLSVSTDTAGYLDLLSWANSFGPLRRAEVEGTGTYGAGLARLLRDHEIEVLEVNRPDRAMRRSRGKSDPTDAENAARAVLSGRATAIPKEQSGAAEAMRAVSVARRSAVKAKTQAINQLRALLVSAPQEIRERLLKAKTAECVEGCARLRSLGKTPMLQTLTTTLRLLAKRWLTLAEELKALDSMLESLTSRHARRLRERFGVGPQTAAVLVAVAGDNPERLKSEAALAALCGTSPLQASSGKTVRHRLNRGGDRSANNALWTIAMVRMRSDPRTRAYVERRTKDGMSNKEIHRCLKRYIVRELHPLILADLADSTLAT

SEQ ID NO: 394490 - protein, 319 aa, unidentified
MQNIIIGVDVSKDSLDVYVRPTSVRKRFANNADGIAAFVIWARPLAAHRILFESTGPYQIAAVDALLADGLPGVVVNARQVRAFANAMNYLAKTDTIDAAVIAHFGEVAVTKVRPLESEEIRTLRELCDRRGQRLHMLTMEKTHRHSAAVARASAKVLQSIDRHIASLEKQIHALEQCLDRLIENSPVLKARNEILQTITGIGPQVARILLVHLKELGLFTRQAIAALAGLAPFNNDSGDHSGQRHIRGGRGKVRIGMYQAAIAAIRHCPRMKAYYAEMKAHGKPSRVAIIAIARKLLVLANAMIRDMTPYQKPANSVC

SEQ ID NO: 394491 - protein, 415 aa, unidentified
MDILHPRCAGLDVHRDSVVACARLIHRGRVEQHVETFGTTSELERLSAWLSGHGVTHVAMEATGVYWKPVWIVLVEAFELVLANAMHVKNVPGRKTDVNDAMWLADLLAHGLIRSSFVPPATVQALRDLTRTRKQLSREKAAHVQRIDKTLQAANIKLGSVLSDIMGESGRAILDALAAGETDPEALAGRVRTRIRACRGQVVEALRGRVSAHQRLLLRIHLAQTDAIDAAIAQIDDEVGERLEPFRQAIARLTTIPGVSELSAAVIVAEIGFDMARFPTSAHLVSWAGLCPKNDESAGKRRSTKLRKGAPWLKTLLVQSAWSAIRAKATYLQALFLRLKARRGPRKAIMAVAAAILTAVYWMLRRGVAYTDLGADHFNRIERTRLAARLARKLDELGFDVTLTQRPAPCRTVSS

SEQ ID NO: 394492 - protein, 337 aa, unidentified
MSYLGIDLHTNSFTVCRRTKQGKETINEYSIAQIDRFLKTLRKNDLLAVEATGNTAWFIEQIANRVKKTIVVNPYQFEVIRKSVKKTDKHDAKTLAYFLSKDMLPESRMKTKENAQLHSLAVTRDKLVKQRTALINKIHNVLNSHGLKFKKESLGSEKGLKAIWAYHWDTIVKIELEVLVSQIRGLNENIKRLDKDITEQGEKLKGYKNLVSIKGIAGRSATVLLSVIGDVEDFADENKLAAYFGIVPRVSDSNETVHHGRITKRGDKLARTTLVQCTLVAKRYSPYLRNYYERIKKHRGSGKAIIATARKFLGIIYNTLKNGWVFEDFPNFVIANT

SEQ ID NO: 394493 - protein, 412 aa, unidentified
MDVVIDRVAGLDVRRDTVVAAVRVGGRGGGRRGEVRTFATTGAGLTRLAGWLSEQRVSLVGMESTGVYWKPVFHLLEDRFECWLLNATHVRNVPGRKTDVADAAWISDLVAHGLVRASFVPPKPQRDLRDLTRARRIVVEEKTREIQRLEKLMQDAGVKLTSVASKLLGVSGRAILEKMIEGEQSLEYLADQARGRLRSKIPQLQEALAGTFRSGHHGFLAAQLLARIDLCDEQIDELDHRIEVMIAPFRETVDRIRTITGVGEVTATVLLAEVGLDMSRFPTAGHLASWAGICPGNNTSGGKRLSGRTRHGNKWLRTALTEAAHAAARSKDTYLASHHAQVRGRRGVLKAIGATRHDILIAYWHIIANKTVYQDLGGDWHARRRRDPERRRKNLVGELEKLGYTVTITPAA

SEQ ID NO: 394494 - protein, 335 aa, unidentified
MSLYCGIDLHSNNHVVVVIDEEDRRIVEKRLPNEFTSTLKLLEPYREQLAGVVVESTFNWYWLVDGLMEAGFVVRLANTAAIKQYEGLKHTEDHYDAFFLAHLLRLGILPTGYIYPKERRAVRDLMRRRLSLVRTAARQLISVQSQIWRSTGVRISSNQLRRPDFVPPLKEPHATLPAASSLTIYHALQREIARPEEAVLKEVRLRPEFEVLKTIKGVGPILGLTIMLETGDIHRFAQVGNYSSYCRCVKAERLSNGKRKGEGNRKAGNKYLSWAFSEAAHFCVRFEPLAKRFYERKKAKTNGIVAIRATAHKLARAAYYMLKDQEAFDAKRLFG

SEQ ID NO: 394495 - protein, 420 aa, unidentified
MTRKNNNKIISVVHPICCGLDVHKDMVSACIIITEADGEEIFVVKEFSTFTDDLYRFKAWLLRHACKVIAMESTSVYWRPVHNVLEDSLEVILVNAKHVKNVPGRKTDISDSMWLASLLRIGVLKASFIPEKRIRQIRELVTLRKSYIKSLADYKRRVHKLFATANVKISSVVSDLFGKTGRNLIGKLIDTDTELKIEHIEQCAQGSLKQKVAELLRAIQGFFEAHHRFQLKIMMHTIAHLESEIEAITKRLDRILIPNQALMDQLDEVPGIDKKTAQSIIGHIGDTLTSFRSDKALASWAGLCPGNNESAGKRKSGRSPVRKHPFKELMIEIAWAAVRTKGSYYKDKYYRLKSRRGAKRAIVAVAHRITKAVYYIIKHNRSYIDLGEAYLMSKSKEKRLKILKINARRLGFSLVPADIN

SEQ ID NO: 394496 - protein, 377 aa, unidentified
MHSENIAAYIGLDVHKETLAVAIAAPERLGEVRYYGTINNEAQAVRRLFQKLQGLYGNILSCYEAGPCGFGLYHQLTAMNIKCQVIAPSRIPKSPTDRIKNDHRDAISLARLLRAGELTPVWIPDLTHEAMRDLIRARAAAKRDSRVARQRILSMLLRTDKHYAGKHWTGKHRTWLANQSFSQPSQQIAFQHYCQSLEQIEDCILQLDQEISRLLPEWSLCNLVCQLQALKGVGQLIAITLVAELGDFSRFSNPKQLMAFLGLVPGEYSSGNSIRPRGITKVGNSELRRLLYEAAWSYRTPAKVGAWLIYYRPDSVTQYSKDIAWKAQQRLCSRYRSLTAKGKKSQVAITAVARELTGFMWDIALAAQSSFSQQKQN

SEQ ID NO: 394497 - protein, 318 aa, unidentified
MTQISTFIGGIDIAKEKLDAAVHGMPGGIMVENAEAGWEQLAQFFKQAGVGKVGVEATGGYERRVVRYLQRAGFDVVVLQPNQVRAFAKMRLQRAKNDRIDAHLIAACTYVLDARARAPRDERFDELADHLTFIEQIESDATRIKTRLEHIGDRRQRGIYARMIKRLETLAKAERLRLMKHLAVHPDLVRRVELVSSIPGCGEKTALAIVIRMPELGQISREEVASLAGLAPFVHQSGKHQGKMHIGGGREPLRRALYKAVLPAANFWNPALMALSERLKSRGKGHLCAQIACARKLLIFANTVVRRDTPWEARPIAA

SEQ ID NO: 394498 - protein, 357 aa, unidentified
MIWETNLEDHRMDVSLIASVGIDLGKTTFHLVALDCHAKVIVRKKFSRAQLLAFTANLPWSIIGMEACSGAHFFAAKLRDQGHEVKLIPGQFVKPFVKTNKNDFNDAEAIAEAVIRQNMRFVPIKTDDQLDLQAMHRVRDRLVHRRTALINQIRGFLLERGIVFRKGPANLRNQMPVILEDAEQNITPRMRTLLADLWQEWQQLETDINHISEQIERISREDAACQRLRQIPGVGPLVSTAMVAAVGNGAAFRNGRDFASWIGLVPRQHSTGGRSLLLGISKRGNTYLRRMFIHGARAVLLRVKYDTGGLGHWVHKLEARTARNKVIVAIANKLARIAWAVLYHAESYRATAAASAA

SEQ ID NO: 394499 - protein, 345 aa, unidentified
MPIVGGLDIHRKQITFDYLDTETGQVQRGQISPADRLHLRAWLARFNGRDDVAFAVEGCAGWRYVVEELAAAGIAAHLAEPADTAARRGRKRHAKTDKTDARHLRMLLAEGRLPECWIPPGHILECRALLELYNDLRREHTAWVQRIHAVLFHQGAPALGEGTLRTGQGVAALRAAAAAHLSPAGQLQVATALEVIDGLEARLHAVRHQLLAAARHLTGAKVLAARLYGVGPVTGLAITCWLAGEGRFSSSRQAVRFAGLDITVHSSDRKGPPGRLSRQGPPVLRWAVYEAGKTHARTSAPDHRYYAQVKDRKNSKRACLSEARKILRQAHHILAELGDDALAAA

SEQ ID NO: 394500 - protein, 337 aa, unidentified
MERQYVAIDLHRRRSLIVRQNGRGEELGVCRIDNDPVALAVAIEEAGPNPEVAIEATYGWYWAVDALQAEGARVHLVHPRGMGGDDRRVKNDYRDCLEMLKRLRLGELPEAWIAPVGLRGLREVIRQRAKLVALRSGLKTQVHAVLAKHGLHPPVGDLWGLAGTDWLDALRLPAPYAFKVKRLLELIDVLDRQVDEYERIIDDWLRDDIGFHAIQALDGVGPTIGAIFVAEIGDVHRFAHPEQLCSWAGLTPKLRESDAKSRLGHISKQGSPLIRWAAVEAVARARGTAKIRRDYQRIAERRGKGIAKVAAARKLLTLVYYGLRDGHIRALERARAG

SEQ ID NO: 394501 - protein, 403 aa, unidentified
MVFVGIDWAEAHHDICVVDEEGQVLAKRRVPEGLEGVGKLHSLVAEHADDPAMVVVGIETDRGLLVGSLVAAGYQVYAINPFASSRYRDRHATSGAKSDPGDARVLADLVRTDRHKHRPLAGDSNLAEAVQVLARAHQGLVWTRQRQVNQLRNALREFYPGALAAFDDLDAIDAVAILERAPTPTRGRALSQAKIITALRHGGRERNLKAKAAQIQGQLRLSQLEAPALLAEAYGHSVAATVAVIKQLNLQIAALEHELASSFEMHPDAEIYLSLPGLGLVLGARAIAEFGDDRTRFLNPKARKSYAGTAPITKASGNRQVVLARVARNRRLADACYLWAFSALTRSEGARHRYDVLRARGQTHHQALRARANRLVGILHGCLTNRQAYNEHLAWSSHVEVAA

SEQ ID NO: 394502 - protein, 355 aa, unidentified
MNQEKYIGMDVHQATISVAVMDGSGKLIMECILETKAATILEFIAGLRGTLSVTFEEGTPAAWLHDLLKPHVSHLVVCDPRRNALLKDGSKSDRIDARKLAELLHANKLHAVYHGEHGVRTLKELGRSYLTIPKDLARVMSRIKALYRGWAIPCSGATVYAPRHRDEWLAKIPHPGVRLRAERLYQQLDLLQPVRQEARRDLLVESHKHHAVELLRQIPSIGPIRAALLVALLQTPHRFRTKRQLWAYSGFAVEIHDSGEYRFARGKLVRNRERITVRGLNHNHNHDLKNLFKGAALSASTRPGPLGDFYVALVEKGMRPTMARLTLARKMAAITLTIWKKGVDFDAKPLNRHAA

SEQ ID NO: 394503 - protein, 315 aa, unidentified
METTTPAPEATYAGLDIAKDRLDYTVDGVRCDHVPNTAAGHERLLAALRSLRHLRVVCEATGGYERAIVAALLLAKIEVCVVNPGRVRAFALAEGLLAKTDRLDAQLLRRFGQRVQPRLHLPMDAAAITLRELLDYRRQVSEQLVAVRNRLELAGPVLRPRLEGQVEFLQKELAESDRLIAEHIDHDGTLRRKAARLRELQGAGPVLTATLLAHVPELGEIESPQLSALIGVAPFAHDSGRRHRARHVRGGRAVVRHVLYMAAVAATRHNPVLAAFYARLVAAGKPKPVALVAVMRKMLHVLNRLLADPDFVLVR

SEQ ID NO: 394504 - protein, 331 aa, unidentified
MKNRLIIGIDVSKLVLDVFILSCNFHFTVENSPKGFAALLEISCTKLKTSKQQLYFCFENTGRYSRMLAVFFHQAEITFFRIPALDIKASKGISRGKTDKADARDIALYARRKGAEMEPTKISSAETSELRQLVSLRDKLIKHRTAYKNSLNDLTDCYYEGETDFIRQTQLRMVKQLDNEIKNVEKRMYTIICSMPDWEENYKLIRTVRGVGPVISRYLIIYTENFTRFTKYKKFACYAGIAPFEYASGTSVKGRTRVHPCANKQLKSLLNMAAMNAIKINGEYKQYYLRRQQEGKNNMSTLNIIRNKILARIFAVVRRQSPYVDLHKFAA

SEQ ID NO: 394505 - protein, 334 aa, unidentified
MWHVGIDLHRMTVVLAAVNDSGEAMNPITIPCSDTATIVGTVTALGTFRAVIEACGTYRWLYDLLRPHGTVLLAHPMRLRAMIQRRSKTDKLDAQLLANLLRINQIPLAYIPPEPYQQLRDLTRCRARLGRHLAEVKIQLRALLARQNRESPYRTPFGPRGLGWFRGQEFGPVENMVRDELLERFRHYAKQMLLFDKRLEELRQTFPQVEALADIHGIGLYSALLIVAEFGEVERFRTAKQVGAYTGLTSRVHQSGGHCYQGSITRQGSPWLRWVLVQAAMKAVHRDVALKNFYSRIRKRSSTKIARVAAARKLAEICWKRLRRWERAHAGQAA

SEQ ID NO: 394506 - protein, 425 aa, unidentified
MAIIDGIKGIGRAIKYQIIKEGRRLKTLPGGIDIGSESHHVIIMDDNGKILCDRKVAHKFREFREAIEEFKEIEKQHQGEITFAIEGKNGYGAPFDRMLIESGFKLYNVDNLKLRRFRDVFGAEWRNDRRDAKMLAKMLKLRDYMDTEEETAFIAVQKTPAVHEKLRILSRHQQSLIDEKVRIQNRLRKRLLEVCPDILEYGDTDSKKLLQLLKKYPDFNRYKKITLAALLKIETIGKKTAVSILEGLRNIQYVEELAVIYKAIIASYCRRILELKEEITLLDRELEETGEKSSEVMQLKSIPGVGTKLSSRLAGEIGDIRRFNRESQLAVYCGVACIDDDSGKSKKTKAVYKANRICKATMIEIAGCTIRYVQESKAYYEKKRAEGKEHNHALRCLARQLIKVIFKMLTENRGYICKEELKKAA

SEQ ID NO: 394507 - protein, 354 aa, unidentified
MANQAHSAVVYGIDLGKTWFHVAGCDATGRSLHKVKLSRSRVFPFFANTSVALIGMEACPGSQWLARRLQALGHTVKIMPAQFVKPYVKSNKNDAVNAEAIAEAVTRPSMRFVQVKQTEQVDLQALHRARDLIVSTRTRLICQMRAFCLEYGIAMRNGAGAFKLDADVLKVLNDDTNELTPAVRHLLRELWNQLQELEARIQKFTRQIESIASRSQFARRLLTIPGIGPLGATALLAAVGDGKQFKSGRDMAAWLGLTPAQYSTGGKSTLLGVSKRGHAYVRRLLIHGARSCVIHLDRTRDRLGSWITDLQRRMHINKVVVALANKLARIAWVVLTRPGALYQRVDPAFSGGST

SEQ ID NO: 394508 - protein, 348 aa, unidentified
MAAITTVGIDLAKNVFHVYGVDERGKTVLNRKLIRRKVLEFFAQLPSCVVGMEACASSLYWARTIEELGHEVRRMPAQFVVPYRRGNKTDATDAAAICEAVQRPNMRFVPNKSQYQADIQAVHRIRSGYIRERTATINKIRGLLAENGIIIPQGSRHIREKVAFIMADELNGLSGIMRQVLTSLYEHLCELKDKISRQDVLLGQIGRESDDCKRLQKIPGIGVMTATLLLSLSGNLSSFEKGRAFSSYLGLTPKEHSSGGKQRMGGISKRGNTYARTLLIHGARAVISVLFAGKIPYGGGPMYEWLKRLVERRGVNKASVALASKNARIAWRLLTRKDEFQSSLGAAA

SEQ ID NO: 394509 - protein, 325 aa, unidentified
MTAIVGIDIAKDKFDVCLLNEAGEVRQATFANNKQGVNQLHHWLKKQGARQAQVCLEATGVYGDLVAETLHSRKYQVSVVNPARIKAYADSQMRRNKTDALDAALIADYCRTQQPEPWTPPPTELKELRTLIRHLDDLKQEKQRASNRLDVQNSSEAVIQHLQAQLELLEEQIQHTLRLIHDHIDRYPDLKRQRDLLDSIPGIGDLTASYLIAELGDIRRFQDVGEVVAFVGLNPRQHQSGKKQTTHGISRMGRAALRAALYMPAIVAKRCNPRLQVWANQLSQRGLTGKQVIVALMRKLVHLAYGILKSGRAFDPHFGDFRLAA

SEQ ID NO: 394510 - protein, 369 aa, unidentified
MNNYTTVVGLDVHKETIVAAILPYGHKDVTEKVSIENHPKAIEKLVNRVTRQGPAEFVYEAGPCGYQVQRQIAGLGHHCAVIAPSLTPVRPGDRVKTDKRDAVNLARFYRSGDLTEVHVPTCEEEAARDLPRAREDVLKDRLRARHRLSKFLLRQGRVYRETTSWKTAHRAWLRTQKFEWPVLQQTFEANMRAHEEAEARLETLNQQAHDLAQQPKYSMAVSCLRALKGIDTLGALTLVVEAQDFRRFSKASAFMSFTGLVGSESSSGEKVRRGSITKAGNAHIRRVLVEAAWSQRYHNVVSRELAERRKGCPEEVLKIAKKAQTRLNRKFLRMTGRNKLHQVAVVAVARELAGFVWSIGQHIPAAVSV

SEQ ID NO: 394511 - protein, 355 aa, unidentified
MNQEKYIGMDVHAATISAAVMNAQGTVLMECVLETKGATILEFIQGLRGTLALTFEEGTWATWLHDLLKPHVNRLVVCDPRKNAQSRDGNKNDRMDARMLAELLRTNRVKGVYHEKNGTRALKELGRSYLTLTKDSTRVMNRIKSVYRSWAIPCAGTSVYSRRHRAKWLAKLVEPGVRIRAEHLYQQLDSLEPVRQAARRELLRESRKHAAVKLLRQIPTIGPIRSALLVAILQTPHRFRTKRQLWAYSGFAVQTYDSGEYRVVRGKLQRNRERITVRGLNRNHNHDLKNLLKGAAISAIGRSGPLQDFYAALVEKGMRPSMARLTLTRKIAAISLIIWKKGVSFDPKQLQRQAA

SEQ ID NO: 394512 - protein, 369 aa, unidentified
MQRKEISFKGQKVFIGIDVHKDSWRVAIAPEVGVVKGHSQKPSARELLDFLKKYYPDGEYHAVYESGFSGFSTYYALQDVGIDCIVIHAADVPTTQYEETMKTDKVDAAKLVRSLKSGLLTGIYIHKRDDIDARSVVRLRKTIQKQLGSYKSRVKHLLHSNGVTFPERFSTPGSHWSKVFIRWLKEEVVLLSATRTSLDLLIAQVESIRKTLLMATRNVRELSRSERYRHDYELLTSIPGVGVNVAMTLLTEIGDINRFHNEKEFASYLGLVPTSHSSGGKVAHGEKTFRGNKYLGPQIVEASWVSIYRDRGLGCAYLNYKKRMKPQEAIVRVARKLSNIVFSVLKTGKKYKPYEWDEKQKHTDLQATS

SEQ ID NO: 394513 - protein, 387 aa, unidentified
MPQPNDLSRSLVALDQNSTIIAVVELSHSSWLVGGIVPGIERQPRKKLEPNPERLLALLHRWQDEAVRAGSTITRIAVAFEAGRDGFWLARWLEARGVETHVIHASSVAVSREHRRAKTDRLDTELLKRGFLGWLRGERGHCSMARVPTIAEEDAKRPNRERDCLVGERTRIVNRIKSTLARLGIRTFKPTLRKAADRLATVHTPEGMPLPPNTLAELQRDMARLGLVVSQIRQIEEARQKRLEQQHETGPHAMVRLLARIVGVGVETADMLVHEVLSRPMRDRRAVARYAGLTGSPDESGAQRREQGLARAGNARVRRGMIQLAWRFLMFQKESALALWYRARTADSRRGTRKTMIVALARKLIIALWRFVTTGEPLEGVVLRPAT

SEQ ID NO: 394514 - protein, 346 aa, unidentified
MTNNIQFSSVCGIDIAKSVMQVYKVTSDGVVSNKAVKRADFLNEFRNIPPALIGMEACGGSQHWARELQSLGHTVCLMPPKLVKPYVTGLKNDKNDARGIYTALVMGVREVPVKSAAIQDLALLQTMRTKRQREKVAKINHIRGILTEYGLIMGKSVNAFLAKTGSLIVELKERADVSPFIVSELNALFQKVKEAMAKIKELETNIESIAKTLKHYDLFQSAPGVGPITAATMLVLLCNPEVFKNGREFAAYIGLAPKSSGSGGKNFVTHIPKKYECNNEVRILLVQCAHAICRSKHKSDWVSSILARKPKKVVIIAVANKLARQLWIMAKKGEKFERRFILAAAQ

SEQ ID NO: 394515 - protein, 405 aa, unidentified
MQYIGIDIAKHAHVAAARLDDGTPHGKAFEFANDEEGFGSLLKRLRELDADQGSCLVVMESTGHYWMSLWSFLDDHGFGVAIVNPILIDAFRKADTVRKTKTDLVDAFLIAEYARFKRLGPSRVSPEAADGLKQLTRYRAHLVKERTALKNRSTAVADRLFPELERLFSDRHSATSRAILRDYGTPAKVAATDIRTLTKTVERASRGRHGRVKAEEIKAAAKSSVGSAYASDALAFELAHALELVDHLDAEIARLDAKIGELLDTEVGGLLRSIPGIGPVNAAAIAAEIGDPDRFDDPRKLVAYAGIDASKYQSGKFDGDEQHMSKRGSSYLRFALMTAADKARIYDPYFGDYYDSLRARGKHHYVAVSGVARKLCGVILAVLRERRPYEPRPSIQSQRKQAGTD

SEQ ID NO: 394516 - protein, 467 aa, unidentified
MRNVIGIDPDAKGFVCSLVKLEESNVTRRRFTATWKDVQSFIRWVKTVEDVIVAIEGSNGQSRPIEKGLREAGVMFYSFKPADTDRFRKAVLGQNKNNEKDAESVARYAMALEMQGKLERYRRVWFPDAELQLLTRSYERISQETTAEMNRLWKTLRLASPDLYLALGGNNPEVELEENVLKTKGILALLAAKPDIGEWKKLSDEELLAAMGTRTSPARRTIIQELRKVISSFPSMTAPMAMMIGSGAEQIGLFKRKEVEITKLLEEITQGNAAVHALRSMRGIGTITSTTMVAEIIDIRRFAREDSLACYSGLGLLEHSTGDTTRMIHTEMFNHRLKDAFMTAARNYVHFNLDSHLAGYCRNLVKKGMSPLEAYKRVARALVRVIYKKLTSLVESDTHTSGGEDLREGESDMASGVTRSDQSHESDMPLSSPAQGSTGEGGRIKSGDVTTKRRGSVNKRRAVKKNA

SEQ ID NO: 394517 - protein, 346 aa, unidentified
MQYVGIDWAYRHARWCAISEHGELVAEATTPADEDGLLRLIARLGPDVRACVEMMSGAVWVRDCLERAGWRVEVADARKVKGLAPLAAKTDRVDARLLATLAFRDLVPALWVPALSERALSERLKRRAHLIRLRSSAKNRSFGLLSQWGLRLSLQRLREPDAAELLESRGVPEVWRRSVFEAVALVDHLDRRLAPLERELLPLARADRRVQLLDSIPGVAAILGLTLAVEIGEVSRFATARKLVGYSGLTPSVRQSGESSRTGRLSKAGSATLRWAAVEAAQHAWRESNPWHRLYRDVKQRTGKTNAAKSAVARKVLIAAWHVLSREQPFKPHSPVSASSPQPLAA

SEQ ID NO: 394518 - protein, 351 aa, unidentified
MIIIGVDYHPSSQTIAFLDQETGECGERQLNHSDGEAEKFYRELKQRGVSVRVGMEATGHSRWFERLLAELGFELWIGDAAEIKTKRVRKQKTDREDARLMLKLLLENRFPRIWVPSPENRDLRQLLWHRHRLVQMRTRIMNQLQAVAMNEGYRWKKKLFSEKGRGLLEKLPLAPWASRRRKELLELLDQLDPKIAELTAAVEQEAKKRPEVLLLMTHPGVGPITGLVYVLVIGMPERFPCGKQIGSYTGLIPCEDSSAGRQRLGHISKQGNTLLRFLLVEAAQAAARCNPDWRRRYMHLMMRREKRIAKVAMARKLGVRLYWMWRNNWQYSQLVEFGSNAGKLVTGHGVK

SEQ ID NO: 394519 - protein, 348 aa, unidentified
MQQFYIGLDVSLDETSICVVDAKGAIVQEITASSDPESVSAALKMYRDRIARIGLEAGALTSWLAVELRELDYPAIVVEATHMRSAIRAQASKTDRNDARGIAHMMRLGWYKTVHVKSAESQRLRVLLSNRRILKRKLIDIENHIRGTLRAFGRKMGRIGRSSYEARVLELIEDLDPATAEFIVAMLEVRRGIWKGYTALHNLVVRIVKDDPVCRRLMTVPGVGPIAALTFRAGVDDPLRFARSRALGAHFGLTPKVHQSGTIDRDGHITKRGDIDVRTSLCEAAASLLMRVQKWSALKAWGLRIAKRSSMMNAVVAVARKLAVILHRLWLEDRDFQWKAEAAVAEKG

SEQ ID NO: 394520 - protein, 335 aa, unidentified
MQIYGIDLAKEKFDVSFFDLTSKKVSNQPSHKVVKNNFKSIGRFLETLPSDAVLVAEHTGVYGDTLLKCCMDSNVKIAFVGGYVIHRYRATPDRAKTDVLDCALLREFGERYPDKLKYRKIPEEALYELRQLARHREMLVEQRKQLMTADKSEDCRPIRSLAVKRSMDRIKEMLDTEIAETEKEMLKVINGHDSIHHNYEIVKSVNGVGLVTAVELLVKTDNFTKITTARQYSAYAGTAPYEKSSGKMDKGAHISKIGNRRSKTLLYICAESARLHNKEIKLYYERRTLIDKKPRHYVLNAIANKLLRIIFTLVEKGEYYDANFIRQDPRVVKYN

SEQ ID NO: 394521 - protein, 354 aa, unidentified
MNIKYIGMDVHKEAISIAVMTGEGRLVMESIIETKASTILQFIQGLRGDLHLTFEEGTWAAWLYDLLKPHVTELVVCDPRKNALLKEGNQSDKVDARKLADLLRGGYLRSVYHGENGLRTLKELARSYLTISKDLTRVMNRVKALYRSWGILCGGQQVYTPRHRAEWLNKIGEAGVRRRAEFFYQQLDALRALRQAVRRDLLAESRKQSATKLLRQIPSIGPIRAALLIALIQTPHRFRTKRQLWTYSGLAIETRDSAQYRYVAGQLQRSKKPQQLRGLNENHNHDMKAIFKSAATMASSREGAFQAFYQGLLRKGMEPAMARLTLARKMTAITLILWKKGAHFDAEQLKPQAA

SEQ ID NO: 394522 - protein, 315 aa, unidentified
MGKQSSQINVGIDVGKAQLDVYIYERDIHLTVENSPEGVRGLLARLNRYRLARVVLEATGRYERLVADMALAKDMPVVIVNPLQVRRYAGAVGQLAKTDKLDARVIAEYAAVIQPEVRAGSSRNVRIIKDLLARRRQLLVMSTMEKNRMHIMPKSLRADIQRHIRHLEKQVEKLDKLLDEKIEAESQWRDKRAIMLSMPGIGPAVVNTLLGDLPELGHLTNKQVAALTGVAPYNRDSGSLRGKRRIRGGRHSVRTILFMATLTSVQHNPVIKRFYQRLVALGKHKKVALTACIRKMVIMLNAMVRDGKMWNEKLA

SEQ ID NO: 394523 - protein, 363 aa, unidentified
MHSINNTELSSLEETRCQFNGGRCTIKLGIDVHQDFYVVAEQVGGTNPKPPQRFQKQAFLHWAAKLKQSGAEVYAVYEACGFGFSLQRQLSALGINCYVVCPQKLDERNKRVKTDGLDAKALCLKLDRFVQGNRDALAIARVPTEKEERSRAIHRHRQQLVGARKRLEAQGRSLMVNHGLEPVQNWWKPRTFAVLPVPQWMRELLANSQPILVALQQKIAALTVQLQSAAAPNQPRGLGKMTSVVIDREIGNWHRFNNRRQIASYTGLCPGEYSSGNTRLQSCVTKHGNPRLRAALVELAWRLVRFQPNYKPVRKWRQILAKGALATGAARKKAIVAVARQLAVDLWRVRTGRCKPEVLGLVS

SEQ ID NO: 394524 - protein, 359 aa, unidentified
MSTITLGVDLAKRVFSVCEMDAAGRVLRWHELRREAFAAWLGQQPAGTVVAMEACSGAHHWARRCLALGLQPKVIAAQFVGPFRKSRTTKNDRNDAEAIATAARQGNMRFVPVKSVEQQARLAWHRVREGYKAESLAIGNRLRGLLAEFGIVVATSDLALRRVLADLDAHDGLPGEFRELLRDLAAHWAQLRERIDACDARIDTHARQDARCIRLRSIVGIGPITADAVVATLGAATDFRNGRQLAAWLGLVPMQHSSGGRARLGTISCRGDAYLRTLLIQGARSSLQRAKAVVTEKATPEQLWIRTLDRRMPFGKVLVAIANKHARQAWAMLVRDVDYDPHACLQHPRHQQTNTAQAA

SEQ ID NO: 394525 - protein, 312 aa, unidentified
MAQGEVFVGVDVSKDWLDVAVWPAGQTARVANDRAGRGELTRRLKRLGDLQAVGFEASGGYERGLLKALLDAGLPARRLNPVRVRRFAEACGLLAKNDRIDAAVIARFCATLPGRLAERNAAADALAELVTARRQLCEEMTRAANQGQHAGQPLLKRLAGRRASRLAQDIRTLDAAIAKAVAADPDLAAKDALIRSVPCVGPVLSHTLLGLMPELGSLSNRAAAALLGVAPFDRDSGTFKGQRRIAGGRQPVRDVAYMAALVGARCNPTLAAFKKRLQDAGKRPKVILVALMRKLITILNAILRDQLPWAVT

SEQ ID NO: 394526 - protein, 344 aa, unidentified
MQKQSYVGLDVSLAETSICVIDETGARLFEGKVLTDSAAITATVRRHVVGQVVRVGLETGTTAGWLWRELIALGLPAVCLDTRHAHRALSLRVQKTDKNDARGLAELVRLGWYREAKVRSVDAQFVRSLLMARRQLLAIKRNLANQLRNVLKTFGLTRTSTAGRGWLAKVRAIVADTGWVAPVVEPMLKICAELDIQLAALNKQLLILAREDPDVRRMMTVPGIGALTGLAYKAAIDDPSRFTSSSSAGPYLGLVPKVRQSGETEWTGRISKTGDELARTYLYEAAGVLLFKVSRWSALRAWGIRLVQRIGLKRAKIAVARKLAVLLHALWTDGTEFEWRAATT

SEQ ID NO: 394527 - protein, 318 aa, unidentified
MSTTRRTYVGVDVSKATLNVAILPARQHFVVSNDEAGIDELLGRLTQVSDALVVLEASGGFERPLAAALAASGVALFVVNPRQARDFAKATGTLAKTDALDAFVLARFAEAIRPTPRAIPDAEAREFREILARRRQIIRMMTAEKNRLGASSSKAVCGRIEAHIRWLEKELSRTDRDLDETIENSPAFKENEALLRSVPGVGPVLCRTLLAELPELGSLSPRELSALVGVAPLNRDSGTLRGRRTVWGGRARVREALYMGALIASRFNPAIKEFYERLLAAGKPKKVALVACMRKLLTILNAVMRERVPWRCPHALNS

SEQ ID NO: 394528 - protein, 348 aa, unidentified
MDTVTERYVYVVGVDTHARTHTYCIIESRTGAVVDTRSFPTTAPGMQRAVSWIRRRTHGTAVLAAVEGTSSYGAGITTAFLTEGIEVAEIRALYRRSRARTGKSDPLDAEAAARTALSTDAEKLAQPRRSGDRAALRVLLASRSLTDQQRTANKNALTALLRITDVGIDARKPLTDAQIATIAAWRTGRDERSQRVFREEGRRLAKSIIEQTRSLQQNHQALSVLTETLAPGLQSIPGVGAVTGAILVASYSHHGRVRSEAAFAALGGIAPLPASSGNTRRHRLSRSGDRQLNRPVDVVVRTRMSYDPATCKYVDRRRAEGLSKREIRRCLKRYVCRSLFRELRTRMA

SEQ ID NO: 394529 - protein, 357 aa, unidentified
MSPIVSEQYEFVIGVDTHAATHTFAVVAGATGAALHRATFPTSTPGLARAFDWLNRHVADRSTLVVVEGTGSFGAIVTRRLQAAGFTVVEAARMSAGERRGTGNSDELDAVRIARAVLGLPLTRLRDPRELSTDKARVAMRVLVVVREQMTGERTRTINTLTALVRTVDLGVDARKALTTGQIRTVAAWRERDEDATTATCRHEAVRLPRHIRTLEADLASNRTDIHTLVAKDTPELLDLTGVAAVVAAAVLVTWSHPGRLRSEAAMASLAGTCPIPASSGNTVRHRLNRGGDRRLNRALTTITIVRMRVDPDTRAYVARRRAEGRTTKEIMRSLKRYITRQLFRTLAAAHPTPEPA

SEQ ID NO: 394530 - protein, 336 aa, unidentified
MSHYCGIDLHSNNHVVVVIDERDKRVFDKRLNNDLSSTLEVLSPYRETLKGIAVESTFNWYWLVDGLQEDGFGVQLVNTAAVKQYDGLKCSGDHQDAFHLAHLMRLGILPTGYIYPKEQRAIRDLLRRRLSLVHAASTQLISVQSQIWRTTGNRIPSAELRKLEFTPPPMDQYTLQAVDSGLLVYKTIQEQIRVLEQSAYRVVKLTDTFEILRTITGIGKILGLTIMLEIGDFHRFAGAGNFASYCRTVDATRTSNGKKKGTGNAKAGNKYLSWAYSEAAHFAVRYEPLAQRFYERKKAKTNGIIAIRAVARKLARATWMMLKHQVPYDAKLMFPG

SEQ ID NO: 394531 - protein, 340 aa, unidentified
MSRIKDIRKSVDIKHMYVGLDLHKATINATVMDENGTVLNKVKIKSEPDSLRNFSDSIPLGSDIVIESSSTWYWAYRILSERHNVTLSNPLKTKAIAESKVKTDKVDSFTLANLLRGGYIAESYIPPMELMQLREMVRYRASLVRVRSIIKNRIHAHLLMYNIKINASPFTKEFIKTLRELNDYKINGYLNVLAVLNKEIDDISNKIKDIANDNEDAKLLMSIPGISLYSALFILSEIGDINRFPDSGHLVSYAGLAPSTRSSGNKVYHGPITKQGSSYLRWILTQVTWANIRKEPNETVGNFYSKLKKKKGSAKAIVAASAKMLRIIYWVLKEHRPYQS

SEQ ID NO: 394532 - protein, 343 aa, unidentified
MAIVILGIDLGKNICSLVGVNEDGAVVLRRRMRRQTVLTFAAKLPSCVVAMEACCGAHHLGRLLTAQGHTVKLMSPEYVRPYVKAQKNDDRDAEGIAEAASRPTMRFVDLKSQEQLDLQSLHRVRSRLVGVRRTLLNQLRAILLERGHIFPQGRRKFEAAIDTLVADPACEISSRIRQLVIDIRSEWQALDSRIEALNGEFVAIARRDETARRLVTIPGVGVLNATALVAAVGNGAAFRRGRDLGAWLGLVPKQHTTGGKPKLLGISKRGNKYLRMLFIHGARAAMPSLSASQSPLGEWLRGLLARTHRNIAIVALANKLARIAWATLRRKTSFDLRHLAVAG

SEQ ID NO: 394533 - protein, 362 aa, unidentified
MMKLKYSICCGLDVHKNVIVATIVTTNKDGISEYLQKSFSTINSDIQRFHNWLIENNCYHVCMESTGKYWIPIFNYLENDIDVCLTHPKYVKAIKGKKTDKKDSKWIADLYKFDLVRCSFIPPKDFRQLRELSRYRFKLVCMKSSEKNRIQNCMTISNVGIASVLSDPFGKTATEIISYLLEHTADSMDEKAVRKLIKKGAKSKSDEIIEAIKGYTIETDQAKKLELARGHLEYLDDMITQTEVELYVRIKPYYEFVEFVSTMPGMTELSSTIVLAETGVDMDIFDDVKHLCSWCGLSPANNESAGKKKSVRIAKAGDYLKPMMVQCALAAIKSKKQPYFAIKYGRIKKRRGHKKQSLPLQE

SEQ ID NO: 394534 - protein, 391 aa, unidentified
MIYVGIDVAKDKHDCFITNSDGEVLYKAFTIANNLDGFNDLYQKIEAVMEDVTKVKVGLEATGHYSYNLLGYLIDKGLTTYVINPLHTNLYRKSLSLRQTKTDKVDARTIASMLMSDVNLKSYSDTSYHNEELKSLTRYRFDKVKERAKLKTSISRLVCILFPELEKLVPQLHMASVYAMLSEFPGAKQVANAHLTRLTNLLSESSKGHYGKETAITFRDAARASIGSNMPAKSLELKHTIKLIQELDSEIGEIENEIKIIMDGINSPILSIPGINYRMGAMIIAEICDFNRFDSPDKILAYAGFSPSTYQSGQLDGAYAHMEKRGSRYLRYALYNATKYVCHWDPTFAAYLAKKRAEGKHYNVAISHAVKKLVRVIYHLEKTKQQYIKAA

SEQ ID NO: 394535 - protein, 314 aa, unidentified
MEKITVGIDVSKDRLDVAVRPSGEDFAAPRTGAGLDDLVARLKVLKPNLIVLEATGGLETVVAAALAGAGLPVAVANPGQIRAFAKAIGQRAKTDAIDAAVIAHFGEATGIVPRPLPDQATQQLADLVARRRQIIDMIGAERQREKRANPRIKKSIGRLLKSLERELSSVDTDIDDAVRGSPAWREKEDLLSSVPSVGPAISRTLIAELPELGSLDRKEIAALVGLAPFARQSGQWRGKSFIGGGRASVRKALFMGAMVAAQYNPVLKAFYQRLLAVGKPKKVALIAVARKLLTVLNAIVRDGTPWKGTVGAVS

SEQ ID NO: 394536 - protein, 410 aa, unidentified
MDILYLRCAGLDIHRDTIVACVRLAEAGGVVRLVETFATTTAELERLSEWLAGHGVTAVAMEATGVYWKPVWAVLAGHFELVLANAHHVKAVPGRKTDVNDATWLADLLAHGLIRPSFVPSLSEQALRDLTRARKQLTREKASHVQRIDKTLQAANIKLGSVLSNIMGQSGRALLEALAAGESNPEQLAGLVRTKIRASHAQVVEAVRGRLAAHQRLLLRLYLTQVDALDAAIAAIDHELGERLKPVQETVQRLTTMPGLSPLSAAVVISEIGLDMSRFPSAAHLISWAGLCPKNDESAGKRRSTRLRPGAPWLKAVLVQSAWCAVRVKASYLHALFQRLKARRGPRKAIVAVAAAMLTAIYHMLKRGAAYHDLGPDHFQRTERSRLAARLARKLGELGFDVTLTQRAAA

SEQ ID NO: 394537 - protein, 395 aa, unidentified
MFIVGIDVAKRSHEVCMITSDGQTVQRPFSIRNNCTGYNLMLEKIRKHTNIKSQIVFAMESTAHYWLALFTRLRKDGYHVILLNPIQTSAMRDMFIRKIKTDAKDSFIIAELIRFGRYAESNVAQDRLLALKELCRNRFYLVDMAGDLKRKLIALIDRVFPEYEAQFDTIFCKSSVAVLKKYPTPQKLSNAHLDKLTELLWNSSNGHFGEWKARELRELARNSFGVEDCDGAYSTLILLMLDQIQSLSGKADALEKEISRLFQSFDTTVTTIPGVGPIIGAVILSEVGDISRFSSADKLAAYIGVDPSVNQSGEFQAAHAHMSKRGSPYLRRCIWMASQVAVQRDPMFHAYYEKKAAEGLKYMTIIGHVTRKMTAVIFAILRDHKVYEPILPTAA

SEQ ID NO: 394538 - protein, 408 aa, unidentified
MQVLYPRCAGLDVHKDMVMARVRFVSDPPHDEVRSFGTTTSELLQLNDWMYEHAVTHVAMEATGVYWKPIWHLLEDHFELVLANAQHIKNVPGRKTDVNDANWIADLLAHGLIRSSFVPPAPIQELRDLTRTRKQLVREIAQHSLRIQKTLEDANLKLGSVLSNILGKSGRAILAALIAGETDPDKLADLAQGHARKKRVELVEALRGRIRAHHQELLRIHLNLIDALYQALADVDARVGKTLAPIKESARLLTSLPGVSDLTAQVIVAEIGVEMARFPTAGHLISWAGLCPKSDESAGKRRSTRVRKGAPWLKTTLVSAAWAAVRVKGTYLQAQFLRLKARRGAKKAILAVAASMLTAAYHMLKNGIEYHDLGADHFSRRDRSKAIQRLVRRLNDLGCEVQLNPQAA

SEQ ID NO: 394539 - protein, 467 aa, unidentified
MRWRRGCVKKRANLVQASLRSDGLEVAVLCETQIPHHRFDPHCLKVPPFAEPGNGKGVWQFLSLTCSAAIGFAEEETMQVMIERGCGLDVHQATVVACLLTQMPNGRCKKQIRTFSTTTRELIALRAWLQAEGCTHVGMESTGVYWKPVYAILEGAFELVIANAQHIKRVPGRKTDVKDAEWIADLLVHGLMKASFVPPPAIRELRDLTRYRRKLVESQSAERNRLLKVLETANIKLASVASDVFGVSGQLMVAALVAGEATPAAMAELAKGRLREKLPQLELALAGKVEEHHRYLLRLQLKRLQAVEEDLAQLEAHLQEKLEPYREQEARLREIPGVDSTLAAIIIAELGVDMSVFPSASKIAAWAGVSPGNHESAGKRRSGRVTKGNVYLKTALVEAAFAASRKKGSYLREKFYRLKARRGHKRAAVAIAHKILTAVYHMLGQQVPYHELGDLYLNVTLERTVAA

SEQ ID NO: 394540 - protein, 370 aa, unidentified
MKETITSYVGLDIHKDSIAVAVAEAGRAAPRFVGTTPPELAALCKALTRCAKRSNTLVVYEAGPCGYGWARHLSKQGWRCEVISPAHITRKAAEKRLKTDRLDAQLLARESRAGNLVKVVMPDERDEAIRDLSRAREDAGGARLRARLQLKALLLRHGRAYHGKSSWSAAHERHLAAIKFDHPAQQIAFDEYRQAVKDAHERVERLTQALREQCEHWRMRAVVNALMCLRGLDFIAAVTFIAELGDLSRFAHPKALMKYLGLIPSEFSSGNTRRQGSITKAGNKHARRILVEAAWTYRFNPRVSRPIEVRQEGQPKAIRDIAWKAQLRLTYRFRKLNAGRKMTQNKCCVAVARELAGFIWDIARQVKIPA

SEQ ID NO: 394541 - protein, 408 aa, unidentified
MEVVHPRCCGIDVHQASLAVSVSIKETRKAEKYQMCCGTTTADLLRLADWLDGHQVTHVAMEATGVYWKPVWHILEGQFELLLANPAQVQALRGRKTDLKDGERIADFLQHGLLEGSFVPPQPIQQLRDLTRSRTTLKQEQVRIGNRIRKVLEDANVKLSSVMSDVMGVSGQAMLRAMVRGESDPEVLAGLARKRLRGKIPVLRQAAIGTLNEHHRFLLEQWLAHWDELKERIAKFDQRIEEQMRPFAEAVETWTSLPGIDRITAWTMVAEMGPNMRQFPTVAHAASWAGLCPGEEESAGKRKSGRTRRGNVWLRRGLTQAAWGASMKRGSYFKAFYQRLAARKGKKRAIVAVAHALLSTGYMLLWTGRKFSDLGEDYFDRLDRERLTKRLVKRLEKLGHQVSIQPAA

SEQ ID NO: 394542 - protein, 350 aa, unidentified
MMIIGCDYHPGFQQIAYVNTDTGEVREARLGHKEEAEQFYRELRKRGMQVRVGMEASGHARWFERLLNELQFELWIGDAAAIRTKRVRKQKTDRQDAQLLLRLLLEDRFPRIWVPDAENRDLRQLLWHRHRLVQMRTRVMNQLHVVALNEGLRRKKALWRPAGRAQLESLVLAPWASRRRQDLLDLLDQLTPKIQELTRRLEEVVEARPIARRLQTHPGVGPLTALAFELVIGTPERFQCAKQIASYVGLVPSEESSGDRRRLGHISKQGNVLLRFLLVEAAQVTVRSQMQWRSQFFHLAMRRGRKIAKVAMARKLAIELYWMWRRGWNYNEMQQLGSHAGEPGHPHGVQ

SEQ ID NO: 394543 - protein, 437 aa, unidentified
MSATASDCPPPHFQAPALPVGEFAALIGLDWGDRKHSIALRPRSVGPTAVETLDLEHSAESLHAWIKEIGERFGHQPVAIAVESSKGAVVAALMEYPWLVLYPIHPSTSRRFSTAFTPSGAKDDMPDAQILLEIIESHRQRLRALVPQDAATRRVAMLVEVRRKLVDSRTHATKKITRLLKNYYPQALELTCESLCAPMAMDFLGRWPELAVLQRAKAQTVRDFYRAHNVRRPELIEARLALIKGACPLTEDRALCEVSVLHLAALVAEVRALSAHVAKADAAIATAFASHPDAQIFRSLPGAGPALAPRLCVLFGANRERWSNASELQKYYGIAPVTERSGRQKYVHWRWSAPVFARQSLVEWAGQSIKWCEWAKAYYLQQKERKNRHSSILRSLAFKWLRILWRCWRDSKTYDDALYVAHLRERKAPLLAFLPAA

SEQ ID NO: 394544 - protein, 337 aa, unidentified
MPNYSLIAVDLAKSVFEIAVSGRPGKVSEQCRVTRDKFLSFFVNRPQATVVLEACGSAHHWARAIENLGHKAVLLPPQHVRPYVLRNKTDRTDAKGILEAYRNEDIRPVPIKSVEQQTLASLHRLRSSWLAERTAKINVIRGLLRELGFIIPVGARNVIPRAWALVEDADSGLPDALRPALAEVCDEIRTLEEQIRRIEHQLGALAQQTPTVELLRSIPGIGLASVGDVQRLPSARHFASYLGLTPREYSSGSKRRLGRISKRGDVYLRMLLIHGARAVLCHAKKMKEPDRLRAWALRLEKSAGHNKAAVALANKMARIVWAVWKRYRRFEPIAQSA

SEQ ID NO: 394545 - protein, 333 aa, unidentified
MTSLGIDVSKDSLALALWQQGQVVTVASVPNTPEGWAQLPTRVRAPGGAGATTSVAVVLEPTGGYELGGALWAHQHGWQVHRPNPRLVRDWAKGEGHRAKSDRLDAKVLARYGAKQQPPVWQPLLSHVSELEAWLRRRDDVTGLLQQERNRQQQITVRPGMHREVPASVERVIGVLEEELRQIEQAIADHLAQHPDLAQGRARLLTVPGLGQQNVLPVLVLLCRWQTLTAGQGESKGLVADAGLDPQPYESGTSVKKPAPISRMGERNVRRLLYMGALGATRGDNPARAFYQRLVGRGKAKKLALVAAARKILIWAWAVFQAGTVFDPAKLVA

SEQ ID NO: 394546 - protein, 347 aa, unidentified
MERTLNHHWCVGVDLHKDTLMACVFCGCCGEVSFQKLPCKCRRQIAAYFAALPRPHTVAIESVGFYRWLWETLEPVVQELVLADATQARALAGRRLKTDREDALNIAQLLSAGRLPTSYAPPLEVQILRDITRHRNGFSRQHARVLHRVKSIMNANNRPGPARLASEGLIRYVKAQGPKLPPRHVAMLWQCVDSLVLTERQMQEAERTIGDVVRRDLFREMVEILVSFPGVARLTAATVIAEVGDFRRFKDPKAIGRYAGLNPRVFASGGKQRIGHIAKTGSADLRWILQQAAWTAIRTDEHVRRIFLRIAKRSGRKAAAVAIARKLLTWMWSAVCKGEPYRTRSAA

SEQ ID NO: 394547 - protein, 349 aa, unidentified
MQYIGVDNHKKFSYLAIMDEKGKILKEGKIGNSRESLKKFLGDSDEPQKAVLEAGRNWTVMHDWLEEDMEEVKLAHPMKVKAIAEAKIKTDKIDAKILAHLLRTDLVPEAYVPKKRTREVKNVLRQRMFFVKLSSMTKNRIHNILDRYPDIRGRIDPSDLFGKQGIKWLKVVELPEEARKLLDEELELLEYLKEKIKRSDSVVAHLGSKDKRVKRLMTIPGIGKFFALLIAVEIDDIKRFRNKSKLASYAGLIPSVHSSADKTFYGKIVSHGNKHLRWAFIEAVWPAIKKDLRLMEMYSKVKQHKKVNIAKVAVARRLCEIAYRVLSEDRDYVANYSGRPHNLLAVAEN

SEQ ID NO: 394548 - protein, 369 aa, unidentified
MAKSITYIGLDVHKDTIAVALAEAGLRGEVREHGKIPNAPAALKALAMKLASAGRELRFCYEAGPCGYGIQRQLAGMRHDCTVVAPSLIPRKPGERIKTDRRDAINLAKLHRAGELTPVWVPDQAHEAIRDLVRARQAAVRTLRQARQQLSGFLLRHGYHYHRPAWTQLHRRWLASLRFEQAVHHIVLEDCIAAVEAATARRDRLEAHIEAALPEWALAPVVQALQALRGVGLVAAATLLAELGDITRFTNPRQLMAYLGLVPSEHSSGRTRRQGGITKAGNGAARRMLIEAAWSYRFPARISREQLLRQERLAKPIRDIAWKAQERLCRRYRQLARAGKLPTVITAAIARELAGFIWAIARQPQSTTP

SEQ ID NO: 394549 - protein, 360 aa, unidentified
MELKHDTLPSFKNQDFHIGIDVHKNQWTLSIISMNMLLKKYQSIDPSPSILLKYMQRHYPDGKYHVAYESGFSGFWAARKLKDLGVNCMVVHASDVPSSQKERLNKNDRVDSRKIARSLSNGELMPIYIPEKIAEEYRYLNRHRLKTIKDQTRLKNRIKSVLHQFGVTIPLQYQERRWSGVFIDWLLTIKFDTEYAQFAYEDLVDQFIQTRARITTHLRKMRAMAKVQAPFDTLIPLLLTVPGIGFITAMTLVTEIIDMTRFNTLEKLASYVGLIPSIQSSDETEINYGITPRRNKYLRTMLIEAAWKAVKIDPALTMKFNKLSRRMHRNKAIVRIAKILLSRIRYVLKNQKPYVLSVVN

SEQ ID NO: 394550 - protein, 350 aa, unidentified
MKDIVAGMDLHSNNVVIGLMEKDGKRLGSRKIACDIDDVVAYLAPHKDRLKMAAVESTYNWYWLVDGLAERGYPVVLANPAGMAQYDGLKHGDDHSDAFFIADLLRLDILPQGHIYDRDLRPVRDMLRRRMSLVRQRTALMISFKSLYSRTTGAEMPLKKLKDLDVETAQKLYEHPANNLIAGLQLEQIEHLDAAIKRVEKVVLESARELPYYANLSTLPGIGRILGMTITMEVGDIKRFAGPGEFASYCRTVDAGRTSNGKKKGDNNSKCGNKYLSWAFVEAANFARRYDEQCRQWYDRKAAKKGKVLAAKALACKMAKAAWYVMARNTSYDAARMFGGAGGEKKTMKP

SEQ ID NO: 394551 - protein, 405 aa, unidentified
MELIIALDISMGKSYKVLYDGQTCLSEGEILHNKFGFQALLEEIHSLPEEPKIVFESTGIYSKPVETFCQKNNLTYFLLNPLEAKKQLEQGTLRSWKTDKHDAHKLAQIHPFVDRSEKVQQPEIYTELRDLSRFYQEIEGQIKHTRMYLHHALQVSFPELERFFSSRVTPYALTLIELFPHPELVLQTSRTKIKNLLMKTTHKKISENRAMEKAKLIIEYAQESYPAVSPDSVPTQKVQYYARQLLHLLEEKKMVSEQLIVKARQLSEFQLFTSFPGIGEISAALLIGEIGDLSRFSNHKKVNAFIGIDIRRYQSGKYAGQDHINKRGNPKGRKVLYLIVKNMIRQQKAAPNHIVDYYYKLKKQPQAKKDRVATVACMNKLLKCIYSMVRNNTKYEYSYTVSKDQ

SEQ ID NO: 394552 - protein, 428 aa, unidentified
MTQSSSTTSPTMWVAIDIAKAHNEVLIESPQGRRRHFRVANTLEDFAKFAALLSSSGYRCRIAFEATGDYHRPLAYFLGAQGFALSLVSSIAVARTRDALYNSWDKNDPKDAQVILHLLKTGTTQVYYDPLEHHYHDLQELANTYQQISLGKVRLHHSILTHYLPLYFPEAERYLHSTRAEWFTQLLLLAPCPAVVLKWSREEFITWARRLNAHKNDKTRWLADFYEAARSSIGLPVAENSEAIRMFRVVLNEYLHLCRLRREMEEQVVARLSNHADFRRLQTIPGIGPILALIILAEAGNLRRFSHDQKFLKYCGLDLSTEQSGQFRGTTKLSKRGNARLRYAFWMAGAVAVRAKQNSFCQKFHDYIRRDPLNPDLRRKAYTAVAAKMARVVYAVVKTGTDYRRFPEATVPGGRIPSLRAVEAISTS

SEQ ID NO: 394553 - protein, 453 aa, unidentified
MCLEDRPVLEPNAAGIDVGAREMFVAVPPGRDQNPVRVFATFTEDLERLTDWLEQCGVTTVALESTGVYWIPLFEILEQRGIRPCLVNARHMKNVPGRRTDWHECQWLQFLHSVGLLRAAFRPGQDVCAVRTLLRHRNELVAAASQHVQHMHKALTQMNLQIHHVISDITGLTGRAIVDAILAGQRDGAELAKLRDPHIKADTETIRKSLEGNWRPEHLFTLGQSRDLYRIYQQQIVNCDLEIEKMLQGFAPRIDPVERPLPPDRKRNRAGSKRRRKNGHPHPEFDLRTETYKLFGVDVSQIPGLEENALPLFSEVGRDMSRWPSAANFVSWLALCPDNDISGGKLLWRGARRVKNRAGHLFRMAAYALHRSPTPLGNYLRRMKAKLGPQAATMATAHKIAVIFYTMIKNQVEYDETIWDARDAQREKRLEAKLKRQAKQLGFELVPVELKAA

SEQ ID NO: 394554 - protein, 350 aa, unidentified
MRKHSENRAVKIMGIDLAKKSSHVYGEDAEGRKAISKKFGRQKLKEYLANLPPCTLAMEACGSAHYWARLVQSYGHEVELIAPQFVKPFVKSNKNDAADAEAICEAAQRPNMRFVAVKEIGQQDVQAIHRMRSLAVASRTAQINQTRGLLLEYGIEIPKGRANLLRRLPEILEDAENGLTELFREELFGLYEELRHLDARIAHYEAKIEQIAQADERTQRLQTIPGIGPKIATALLAAIGNIHAFKNGRELAAWLGLVPRQHSTGDRITLLGISKRGDVYLRQLIIHGARAILNWVDRKTDRTSRWATALKERRHKNIAVVAMANKMVRIAFALLKTGESYRAEPTPAAA

SEQ ID NO: 394555 - protein, 350 aa, unidentified
MDTTVAPLASIGVDIGKDVFHLVGFGTDGKIAFRRKIKRLALIETFKKLPSCVVGMEACLSAHFVSRALRKLGHEPRIIPAIYVKPFVKGQKNDYNDAEAIAEAPLRPNLRTVREKSQEQLDLQACHRVRSRLVSRRTATINQIRAFLIEQGIAVRAGVTALRNSLFEILKNREDEISPRMSELIVGLYEDWLWLDKRIEAITKEIEEISQREGNCVRLMSVPGVGPLISTAVVAAIGTGEAFDRGRDFGAWLGLVPRQYSTGGRSILGGISKRGSRYLRTLFIQAAKVLLMRSQNWPKFSFGPWLANAAPRMHRNKLAAALANKLARIAWSVLSTGKAFDIHKLEIEAV

SEQ ID NO: 394556 - protein, 342 aa, unidentified
MKEVSIVGLDLAKRVFQVHAAKSDGSVVLRRKLSRGQVVTFFTELPKCTVAMEACATAHYWAREIGKLGHDVRLIPPAYVKPFVKRQKNDAADAEAIVEAATQPSMRFVVPKTESQQACSMLFRTRDLFVRQRTQLINALRAHLAEQGVIAPQGIANLTLLTEIVEDHDTGLDLIVVETARLYLDQIGVLSSRIASLEKALRSEAKRSQSTARLMSMPGMGPITAMAVEAFAPTMVTFRRGRDFAAWLGLVPKQHSSGGKQVLGRTSKMGQRDIRRLLIIGAMTVIRWACRKAPPENSWLARMLARKPRMLVAIALANKMARSIWAMMTKNEDYKDSALAAA

SEQ ID NO: 394557 - protein, 357 aa, unidentified
MQSTIAASTQPQVTVGVDTHKQFHVAHAADQLGRPLGSHRMAASTAGYRQFVSWAHGLGQLVIVGIEGPGHYGAGLARYLRAEGIAVTEVGRPKRQRRARYGKSDDTDAAGAAAIVLAGEALGDPKSADGAAEMVRVLRVARTSAVRARAKAYTALQDLLVTAPAALREQLAGLYKKRLIQACKQLSESETPSSPTDAITMAIKSLAARCEQLDVEAARLKHHIDTITATAAPQLRAVYGVGPDTAATLLAAIGDNHDRITSDGAFAKLCGVSPLQASSGKTVRHRLNRGGNRDANRALHVILVVRLRRHQPTRDYMARRLAEGKTKNEVMRCLKRYLAREIFHALQPSRKATKIVA

SEQ ID NO: 394558 - protein, 448 aa, unidentified
MVMCLYHRVYDDVKLATVAHRSLRVMNATSYFRRHATVTNDNDTASNSALVAIDIAKAKNDVVIERPGARQRQRMKVLNTRAEHQRLIDHLHALDCPVQIGFEATGNYHRPLAWRLLEAGFELRLISSVALARTREALHNGWDKNDLKDAQVILHMLKIGLTQCYYDPLTHGINDWQELSKTHEIVSKAKTEAMHRLQTHYLPLYFPEIERFRHNSRSEWFFIFLDRFPVPAAIMALSREQFIEAAWPVIGRKVAKARILGDIYETAKTSIGLPVTAESPAVAMYRLVIAHIRQLIQQRDEIERQAHVLLADHPDYQRLRQLPGIGPIIALTVLAEAGDLRRFRHYRQFLKFCGFDLATHQSGQFRGQSKLSKHGNARLRKAFWIAGQTAVRQRENSFRDKYQRYTARDRDDRDLNRKALTAVAAKMARVAHAVVTSETDYRPFYGVR

SEQ ID NO: 394559 - protein, 352 aa, unidentified
MTAVMIGIDPHKASHTAVVISGAEEPLGELRIRASAAQAERLLAWAAAWPERTWAVEGAGGLGHLLAQQLLSAGERVLDVQPKLGARVRLLATGNVNKNDPNDARSVAVAALRSPGVREASPDNHAAVLKVWAKRHRDLGSSRTQVVCRLHAVLCELVPGGVAKKIIAARADRLLGSITPPDAAAAARWELAAALVEDLRRIDGQLRETKKKLATAVRASGTSLTGLFGVGPVTAAIIIGEVREVSRFKNRDRFSAYNGTAPIEVSSGQRKVHRLSRRGNRRVNHAIHMIAVTQVRQKHSEGRAYFDKKLAEGKTRKEALRALKRQVSDAVFARLRADAQRARAQVKDPGGQ

SEQ ID NO: 394560 - protein, 368 aa, unidentified
MRMKTHPQYFISKPRRSSKVGVTIGIDLGDIWSHYCTLSEDGEVVDRGRFRTNPSGVGKRFRDLGPARVAMEAGTHSIWVSEQIRELGHEVIVANVRELRAISHSDRKSDKVDAEKIARYARLDPEILRPIAHRSVAQQETLTLIRARDALVRLRTGAVNSVRGLAKPCGYRLPASSTLTFAKRCLAVLPPGLAQALGPLLHQIADMTVKIKQYDREIQRLTETKYPEPQALVKVYGVSHLTALTFVLTLGKKERFQRSRDVGCYLGLRPRRSQSGDSDPQLGITKAGNGYLRQLLVECANHVIGPHGKDSALRRWGLSLGARGGSHARRRAVLAVARKLAGSRAISIRSFGWSQCASGSHELTLELY

SEQ ID NO: 394561 - protein, 369 aa, unidentified
MEKSTTYVAMDDSKRKIVVGILRPTADDPELREIANDPRQIRRLFERLKPEGRLAACYEAGVSGYNLHRQIMALGVPCSVIAPALTPRRPGQRVKTDRRDAAKLVRLFRAGELTAIHILDEREEALRDLVRCRDDLRRDVLRWRHRVLKLLARHGCTYLAGRNWSRAHWRWIREQHFDLPPLQRAFEATLFALEQALARQAELDTELATVATTAPYREPVAALRCFRGIDTLSAIILLAEIVDFQRFPRPRQLMAYLGLVPSEYSSGETQRRGALTKAGNSHARRVLIEAAWHYRHRPAIGPALATRSHGQPDEILGHAWRAQQRLHRRYRHLVGHGKRSPVAVAAVARELVGFLWAAMTRADHRSAVA

SEQ ID NO: 394562 - protein, 411 aa, unidentified
MIKENYIYVGIDLHKETHTAVMIDCYNQKLGEITFPNRPADFPKLVAKVKKCNTDGKTIVFGLENAYGYGRALAVWLIDKGYLVKDVNTAISHRQAKHRGAMYRKSDSDDAEAIALATLNMLDKLPDAYPNDAYWSLGQLVHRRDNIMKQRTRLVNQLHEQLCITYPSYKQFFNDISRPTALYFWEHYPSRKYLKGKSVEDLRAELVPVSHNKCSTKTCEKILDAVASDKVKNNAYQDARDMVTLSIVSDLQHYDSQLTEVDKMLEQMYKMLGCTLTTIPGVNVITAVKILAEIGDIKRFSNANKLAQFAGIAPLHLSSSGKGKDVATKQGNRRLQATIYFLAIQMVQVSSKGTPRNSVVRAYYEKRKAEGKTSQQALICISRRLISIIYGMLKHGTEYRMPVVESAGENR

SEQ ID NO: 394563 - protein, 350 aa, unidentified
MGEISIIGLDLAKQVFQVHGADKTGRCLLRKQLKRREVLRFFAELSPCLVAMEACGSAHYWAREIARLGHDARLLPPAYVKPYVKRGKTDRIDAEAICEAASRPTMRFVPVKTIEQQSLATLHRCRDLLVKNRTMLVNALRAHLAEFGFVAAKGIGKLPDLIEIVSEAPAEALPEMARAPLSGFIDAIALINRQLDGLEKRLRAWHKGNAQSKRLETVPGVGLIGATALCALVPDPKLFRNGRHFAAWIGLTPRLDGTGGKVRLGRISKAGDGTLRRLFVLGATALLRSLANKTTPLALWVQGLLARRSGRAVAVALANKLARIAWAIMASGKAYKPLSAAQLPMPAGRA

SEQ ID NO: 394564 - protein, 419 aa, unidentified
MSFKILKFNCCGLDVHKTWIYACIGITDSNNRTEYKQARFSSFTKGLNELCNWLAKYNCKDVCMESTGKYWIPVFNILEQHNLWVTLSHPKYTKPMKGNKTDRKDAKWICDLYMCGMVKPSFIPPADIRELRDLVRYRFKLTCMITGEKNRAQNCLTVSNLKLDDVFSDVFGKSSRSITEQILKHPGETFDVTPFVDGRCKTPIEKIQAAVDGAISKEQAVKLRQCLDHIDELNKHISEVEQEILRLSDKYEIALNLIRTVPGFNKNPLTAIQVLSEIGGDMSVFPTAKHLVSWAGCCPRNDQSNQKIKSTRISRAGSYFKPVLVQVANALIKSKKHLEFTNRYKRIKARRGHKKAIIAICRMILTAIWHILSDLKPYTPEGFLESRPVKEEKILSTSQALNLLRQRGYVIKDEPLTVS

SEQ ID NO: 394565 - protein, 336 aa, unidentified
MPMYQLGIDVSKNTLDLCLLREGIKGRIKTRKLKNTADAAKVVAEWLKKQSCELGEVHIIMEATGVYHEPLAYGLHFAGARISLANPHRTREFARGMNILTKNDKVDAWMLACYGSLKEPEAWTPPPESVRYLRALLRRRDALVADSTREKNRLEKSVFTDSPDAVRASIENMLQELSNEIEHLDVLIQEHIKTHPELNQDFRLLTSIKSVGYLLGLNMLAILKSHSFESAEQAAAFLGVVPVERRSGTSVKGKPKLSKIGPPEIRTKLYLAALCGLRFNPVMKQMYTKLCQRGKSKMCAIGALMRKLVHWCYGVLKTQLPFDAEHNQQSHYKTIC

SEQ ID NO: 394566 - protein, 451 aa, unidentified
MNNEPEIVLDDEHELVIERVAAIDVAKASGKVCMRMPHPSRPDRRMSKVRDVDATTRAVTELADDLLGEGIERVTVESTSDYWRIWFYLLEAAGLRVQLVNARDVKNVPGRPKTDKLDAVWLAKLTEKGLLRPSFVPPAPIRQLRDYTRFRVDLTRERARYWQRMEKLLEDALIKVSAVVSRMDSMSVRDMLEALIAGERDPRRLAGLARGKMRPKYNALVEALSGRFDEHHAELARMLLDQIDALGAQISTLTTRIDELLAALIDTPGPAADGSVRDGDGEVELMVTGLDAAERLAEITGIGPVSAQVIIAEIGLDMARFPTAAHLVSWAKLSPRTIQSGAIQRSGKAGKGNPYLKGALGEAAAVAARTDTFLGERYRRIVKRRGKLKALVAVARSILVIVWNLLSDPTARFHDLGPDYYTRRIDTERRARNHLAQLAALGYRVTVEPAA

SEQ ID NO: 394567 - protein, 351 aa, unidentified
MAVAEGGLRGEVRDYGRIANTPAALRRLAHQLGQDGLTLRFCYEAGPCGYGIQRQLSALGHECVVVAPSLIPKRAGDRVKTDRRDAASLARLHRAGELTAVWVPDPGHEAMRDLVRARLDAVRALRRARQQLSGFLLRQGCHYGRPAWTKLHRRWLAGLKFDQAVHHIVLEDYIAAVEAGEARRDRLTAQIEAMLPDWTLAPVVAALQTMRGMALVNAATLIAELGDLSRFANPRQLMAYLGLVPSEYSSGASIKRGSLTKAGNSAARRLLIEAAWCYRFPARISRELRLRQEEQPRPIREIAWKAQLRLCARYRKLARNGKPAKVITAAIARELAGFIWAIARHVSPAAG

SEQ ID NO: 394568 - protein, 345 aa, unidentified
MKRYLGVDLHRTQMTVCTRLESGEESVREWAIKDLPEFAEQLRAEDEIAVEATGTTGRFYDAVVGRVARLVVVNPHKFKIISESVSKTDGKDCRELALFLSKDLLPEVRMKPKKQRELAHMTETRDLLVKQRSALKGKINNLLAMQGINLKREALSSKVALERGMGLEVSAMVKLELRVLVEQIRALSASIGELEELIAEEGEQLPGHRNLTSIKGIGSLSATVLLTTIGSVGDFADENKLAAYLGLVPRVQNSNATERNGAITKMGNKLARTALVQCGLVAKRYSPYLNRFYQRIKERRGGGKAKIALARKMVKIGYDTPKNNWVFDDSPSFTLAPKHGPNKIE

SEQ ID NO: 394569 - protein, 341 aa, unidentified
MGEVTIIGLDIAKSVFQAHGADAAGSVMFRKKLGRSRLLAFFAGQPHCVVAMEACAGAHHWGRELEALGHTVKLIPPAYVKPFVKRQKNDEADAEAICEAAQRPTMRFVPVKSREQQASGVVFRARDLLVRQRTQIMNGLRGHLAEFGYVAPKGVMYVERLVAEIEDPDSQLPPAARVSLQVMVRMLAALETEIASLDAEIVRRAKEDPVARRLMTIPGIGPVTASAMVALAPGAEAFRCGRDFSAWLGLTPVQRSSGGKQKLGQITKAGERTLRRLLVIGASAVIKQALIRGALPGSWLAQMLARKPRMLVAVALANKTARIIWALLAKGGVYRAPALAA

SEQ ID NO: 394570 - protein, 344 aa, unidentified
MQHYIGLDVSVKETSVCIVDKAGKVIREVKVATKPVAILAVLTEEALAIERIGLEAGPLSQWLYSALAEAGLPVICVETRHMKAALSAQINKSDRNDARGIAQMMRVGLYRPVHVKTLASQKRRMLLTSRQLLQAKALDIENDLRGTLRNFGLKVGMVGTVKFEARIRELVANHPDLAAIVEPLLIARRVLREQLGVLHRQLLEIVRHDEVCRRLITTPGVGPVVALTFRATVDVPSRFTSSKAVGAAFGLTPRRQQSGEIDRMGGISKCGDAMMREMLFEAALVLMTHSRKWSWLKAWGMKVARHRGMKRAIVAVARRLAVIMHRMWVDGSEFRWTRQEAAAA

SEQ ID NO: 394571 - protein, 342 aa, unidentified
MSYLGVDLHTNSFTVCRRTQQGKNSIRTFQISRISDFRKTLRKRDLLAVEATGNTAWFVSQIRDRVKKVTVVNPFQFEVVRRSVKKTDKNDSKTLALFLSKDMLPEARMKTKENAQLHSLATTRDKLVKQRTALINKVHNVLNSYGIKFKKESLGSEKGLKSVWAYDWDVIVRIELEVLVEQIRSLNKSIKTLDKEMSDHGQKLKGHESLTSIKGIAGRSATVLLSVIGDVNDFADENKLAAYFGIVPRVSDSNETVRHGRITKHGSKLGRTTLVQCTLVAKRYSPYLHQYYERIKSHRGSGKAIIATARKFLAIIYNTLKNEWIFEDFPNFVLASSCVKKQ

SEQ ID NO: 394572 - protein, 409 aa, unidentified
MEVVHEVCCGLDVHKKSVTACVLWASGRRRQTRAFGTFTRELLELGDWLRACGVTHVAMESTGVYWKPVWNLLEGQFEVLLVNAQHIKAVPGRKTDQKDSEWIADLLQHGLLRASFVPPTPIRELRDLTRYRASLAQEINRIANRIQKVLEDANIKLASVATDTLGASGRAMLEAIIQGEQDSQRLAEMSRGLLRNKIPELQEALQGRVTAHHRFMLRELLDHLYFVQSKMQRIEQEVAERLGPFQSEVARLCTIPGVDRVTAWGLLAEIGMSMKQFPDAQHLASWAGLCPGSHESAGKRKSGKIRKGSLWLRRCLCQGAWAVSTKKNNYLSALYRRLAVRRGSKRATIAVAHKLLVIAYYILRDGTCYSDLGADYFDRLNPEGLRRRLTKRLEGLGFKVTLEPLAQVA

SEQ ID NO: 394573 - protein, 347 aa, unidentified
MRFYTQQHQHSCGIDLHARSMYVCILSQAGEVLLHRNLRATPEAFLQAITPYREDLVVAVECMFTWYWLADLCRAEGIAFVLGHALYMKAIHGGKAKNDRIDAHKIAVLLRGGMLPQAYVYPAAMRATRDLLRRRLHFTRKRAELLTHIENTNSQYNLPAFSKKLTYATNRTGLVDRFEEASVQQTIAADLDLIAHYDQLLREVENFILRTAKGHDANTLYRLRTVPGIGKILSLVILYEIHDITRFARPQELASYARLVKCAKESAGKVRGNGGTKIGNAHLKWAFSEAAVGFLRKNPAGKAYYDRLVRKHGKGKALTVLAHKLARAVYHLWKHDQVFDQEKFLSN

SEQ ID NO: 394574 - protein, 403 aa, unidentified
MIFVGIDWAEAHHDVCLVDESGQVLAKRRVAEGLEGVGKLHALVAEHAQEPASVVVGIETDRGLLVGSLVAAGYQVLAINPLAASRYRDRHATSGAKSDPGDARVLADLVRTDRHQHRAVAGDSELAEAVKVLARAHQGLIWSRQRQVNQLRNTLREFYPGALAAFEDLDSPDAIAILERAPTPNRGRALSQAKIASALRRGGRARNLETKVTSIQGHLRQPQLEAPALVARAYGHSVAASVAVIKQLNQQIAALEQELAASFETHPDAEIYLSLPGLGRVLGARALAEFGDDRTRFAHPKARKNYAGMAPITKASGTRKVVLARVARNRRLADACYRWAFSALTTSGGARSRYDSLRGRGQTHHQALRALGNRLVGILHGCLVNREIYREDVAWHSAFEVAA

SEQ ID NO: 394575 - protein, 489 aa, unidentified
MARPALEVADIFRDHGAAWREANRGHVSLPQMKVMSAIESCRTAALGGHVARCEDCAHTSIAYNRSYEASGGEKIASIVVVLNSAMEHQVRKPKQSQPKPRQSKQRKPNDLSRSLAALNPDRTLIAVIEMGASSWLVAGLVPGVERQPLKKIGTDEHALLALLERWRREAIRSGYAITRIAVAYEAGRDGFWLARWLRANGIEAYVIHAASVAVSREHRRAKTDRLDTELLKRAFLGWLRGERDHCKMVAIPTVAEEDARRPGRERESLVGEVTRIVNRMKSALARVGIRNFNPKLKKASVRLNDLRTPEGDPIPPNTLDEIKRDMERRQLICEQIRRIEQERVKCLERAPDAGPNAMVHLLARVTGIGIETADTLVREMLTRNLRDRRAVARYGGLTGAPSQSGSFNREKGLARSGNPRVRRCMIGLAWRFVRLQKDSPLVKWFELRTANARGSRKTMIVALARKLLIALWGLVHEGVVPEGIVMRPA

SEQ ID NO: 394576 - protein, 412 aa, unidentified
METQIERCAGLDVHKETVVACVRVPGAGRERQQLVQTFGTTTAALLALRDWLVAHGVTVVGMESTGMYWKPVYYVLEDALECWLLHARHLRNVPGRKTDVADAAWIGQLVEHGLVRPSFVPPKPIRALRNLTRYRKAQIEERTREAQRLDKILQDAGIKLSSVASDVLGVSGRAMLGALVDGTRDPAVLAALARGTLRKKIPALREALRGRFSPHHALLVGTMLAKLEFLAEALAQLAAEIEQVLAPFAAAAALRRTIPGVDRRTAEALIAEIGVDMSRFGTASRLASWAGMCPGHHASAGRRGPGTTRKGSKWLRTSLTEAAKAAGCTKATYLGAQYARLRARRGAAKATVAVGHSILVAAYHILDRRQPYHDLGPDYFRRRHSREHQTRRLVRQIQALGYKVTLEEVAAA

SEQ ID NO: 394577 - protein, 344 aa, unidentified
MDHVGIDVHKKESQVCILTAEGEVLETRIATRRERFAEVLKGRVGKVLIESSTESEWVARCLEELGQEVIVADPNFAPMYGMRSRRVKTDLRDARALAEACRSGVYRSAYRRSERQRRVTSELVVREALVRSRTSFIAVARALLRKEGLRVPGGKAETFPERVARMELPGRLRSELAPLLATMVTVNQQVAWCDGALARTTRSDPVVALLQTAPGVGPVTAAAFRATVDDAGRFRGAHQLEAYLGLVPGESSSGEKLRRGRITRTGDARMRWLLVQAAQCIRLSKSSCAAGLQLWTKRIETRRGRAVATVALARKLAGILFAMMRDGKPFDAGRQLGVVTRAAA

SEQ ID NO: 394578 - protein, 410 aa, unidentified
MEAIVERCAGLDVHQATVVACLNLGAATAKPSKQVCTFGTTLPDLEELRNWLKDNGCTLVAMESTGVYWKPVHAVLEDHFEMVVGNARHIKNVPGRKTDVKDCDWISDLARHGLIDKSFVPPRPIRELRDLTRYRCKLVQATSAERNRLIKLLESANIKLSSVASDVFGVSGWAMLEALVEGRQTPAEMAQLARRRMRRKLNELERALHGRLEEHHRFLLGVQMRRIETMEADVAELDKRLREKLAPYSRQMRLLRQIPGVDWVIAATIIAEIGVDMSAFLNAEHLASWATMCPGNHESAGKQHGGKTRKGNVHLKTALVMAANAAGKTKGTYLADKYRRLKARRGAMRAAVAIGHKILVTAYRMLITGSDYQDLGDGYLDQLNTHRSAGNLIRRLRQMGYDVQIAPKAA

SEQ ID NO: 394579 - protein, 534 aa, unidentified
MARASKSKKRSFPASQTIHRPRGVISPRVQTVGPEHFGIVCVDCAKARSKWMLADFYGRVLVPPTVVEHTRTCLISMIRELRANLDQARIRDQIVVIERTGRYHRPIQRAFAQAGFEVRIIHPLTTKQHRQPANPGNKTDDTDLAAMHRGAVNGFGLLEPPADSLSIRLQLLARHRRDLVEKTVALRSQIHEHLHAVMPGYSKCFDDVYDAQIPLSIAREFGSARAILQAGVPGLIVHLRGAGIRVHAPTLEKILAWARSAPAAEDESDIHLRILAQLDDDRLSKVRGVRAIEAELAGLLVQTPYVLLMGIPGINVVSAAEFAGEMGPIERYATARAITGRAGLFPSRYQSDRVDYPDGRLVRCANRTLRRALMTIADNLVKCNDHFRVLAAGWRLHGKDARAVRVQVAGRFSRIAFQMVAGRKAYRHPCCQQRDYVLNKLLVFHTENGIGYEQLTMNLEAAVAQLPRSEYREEAVPLADELDRVLKKRGKGPRPLAEILPVVLAKLGVKPVRSPESGEAILTQPFVRRDRTTS

SEQ ID NO: 394580 - protein, 372 aa, unidentified
MGHHSEAFIGIDTSKSRNAVAIADGGRGGEVRFLGEFPATEATIRKLVSKLAAIYAKLTFCYEAGPSGYGLYRLIKSHGHECIVVAPSLIPKKPGERVKTNRGDALSLAKLLRAGELTSVWVPDERHEAMRDLSRASQAAKKDLQGKRQQISSMMLRLGRIYPGKTTWGPTHMNWLMAQKLEHVEQRIAFEELMEGMRQESERIERLQQTIREAVPEWSLAELVTAVQAMRGIDLIAAVGVVAETGDLSRFQNPRELMGYLGLVPSESSTGDKVKRGGITKAGNARARCILVEAAWAYRHPARVGREKQAKVAAAPRRVREIAWKAQTRLCRRFRALERKGKRKTVVATAIAHELAAFVWAINREVMAARKA

SEQ ID NO: 394581 - protein, 421 aa, unidentified
MEEVVEQEEIIERVAALDIGKAELVCCVRIPGTGKRRLQEVTRYSTMTRSLLGLADRLGELGVTRVVMEATSDYWKSPFFVLEAAGFETWLVNARDVKHLPGRPKTDRLDSVWLCKVAERQMLRPSFVPPADIRDLRALTRYRRSLIAARTAEKQRVEKLLEDAGIKLSVVASDIFGVSGRAMMAALVAGERDPEVLAGMARGQLRKKNTDLTEAFFTTRFRDHHGWLLAKMLARVDQLNADIAEVDDRIGEQIAPFTQAVARLSEIPGVSDTTARIIIAEIGVDMTRFPTPGHLASWAKFAPGIKSSAGRQKGNGASGHGNRYLAAALGDAAVATRQTDTFLGQRYRRLVKRRGKKRAVVAVGRSILNIVWHLLSDPDAHFIDLGPDYYDTRINAARARRNHVRHLERLGYKVTLEPAAA

SEQ ID NO: 394582 - protein, 427 aa, unidentified
MRNRNYKLEAITPSTLVVGVDIAKEIQWVRFVNYRGLEIGKAIKFYNNKSGFDSILASIKSICKEKGFDNVIVGMEPTGHYWKPLANYLLIDEKKVVMVNPSHTKRAKELDDNSPTKNDKKDALTIAKLVQDGRYYEVYMPHDIFAELRVLTNTRNSVMRRRNAVKNTMTAVIDEYFPELVTVFKEPLKGKTSIQILKSCPFPALILELGVEGVLIEIRKAVKKSVGIKKATQLVETAKTSIGVNYGITSAKLRLELLIEELELLNRQLTKIEEAMDLALDVTGFKKVILSVPGIGVVTAASFLGEVGDPMRFESPRQISKMAGYNLIEDSSGKNKSGTVISKRGRKNLRNILYQMALSMVSVNPEIRVLYNYLKTRPNNPLKKKQALVVVAKKAITIIYNLIKKQSEYKAELVLGEFRKNQIKQAA

SEQ ID NO: 394583 - protein, 357 aa, unidentified
MKTVVVAGRRSVVGKDVYVGIDVHKESWQVTVRTDGEEVFNGRVPGQYQSLKKLFERYQGCRMKVAYEAGPFGFWLSDKLVEDGIEVLVVPPSLIPVESGNRVKTDKRDSRKLARLLESNMLKRVYMLTPEEREHRDLLRTRRQIVDHRNDVARQIKSKLLFYGIASPFTTTTRWSFKYIEWLKTLRCDTDYLRESFDLLIDLYEYLTRQIVRINKKVVLLCHDKKYSDRIKLLCTAPGIGRLTAIEILVELQDISRFPSAEELASYIGLTPSEYSTGERTRQGRITRCGNKRVRTYLVESTWMLITKDPAIRLKYLKLKSLRGGKRATIAIARKLLIRIRRMLLDNAPYRMAAMAA

SEQ ID NO: 394584 - protein, 343 aa, unidentified
MQYYVGLDVSLKQTSICVVDQAGLVVREGVVDSDPEAISVYVTSRAPNAVRIGLETGPTSTWLWTELKRLGLPVICIDARHAKAVLKMQINKSDRNDAIGIARIMQTGWFKEVHVKDIDSHSVRALLASRALLVKIKRDLENHVRGLLKNLGLVIGRAKFNVFAVRAEELIEGRPELVAAIRPLLEARNAVEQQVSELDRKVMKLARHDTQVRRFMTAPGVGPITALCFKATIDDPARFARSRSVGAYVGLTSRRHASGEVDWTGRISKCGDAMLRSYLFEAAGVLLTRVPKWSAVKAWGVRLAKRNGLRKAKVAVARKLAVILHRMWIDGTEFNWSKKEIAA

SEQ ID NO: 394585 - protein, 402 aa, unidentified
MNAVGIDVSKGKSMVAIMRPFGEIVSTPFEIKHTSSDINSLVKLIKSIEGESRIVMEHTGRYYEVLAHQLSEANLFVSAINPKLIKDFDNDSLRKVKTDKADSVKIARYALDKWQNLKQYSVMDELRNQLKTMNRQFGFYMKHKTAMKNNLIGILDQTYPGVNTYFDSPARSDGSQKWVDFASTYWHVDCVRKMSINAFIDHYENWCKRKKYNFSKSKAEEIYGKAKELVPVLPKDDITKLIIKQAVDQLNSASITVESLRTLMNETASKLPEYPVVMAMKGVGTSLGPQLMAEIGDVSRFTHKGAITAFAGVDPGVNESGSYEQKSVPTSKRGSSDLRKTLFQVMDVLIKTHPQDDPVYQFIDKKRAQGKPYYVYMTAGANKFLRIYYGRVKEYLSSLPES

SEQ ID NO: 394586 - protein, 344 aa, unidentified
MENYAGIDVSLELSSVCVVNAQGKVLKEAKVASEPAALVEFFERLGFAIKRIGLEAGPLSQWLHAGLKGAGFETVLLETRHVKAALSAMTVKTDRKDARGIAQLIRMGWFQPVHAKSVGAQETRALLIARKQLLGRLIDVELSIRGILRGFGLKVGPVTRRNFEARIRELVAGQATLERIAGAMLSARSALKAEYGRLHKAVLAIVRDDAVCRRLMTVPGVGPLVAVTYKSAIDDPHRIVKSKAAGALFGLTPKKYQSGEKDVTGGITLAGDETVRTVLYEAANVLLSRITRFSKLKRWGMDVAKRRGSKRAKVALARKLAVILHRIWVDGTSYRWTDAGPIAA

SEQ ID NO: 394587 - protein, 429 aa, unidentified
MGAISENEVLRHEPQFAALVGIDWADQKHAWCLQAAGTTQRESGEVEHTPEAVEAWVGQLCQRFGNRPIAVAVEQTKGALVFMLSKYEPLHLFPVPPAMSAKMRAALYPSGAKDDPRDADLLVDLLLQHRDKLRRLSPDSEATRRVQNLVEERRHLVEEKTAQSNRLTNHLKIYFPQMLEWFDRLDTELVCALLEQWPTLEELQKVPPARLRTFFRKQRCHYPELVERRLVGIRQAMPAIRDRAVIEAKSAVVKVSAQVIRSLIRGVADLDRKIEEAAAAHPDCFIFESLPGAGAVLAPRLLAALGSQRERYANAAEVQAYSGIAPVTERSGKKKWIHFRWACPKFLRQSFHEWAGHSIAHSQWARSYYQQQRERGKAHHAAVRGLAFKWIRIVFRCWKDRVAYDESKYLAALAKRNSPLAAVAAGTIL

SEQ ID NO: 394588 - protein, 318 aa, unidentified
MDSKKYIGMDVHQATVSVAVMDSRGRVVMDSVIETKATTILEFIQGVRGTLWVTFEEGASAAWLHDLLKPHVAKLVVCDPRKNALLKAGNKNDRIDARKLADLLRSGLLWPVYHGGAGGVRTLKELARSYLTITKDLTRVMNRIKGLYRSWAIPCAGQKVYSPRYRSAWLQKVTEPGVRRRAERLYQQLDDLQPLRREARREMLAESQKHPAHGVLRQVPWLGPIRVALLIALIQTPHRFRTKRQLWAYSGLALQTRASGEYRVTGGQLQRAKRQPSLRGLNENHNHELKALFKSTTTRASIAAGPFGDFSKSGKTTA

SEQ ID NO: 394589 - protein, 354 aa, unidentified
MQTHAIGIDLGKTVFHLVGLNLRGEVVVRRKCSRTQLLQFTANAQVDLIGMEACAGAHFMGRALREQGHEVRIIPAQYVKPYVKTNKSDFIDAEAIGEAVARPTMRFVPIKTDDQLDMQSLHRVRERWVIRRTAVVNQIRGLLLERGITLRQGRRHLEAALPGILEDATTRLSGALRMLISQLKHELEELANFIGEADGVMERTSRENESCRRLLAVPGIGPVTATALIAAVGNGAAFRKGREFSAWVGMVPRESSTGGKQKLLGISKRGNPYLRKLFIQGARAVMLRGTKQSIGLRTWIENIALRKHPNVAAVALANKMARIAWVVLARGEAYRPSLLTESEPNLHSLQMMSA

SEQ ID NO: 394590 - protein, 363 aa, unidentified
MAGREGSATLAEVVLGVDTHLDLHVAVALDQLGRRLGALSVPTTAMGYQSLVSWAEGFGPVRCAGVEGTGSYGAGLARHFKTAGIPVMEVERPKKRHLRRNGKSDPLDAEAAARAVLAGETAGKPKGGEGRVEMIRALRTARHSAVKARSQAIYQLQALVVTAPETLRKRLRGLSTRELVGVAARFRLGSDPADVQTATRFALRSVARRHQQLSEEIAELDEQLDRLVAEAAPGLVSLPAVGTSHAATLLLVAGDNTERLSSEASFASLCGVSPIEASSGKVVRHRLNRGGDREANRALHLICVVRMARDQRTREYVSRRTTEGKSKREIMRCLKRYIAREVYRVLASTAAASPLAALSPGAV

SEQ ID NO: 394591 - protein, 338 aa, unidentified
MKLYGGIDLHSNNSVFAISNEEGVIVSRKKLPNDLDKILSFLAPFKDQLIGLVVESTFNWYWLVDALIENKYCVYLANTAAIQQYSGLKHADDNSDAAWLGEMLRLNILPTGYIYPKEERTVRDLMRKRMQLVQQSTKNLLSIQGAYMRHLSHKLSNNKTKKLTSLRIEQDFKSENTVMAVQTNLAVMNCLAEQVKLIERAIIQQVKLRQEFQKLTSIDGIGTVLALTIMLETGSIKRFEKVGNYASYCRCVNGARYSNGKKKGSTNSKNGNKYLAWAFVEAANFAIRYNTTVRNYYQRKLAKTNKTVAIKTVAHKLSRACFYVLRDQVPFEAEKAFT

SEQ ID NO: 394592 - protein, 387 aa, unidentified
MVQVNDLSRSLAAFDPISTLVVVVEMSKASWLVSSVVPGVERQPLKKLEPDATALLRLIERWRNEAVRVGRPIRRIALAYEAGRDGFWLARWLIARGIEAHVIHSASVAVSRERKRAKTDRLDAAMLMRVFLGWLRGERGHCGMVAIPTMEEEDARRPNRERESLVNERSRIINRMKSALARLGIRGFKPHLRKAPERLAGLRTAEGTGLPANIIEEFRRDMARLALVREQISSIEKTRAERLERAPDTGPHAMVRLLARVIGIGIETADMLVREILSRKLRDRRALARYAGLTGSPDESGLKSREKGLAKAGNARVRRGLIQLAWRFLMFQKDSALARWYRTRTEGPSGARKTTMIVALARKLLIALWRLVTTGEVPDGVELRTAA

SEQ ID NO: 394593 - protein, 345 aa, unidentified
MEQISRIGMDTSKHFFQLHGVNAAEKVVLRKKLRRKDMVAFFKALAPTVIGIEACGAAHYLARLLGSFGHEVKLIAPQLVKPYVKRGKNDGADAEALCEAMSRPTMRFVPVKTTEQQAALMMVGLRDRLIRNRTQLSNSIRGYAAEFGFTATKGKAHLVTLLERIQADESVPALARELFAAQAAEYARLQAQIDEVDAKLMAWHKANECSRRLAKIPSVGPIGAVLLMMKTPAPELFRSGREFAAWIGLTPKDHSTAGKVRLGGITRAGDETLRSVLVVGATSIIQHVRRGGRGSPWIVDLLKRKPPKLAAVALANKMARIAWKLMITGESYVAKSVPAALANAT

SEQ ID NO: 394594 - protein, 275 aa, unidentified
MDNFYFIGVDVSKKKLDFCVLFEGKVLREEQVSNHQQAVARLIGELKNDLEMDNEQFLICAEHTGQYTFPLVCACKSVECKLWLENPSQIKYSSGMQRGKNDKVDAKRIAIYASRFGDKVKYYDRPTEEIERLKQLERERALYVTDLAKYKGQMYDQKDFMPAALYRKKTKRMKGLIQELQAAIDAITAEMEKIIGSTEVLARQMELLMSIDGVGKVVALNVIIETEAFSRFDNPRKFCCHAGVAPFSYTSGSSQHSKNKVSHISAEKKKKETAT

SEQ ID NO: 394595 - protein, 376 aa, unidentified
MEKVTYVGIDVHKAFHQVAMLIPGREAPVEWRAETDARGIRRLIRRLLREAVGVVHVAYEAGPCGYGLQRALEAHGIACTVVAPSLIPRKPGERIKTDRRDARKLAELLRAGVLTAVMPPTPEEEAARDLFRAREDARQDLLRARHRLAKWLLRQGVRYTRGKKAWTRDYQGWLRTLDFADPTAQAVFDAYRVQAEQRAQACRGLEEALATLATQPTYTEAVGYLRCFRGIDTLTAIGIVVELFDFGRFDSPRGLMSYLGLVPSEHSTGGHPRRGAITKTGNRPVRRLAVEAAWHARHPVHVSRALAARRQGQPAGVIAIADQAMARLHRRYWRMVSRGKPTNQAAVAVARELAGFLWAVLYPRAMGIDPASVPTP

SEQ ID NO: 394596 - protein, 353 aa, unidentified
MLAELVHHVIGVDPDRDWITLAVVDAHTTGVTAHDRFPATAVGYAEAVEFVDGHSVDTERAWAIEGTASYGCGLSVALSRLGEWVIEFDRPTRKTKDGAKSDHLDAVRAARETLGRDRLSEPRAHQGAREAIRVHAVTRAGAVRARTAAINELKAMIVSADEELRGSLRGLRTSQQVARCARFRERASMSIEGRGTRLSMRALARRIEHLNDEIDDHDRALKTLLDDTAPQLLTERGIGYITAAAFYLAWSHPGRCRSEAAFARLGGTSPVEATSGQKQTCHRLNRGGDRQPNRALYLVAVTRRRCDPATRAYIARRAADGISERFAIRCLKRFIARRVWRLLEHPESALDKT

SEQ ID NO: 394597 - protein, 475 aa, unidentified
MHGAPMAAAGFGYRLMHIAALWPLESCRRTRRRPLITHKVAAIRSLECCRGLARGGFVSFFGKELSLNKVDIAPFEVFCGIDVGKSLNHIVALDRYDDKPLINRKVPQEEAEIRAALEEAGDFGLALVIVDQFGAFGRLVVGVAKSMDIPVAHMSPRRFRQVAETYGEDKFDEKDAFILADASRTTPRNIEFVGNRAESMAEIKVLSSRRDDIVEERTRCYNRLHDFIHQVSPPLEELFSKRKLHNDLEIRLIARYGGPIGFRQAGRARASTWAAELKYHCVDGPKKVEQVFDVLDRQTVMLPGAAVIEEQIRSIASRIIELLAEEKRLNLMIEQRAKMIPEVDLLQSIPGVGPVYAALIAVEIGDIGRFRDSNHLASYAGVAPRKEESGTSVHKRRKRKGGNRRLKNALMQSSQRSVQCDPLARAYYERKRAEGKKHLQALRALARHRVTVIFAMLNEGTFYEPPVEVDENGRG

SEQ ID NO: 394598 - protein, 357 aa, unidentified
MIVAEHFSFVVGIDTHAKTHTLAIINATSGGEIANETFPATTAGGNRALSWILRHTKAPAQTVLLSMEGTGSYGAKLRQQASDTGFIVTEAPIPDQRLGRYQGKSDTMDAARAARAVLSVPMDRLREPRSGQNHMALRILSNARRTMARERTAAINALTALLRVVDLGLDARKPLTAAQINTIASWRERDEEFGVQTCRREATRLAKQILTLQEQMAQNHSELETLVRQVQPALLEIYGIGPVLAAIILTAWSHAGRVRSEAAFAALAGTCPVPASSGGTTRFRLNRGGDRQLNKALYTIALIRMNRDSATKDYVAKRTSQGRTKKEIIRSLKRYITRQIYRQLSIAGRSSGDLACP

SEQ ID NO: 394599 - protein, 383 aa, unidentified
MKIFVGIDIAKLNHFAAAISSDGEILIEPFKFTNDADGFQLLVSKLESFDKNSIIIGLESTAHYGDNLVRYLVAEFYQVCVLNPIKTCQMRKNNVRKTKTDKVDTFVIAKTLMMQDDLRFITFFDLDMMDFKALGRFRQKTIKQRTRLKIQLTTYVDQVFPEIQYFFKSGLHQNAVYALLKEAPSPKEIASMHMTHLANLLKVNSHGHFTKEQAKELRVLAQKSVGANDSAISIQITQTIQQIELLDSQLEKIEAEMTDIMKFNDSVIMTIPGIGYINGGMILGEIGDIHRFSNPNKLLAFAGLDPSVYQSGNFQAKTTRMSKRGSRVLRYALVNAAWNVVRNNATFKLIMMPRGLKAGLTTMHLGTVPASLSESSGRCSLTK

SEQ ID NO: 394600 - protein, 392 aa, unidentified
MNALRVAVDVGSRLHQVAIGDGSGRLLDEFQIDHCRAGFERFFERVTRHAATDIRVAMEGYNGWARPLDQQVLARGWRLYNVNNLKLARYKEIFPAPAKSDAIDTRRMLELFAFDGQRPLGRDVLQEVTTSTTTQRELKYLTRRRRQQVADRATRLTRLRADLLAVCPDLLALTKAVDNLWFLRLLTCRDRLTALPRLREKTIASIRGVGAKKRPCILEWQKTATFGSTIDLADTDIVADAAAILALDEQIKTLDARIDIVAGDCPMARRLSTVPGFGVTGTAELSGEIGTLDRFDSEASLSLYLGMAPLDNSSGLRQRGKRPKCVNRRCQAALMTCIVRHMACVAESRSYYDRKRTQGKRHNQAVRALGRHLVRVIWRMLKNERDYEIKSE

SEQ ID NO: 394601 - protein, 412 aa, unidentified
MKDLLEISCGLDVHKEKIVACILTGPLGKPTRSEIREFSTLIPDMIALRNWIVSKNCHHVAMESTGIYWMPIYEILEDAFYGDITLLVVNARHMKNVPGKKTDMRDSEWISTLLRAGLLNGSFIPEKKIREFRDLNRYRKSVIRDITSQKNRIEKFLQSSGFRLSSFISDIFGASGRNIILHLIEHGQIDKTALDSCLKTKTRNRIDEILMSVNGTLSEHQKAFLKILMTHYDSLKKHLAEIETSLEEDMAPFALQVEQLNSIYGISTTASCAIIAEIGIDMKPFKTAEHICSWAGLCPGNNESAGKRKSTSVTKGNPYIKSMLCEIAWVIAGKRNTYLSAWYWRIKQKKGAKKAIVALARKLLVIIYTMLKQGTLFDESCFETRRKHCEQKQLSRYIRELEKHGYHVEAQS

SEQ ID NO: 394602 - protein, 339 aa, unidentified
MKDQDVSDVVRTKKRTAMRYIGIDVSKATFVVAYSSDKGGEIRTFNNTTAGIKQFIGTLPKDGSIHCVMEATGNYSAMLLYLLNVAGIAVSMENPLKIKNFARAMLSTVKTDKIDARLIALYGEKMNPQPFKVQGEAILRLRQKRTVIRQLTKQITAMSNLRGSLACLPVPDKGATHTVDETIKFLEKRRDRLQSELTDLVEVEFSRQLALLTTIKGIGITLATALILTTGGFTYFQNAKQVSRYLGICPTYEQSGTSVNIRGHINRNGDAYTRGLLYIAAWPASRFNAQCKETYTRLRQNGKSGKLAMIAVANKLVRQAFAVVAHDKEYVDGFVSNRP

SEQ ID NO: 394603 - protein, 329 aa, unidentified
MKKNWYVGIDVSKKWLDVAIFVENSSLEGYTHTQVSNDKVGYKELLRWLKEHDVDASTCMYGMEHTGFYSDGLQHFLNKKGYRYTMLEPAIIKHYPIQPREKNDRLDAAKIADYLFRFKETISLSRVPDKAMEKLRELHRERKFYVEDRVCYLNRKQVVGKEEQKRLDKIIALLDKQVESIEEKIRDIIQQDPALMENYLYLTSIKSIGFVNAVNAIVITQNFTVFKTARDYASYIGVAPHTKTSGTTVRWKPKPYRHCDLTAKADISQAAKIAIVHDVELKRFYERKCNGKDDADTVRKAMNAVKFKLVLRLFAVVRQKHTYKQLTTI

SEQ ID NO: 394604 - protein, 342 aa, unidentified
MTMIGIDPHKATHTAVAIDRDEHVVDEFKLRASSRQAERLREWADRFGEREWAVESANGLGYLVAQQLVAAGEIVFDVPPVLAARVRVLGSERSQKNDPNDARSVAIAAMRSARLAIVQPDDHSRVLRLLAKRHRDMARLCNKHCTRLHALLLELEPGGISSEMTVTKASTLLNAVIVDDQVTRHRVMIANELVDDIARLDALLKASKKRVEQAVVASGTTLTDIVGVGPICAAIIIGYTGDIGRFPTKGHFAAHKATAPVDASSGPRPKHRLNQRGNRKLNHAIHIAAISQLRFDTEGRAYYERKLAEGKSSKEAIRSLKRRISDRVYRHLNIDAQRLAAS

SEQ ID NO: 394605 - protein, 323 aa, unidentified
MKLFIGVDVGKKALDVCCNNKLFQVSNDQIGLEKIYSSLQEEIKEGNEIALVICEATGGYETKLVKFVIEHNLPIRREHANKVRNYAKSKGLSAKTDKIDARLLSEYAEVMQVKPLICERSVKEEKLVGLVKRREQLKTDRIKETVRLDKELDSSVKKSIKNHIKWLEKEMAAIENLIRGLQKEDEAIDTKVKLLTSIPAVGDMTAYYLIAFLPELGSTTEAKQMVALAGLAPYARDSGQYKGKRFIQGGRSSLRSALYMSSLSSITHYKEMKEFYQRLRNKGKPAKLALIAVARKQLTVLNSVMYRGTPWTEVYVAQNVALA

SEQ ID NO: 394606 - protein, 367 aa, unidentified
MEKFSKVFVGMDVHKESIDITVAEQGGEVRRLGQVGGDRGSLLKMVRKQQSQGGERVFVYEAGPCGFWIYREITALGERCMVVSPALIPRRAGDHVKTDRRDSERLASLARAGELEAIHVPDIRDEAIRDLVRGRDDAVIAQRRVRQQLKALLLRNDIRYVGRTSWTGAHRRWLSELKLPEPAQQITFEEYVDAIAVATGRIERLTRAIEIEVITWRFAPVVVALQAMRGIQFVHAVTLIAELGDLTRFGSPRQLMGYLGLVPRENSSGEHRRQGSITKAGNSYARRALIEAAWAYRHPARVTRIIATRQTGLPKAACDIAWRAQLRLSAKYRRLNARHLNHNKIVVALARELSGFIWAIGQSVKPQ

SEQ ID NO: 394607 - protein, 362 aa, unidentified
MSKSTTIIAFDQHAATTVAAVLLSGQRTPALHTLTSDSPTILRFVERLRRQGAVRCCYEAGPCGFELQRALAAAHIRCDVIAPSLIPRRPGDRIKTDRRDAAQLAVLYRADALTPIHIPTDQEEAARDLLRCREDIRADLLRARHRLSHFLLRHGRRFTATKRAWTKKHADWLQAQRWPLPALEQTHRAYVRAVDEAGGRLQAVDLELRDLLTIEPLQARVERLRCFRGIDDLTALTIAAELGDARRFPTAPSLMAFTGLVPSEHSSGPKQARGPITKTGNAHLRRVLVEAAWQYRHHAFLGPALQRRQRGAPPPAIEIAWHAQRRLHRRYRVLAARGKPKQLIVTAVARELTGFLWAALTS

SEQ ID NO: 394608 - protein, 367 aa, unidentified
MKKVSTVAAKPSKKISQQKLTVGLDLGDRNSWYCVLDECGQIQVEQRVRTNVKALEEVFAAMPHSRIALEIGTHSPWISRLLRELGHEVIVANARKVRLIGESRKKDDRLDAQTLARLARIDPQLLYPVKHRSAQAQADLMMIRARAGLVRARTGLVNTARGLAKSYGERLRGCNVRNMNPEKAEGLSPELQSALEPLLNAIESLSERIVEYNERIEKLAQESYSQVALLKQIKGVGTLIALTYMLTLEDPHRFRKSRDVGCYLGLQPGRRNSGQSEPQLHISKEGDPYLRTLLVQGAQHILGPFGIDCDLRRWGLKLAERGGRNGKKRAIVATARKLAVLLHHLWVSGEVYKPLHNSSPTTVAAAA

SEQ ID NO: 394609 - protein, 427 aa, unidentified
MAYKIAGIDVHKKVLAVVVADVECDGEYEFERRRFGSNPEQLQLLSEWLIEQQVEEVVMESTAQYWQPVWGALERYWRPSCQKQEGAGAMSGKLHLAQAQSNRGRRGRKKDFPDAERLVKRLVAQELVLSFVPDPEQRLWRTVTRRKLQMTRLHVRMQNQLEGLLEEAHIKLSSFVTDLLGISARRMLQALADGETDPAALAALADKRLRATPAQLCDALGACTELNPVYRRLIKMALEELQFLEQQMGQLDQEIANLLRPHEDAVKRLAEVPGLGVDSAQQIIAEVGPTVATFPSDKQLCSWVAVCPGDNESGGVNYSHRSPKGSRQMRRILNQAANAAARTKGSIFEIVYRRQVARTGHNQAIGVIAHRLCQLIWILLHRKVRYEERGPAVTETSKRKRTARMIRELRALGYRVEALNLQTAASM

SEQ ID NO: 394610 - protein, 342 aa, unidentified
MQLPQFVVGVDIAAESFTLSSYDTASQIYSASQFFPSDPEGLEKLQSYLDDHHLSPSNTVFCMESTGVYVESLAYFLAAKGYRLAIEAPHKAKRAFYPLGGKSDPLDCRQLAEYAFRFFDQLPFWNPSHVIVEQVRVLLTAREQLSRQSTASRNALTAIRHKVIRTPPAEAAFEAVIENLKQQIKHIDQEIKNRTSRHSTFGPTIALLTSIPGVGLLLAAHLLTLSQGFTQPLDPRSIASHLGICPLPFQSGTSIHRRSRSRGSGPSILRKLLYLAAMNLRTFHPGFKKYFLRKKEQGKSGALILNNIENRLLKIICAVIRTKTPYIADYRSVNPMLLKKTA

SEQ ID NO: 394611 - protein, 332 aa, unidentified
MTAVSTLGIDLAKNTFSVHGVDAQGVVTVRRTVSRAKLGELVARLPPCLIGMEACSGAHEWARRFSEAGHTAKLMAPKFVTPYRKSGKNDGNDAEAICEAVGRPNMRFVPIKSVQQPCDLSLHRVRLGFVEERTATLNRIRGLIAEFGYVVPLGTERLRREVRDLLERLPARAASCVRDLLEHAERLRSKALEYEREIRSSLQHNELALRAHTRPGIGPINASALVATVGNGHDFRNGRQFSAWLGLVPRQYSTGGKTRLGHITKRGDPYLRTLLVMGARSVLQRAYRETDPLSRWALALQQRRGYHRACVAIAAKNARVAWALLAKGAAAA

SEQ ID NO: 394612 - protein, 435 aa, unidentified
MLGDPVTAFSSPFQYEEVRLMKVVFPTCCGVDVHKRFLVATIITSPTDSLQPHYQKKRFSTFNSDLNRFADWLHENACLDVCMESTGKYWVPVFNILEMRGIRVVIANPKWVKAVKGNKDDTKDSKWIGDLFRIGLVKSSFIPDKSIRILREFTRYRYKLTSMKSSEKNRFQNAFTVCNVALDSVVSDMFGKSATAITDYLASNEPFDVEHCVSLLQRSLKKKADAVIESIEGYSITDEQKLRIGIIRQHLDHLVDLIDKMDDCINTLVSGYEGQINLLCTIPGVRRDTAITIISEIGVDMSQFGSSKRLCCWAGLTPANNESAGKKKSVRISRAGVYLKPALVEVAHAAVKDKTDPYYALKYERIAKRRGKKRAIIAIARMILTAIYEMFSTGEVWNPVDLYKVDMPEHLKEKQLAKAVKQAIRFLETQGLKVS

SEQ ID NO: 394613 - protein, 342 aa, unidentified
MKIIGCDFHPSFQQIAMVDMPTGEYTERKLTPEEARQFYAKLKGPVLVGMEACGNTLWFERLLAALGIELWLGDAGKIRAMEVRKQKTDRRDAQLLLQLLLENRFPRVWVPSVEQRDVRQLLLHRHKLVAMRRQVKNELQHLALNQGVQQKRKLWSAAGRQRLEELPLEGWTKQRRQDSLELLDELNRRVAKLDVAAQQEADRDAVAKLLQTHPGVGPITALAFSLRLGEIKRFARSRQVVSYLGLNPAEHSSGGRQHLGGISKPGNPMLRSLLVEAGQSAARSVPELKRAYQRLKHRKHSGVGKVMVARKLAVRLFWIWKTQQPYTAARTQGSPSHHVVAV

SEQ ID NO: 394614 - protein, 499 aa, unidentified
MITIPVITERCAGIDVGKRGLAAAVAVGPADKEAEIKTRWFATTMPALRQLHTWLREEGCTTVALESTGSWWISIKNELEDDLRMTLVCPRKHHPKKGDKTDFRDAIDLALHHRHGLLTGSFLPERGIVELRDLTRRRKKLLGNLSSEKNRIQKVLDTAGVKMGNVISDVFGVSGQEILQALLKNVPLQAEELAAMAKKRLRNRIPQLTEALQDHYMNDHHRWLIGQSVEHAQFLDVQVETLEKKIDAHLEPYRRQYELLQSIPGIKEHTAASILAEMGADMSQFATADKLCKWSRICPGNNRSAGKSRHSHIQRGNKFLLAALVEASWGAIRKEGSAFQRKYRRWLRKGEQKAIIAVCHCLLRVIWSVLKNDRPYVEPDATVVEGLERQRLIHHHTRKLREMGADEQTIGVLIEQLLVLPADSESKPARVETTKDTQAHRDPQPKRPLARGVLGFRIRTAPIKKDSDFKDRPDPPTGVDASETAASSKKRCRTQKAKT

SEQ ID NO: 394615 - protein, 374 aa, unidentified
MKNFSTFIGMDVHKETIAVAIAGEEGVPRYYGEIMNTPEAIAKLLKKVAGKKDLTAFCYEAGPCGYGVYRQLKGMGYRCDVVAPSLIPKKAGDRVKTDRRDAVMLTRLYRAGELTAVWVPEVEQEAVRDLTRAREDIKGMERHARQRLGGFLLRHDKKYSGKSKWTPGYFRWLEAVRFESPIQQIVFQEYVDMVKDLKERVVSIEEEMRKAVTDWSLGRVVEALMALRGVSLITAMTVVAEIGDMSRFESPRQLMAHLGLVPSEHSSGSSQKRGGITKTGNGHARRVLTESSWSYRLPARKTAHLQRKAEKTSDQVQAIAWKAQKRLCKRYWYLIHKGKLPVQACTAIARELTGFIWAIAREVMGKNNVCKAEA

SEQ ID NO: 394616 - protein, 381 aa, unidentified
MEKTCGLDVHKDSVFACILDEKGEKIFEKRYGVLTPNLLELRDTLVYHCCGRVAMESTSIYWIPVWHILDSDFELTLANPYFIRQLPGRKSDVKDAQWIAERLQKDLIKSSFVPSEELQQMRQYSRQYRRLTKSTVRLEQQIDNQLQRCNIRFSNYVSNQGNNISVRKIIDAIISGERDCLHLIRFVHGRTRNKHGEQVITDSLNGVIQQADVDMLIQCMEQIKLIKNQQASCLTHLEELANMYFANEISLLCTIPGVQKLSAFFIIAEIGNDMSFFQKATHLIGWAGLKPRNDETSQKIRSRQILHGNKYLRQILVEISWSAARSNKSFLGQKFNILSKRMKRQKALIAITRKILVIIYNVLKTKQGFDPKKNCQLLLTA

SEQ ID NO: 394617 - protein, 428 aa, unidentified
MSYRIAGIDVHKKMLAVVVSDVEIESEYQFERRMFSSNPEQLRSLAAWLVEQKAEEIVMESTAQYWKPVWETLERYWKPLCEKREGARRRSGTLHLAQALSNRGRRGRKRDFVDAERLVKRLVARELTLSFVPDTEQRLWRTVTRKKYQLRRDVVRLNNQLESLLEEAHIKLSSLVSDLLGVSARRMLKALADGETNPAALAALAHERLRATPEQLCDALGACTELKPVYRRLLKMTLEHLQILEQQIGQLDQELATLLHPHQDAVERLAEVPGFAVDSAQQIIAEVGPAAATFPSEKCLSSWVGACPGEEESAGVNYSHRSPKGNRHMRRLLNQTANAAVKAKGSIFEIIYRRCVPRLGHNQAIGVIAHRQCRLIWLILHQGTRYEERGPAVTKRSRYQRTWRMIRQLRNLGYRIELPNPQASQAPA

SEQ ID NO: 394618 - protein, 382 aa, unidentified
MPAYADPTPTPISADTIFLAFELSGTSWLVALHAPDADKVERHRLSAGVAAEVLGLIARTKARVTRRLGTTPRVACCYEAGRDGFWLHRVLEAEGIASHVMDPTSLQVDRRARRAKTDRLDAQALLRALMAWSRGERQVCSMVRPPSPEHEDERRLSRERGTLLKERLRLSNRIKGLCAAQGIYHYEPLGADRRERLARLVTGDGRALPGRLAAEIGRQLDCLELVLRHLAEVEAVRDARAAQAREEGGSKLATLLRLKGIGPELATVLELEVFHRHFANRRDVAAYAGLAPSPYASGGTSREQGISKAGNRRARKALIELAWLWLRHQPESALARWYRDRVGTATGRVKRIAIVALARKLLVAIWRYVETGLVPAEATVRT

SEQ ID NO: 394619 - protein, 425 aa, unidentified
MSDTGVASEPQFAAFVGMDWADQKHVWCLEAAGSQQRECGEVEHTPEAVEAWVGQLCQRFGSRPIAVAVEQSRGALVFMLSKYEQLHIYPIHPKAAGQFRKVLYPSGAKDDPRDADLLLDLLVQHRKHLRRLSPDTEPTRLVQNLVEERHKLVNEKTRETNRLTDKLKIYFPQILDWFERLDTALVCGMLERWPTLEELQKARPATLRSFFLKHHCRKEELIESRIQAIRQAIPAIRDRAVVQALAAGAGVLAQLIRTLRQGIDDLGGQIEKVVKSHPDFGIFDSLPGAGAVMAPRLLAAFGSQRERFQTAAEIQSFTGIAPVTERSGNTKWVHFRWACPKFLRQTFHEWAGHSIMYSTWARAYYQQQRGRGKSHHAVVRALACKWIRIVFRCWKDRVPYNEAVYLGALAKRRSPLLLPVPPQIL

SEQ ID NO: 394620 - protein, 353 aa, unidentified
MDRYIGLDVHMQSCTMAVMGPTGRRLREEVIATNGRELVAAIRKVEGRRHLCMEEGTQSQWLYELLEPEVEELVVTVPGASSGQKSDALDAWARADELRQGAVKTKVFKAAAGQYTELRHAVRGYRFMVQDMTRSKNRLKTLYRSRGIIGMKDEIYDEARRGPWLAKLGPSHRKLAELIGEQLDGSVKLVAQAKERLEAAAGEHRIVRRLATAPGLGTIRAAQVVATVVAPERFRTSRQFWSYCGLGIETRSSADWVRKGNGWVRSQVQQTRGLNRNRNAVLKSAFKGAAKTVTTRMTDHPLGRAHQALMAAGTKPNLAELTTARRIASAVLAMWKHQEDYDPGKQEAKPQTR

SEQ ID NO: 394621 - protein, 402 aa, unidentified
MNCVGIDVSKGKSMIAVMRPFGEVVISPFEVLHTANELSELAGLLKSLDGETRVVMESTGNYHAPVAWLLHGAGLYVSVVNAMLVHDYGNNSLRRAKTDKKDAVKLANYGLDHWLTLPRYVPEENTRLMLKSCYRQYQQYSKVQTMLKNNLISLLDTAFPDANRLFTSPPRADGSEKWVDFVAVFWHCECVCGLSEKAFTAKYQKWCRKHGYNFSKDKALDIYASACGHFGVMPKTDTAKLLVEQAISQLQTTSAALAALKQEMQSLAASLPEYPIVMGMFGVGPTLGPQLMAEIGDVRRFHSKKALVAFAGIDSPPYQSGQMDVHSRSISKRGSASLRRTLFLVMGVLLQCAPMDEPVYQFMNKKRSEGKPYRVYMMASANKFLRIYYASVKTYLDSLEHD

SEQ ID NO: 394622 - protein, 391 aa, unidentified
MIYVGIDVAKDKHDCFITNSDGEVLFQVFTIQNNRKGFDDLFSRIQSTSSDVSNIKVGLEATGHYSYNLLGYLIDKGLPTFVINPLHTNLYRKSLSLRKTKTDKVDARTIAMMLMSDVNLKSYSDTSYHNEELKSLTRYRFDKVQERAQLKQSVSRLVTILFPELEKLVPTLHIASVYALLSELPSAGKIASCHLTHLTKLLENASKGRYSREKAIEIREAARTSIGSNMPAKSLELRHTLRLIGELDSEITEIESEIKRIMDQISSPILTIPGIGYRMGAMILAEIGDFSRFDSPDKILAYAGISPSTYQSGQLESSYSHMEKRGSRYLRYALINAAKYVCHWDETFGAYLQKKISEGKHYNVAITHATKKLVRLIYAMEKSGKPYIKMA

SEQ ID NO: 394623 - protein, 433 aa, unidentified
MTPDSAAVRATKGRLMKPWIEITHYAGFDWARDHHDVVIVDRQGQIVADFRIEHSLAGWQAFRDKVKPYPVLGVAIETNQGTAVDQLLSLDGTIYPVNPFSAKSYRERKAPSGHKTDRLDAWSLAEALRQDGRQWKALQPLDPLTQQLQMLCRDEIGLIEQRTALINQLQQALVEYYPAALEAFEDWTQPFCWDFIIQFPTPEKLVAAGQRRWEKFLHTQKLWRPETASKRMAIFQNARQFCGSAAVTSAKSLLAISLAKLLNALQLQLDQYRQQIEALFKQHPDHDLFGSLPGAAQTLAPRLLGEIGGDLQRFEDTEALQCVAGTAPVSFQSGQIHRVHVRYQCNKMLRHTVHLWAQCSLRVCPWADVYYRQKRAEGKSHACALRCLGQRWLKILWRMIQTRQPYDADLHARNQKQHGSWVLTLMKPAPQAG

SEQ ID NO: 394624 - protein, 387 aa, unidentified
MPQPNDLSRSLVALDQNSTIIAVVELSQSSWLVGGVVPGIERQPRKKLEPSPERLLAVLHRWQDEAVRAGRTIARIALAFEAGRDGFWLARWLEARGVEAHVIHPSSVAVSREHRRAKTDRLDTELLKRGFLGWLRGERGHCSMARVPTIAEEDAKRPNRERECLVGERTRIVNRMKSSLVRLGIRSFIPTLRKAADRLATLHTPEGMALPPNAVAELQRDMARLGFVISQIREIEEARQKRLERQPETGPHAMVRLLARVVGVGIETADMLVHEVLSRPMRDRRAVARYAGLTGSPDESGAQRREQGLARAGNARVRRGMIQLAWRFLMFQKESALALWYRARTADSRIGTRKTMIVALARKLVIALWRFVTTGELPEGVVLRPAS

SEQ ID NO: 394625 - protein, 344 aa, unidentified
MTKTPIAVLGIDLGKNSCSLAGMDAAGAVVVRKRMTRDAIVTFATTLPACVIAMEACCGAHFLGRTLALHGHTIRLMSPEYVQPYVKAQKTDDRDAEAIAEAATRPTMRFVSLKSEDQLDLQILHRVRERLVNTRTALINQLRAVLLERGIILPKGRINLMRRLEDLMAGDPAVSARTATLLADLRDEWAGLDQRVKAYDDELAALTREDVQARRLATIPGIGVINATALLAAIGDGSAFARGRDLAAWLGLTPRQHSTGGKTKLLGISKRGNGYLRKQLIHGARAAMPHLAAKPNQLGAWLQNMLTRAHPNVVVVALAAKLARIAWAVLRREKDFDREALVAA

SEQ ID NO: 394626 - protein, 326 aa, unidentified
MNSTCSSLAILGLDVAKASVQAELQSTSGSKVRFAFANNPTGFKKLARVLEQHPPAMLHAGLEATGPYSQALARWLHEQGYRVSLLNPRRVKDYARSAGLRNKTDALDAGVIADFVRAHRGRLPGWRPPVAEVQQLQELVRRRHQIEVMLLAEKNRLEASADTVRCSIERLISMLRAEKASLERALAQQIDSHAQLARNHQLLRTIKGIGPLSATVLLAEMAGPDQVQRARQAAARAGLSPRREQSGTSVRRNKGIGKEGNRYLRKALYMPALVAIKHNAPLRHFACKLQAAGKPKMAIVCAVMRKLIHISFGVLKHQQPFNPSLA

SEQ ID NO: 394627 - protein, 407 aa, unidentified
MSEDTGFDIWCGLDVGKQAHHACALDAAGRKVFDKPLPQDQTKLEDLFHNLAEHGRVLMIVDQPNTIGALPIAVARSMGITVAYLPGLAMRRAADLYPGNAKTDAKDAFIIADTARTMPHTLRRVDAGEETLAELKVLVGFDEDLAAEATRLSNRIRGLLTQIHPALERVVGPRLTTKQGLAVIEQLGGPQGIAGLTKSKLLRVITKAYPRNAQAFADAITTALGEQTVIVAGTAAAEQVLPKLAASLRQVLDQRAELALQVEKVVDAHPLAEVLTSMPGVGVRTAAQILLDVGDASQFPTAGHLAAYAGLAPVTRRSGISIRGEFPARAGNKRLKRALFLSSFAALKDPTSRAYYDRKRAQGKKHNAALICLSRRRCDVLFAMLKNKEPYRAPTPAPEPPSMPLAA

SEQ ID NO: 394628 - protein, 430 aa, unidentified
MGLIVPSAMHPEQADQPLPYEWFVGIDWGSQQHQVCVLDRDRRLVGERAVDHDGASLAQLAAWLWTLSAGQPQRVAVAIEVPRGAIVEGLVERGFHVFAINPKQLDRFRDRHSVAGAKDDRRDAFVLADSVRTDRPSFRRLHLDEPHLLLLRELSRVEETLLEEFRRSANRLREQLHRFYPQMLQLCSAADEPWLWDLLHLAPTPAHAMLLSEEQVQRVLKVHRIRRIKAPAVLAGLQTPALPVAPGTPEAAQAHWGFLLPCLRVLAEQLQACSQQVSALLRTMAGEPGEGKSPSDVAIVQSLPGVGRKITAWLFAEAAQPLAERDYQVLRTHGGVAPVTKQSGKRRQVVMRHGCNPRLRHALYHMARVAMQRDAHFSSVYAALRAKGQRHGQALRNIGDRLLRILMAMLRHRTCYDASRIRCEPVVQKG

SEQ ID NO: 394629 - protein, 355 aa, unidentified
MNDEKYIGLDVHQATIVVAVLDSTGKLVMESILETEAATILQFFAGLRGTLSVTFEEGTWSVWLYDLLKPHVDKLVVCNPRKNALLKDGNKSDRIDARKLAELLRGNQLKPVYHGETGVRMLRELARSYLTIVKDLSRVMNRLKAVYRSWAIPCAGRDVYYRRHRAQWLAKIREAGVRRRAERLYEQLDMLQTCVRQARRELLAESRKHAITAKLRQIPYLGPIRSALAVALIQTPHRFRSKRQLWAYSGLALETRISAEYRLVEGQVRRSKKLLSIRGLNKDHNHDLKGLFKGAATMASVRSGPFQDFYQAALAKGIKPTMARLTLARKLAAITLTLWKKGENFDAEKLKSQAA

SEQ ID NO: 394630 - protein, 318 aa, unidentified
MIKYHKHIGIDIGKYNFVVGIEGIKDTKEYENTSFGIFEFINDNKDILANSLTVVETTGGYELELLYSLCERGYVVHRADARKVKNFIRSYGNSAKTDKLDAKALGLYGKERADKLEVFKPESKQNIQLFRLVQRRNDLKQMLVAEKNRLQQANTDKFVKNSCINMIDVLSNQITEITNQVEVIISSDQLLKVKHEILKEINGIGNIVAFELLILLPELGKLTRRQIASLAGLAPKANDSGKYQGYRKVGHGRAGVKPILFLAAMLARNSKTSGLRLFYERLINNGKKKMVALTALMRKIIVIANAKLKSLLFNLKHS

SEQ ID NO: 394631 - protein, 491 aa, unidentified
MPGPSLGIDLSINGAHDCTILDATGQVTQRFTFDSSEAGMRKLEHHVCAIEASQGAPVVVMEPTGLAWLLPCLYLRAQHPAVKIVRIKTSKVAALRRYLKQDAKSDRLDSFTLAKMPFVDPEKLYAVDLPPAVLQGLDRMTRQRARLVEDLTRRKNRLQALLRGYLPGLMDVVGKPWEPPFRAMLTVSLNPITLAGQDAAALRKALQATLSRTPRFEELIPRLRTACAQLAQLYRPIIEAGRLTQAFFDDVGNEVARELRLMDVEQQELKDLEAAIARRYQEVAPNDHLGTMKGLGNVTAPTILAAVGTPQRFHSQAAFRGWTGVVAHASQSADSDAKGLPMTKAGPKRVKLALYQAAEVARQWDPQLAKIYYDQMVHKGKPHYKAIGAVMSHLASRIHAILTEQRDYVLRDVDGREVATREARTIILTRYQVPAEIRAERRTSKRRKRDVSTGAHRGNATRSSRRSSTSSHVHSTGAQEVDQSGTTAIAH

SEQ ID NO: 394632 - protein, 380 aa, unidentified
MEKACGLDVHKDSVFACILDEQGKKIFEKRFGTLTPNLMELRDTLVNFGCGRVAMESTSIYWMPIWHVLYGDFSLTLANPYFIKQLPGRKSDVKDAQWIAECLQKELIKSSFVADGVLQQMRQYSRQHRRLTKQKVRLEQQMDNQLQRCNIRFSNYVSNQGNNVSLRKIIAAIRNGIRDPVALSLLVHGRTKNRHGKQVITDSLSGVIQQVDVEMLKQSMDQIELIEKQQATCLNHLEELANRYYAEEISLLCTIPSVQKLSALCILAEIGNDMKVFSSASSLVGWAGLRPRNEESAGKIQSRKTLYGNKYLRQILVEISWSAARSNKSFLGKKHSVLSKRMKSQKALIAITRKMLVIIYNVLKTRQPFDPNRNIQAIAA

SEQ ID NO: 394633 - protein, 309 aa, unidentified
MKEELVYVGVDIAKAHLDAAIGSEKRRFANESLGHRQLIKWLKQLDDKAQVICESSGGYERKFVQALARAGVKISLVQANRVRQFARAAGILAKTDRIDAEVLCEFGKVMQPQIVTAAKLEQEQLRELESQRRHLTRLLVMEHNRGARLSDVWVQRLNCRLINQIKKQIHQLDLLIKKHIDQSHELSAKAVKLTAISGVGARTAALLLAQMPELGQLNRRQVAALVGVAPFNRDSGRMRGKRTIYGGRRPVRHGLYMAALVAAHHNPILRQFYLRLRAAGKPAKLALTATLRKLLIVLNSALKPDPNYA

SEQ ID NO: 394634 - protein, 748 aa, unidentified
MSSSRSAAVRVLRLRVKDKHAAWLCGLAREVNTVFNYCNELSVKVFERERRFLSGFDFWPFLKGVTRGDCALHLPVQAVQEIAEEYARRRRQHRKIRLAWRKSGGARRSLGWIPFKVRTIRYRGGQIYFAGRWLSLWDSYGLGNFELRAGNFSEDSRGRWYLNVCVPREQRAGDERNKPTAQSILDRSVPSLGIDLGLRTFAAFSDEALPPIEAERFYRDLEPVLARAQRARHRNRSRAIHAKIANRRKDFLHKLSTRLVKANGAIFVGNVNASALAKTRQAKSVLDAGWSAFRTMLLYKCDDAGVWFAEVDEAFSTQDCSVCNSRAGPKGRKDLGISHHGTTGSRYVAPWITLRIGCEPWRRATYEWEPAMKNVRFIGLDVHAETIAVAVAEPDGEVRSLGTIPNRSESVRRLIGKLGKPESLKVCYEAGPTGYVLYWQLAELGVTCEVVAPTLVPVKTGDRVKTDRRDAEKLARCYRSGDLTAVWVPDAAHEALRDLVRARLAAKRDQLRARNRLSKFLMRQGRRAPEGATAWTVKYMDWVKQQQFEHAAQEATLVDYLHEVEHVAERIVRLDRDIDAAVERTPETLRAVIAGLQSLRGIAKISAVTLVAELGQLSRFAHPRQLMGYSGAVSRERTSGPLVRRGSISKAGNAHLRRIVTESAWAYRHRPSIGRALAARNREQSEAVKAIAWRAQHRLHARYCALLARNKTKQKVIMAIGRELLGFIWAIGVEIERGHTAPEVKRAA

SEQ ID NO: 394635 - protein, 324 aa, unidentified
MRLPILGIDIAKLKFNLCLINTNGKLKHKVLPNTSTGFEQLREWLTKQGVERVHACLEATGSYGEALALSLHEAGHTVSVINPAAIKAFAQSRLSRTKTDRVDAELIARFCLAQAPPAWTPLPQEVRELQALVRRLESLIEMRVMEENRLSSIITVETVRSSVEAHLSYLNQEIKRTEELIHNHIQNHPGLKQQSQLLDSIPGIAETTAALLLSEITDIRQYRSARQVAAYAGLVPRERQSGSSVRGRTRLSKIGNARLRRALYFPAITALRCSPFFQSWAKGLQARGKSKMSVICAVMRKLVHVAYGVLKTGKPFDPEWAKTA

SEQ ID NO: 394636 - protein, 389 aa, unidentified
MYSYFVGIDIAKNTHWASCLSSDGEIILEPFSFSNDNSGFQKFISKLESLDKTKILIGLESTAHYGENIISYLFNLDYNIGLINPIQTANLRRSNIRKTKNDKVDTKIIIKALTLGNYSIITSRDINNLKLKGLCRSRRNLVTMRSKAKIQLVSYLDQIFPELAQFFKGNLHLNVSYQLLKEYSSPKQISSLHLTKLSNILHDNSHGRYNKQDAIRLRELAKNSVGIDNPSLSLQIKHSILQIELYNEQIAEVEALYKQILDEMNTPILSIPGMSYNQAAVIIGCIGDINRFEHSCQLLAYAGLDPSVIQSGNFQARSTRMSKRGSGMLRYSLVYSAHNVVKNNKTFRDYYELKRSQGKSHYCALGHVAHKLVRIIFKMLKDNVAFNLD

SEQ ID NO: 394637 - protein, 441 aa, unidentified
MTKPKKNLTVIKQHAAGIDIGSKKIFIAVPNMPVKSFDTFTSSFQSAIEYLKENKIKSVAMESTGVYWITLYDMLDDAGFEVYLVKSSAVKNVPGRKTDVLDCQWIQQLHSYGLLKASFIPPSDIRTLRSYTTLRRKNIQLASDHIRRAQKALDLMNIKLHFVISEIHGKSGMRILHAILNGQRDPYKLVELCDKQILKNKRKQVIESLTGNYREEHLFALKQALDGYQYYQSKILECDNEIEKLLKVMTKDLPEPNNISKPKPIRRNKPNIENLHYLLMKLTKGVDPSKITGITDATLLEIISRVGLDMSFWNTSRHFSAWTGLAPNQNDSGNKKRNKKLKNKSSAGQIFRIAAHSLTNSKYNALGSFYKRIRAKKGKLFAMKATARKLAVIYYNIMTKGIDYVEEGITVYEQKIKQQRIKSLHKQARYFGFSLLPVNPS

SEQ ID NO: 394638 - protein, 310 aa, unidentified
MESQEVKYVGVDCGKKSIEVVRINSENSLERRQFSTTESGINNLLQWLTLNDIVGLEAGSQSFRIAKSILNKGVQVIVLNPGNLATIYQSLKKTDKEDSLKIARLIQRFPIEELPVVPIPNDEEEDNRRLCTEHENWTKQLTQGKNRLHSLFTQAGLTQITKKHLRTKVSREASVTLLSDRYKKEAERILKDLDLVELNLKLIEEEIQEALKKNKAYVQTIMSMPGIGMITSLAIMSYMGDCKRFSSAKQAAYYAGLVPRVDISGDTVRYGRIINRGCHSIRRVIVQAAWSLVRCQHGGKVKEFYQRLYL

SEQ ID NO: 394639 - protein, 354 aa, unidentified
MPQSSTLYVGMDVHKESIAVAYVAQEHGAEVVSLGPIGTRQCDIDKLIRQLQSKSKQLVFVYEAGPCGYWLYRYLTKKGYVCWVVAPSLIPKRAGDRVKTDRRDAIQLARLMRSGDLTPVYVPAVDDEAIRALSRAREDTLRDLKAAKLRLKAFLLRHDIRYTGRANWSPAHLRWLSEVVCPTPAQQIVFQEYVQTVTEQTERLGRLELELHEQIKTWRFAPVVEALQALRGVQFTVAVTTVAELGDLTRFANPRQLMNYLGLTPSEYSSGARRQQGSITKTGNSHARRALVEGAWAYRYPAKVSRHLQLRLEKLPTAIQAISWKAQVRLCTRYRQLMAKGKNANQVVVAIARE

SEQ ID NO: 394640 - protein, 307 aa, unidentified
MNGIGAGVDVSKAYLDVAVFQRNEVKRFDNGAAGWRALVRWLKPYGPGQVVLEATGGYEQRALGALHDAGLPMRRINPRQARFFARATGQLAKTDRIDAKTLAHVASVIDLVPFQPLDADAAKLRQYKSRRDHLVQNIATEKQRRRQLIDPMLRADLDAHIEYMERALHRVEQVISDLIKDTPQARIAQTIKGVGPVMIATMICELPELGHLNRKAIAKLVGVAPLNRDSGLFAGRRTTWGGRAGPRSALYMSAVTAARYDHLLKPFYESLIGRGKPKKLALVAVMRKLIVILNARMREAMAMSATA

SEQ ID NO: 394641 - protein, 419 aa, unidentified
MTDPPIQVWTRYIAIDIHKHYLMIGGIDAHKRIVLPPRRVELHRWRAWAQANLLPTDAVVLEATTNAWVVYDLLVTLVGRAVVAHPAKVKLIADARVKTDKVDVLTLAHLLRADMLPEVWVPPPHVRDLRALLSHRRRLVSLQTTAKNRLQSVLHRLNLRAPEGDAFAHKQRAWWAELDLSPTERLRVDQDIATLDHIAPQIAAVDVELRRLSTSEHWADQVPYLVQLPGIALLSAMTILGAVGDITRFPSAKQLVGYAGLGAGVHDSGKTHRDKGITKQGRRELRYVLIEAARAAVQSHPYWERTFTHLAKRIGEPKAIVACARKLLIVVWHVLLAKSADRRADAEQVAFKLMVWAWKLSDEQRGGLSSRQFIRAQLIRLGLGEELTHITRGGTRRPLATIEELLALRPELRDPPNTV

SEQ ID NO: 394642 - protein, 423 aa, unidentified
MEVLHPCVAGLDVHKDSVVACVRVMSGGKAKRECRTFDTTTAALEALRDWLVSCECTLVAMEATGVYWIPIWKILIGGEFAMNLANARHIKAVPGRKTDMNDAMWIAELAAHGLIKASFVPDEEYQELRTLMRTRKQFVREQTSNVQRIQKTLTEANIRLDSVISDIMGVNGRRMIEAMIKGVRDPGKLADLGDRRLKATRKELYDALHGRLTEHHRFVLKLHLDQYDELEKTIRLIDAEVERRIARLDKEAKAAETPFSRLIELLVSIPGVSYLSAITILAEIGVNMSRFPTAGHLLAWAGLCPGQNESAGKRKRCRLRKGAPWLKAILIQCAWAAKRSKNSYYRAQFYRLQARRGPQKAICAVAASILTAIYHILKDGVPHQDLGVDYFDKRKPEARAKRLVAQLAKLGFEATLQPIAKVA

SEQ ID NO: 394643 - protein, 339 aa, unidentified
MNVVIGVDPHKASHTAVAIDEAEDEISSVQVRATRRQVEQLVRWAEPFEKRRWAIESAGGMGYLLAQQLVAQGEVVLDVPATLASRIRVLGTGRSNKNDPNDAHSIAVAAFRAPSLRNVEPADHSQVLRLLAKRNLDLGSHRTRVVCRLHALLTELVPGGIAKELYVSDAERFLANVTPQNPTEWVRYDMALELLDDVRRLDEQTKESHRRIRTAIKASGTSLTEIYGVGPIVAAQLIGYAGDVRRFANRDAFASYNGTAPVEFASGGRVVHRVSQRGNRRLNHALHMAAVTQIRNPGTMGRIYFDRKVAEGKTKKEALRSLKRQISNAVYRQLLHDAR

SEQ ID NO: 394644 - protein, 324 aa, unidentified
MIDESGRALSNERFSSTSEELDRFLGRFQDAKFVLESTGIWEFIYEGIERRGFEAVLAHPLKVRAIAEARVKTDKVDAETLAQLLRADLIPRSWIPPKDIRDLRQLVRQRAYLVRDASRFKNRIHAEILRRGVRRPENLKTPFAQRSIRWMRSLDIPTVTSCLNCLESVQAQVQEINAQLLVEFERSPDAQLISTVPGIGFYGALLILAEVDDVRRFRHPEKLCAYAGLVPTVSQSASCVRYGSISKDGFAYLRWILTESVHVHTRYEPGSQLSRFHARIAKRRGRRVATVATSRKLLRIIYWMLVRHEPFHSHGFNPVKRLHS

SEQ ID NO: 394645 - protein, 423 aa, unidentified
MGSDSHQAFTAFVGIDWADAKHDICVQAAGSARREFSCIAHEPAQIEVWACSLRERFGGPVAVALELTKGPIVYALQKYDFIVLFPVNPATLARYRQAFRPSGAKDDPSDAELALDLLICHRDKFTALQPQSAPMRTLIHLVEQRRQLVNDKLRFTNRIGNALKQYYPQALAWFEQRDTTLFCDFIERWPTLAQVKRAHRAGLERFFQNHNVRFANVIEERLRAIKAATALTADEAVIGVYCLQVEVLVEQLRTTLRAIDRFDRQIAKLAPTLPDYALFSALPGAGPHLAPRLLAAFGEQRERFRSADELQRYSGIAPVTERSGKKSWVHWRWQCPTFLRQTFVEWAAQTINKSFWAGAFYRQHRDQGSTHQAAVRALAYKWIRILYRCWQSRSAYDEVTYLNALQRRGSPLFKHIAAAGQSG

SEQ ID NO: 394646 - protein, 342 aa, unidentified
MTQYKRIAIDTSKAVFTLHGIDQTDRPVLRIELRRAQMIPFFKKLPPTEIAMEACGGSHYWARELTALGHKVLLIPAQYVKPFVKRGKNDRIDAAAICEAAGRPGMHFVAVKSAEQQAQAMLLKVRETLVDQRTMLVNTLRGHAGEFGVIAAKGISNIVRLLEAVEADTSIPSEAREMMTLLGEEIDRLDTRLNEMEARLMKAHKANPVSRRLATMPGVGPIIALTVAVEIDPAAFESGRHFAAWAGLTPREHSTGGKQRMGGISRAGNERLRRLFVLGAMSVIKVAERPGNKLATEWLLNLLRRRPRKVAAVALANKMARIAWAMMTSGENYRRAPAARVS

SEQ ID NO: 394647 - protein, 419 aa, unidentified
MSDVLHVVHPRAAGLDVHKMQITATVRLCSEAGGEPVMHTGVFSALGEGLERLVNWLGGYEVEAAVLEATGVYWLAPFEALEDAGIAPRLVHAQHVKQLRGRKTDIADSEWLACVCQFGLARASHVPPRAFRQVRPLTRYRRQLIADRSRVRNRTQKVIDRCGVRVGGVLTDLFGVNARRILNGLVEGLQREAILDSLDARVSAKLDALGEALALELDPHSRWLLAELLEQYDSLCERLQRLERQIETALSPWDERLRLLQTIPGIDRASACAILAEVGPDLSSFARSQDLAAWAGVAPGNHESAGKRRPTRTRRGSPVLRAVLTECALGAARTRECQFQTFHRALTARRGYKRATVATAHKLVRTLFAVLRDGKPYRDPDTDYEALLVKRNAPRWLRMLQHYDVLHTLPDGTMRVRFA

SEQ ID NO: 394648 - protein, 423 aa, unidentified
MISALLARCAGIDVGKKWISVCVLTGPANGDAQAETRKFQTTNQCLERLAEWLVECGCTHVVMESTGEYWRPIYNVLEEATEMEIILANSQQVKGLRGHKTDPEDAHWLAHLLRHGLIRPSYIPPLEVRQLRDLTRRRKQLVRNEAQERNRIQKILEDANVKLGNVLTDIFGLSGQLMIDKLLEGNATPAEIAELAQRSARKKIPQIRASLEGHRMNALHRRLIDMSLDHMAFLEEQISTLDHAIVQHIQAHGLEKPYQLLQTIPGVKEEAAASLLAEFGPDMQVFGSAKKISSWAGVAPGNNESAGKKKQAPALRGNPWARSTLTESAWSASRKKESEFQNAYQRWKPRLGHKRAIVAVAHCLAETVFEVLSTGQPYSGPGASPMPDSQAAKLIRHHTRRIKTLRKRLKPPPQRPQPQLATP

SEQ ID NO: 394649 - protein, 369 aa, unidentified
MRENTLFLGLDVHKKTISVAIVEAAAGAEVRFYGTIENRPDAIRALCKRLSKEGRHLHACYEAGPCGYNVQRHLARLGHRCDVVAPSLIPRKAGDKVKTDRRDAMMLAQTLRAGQLTEVWVPDQAHEAMRDLVRLRSQATRDLRKTRQHLLSFLLRHERISPFGHWTKAHRRWLGELKFTHPAQHLALEEMLHRIERAEELCERLKRAIGELVPQWSLAPVVQALQALRGVSLITAAVLVAEIGSFERFASPRQLMAYLGLNPSEHSSGATVRRGAVTKTGNGLARTSLVEAAWTYRFPARITQIIRDRLKGLPEPIRAVAWKAQVRLSARYRALIAHGKSAPTAIVAVARELVGFIWAIARMVEPKFA

SEQ ID NO: 394650 - protein, 339 aa, unidentified
MARYIGVDLHRNRFTVCVLAENGREYRSEYRLEQLSQFVRKLRAADELAVEVTGNTRLFYNAVVLHVAKVVVVNPTQFRVIRRSVKKTDPHDARTLAFYLSKDMLPEVRMKDTLHAQLASLTQTRDTLVKQRTALKNKVNNILSAHGINLRKESLASDVGLDRVLEMTFDAIVATELRVIVGQIRALNQSIAELEKTIKIEGTKLPGHKNLKSIKGIGDLGATVLLTAIGDINDFAHPGKLAAYFGIVPRVRNSNETEHTGRITKRGTKLGRTTLVQCALIAMRYSPYLAKFYHKVARRRSTGKAIIALARKFLSVIYHTLKNNWVFEDFPNFVIAGAA

SEQ ID NO: 394651 - protein, 332 aa, unidentified
MPVSVIGIDLAKNVFQIHGVNDVGRPVLLKQLRREQMMSFFAQQPPCLVGMEACASAHHWARKLQDLGHTVRLMAPQFVKPYVKSNKNDAADAEAICEAVRRPTMRFVPVKNVEQQAALALHRARQRLVKSRTAQANQSRGLLAEYGPVMLPRISAVRANAPKLLEEAAGWISGAFCELISELLEHLKSLDQRVKTLERKIRAWHRDNVLSLKLEAIPGIGAMIASALVASIGDAKHFKNGWQLAAWLGLVPRQYSTGGKPKLLGISKRGDRYLRTLLIHGARSALRTAHQKSIGERWLNRLVERRHRIIAVVALANKNERIAWALLVQQNL

SEQ ID NO: 394652 - protein, 344 aa, unidentified
MEIRSIGIDLGKTSFHLIALGNRSQIVIRKKFSRSQLLAYTANLPSALIGMEAGVGSHFLGRGLREQGHEVRLIPAQFVRPFVKSNKNDYRDAEAIAEAVERENMRFVAIKTEDQLDLQALHRVRDRLVARRTSVINQIRAFLLERGMSFRKGPASLRRQLPEILENADEQLSPRMRCLLDFLWQEWKGLQSQIESLNQDLEQIASSDPACVRLQQIPGVGPLIATAVVSAIGNGAAFRKGREFSAWLGLVPRQWSTGGKTKLLGISKRGNPYLRKMFIHGARAAVLRLKREGSSLGKWMGQLETRTARNAVIVATANKLARISWAVLASGNNYHPLYKAAFSN

SEQ ID NO: 394653 - protein, 394 aa, unidentified
MAFKIFRKNCCGLDVHKTWIYACMGITDTNGRTEYKQARFSSFTKGLQELADWLAKYDSNDVCMESTGKFWIPVFNILEKTCWVTLAYPKYTKPQKGNKTDHKDAKWICDLYMCDMVNPSFIPPPDIRQLRDLMRYRSKLTNIMTSEKNRALNCLTVSNLKLDDVFSDVFGKSSRSVIRYILEHPGETFQVAPFIDRRCKHPVEEIQAVIDGTISHQQAVKLRECLQHLDELEVHKTNVEKEILCLVQQYPYQLELLQTVLGFSGNIMTAIALISEIGADMSVFPSAKHLVSWAGCCPRNDQSSKKVKSTRISRAGVYLKPLLVQVAIQPFTANADELSAAGAVEIRCQICDGRFLSMWAALFIFLGCPLPPCQKDLHVHNGRIVILASVAWIF

SEQ ID NO: 394654 - protein, 435 aa, unidentified
MRCERGSVGVVLPASSRFKLSRTEDTGMRIIGLDIHRAFAEAVAWENGNLSRLGRVIMRREPLEEFAKQLSSRDVVVIEATGNAASVAAVIGPHVSRVVIANPKQVRLIAHAKIKTDKIDAGVLAQLYASGFLPEVWIADAATQALRRQVTRRNQIVRQRSRLKNIIQSILHAHLIPSCPHQDLCGPKGRAWLSEQILPGDERLAVERHLREFDRLTDDLKVIERDLAQSALADERVQRLMTIPGINMVVALALIAAIGDIERFAKPEQLVGYLGLNPSVRQSGPGPAYHGRITKQGRGHARGMLVEAGWAAARCPGPLRSFFLRIQSRRGQHVAAVATARKLAILIWHLLTKNENYLWARPALHARKLRDLELKAGHRAARGRKGTAHAYNLQSHRDQERRWVEQAEAAYARFVAGWNAKGPKARTGAAKEERQ

SEQ ID NO: 394655 - protein, 344 aa, unidentified
MLKSTIFGIDLAKNIIQVCEISKHGELVSNKPVSRQKLKEILAKVKPAVVAIEGCGSSHYWGRYAQSFDHDVRIISPKKVKGFLQGHKTDANDALAIANASLQIGIKTSKPKSEEQQTIQTLETSRFHLSRSITSLSNHLRAMLYEYGIVSARGVKALTTVVQDTLNDADSIPECLRSTVNQLWLTYLHLRKELAQLIKTKNALIRQLHPCKSLMDLEGVAEVCAGLLYSSIGDGKQFKNGREASAFIGLTPKQHSSGGKVFMTGIDRAGGIKELRSALYQGALSYICRLPEEPKTAKQAWLIRLVQRAGIKRSCIALANKTVRTAWAMLRYENKYEQQPLLTI

SEQ ID NO: 394656 - protein, 401 aa, unidentified
MKYGVGIDISKGKSTVAIISCAGEVIAEPFEINHDQNGMSQLEEKIKEIPKEDLKIVMEETGTYHLPVLGYLLDKEYFVVAENALKIKKYLDRGIRKAKTDKKDAYKLAEYACDNWYKLNKVRESDEIYTNLRFLSRRYLSNISIQINQKVNFSNLCDLLFPGYYQLLDENIFILGLEIFKKYYHPELVSNKKQSQFINEIDKLAKKLGHKGAGITLAKKIYNLATQTISPYPNNKYSQLSAISCADELILTIKTSNEIISNMDELARELPEYYVISEIPGVGRKLTSRVIAEVGDIRRLKNAGSLIAYAGLDAPPYQSGQFEAINRHISKRGNKYLRKTGYEVMKAIKSSCKSDNELKSYIIKKENEGKLKKVAKIAGLNKFLRMYYGIVKKKYKELNVW

SEQ ID NO: 394657 - protein, 388 aa, unidentified
MFFLGIDVGKNTHVASLLDEKAKVIFKAHSFANTLDAAEALLVKLEPYKDSLEIGMEATGHYWLSLYSFLTEHNFIVHVINPIQTDGWRKGIEIRKRKTDVIDSVLIADLIRYGDFLETSLADEDILSLRNLTRFRAYLVNSVSDLKRKAIAVLDQIFPEYASVFSNVFGQTSKELLKSLSLPSDYENLSATKIEEVLSNITQKKKASETISTLSDKASHSFGISFCKDSFAFQLKLIIEQICFIEEQIASVELEIEQLMSKLGTNIKTIPGVGNVIGAVILGEIGDIERFDNPSKLVAYAGLDASVSQSGEYEASSGKLSKRGSPYLRKALYMAAQRAEFCDPVFQAYYEKKRNEGKHHLVATNAVARKLCHTIYAILKKNIPYEIQ

SEQ ID NO: 394658 - protein, 389 aa, unidentified
MLLDHPSDGLTAIRTHIGAIFVSLELSRSNWLVTSLSPGKGEKMSKHSVAAGNVAELLTLFAELRRKTEVRTGQSYPIITIQEAGLDGFWLHRVLQQEGIESHVVDPASIATPRRRRRAKTDRLDGEALLRALLAYKRGEPRVCAMVVAPSPEEEDRRRLCRERRTLIEERITHVNRIKGLLFAQGISDYGPLRRDRRARLDALRTGDGRELPSHLKAQIGRELDRIELLLGQIKAVEAAQDALLAAAKKPASEKAASEPVAMLLALRGVGANFAAVLWSEAFYRQFANRRQVAAYAGLAATPWQSGGIRHEQGVSKAGNPRLRTTMIQLAWLWIRHQPQSALTRWFKERSQQGRKRAIVALARKLLVALWKYVTQGVVIEGVVMKPAA

SEQ ID NO: 394659 - protein, 338 aa, unidentified
MLHSGIDLHKRDLVIATVDAAGMPIAEAQLPTTRAAVQRYFAELPGPHRAVVESTATWYWLRDLLVDAGIDVRLGHCKYIKAITYAKVKTDAVDAATLAQLLRSDLIPEGHMVSAAHREERDLLRGRLRAVTQHARCRHIIEGLLAQYNVSSVGALPTLVQLRVAMLSEQRTLLAQQIKRIEHELAPRLVPTRDIQHLLYVPGIGKIVAFTILLEIDDIHRFPTVKDFVSYCRLVPAAKNSGGKQRQQRSKDGNRYLKLAFHHAAVRAIQYFPEIQRFYRALARRKPRGVARAIVAKELARTVYVILARNEPFNGTFKGKPLSRTKTAKWPRLANPPV

SEQ ID NO: 394660 - protein, 455 aa, unidentified
MPRTTTGDRPELKPVNLGAAAIDIGSKMHMAAVNPACADLAVRAFGTFTQDLHDLADWFKACGVTSVAMESTGVYWIPVYEILEQHGFEVILVNARYAKNVPGRKTDVSDAAWLRQLHSYGLLRGSFRPDAEIATLRAYLRQRERLVEYAAAHIQHMQKALMEMNLQLHHVVSDITGATGMRIIRAIIAGERNPDVLATHRDVRCHSSIETIRAALVGNDRDEHIFALTQSVELYDTYQAKMLDCDRKLESLIAALTDKGAKPVGKLARPRVKTKQVNTPSFDVRAALYGILGIDLTEIHGLGPSLALKLIGECGTDLRAWPSAKHFTSWLCLAPGNKISGGKLLSSRTRRSSSRAAALLRLAATTVGRSDTALGAFYRRLSSRAGKAKAVTATARKIAVLFYNTLRHGMTYRDPGADRYEEQYRSRVLANLKRRAKSLGFALQAVPFGDEVAVS

SEQ ID NO: 394661 - protein, 403 aa, unidentified
MLFCGVDWASDHHDVCLVDEGGAIRWRGRIAHDPAGIERLRQAIAEHEPDPAQVAVGVETSHGLLVGALVEAGYVVYPINPKAAERFRDRRKPSGGKNDQLDAEVLAQAVRTDRTSLRALLPDSALASEIATLARDRHALVREHTRLLNQLRSALGEYFPAATLAFDLDADSTLAFLERYPTPEAAAKLTAFQIAAFLRARRANRDLAAKAAAAKEALRAPALRARPEIARAKARLVRVVCVQLQSLRPELAAYARQLERLLKMHPEGELFLSLPGLGTILASRVLAGTGDNPARFHSAAGLCAYAGTAPIVLQSGRRAVVKARSACPKELRDAVQQWADQARRPARSAWAAQFYQRHRDRGHNHNESLRALGNRRLELLFDLRRKGIRYDEAVHAANIRWAA

SEQ ID NO: 394662 - protein, 338 aa, unidentified
MYSVGLDIHKRRSSLEILDQHGALFKRQQVIGDWASLFEEVAKIPRPFAICYEASCGYGYVHDQLSRRADRVVVAHPGQLRLIFRSKKKHDRIDAGKLAKLLYLEEVPAVHVPGIDVRAWRGLIEYRHKLLSRRGAVKNQIRALLRGLGITAPKGLWTGKGLTWLRAQVLDDPDSLRREIMVDDLQQLQEMIKRVEKELARIAAKHPGITLLRTIPGVGIRTAEAVLAYVDDIKRFSRTKQVGSYFGLVPCQDSSAERNRLGHITRDGPATVRGLLCEAAWQGVLRSPTIRAFHQRIMRNDPERKKIALVATAHYLLRVMTAMLRNGEAWREAIIQQA

SEQ ID NO: 394663 - protein, 447 aa, unidentified
MDTESATQYAAYIGIDWADKDHAYALRATEGKKVEQGKVEAKPEAIEEFVAQLRQRFGGKAIAVALEQSRGSLLFMLSKYDHLVLYPVHSSTLDSYRKACHPSGAKSDPDDAALILDLLQKHPEWLQPFAPDTVPTRTLQFLTEERRDAVNDKTRYLNQLTAALKTYFPQMLEWLDVDSKVMCEMLQRWPTLEQLQQQKPSVVEEFLREHRYPVVRVKPLQEAMEKAIPATTDQAVIEAKKFTVQRTIAQLEALRENIAELDRRIEQITRLHEDYRVFASLPCAGKVMVPRLIAAMGTQRDRFQTASELQCQTGIAPVKEASGQREWIHWRWACPKFLRQTFVEWAWLSTRKSQWAREFYDRQRAKDKSHHAAVRALAFKWQRIIFRCWKDRCPYDEARYLATREQRARTAKASTDGSPQLKSSQAGGVEITWKNVSGFSRPDSISC

SEQ ID NO: 394664 - protein, 414 aa, unidentified
MSMEVFCGIDWAEDHHDVALVDRDGQLLARRRISDDAAGLAALLDLLAEHGDSAEQPVPVAIETPRGLLVACLRATGRKVYPINPMAVARYRDRHAVSGGKSDHGDSAVLANVLRTDLAFHRPLPADTELAQAIAVLARAQQDAVWDRTTAHNKLRSCLREYYPGFLAAFADARGGILRPEARTILAAAPTPADAARLTLAQLRSLLRKAGRRRGIDAEAARLREAFRAGQMRQLPLVEQAMGRQAMALLRQLDAACAAATDLEQAAIQSFNQHPDAGIITSFPGLGPLTGARVLAEIGDDRSRFQDAKGLKAYAGAAPITRASGKTKSVTRRRIKNNRLNATGYTWAFSALTASPGARTHYDRRRETGDGHAAAQRNLFGRLLGCLHHCLATGQHYDETIAFPDTTQKHPAAA

SEQ ID NO: 394665 - protein, 310 aa, unidentified
MDHFVGIDVSKATLDVAVLPDGESWTVANDDHGLTELLPRLGALAPTLVVLEATGGFELLAALTLANAGLPVAVVNPRQVRDFAKAMGRLAKTDALDAGILALFAQRIRPEPRPLPDEAALLLEGLLTRRRQIVDMLTAEKNRLGFARGPIKRDITRHIRWLEKRLADVDGDLQDAVTASPLYQAKAELLRSVPGVGQVTTLTLLATLPELGQLSRHQIAALVGVAPMNRDSGTMRGKRMVWGGRAPVRAVLYMAVLVGIKHNPILRAFYERLRAAGKPFKVAATACMRKLLTILNAMLHQNRKWDPQHA

SEQ ID NO: 394666 - protein, 354 aa, unidentified
MEDYDGRQVVGMDLHRRRSVLVRMTEDGRRLGTAKITNSPAALRKEIARAGQHPKVVLEATYGWYWAADVLAAAGAEVHLAHPLGVKAFTYRRVKNDERDSADLADLLRMGRLPEAWIAPAEVRELRELTRYRQKLVHLRTSCKDQVHGVLAKLGVPVTCTDIFGVAGSAWLDALGLPQPYAGKVTSLRQLAGALSAEITMLGEVIADLLAGDRGYQVIQQLPGIGPVLAAVITAEIGDITRFRNAGQLCSWAGLTPRHRESDTKVARGHVTKQGSRLLRWALIEAIQRIPRDCVIGAVKDGIIARRGKEAKNIAKVAAARKLLTLVFYGMRDGQIRCLARPAEPTATAPARAA

SEQ ID NO: 394667 - protein, 434 aa, unidentified
MPQNIDLFISVGIDVSSDFSEMAIVLPNQIFLEKKTFRIYHSKQDSLSAAVRKIKKAEEENNMKTRIFMESTGIYHYPLFRYLTDAELDVYVINPLITNSNKNSNIRKVKNDRVDAKSIALVGLRPELKVSKLPQELVMDFRNLCREYYYLVDEKAAFVIKLTAQIRIAFPQFKGIFSTLTAKTALAILKDYGTPKKIIEADKGALVSTIATLSRKGMAVAEKKYEKLLRAATDALTFSAGVDSNFHLIAQYIRHIEHYQAEIDYLLSKMKELVKTNEGVNFVKQVSLLETIKGVGFLSALTLMCEIGDFEAFKKPKQLFAYFGLDPSVNQSGNFNGTRMKMSKRGSRIARRVLFMVAVQSIGTTLKQVPKNPVLHRYYHDKLSSGKTKMCALGAIMHKICNIIFAVLRDERPYVLKTPEQHQIERQASEIKAA

SEQ ID NO: 394668 - protein, 351 aa, unidentified
MNYVGIDIHKRYSVFVALDERGRELKRCRINGNTAFGFDQFFSGLDGKSKVVVEACWNWGRIYDLLSEIEQVEEVVLAHPLKTRLIADAQIKTDGLDAHGLATLLRGDLVARAYVPSKPTRQRKEVLRQRLYWARLRTRVRNRIHALIDRQGELSMPQCSDLFGRKGLNALNKLCLNEPDATLLREELALLELIQSQIKAQEARIVEFNSKDETTLRLQSIPGMGKILAAVAAVEIDCVERFSSAAKLCAYAGLVPRTHASGGRVYQGPLVKSRNKWLQWAFIEAAWVAIGCSAYFGGLYRQHRARGKNANIAITSIARRMCQISFTLLKERRDFIEALPGRSAVRLTAAA

SEQ ID NO: 394669 - protein, 418 aa, unidentified
MEDVVEYCAGLDVHRDTVVATVRYPVGGRRSSTTKTFGTDTAELVALGDWLVSQSVTRVGLESTGVYWKPVFYQLEDRLEQVWLLNAQHLKNVPGRKTDVADSAWIAQLVEHGLVRPSFVPPPQIRQLRDFSRHRRVLCEERTRMVQRLEKVLQDAGIKLTSVASTVLSKSGRAMLEAMLAGQTDPVALAELAKGRMRSKIPQLVDALHGNFRLDHHGVLVAQILAQVDFLDRQLADIDEHISALVADLEPIIERVQTIPGVARKCAIGMIAEIGVDMTVFPTAAHLASWAGICPGNNASGGKARSGHTRRGPVALKTVLTEAAQAAGRTKNTYLGARYHGIRGRRGTFKAVGAIRHDILIAYWHIVSGTSTDGTPVGYRDLGPDWITRRHSTEYQIAKLTKQMEKLGATVTVTLPAA

SEQ ID NO: 394670 - protein, 400 aa, unidentified
MKKHSKSSQRSEPSLKRTKARGPVQRDAKEVLAEVLEKLTGKLDVPAVSTSAKENRRANTVGPNRDRLTVGVDLGDRWSQYCILGLEGETLAEGQLRTTQDDVREFFQALTAARVVIEVGTHSAWVQDVITEWGHEVLVANPRLMEGSKRRKRKSDRIDANKLARLGRVDPQSLYPIRHRSREVRQDLVVLRARDALVSVRTELINTTRGLVKSMGTRLPGCSSPSFTDKVKDAIPVEVREALLPLVQLVETVNDCIAKYDQKIEELGREKYGHTTLLRQVKGVGPITSLAYVLTLEDPQRFSSSREVGPYLGLVPKQEDSGDSQPQLGISKTGDRMLRRVAGGEFAIHVGSLRTGHRLTAVRTAIVRAGRKECEEASRGGGGTKASRVAASPVGDRGCL

SEQ ID NO: 394671 - protein, 392 aa, unidentified
MYEIFVGLDISKSSFAACAIRQEKDKLFEFSAPMNMEGFKELAQHLSKFSKDSILIGLESSGCYHINLSSFLSKKGYQMVVINPLLISNFMKLSLRKTKTDRKDAFAIACFLTMFYGSLPQSCFLSPDFRELARERERLSSEIARLKNDIEKLLSVTFPELLRATNVYSGAILNLLGHYPSAWMIKSLPASEIARLIEPKTRGRKLGISPEELISLARSSIASMSPGRELILSQKASQLLLLEEELKKLTEMLTQMCHKSALEDLRILKSIKGIGDITALHFLAEIGDVSRFENYKKLIAYAGLDPTVHQSGKFEGQSRISKRGNRHLRRVLWLMATKVARYNHTFREYFLRRRAEGISYKKAILAVAHKLVRVIFAMLSHKTCFRVSQNSL

SEQ ID NO: 394672 - protein, 447 aa, unidentified
MKRKQIPKPQEILDAEHELVIERVCAIDVAKAFGKVCMRTPRERRRVSKVWDVEATTGAVTELAVQLTEQGIEKITIESTSDYWRIWYYLLEAAGLDVQLVNARDVKNVPGRPKTDKLDAVWLAKLTEKGLLRPSFVPPAPIRQLRDYTRLRVDLTRERSRYWQRLEKLLEDALIKLSSVASTLDTLSARDMIEALIAGERNPHRLADLARARMKTKRTALIKALDGRFDDHHAELARILLDQIDTLTAQIDTLTTRIDELLVAAEPGKDDSGGNPTGDTVSGSGLSAVERLTEIPGIGSTGAQAILAEIGLDMTQFPTPAHLVSWAKLCPRTIQSGPITRGGKTGKGNPYLKGALGEAAAAAAKTDTFLGERYRRIVKRRGKLKALVAVARSILVIVWQLLSDPSARFRDLGSDYHTSRINIERRMRNHIAQLAAMGYRVTLEPAA

SEQ ID NO: 394673 - protein, 287 aa, unidentified
MTIVAHAHSFVIGVDTHARNHVLAILAATGEIIDTGQFPTTAAGLARAIAWVGRRTGGDLAALWIIEGIASYGAGLAATVARAGYEVIEAARMNARGNRGLGKSDPLDAHRIAAAVLALDTRQLRRPRLAEGTRATLRVLIASRDHMTAERTATINALIALLRVVELGIDARLPLSRTQPATVARWRSRDEDLGAATAQAEATRLARRVIELDEQIAANSARMSELVHASQAAPLLEKRGIGPTTAAICLTAWSHHGRVRSEAAFAALAGANPTPASSGNTVRHRLM

SEQ ID NO: 394674 - protein, 315 aa, unidentified
METMEARYVGVDVSKDRLDVHVLPEGAAFAVARDGKGLAELVERLSALQPQRIAVEATGGFETIVAAALAGASLPLVIVNPAQVRHFAQALGRRAKTDPIDASMIARFVEATKPDLRPLADEAAQLLADLVARRRQIIEMIVAERNREKRVAVRRIRKSIARLIAALEKELSEIDAEIDASVRGSPAWREKEDLLASVPGVGPITARTLIAELPELGTLDGKRIASLAGLAPFTRQSGQWKGKAMIAGGRKSVRSALFLASLAACRHNPVLKAFRQRLIDAGKPKMLVAIAAARKLLTILNAILRDKQPWRPENA

SEQ ID NO: 394675 - protein, 282 aa, unidentified
MPSALNLGVDVAKDSLQVAEADSLMAATRLSNNGAAIRAWLATLPAGSRIAMEATGRYHQLLADLAHRAGMIVYVVNAYDLRHYARGVGVRGKTDRVDARLIARYLAHEGSHLHPYTPATPAQREIDELLRRRATVVNTRTRLSLSLRGVAHCASDLRSILKRLDSLIAKFDRRLRELARGQAEAEQRVESVLGIGPLVGVALTNTFTRVPLRNANAAVAFVGLDPRAKDSGELIGRRRLSKRGPAELRRLLFNAARSASKTKVWHPLYERYRAPCRPPKPR

SEQ ID NO: 394676 - protein, 347 aa, unidentified
MNITAVGIDLAKLVFQVHGVNGHGKAVIRKQLKRTELTRFFANLPACLIGMEACSSAHYWARKLIEQGHTVKLMAPQFVKPYVKTNKNDARDAEAICEAVARPNMRFVPIKNVEQQVLLGIHRARQGFVKARTAQANQIRGLLAEFGIVMPKGVRFIAQQMPGILEDAENGLPHRSRELFAQLLAHFRNLDHQMNELERQIKTWHRQSSQSQRLEKIPGLGPLTASAVVASVGDAKTFRNGRQFAAWLGLVPRQKSSGGKEQLLGISKRGDTYLRTLLIHGARSVLFSLKRHAEEPTGWLMRVAERRNLNIAAVALANKNARIIWALLAHEREYQAGYTSSSIAVAS

SEQ ID NO: 394677 - protein, 345 aa, unidentified
MSEFYEGRQFVGMDLHRRRSVLVRMSETGEHLETVRILNDREVLADVMSRAGESPEVVLEATYGWYWAADALAELGATVHLAHPLGVKAFSYRRVKNDQRDAADLADLLRMGRLPHAWIAPPETRELRELVRHRAKLVAMRSQCKAHVHAILAKGGIWVPMSDLFGVEGNLLLDNVTMPAPYKARIASLRRFIEAFDAEIDLFTGLAQRRLTHHAGYTAIQQIPGIGAVLAAVFVAEIGDVHRFPGPAQLTCWAGLTPSHHESDTTVRRGRITKQGSCLVRWAAIESVKSLPDTSHIGAIRDQVAHRRGNRNIGAVAAARRQLQLVFYGLRDHHIRALHHPPRAA

SEQ ID NO: 394678 - protein, 344 aa, unidentified
MIFVGMDIHDKSTTVCFFDPEAAPVAQHRYATCPTTAKDLTALLRPFGGDCQIAYEVGTQAQWVAGILRPLAEEVQVANPGQIRWLYRSGRKNDRLDAKKLATLLYLGQLPTVHLPSADVSAWRALINHRRTLVNRRTMVKNQIRAILRAFAARCPYRSCWSVRGVLWLRSQTFDAARDLMRDTLLAEMDFITGQLRHVERQLDAIARTQSNVALIRTIPGIGPRTAEAIVAFADQVGRFKHRKAFACYFGMTPTQDASGGRDHHGHISKQGPSVVRWVLTEAAHQTVRRCRALKDFYRRVHQGRKDRSKRAIVATGRKILTLAFAMMRDQTVFDPSRVTASAA

SEQ ID NO: 394679 - protein, 358 aa, unidentified
MRENIRRSGDGEKPGMTVGIDLGDRFSRYCVVNQEGEVIEEGRIQTTMAALERHFTGERQRIAMECGTHSPWVSRLLQGMGHEVLVANARKVRAITGSESKNDRNDAEKLARFAAYDVRLLSPIQHRSPERQRDLNLLQARDTLVRARTMLVNAMRGLVKSAGQRLPKCSTESFARAVRTTIPAGMEPALTPLLGQVASLTEQIRQMDKQIEALGKRYPEVVRLRSVPGVGPVVAAAYVLTLDSPRAAGKSRAVGAFLGLRPRQSQSGECDPQLRISKTGNSYLRRLLVQAAQYVLGRFGPDSELRRWGLKLAASGAKRGKKRAVIAVARKLAVLLHHLWRSGEYYRPFPNGPQVFTP

SEQ ID NO: 394680 - protein, 350 aa, unidentified
MDIIGLDLHKRESQLCLGAEDGTITERRIVTSRERFTVVLGNRPRAKILLEASTESEWVARHLESLGHEVLVADPNYAPMYATRSRRTKTDRRDARTLMDACQTGAYRLAHRLSDPRRHVRAELAVRDALVRTRTRYVALAKTLVRRDGLRVASSESHLVAQRIGALSLSPVLAAELQPLFTVLAPLNEQIAAADGRIATLAATDPLVARLATAPAIGPVTASAVVATVDDIGRFRSAHQFEAYLGLVPGERSSGEKRRVGPITKAGNSRVRWLLVEAAWRLLRTKSAEAAALRAWAHGVAGRRGKKIAVVALARRLAGILYAMWRDGVPYDASRIRGPRIAAEVTARAS

SEQ ID NO: 394681 - protein, 348 aa, unidentified
MIIIGCDYHPGFQQIAYVNTDTGELSERRLGHKEEAEQFYHDLRSRGMRVRVGMEASGHARWFERLLGELQVELWIGDAAAVRTKRLRKQKTDRQDAQLLLHLLLEDRFPRIWVPDAENRDLRQLLWHRHRLVQMRTRVMNQLHVVALNEGLRRKKALWRPAGRAQLESLALAPWASRRRQDLLDLLDQLTPKIRELTRTLEEVVEKRAVAGRLRTHPGVGPLTALAFELVIGTPERFQCAKQIASYVGLVPSEESSGDRRRLGHISKQGNALLRFLLVEAAQVTVRSQPEWRSQFFHLAMRRGRKIAKVAMARKLAVELYWMWRRGWDYEEIQKLGSHAGGPEIAMV

SEQ ID NO: 394682 - protein, 433 aa, unidentified
MKVKYEDRLKQKIIAITPDTLVVGVDIAKNYQWARFVDFRGIEHDRALKFKNRKGGFETILARIREICKKENFTKAVVGMEPTGHYWKAFANWLEKQDGITVVLVNPYATKQAKELDDNSQTKSDKKDALTIAKLVKDGRYFELYLPHDIYGELRGLSTTRIGLNKRKNALKNTITAILDEFFSEYEEVFKHPLTGKASRHILKTCPFPKFIMELGEEGVTTEIKKAVKKTVGRKKAGQLVEAAKGSVGVDYGEEAARLKLRLMLEEVELLERQTEELEEQMEAALEKTDYAEYLLSIKGIGVVTLAACLGELGDPTRFDSPRQMSRMAGYNLVEDSSGKNKSGTKISKRGRKNLRSVLYQMSLTMVATNDEMKQLYHYLKTREKSPLRKMQALIVVSKKILTLIHTLAKKKESYDPEKGFGTVRREQFKAAA

SEQ ID NO: 394683 - protein, 409 aa, unidentified
MERVIERGAGLDVHKKTVAVCVRVPAPDGSRGQHVRTFGTTTADLLTLRDWLEAHGVTHVAMESTGIYWKPIFYVLEEAFTCLLLNAAHVAQLPGRKTDVRDCVWIAQLLEHGLVRGSFVPPAPIRELRDLTRYRKVLIQERTREANRLHKVLEDAGVKLASVATNILGASGRAMLDALVQGTTDPELLAELARGKLRAKLPALRQALAGRFRRHHAFLVSQILGHLDYLDEAIEGVSHQITEVIAPFDTEVQRLDTILGVGPRTAEVVIAELGVDMRVFPTAAHVASWSGLCPGNNESAGKHKSGRTRRGNRWLRTALVEAAHAAIRRPESAYAARYRRIMRHRGHNKAIIAVAHAILVTAYHVLSRQTTYQELGAHYYDARHAERAKRRAIQALERQGFRVTLEPAA

SEQ ID NO: 394684 - protein, 328 aa, unidentified
MNMHPQGGVTNRDQRPNAGIDVCKQHLDVCLGAQDQRLANDATGWDELIAKFKDASVDLVVIEATGGYERGLVCALQGAGITVARVNPRQARDFAKSMGVLAKTDQVDARTLRDFGDVLARHKDRAKYITPMIDAQRQELAALMTRRRQLVDMRVVETNHLEQAGKRAVRSIKSMLKTIDKQLASIDEDVDDLIEKHFKEQRTLLDSVKGVGPVTILTLTAVLPELGRLGRRQIAKLVGVAPLADDSGPRKGKRRIWGGRSDVRAVVYMATLSAIRFNPVIKVFHSRLIAAGKPKKVAIVACMRKLLTILNAMLRDQAMWDAAKHLQT

SEQ ID NO: 394685 - protein, 379 aa, unidentified
MPTPTTHTDPPRPVPTLHVALDLGNTSWCLAGAPAVATPARVRMFPARSLARLHAELASARQHCGLPADAPVVLCYEAGRDGFWLQRACTAVGIVALVVDSSSIEVSRRARRAKTDRLDATALLRLLFRHTAGERGHWRVLHVPTVEEEDRRQVHRELARLTQERTRAVNRLKGLLALHGIRLTSLRAVPDQLPHLTQWDGTPLPPGVCERIQLIWTRLTLIQAQRTALVRARRILLETATDPTIQMVRRLLQLRGVGEVSAWLLTMELFSWRRFRNRREVAGVLGLTATPQASGDRRRELGIGKGGSALLRGLAMELAWGWLRYQPASALSQWYRTRFAAGGSRQRRIGIVALARRLMIALWRYVETGQVPAGATMKA

SEQ ID NO: 394686 - protein, 356 aa, unidentified
MAGDIIVGCDPHKLTFTLAAVDGLGQEIDVITGNNDAAGIGGVLEWLGGLGEVVRVGIEGSAGHGHHLAVGLVEAGFDVCEVPARRTAQRRRERRRPKTDRDDALAIARATAAEPTLGPVRAGHQDPIVDELDAVTDWRDDLVDQRKRLLNQAEGVLGKLPVDLLDSVGRAGKTINRARRALALTTEDPIARTRLAHLSDLVARHDELTATIKRVEKDLRQLVQATGTTLREEVGIGWVGAARLLVEIGDPTRFRTEAAFARWCGAGAVAVSSGEGDGPPTRHRLDLGGNRRVNSVLHIASVVQGRHHCDARAFLARKRLEGKTSREARRSHKRHLANRVIRRLWADTQHQHPLAA

SEQ ID NO: 394687 - protein, 377 aa, unidentified
MKRIKFVGLDVHAETIAVAVAEQGGEVRSLGVIPNREESIRKLVKKLGPVEQLRFCYEAGPTGYVVYWQLTALGAKCEVVAPTLVPVKSGERVKTDRRDAVKLARNYRAGELTAVWVPDAAHEALRDLVRAREAAKKDQLRAKHRLGKFLLRHGRRPPTGVKPWTLNYLSWVKHEVRCEQPAQEATLLDYLHEVEHAEARIDRLDLAIEEAVKSTPPKMRAVIEALQALRGIAQVAAVTIVAELGEISRFPGARQLMGYGGIVASEHSSGESTRRGGITKTGNAHLRRVVVEAAWASRHRPNVGAALRKRQELVSEEVREIAWKAQHRLHTRYRKLTARGKDKGKVVTAIGRELLGFIWAIGVKVEAAQKETERRAA

SEQ ID NO: 394688 - protein, 388 aa, unidentified
MAARTANNLPPAGAHDDAVRCVLAIELSKKSWIVAVNTPLSDKISRHTLKPCDGKGLLDLCEQIRTRVARATMKRVEIVSCYEAGYDGFWLHRLLQAHGIRNCVIDPASLQVDRRARRSKTDRVDVERMLRSLMAYLRGEPKVWSVVRVPSVAEEDGRRLHRERGRLISERVQHVNRIKGLLALHGIYDYQPLRPDRTQQLERLRTADGTLPPRLKAEILRELQRLELVVGMIKTIETERNAIASAKIETEHGSAKKIQDLAKIKCIGPEFATTLVGEVFYRSFDNRRQLASYVGLTPAHFQSGSMCHDQGISKGGNAKARTVMVELAWLWLRHQPASSLSVWFHERVGKLKGRIRRITVVAVARRLLIALWRYLETGLLPEGATLKV

SEQ ID NO: 394689 - protein, 341 aa, unidentified
MKNKSFIGIDISKNVIDASIFTEGASIKDFPHAVFNNSRKGFGGMATWLKKNHVVLSNCLFGMEFTGSYSMELEKFLTARKYQFCMLSTHTVKHYPMGPKDKNDKIDSAKIADFLYRYNGTECVKPYKMPDKTMQRLKTLMNERKFLVEQRTCFMNRRQLCTTKEDTQLYDGYIKKLSRDIENIELEEQKLLATDESLLTTYRNLLTIPGIGSVNAINVIVITRNFTAFETARQYASYVGVAPHFRTSGTSVRWRPRPSARCDGQAKADLSMAALITVQYDAELQSFYNRKLGGKQDSDTKRKALNAVKFKLILRMFAIGKQNRKWETLDSMSNNEILAIS

SEQ ID NO: 394690 - protein, 417 aa, unidentified
MLFVGDDWAEDHHDVEIVDGSGKRLGQARLPDGIAGMTRLHEMLAEHLDDTDLDPETGMLAPERVVVGIETDRGPWVAALIAAGYQVFAINPMSVARYRERHTTSGAKSDPGDAHVLAEIVRLDRDHHRPVAGDSGEVEGLKLVARTHQSLIWDRTRHRQRLRQALREYYPGLLDALAAAGLDLGDPEARELLERAPDPERAGQLSRSKIAAVLKRHRRRNVDARAEAIQAALRAAALRQPPAIESAYATIAATQARLLEALAGQIPQLEEVLGQGFGRHPDAEIYTSLPGLGVVLGARVLAEFGDDPHRYRDARARKNYAGTSPITRASGRKTVVLARYARNRRLGDAMHQWAFCALTSSPGARAYYDTLRGRGIGHHAALRQLGNRLVGILHGCLKTRTHYDESTAWAHHQTVAA

SEQ ID NO: 394691 - protein, 338 aa, unidentified
MATYAGIDLHSSNNYIGVINSKDKRLYGRRHENNIEHVVQALAPFKKTLKGVAVESTFNWYWLVDGLQEAGFKVHLANPTAIQVYTGLKYTDDKWDSFWLAHILRLKLLPQGYIYPKQERPIRDLLRRRLMFVRQRTTQILSLQSMIARHRGLNFSGSTIKGFMDPFVERLFDDPYLTLLAKSQMATIRHLSHIIKEIESKVRSEISLRKEYQLLLTTPGIGQILGLTIMLELGDVGRFKKAGNYSSYCRCVESKKMSNGKKKGQNNKKNGNRYLAWAYIEAAYHATRSNKQAQRFFQRKMSKSNRALATKALANKLTKATYYIMRDQVPFDETRLFK

SEQ ID NO: 394692 - protein, 382 aa, unidentified
MIVSVGIDVAKDKHDCFIQSSEGEVLADVFTISNNMDGFNILLEKIRICTSPQDKIKVGLEATGHYSYNLLGFLLDNGLATYVLNPLRTNLYRKSLSLRKTKTDRVDARTIAAMLLSDGGLKPYTDTAYHNEELKSLTRYRFDKVKERAKLKSSVSRLVCILFPELEKLVPMLHMVSVYALLEEFPGAKQIAGAHLTRLKSLLANASKGRYKRDMAVSIRDAARNSIGSKMPAKSLELQHTIRLIRELDAEIDEIEAEIETMMEEIHSPITTIPGIGCRMGAMILAEAGDLSRFDSPDKLLAYAGMSPSTYQSGQLKNCYPHMEKRGSRYLRYALFNATKYVCLWDPTFSTYLAKKRAEGISNSRGRQTADIFGEAPQSVRS

SEQ ID NO: 394693 - protein, 345 aa, unidentified
MEFFAGIDLGKRKSHIRVIDSDRRVLEDLKIDNDPKTFARIFRKYGKNVTVGCEASSNAFWVWDTLSPIVRKCFVGHTSKIRWIAEARIKTDKIDAGILAELVRADLFPAICIPPKRIRELRELVRGLVRMRRQTTRFRNQVHGLLGRHGVAYQRAETEGKKLGELVRSATLASPARVAAETFLAVEETVKEQEKLLQAEIRKELRDEPEILEQVKLLESIPGVGFFSAALLVLELWDASRFEDGKHLASYIGFVPGTHQTGETMWHGRMTRTGNKLIRWLIVQDAWVASHTHWFFGRLFERHKKRKGGARAIVPVARALLNTILRVWSERKSYDVLFKEESLVG

SEQ ID NO: 394694 - protein, 350 aa, unidentified
MVEYHVGVDLHLNVAQIAVVDGSGELVHEARVEIPDLPAGEAMLDGLAPFLKEGRLAVEALGCNRWFVDRCQARGWDVLVANAAKLQLKREGRKTDRRDAREIARRLYLGDLHRNARTYYPTQTEFAHRKLLRTRHNQVEKRTQTELEIYAILRAFKLVPPKKLLRSRASIAWLRSVELPHPDLRVTLDVLIEDLVSVKKRIYVLDKAVTAAAKSVAEARLLEETLPSVASQTSLTLICELGDVKRFNDSRAIASFAGLVPRVTASADTSHHGKMTKHGNPELRWILGQLAVRLLSRDPVVKAWGARMRRRVHKNKVRVALARRLLIGIWVMLSRGEVFSMERCLGARAA

SEQ ID NO: 394695 - protein, 332 aa, unidentified
MSKFKNYVGIDISKDYFDVAFIQDLKSKSFHNQFENTAMGVKKLMTWLKFLECGNTDTLLCMEHTGMYSKIIVEKLISEEFQLWVEMSLKIMRSGGVQRGKNDKIDAERIAVYALKNQDSFSLYQTNRESVTKLRALFSLREKLIGYRTALVNVSNEFRKFDSNISKITSCYSKNTLSGIKKDLLKIEKEIDSIIEKDEDLKILFKRITSVPGVGKVTAILLIYLTNEFKNFDNPRQLACYSGVVPFEYCSGKSIKSRPKVHYIANKKLKKALHMCAISASKNDPEIHQYYIRKTEEGKNKMLVINNIRNKIVHRICACVREIKLFEARNVA

SEQ ID NO: 394696 - protein, 341 aa, unidentified
MTFYCGIDLHSKKSHVCLIDKNGKKVKEENLHNDLEVILQFLEPFGKDLHIAIESTINWYWIVDGLQEAGYDVKLAHTLGLHMITGAKVKTDRRDAFKLAKLLRMGEIPEAYIYPKEKRPLRDLLRRRAGLVHERASCYSSRGVQFIRYNLNTMSLTDLKQFLPVDINIMPIPQELKDYCVMILQRVDLLSNQIQEIDNYLKCITLEDPKFKILLTLPGVMYILGLTLYYEIGDIGRFKSVRQFASYCRLIPGISQSSDKVKKGKGSNQGNHYLKWAFTQAANVAVRYYPTLRKFRDKHANRRKSNAAIMVANCILAHKIAIATFHMLKEGVPFDEVKLFG

SEQ ID NO: 394697 - protein, 446 aa, unidentified
MKRKQDASAPEEIPDAEHELVIERVAAIDVAKAFGKVCVRTPRERRRVSKVWDVEATTGAVSELAAQLAEVGVEKVTIESTSDYWRIWYYLLEAAGLDVQLVNARDVKNVPGRPKTDKLDAVWLAKLTEKGLLRPSFVPPAPIRQLRDYTRLRVDLTRERSRYWQRLEKLLEDALIKLSSVASTLNTLSVRDMIEALIAGERDPRRLADLARGRMTVKRPALIKALDGRFDDHHAELARMLLDQIDTLNAQIATLTTRIDELLVAAGPGEDDDGPTGDAAAHSGPCIVERLTEIPGIGSTGAQIILAEIGLDMTQFPTAAHLVSWAKLCPRTIQSGPLTRGGKTGKGNPYLKGALGEAAAAAARTDTFLGERYRRLVKRRGKLKALVAVARSILVIVWQLLSDPSARFRDLGSEYHTSRINIERRMRNHIAQLAAMGYHVTLEPAA

SEQ ID NO: 394698 - protein, 416 aa, unidentified
MSGKREIACGVDVHNKFIVATILSSDGLKLQDRFNTNLEELLKFKDWLKKNGCRKVALESTGNYWIPIYSILEGSVNFILANAYQIKHIPGRKTDTLDSEWIAEICLKNLISPSRIFTRDYRELRSFTRSRESLIKVRTKIKNRVTHELEASCIKLSSKLSDIFGKSGRYIVDGLLNGMDPEVILERIPLGRIRATKEEILGAIQSNLSPSQIFLIQSHLNIIDTLTKQIAEIDAKISGLISLRKEDLRIALSMPGMGIISASTILAEIGDFRDFSSPDKLAAYCGLVPSVYQSAGKLINGHITKHGSPHIRAMIIEVAHAIIRSKQNSRLKKFFLRVKARRGTKIGVVALGRKVLCILFHLIISQELYQDELLSKPRNSKHISTHSTTSMSLGEMIETIIKAGYEVRRNECLEHG

SEQ ID NO: 394699 - protein, 385 aa, unidentified
MQMILEQSRFAPFGLPFAGLEELVEGVRSVTALYDYHIGVDYHKSYSHLVVQDSAGKTVRSGRVKNDRQSLGSFLERYRENSHAVVEATRNWMVMYDWLDDICDDVVLAHPLKVKAIADAKIKTDKIDATVLAHLLRADLVPEAYAPSEKSRELRVALRERMFYVRLRTMVKNRIVTVFDRYPEQTAQLKKLGDLFGKAGRQQLAALHVSEIDRIQIDRGLDFIGDIAGRIKQSETTIRAMTKTNGNVKLLKTIPGIGEFFARLIDAEIDDIGRFRNAKKLAAYAGLVPSTYSSGGKTYHGKIIKQGNKWLRWAFVEAVQPAVATDPQLRAQYEHLKFRGTNKARVAIARKLLTIAFQILRDRRPYERRDASGEEGASSTISRLS

SEQ ID NO: 394700 - protein, 420 aa, unidentified
MLKIVHPVCCGMDVHKTFVVASIAITDKQNVTTYIKRRFTTFNSDLRNLEKWLLNHNCTEVCMESTGKYWIPIFNVLEKSCHVVIANPKYVRAIRGKKTDDKDATWIADLFKFGLVPQSFIPPREIRMLRELFRYRFKLTGHKVSEKNRLQNSLTVSNIALASVVSDSFGKSASAIVDYILTCDTFDPEHCKSLLQKKLKEKADEVVQSIIGYELRKDQSVKMKLCRKHYDYLEQCISELDETISNMAQPYKQLIDIAVTLPGITGKSATYIIAEIGTEMSVFHSSKHLCSWAGLTPQNNESAGKRKSMHVSRAGVYLKPLLVQCANAAIRDKKNPYFKIKYDRIKKRRGHKRAIIAIARMMLTCLYHMFLKKEAFNPKDSNYSEMPEALYQKHKAEYIKNAIKLLEKEGCVIIPPTVPA

SEQ ID NO: 394701 - protein, 418 aa, unidentified
MEIVYERVAAIDVGKKIIAVAVRTPGERPGKRRQQLRKYNTFHQTLTTMVAWLVAEGVTHVTMEATGIYWKPIFHALCAAERPLELLLVNARHVKNVPGRKSDALDAVWLAELTECGLLRGSFIPPPQIAAIRDLTRYRKKLIEQRTSELQRLAKVLEDSGIKIDSVASALTTLSARDMIEALIAGERDPAVLANLARGKMRSKIPELRLACAGRFADQHALMCVLHLEHIDHLADMIARLDTRIDEASLPFARQTDLLATIPGISERAAQIVISEIGVDMTRFPTAAHLASWAGLCPGNNESAGKHRSGRTRKGNTELCTVLTECAWAAGRTSTYIGAQFRRFHRRFGTKGGKKAATATAHTLIVIIWHVLAETAAYRDLGSDYFTRRVDNPEARKRRLIHELEALGHKVTIEPAAA

SEQ ID NO: 394702 - protein, 343 aa, unidentified
MTQYVGLDVSLKETKIHVLDEAGNRIWRGRCATEAAAIAAAVRRYAPTAVRIGLETGPLTTWLWTALTAEGLPMICLDARHAKKALDMKVNKTDANDAEGLAHLVRAGWYREVRVKGRSAMLAKALLGARSQLLSMSLALENQIRGILKTFGRIVPKGAGGLFEKNVRALIMDDADITAVIMPLLQARQMARGKCAALDRRIIRSVQGDATCRILMTMPGIGPITAVAYVAALEKPDTFKRSRAVGAWLGLTPRRFQSGEVDYDGHISRRGDGQLRALLYEAAAVLLTRVRRESALRSWGLLLRKRLGFKRAATALARRMAVVLHAMWKSATPFNPALGATTP

SEQ ID NO: 394703 - protein, 347 aa, unidentified
MGKIAYIALDLHARSCTLGAMDAAGRFLGNHQFQTSEKQLVDALEMVTAKHKHLVIEEGPLTRWAAQVASAHVERVVTCDSRENALIYKSSSKRDTLDTVKLCRLLRLGELKHVYQPESDHRAIFKAAARHYIDLRHQLIAIKQKIKAVFRYWGVINCFGTRLYGTKGRQGYLQQIPHGVVQRQLLRLYELMDSHVQAKESAKAELKELSRRYPEIREFKKISGIGALNASLFDAFIQTPHRFVTKRQLHRYCRLGVTERSSDGKPLGYQRLDRSGIGELKAISHRSFVASMRGDNEVKRFYQQSLARTHNKVHARLNTQRKVLSVMYGLWKKGGTYRADLFLDPSA

SEQ ID NO: 394704 - protein, 337 aa, unidentified
MRFCGIDLHSNNSVVVVTDETDKVLVSRRCPNDLSKILALLAPHSDDLSAVVVESTYNWYWLVDGLMAAGYNVKLANTVAMKRYDGLKYSDDETDAAHLAHLLRLGILPTGYIHPPAERALRDLARKRIQLVRSRTQHVLAVENILARSTGASLSATGIKRLAADDVGALGLAPDVALAVQANLAVIATLKLQVERIEARLLESVKLRPDYARLKSIPGIGEVLAIVIMLETGNVARFAQVGNFASYARCVDSARYSNGKKKGEGNTKNGNAYLVWAFVEAANFARRYSDDAKRFFERKKARTNSIVATKALAHKLARASYHMLKAGQDFDVKRCFA

SEQ ID NO: 394705 - protein, 338 aa, unidentified
MEAYAGIDLHSSNSYIGIIDEQDERHFGKRLPNSLTQILVALEPFKKDLEAVVVESTYNWYWLIDGLHEEGYKVHLANPSAIKQYDGLKHTDDKWDSFWLAHMKHLNILPEGYIYPKEERPVRDLLRRRLLFVRQRTAQILSLQSAIARNLSLKMSGRAIKKLTEEDAEGLFDSPYLVLTAKSHIGVIQFLTKTIKAIEDAVKSQAKLRKEFQLLKTISGIGDILSLTIMLEVGDINRFPKVGNYSSYCRCVKSEKLSNGKKKGENNRKNGNRYLSWAHVEAANFAIRFSPEAQKFYQRKMAKRNKIVAIKALSNKLARASYYVMRDQVAYDAGKLFG

SEQ ID NO: 394706 - protein, 344 aa, unidentified
MDHFAGLDVSVKETSICIVDDTGRIVREVKAGSEPEAFLKVLRNPAYRFKRIGLEAGPLSQWLFSALAEAGLPVVCVETRHMRAVLKAQINKTDRNDARGIAQMMRVGLYRPVHVKTLRSQKLRMLLTHRKLLQSKAIAIDNDLRGALRNFGLKVGMVGTVRFEARIRKLVEDLPDLAALIEPLLIVRRTLREQFCILHRRLLTIVRDDEVCRRLMTTPGVGPVVSLTYRATVDVPARFRKSKSVGAVFGLTSSKYQSGEVDWSGKISRCGDEMMRTMLYEAAQSMMHSKKWSWLKAWAMQIARRRGMKKAVVALARRLAVIMHRMWIDGTEFRWTREQAAAAA

SEQ ID NO: 394707 - protein, 337 aa, unidentified
MKYCGIDLHSNNSVIVVIDDEDRVVARKRLPNELARIVEFVASWRDELAGVVVESTYNWYWLVDGLQAAGFEAPLANTAAIKQYDGLKHSGDEADARHLAHLLRLGILPTGTILPRDERAVRDLARKRMQLVRGRTTHILAIENIMARQFGGRMTSNQIKRLSADDIDRMPIAADVGLAMNANLALIGALDAQIEVVEQRLRERVKPRPEYAFLTSVPGIGQALSTTILLETGPIDRFASVGNYASYARCVDSVHTSNRKKKGEGNVKNGNKYLAWAFVEAANFARRCCPEAKRFHERKKAKTNNIVATKALAHKLARACYHILREGRPFDVTRCFA

SEQ ID NO: 394708 - protein, 423 aa, unidentified
MRVVFPVCCGVDVHKSFLVATMITTHSHQAEPVYHKKRFSTFHRSLVEFKEWLLESQCFDVCMESTGKYWIPVFNVLEGIVHVTLANPKWVSAVKGNKDDVKDSKWIGDLFRLGLVPGSFIPCKEIRVLRELTRYRTKLVACKASEKNRYQNALTVCNLSLDSVASSMFGKSATAIVNHVVGGQSLDSEQCMSLLHGAMRRKVDQVLEAVEGFQMEAEQKIRLRIIQSHMAYLDGLIALLDEEIDLLTGSYTSHIKLLCSIPGVKHLTAVVVLSEIGTDMSMFGSSKRLCSWAGLVPGNNQSAGKKKSVRISRAGVYLKPALVQAAHAAVKDRHCDYYGQKYRQIAKRRGKKRAIIAIARMILAAVYAMLQTGETFRPHDMIAEEEAIILKNQKHHQALKEATKLLQAEGIEIPEAFVISLTG

SEQ ID NO: 394709 - protein, 409 aa, unidentified
MNCSTLCIGADVHLDEIVLCAVDQAHGHEVTDRFRVTNNLPGAQAAATTIVRLATDLGYSRIEIAWEATGMLWIPFHRYLSRCPQLQSFELELVCLNPQLVAKFKEGLVLRRPKNDPLDAAAVAARLRFGELPLSYVPGDFWQGLRRLTRHRFHLSRSLSREKMRFQAYAFLKCSDWKRVKPFADVFGATSVTLLTEYTVAELTQMTHDQLVDLIRRHGRKHFADPAATARKVRQALRSSYPVDPQLDEMLTATLATAWEHIRFIQRLMKRLDQHIARAIEPVPNPLITVKGLGAVITAGLLAEIVDISRFAEHKHLAQYAGITWEKRSTGNFVSQNTRLTKVGSKYLRYYFILGANSLRRFNLDLTARPSTGANTMKWPSTNTSVPSSSPRGNWCVWCMPCSQRTLPM

SEQ ID NO: 394710 - protein, 340 aa, unidentified
MSEITTIGLDLAKHVFQVHGVDAEGTTVVRKRLRRGQVLAFFSRIPRCVVGLEACATAHYWARELGAVGHEVRLMPAQYVKAYIKRNKHDAADAEAICEAVGRPTMRFVPVKTAEQQATQLLHRGREQLVRQRTMLVNALRAHLAEFGLVAAQGLRNVGELIAIVRDDGDKRLPAVARQVLQVLANQIEQIEAAIAALERQLLAWHKANAVSQRLASIPGIGPIIATAIATTVADPNVFRSGREFAAWLGLVPRQNSTGGKTRLGGITKRGNRYLRRLLINGASANLLRSKATKADPWVIGLRRRRPPLVVAVALANKTARIAWAVMLRQKEYQPRAVAA

SEQ ID NO: 394711 - protein, 342 aa, unidentified
MSEKRYIGVDLHRKVFTCCIRLENGRPFLSEWRLEQVPQFVKKLRATDEVAVEVTSNTRLFYEAVAPHVARVVVVDPHQFRVISQSVKKTDPNDARNLALYLAKGLLPEVRMKEKQQAQVASLTQTRDRLVKLRTALKNKVNNLLSARGIALEKEELSGEKGLTRVLAMEVEELTRFELQVLVEQIRSLNHSIAELEKVIDREGKKLKGHGNLTSIKGIGSLGASILLSVIGDLRDFSDEGRLASYFGIVPRVHNSHETEHSGHITKRGSKLGRTALVQCALIAKRYSPYLANYYERIRSRRGTGRAIIALARKLLGIIYRTLKNNWVFEDFPNFALREATA

SEQ ID NO: 394712 - protein, 378 aa, unidentified
MRMTTDQARVTAGVDAHADTHEAAALDERGRLLGTRTFRTGSEGYRELLAWLEQFGELVVVGVESTGSYAAGLVRFLHAHGVDVVEVNRPHAHTRRRRGKSDPIDAEMAARQALSGDASAIPKTTTGIVESIRQLRVARDGAVKARSAALCQLSDVIVTAPDGLRERLSQRKRTRAKASLCLGLRPRTTHLGEPAEAAKLALRSLARRIHDLDEEIAVLDKHLGTLVATAAPRTTKLLGISTGHAGQLLVTAGQNIERLRSDGAFAALCGASPVPVSSGRRSRHRLNPGGDRDANRTLHMIAVVRLRYCQRTRAYAQRRSTEGKTKREIIRCLKRYIARETYRTLCADLHDLQQPPRPAAAVTIMCGAGPIGRTRRRT

SEQ ID NO: 394713 - protein, 350 aa, unidentified
MQITTVGIDLAKSVFQVHGIDARGKTVLRKQLRRGQVAIFFGNLPPCLIGMEACAGSHFLGRALREQGHDVRLMPAQYVKPFVKTNKNDFIDAEAIAEAVSRPTMRFVPIKTDEQLDMQSLHRVRERWIMRRTAIVNQIRGLLLERGITVRTGRCHLDAALPNILEDGSTPLSGTLRFLLAELKQELEQLAGHIEQAEILIQRAAQQSEACRRLDAIPGIGPLTATALIAAIGNGGAFRKGREFAAWLGLVPRQHSTGGKQKLLGISKRGNGYLRKLFVQGARAVLQYRDKQCSGLRHWLAELSSRSHYNVVGVALANKLARMAWAVLASGGAYRPPVMTDMTGLRMTPV

SEQ ID NO: 394714 - protein, 366 aa, unidentified
MSSLTSPAGAIHLGMDTSKNTIVVAVLMPGEEVPVIDRMWNEEGSVRHLVGRFADRAALRACYEAGPCGFELHRLLASMGVACDVVAPSLIPRRPGDRVKTDKRDAGRLARLHRAGELTAIRVPTEAEEAVRDLVRARAALLADRKRAQQRITAMLLRHGRVWRSGSYWTQAHEQWIAAQRFSEPALGAALAHYRAALDTRQAELDAVEAELAPWARREPLAAAVARLGCYRGIAELTGLVLAAEVVDWRRFPSARAFMCFTGLVPAEYSSGERTRRGSITKAGSEPARTALIEAAWSYRFRPAIGVTLRRRQHGAAPQTLARSWRAQRRLHARYKTMTARGKPAAVAVTAMARELAGFVWAEMTS

SEQ ID NO: 394715 - protein, 343 aa, unidentified
MKDTIYDHYIAIDWSIENMAIARITKKSNKIVLTDVPLDILEIKVYLRKLKGSKILMVEETTTSQWLYTELRDYVDRMVICDPHRNKLLDDGPKTDKIDATKLVHLLKAGLIKEVYHSTDKFLCLRRFVSGYEDLVKAGVRLQNQRYSLLRACGKRGYDWAGTKLDSEGDQYALDCLDRQIEIYKQEKEGYEKRFKRLTKEYPEISHQKSLPGIGPIHAVKIVARVVTPYRFADKGHYLSYIGLIKLEKVSGGRSYGRKNSRYCRQLKSIYKTSTWAAISGNNPINDYYEYLIKVKGYPEHNARHSACRRLAILSLGVFKSGKKYQPYRRDHVKGNQEVKTGL

SEQ ID NO: 394716 - protein, 409 aa, unidentified
MERLLERCAGLDVHKKTVAACVRVPGPGGKRGQHVHTFGTTAADLLALGDWLAAHEVTHVAMESTGVYWKPVYAVLEERFTCVVVNAAHVKQVPGRKTDVADCAWIAQLMEHGLVRGSFVPPRPIRDLRDLTRYRTTLTHERVRHANRLHKVLEDAGIKLATVASDILGVSGRAMLSALVAGTTDPAILAELARGRLRTKLPALRAALAGRFRGHHAFLVSQMLGHLDYLDEAIATVTTQIEEVLRPFAAVVTRLDTIPGISRRVAEVVVAEIGTDMTAFPSARHLASWAALCPGHHESAGRQKSGRTRKGNRWLRAALVQAALGAIGTRDCALGARYRRLVRHTGHNKAVVAVAHALLVTIYHVVARETVYTEQGAAYFDARHAERVTQRAVRALERQGFRVVLERAA

SEQ ID NO: 394717 - protein, 471 aa, unidentified
MATRQEVKTEAKPNRKQRREQQRRIWTDNPGLDVVHPDAAGIDIGNSEHYVAIAPGKSEAPVRKFSCFTHDLREVAQYLKAHGIRSVAMQSTGVYWIPLYDVLEEEGFEVYLVNARDTRNLPGRKSDVQESQWLLKLHTYGLLRNSFRPTSEIRVLRTYWRQRGEHIHTAGECVQRMQKSLTQMNLQLANVISDIMGVTGQKILRAILAGERNANKLAEMRHERIQASPEEIAASLTGNWRPELLFALQQEIDRYDFCQRQIAECDQEIHQHLGTLPARAKETGSAVEPSPQKRKRAGGNSPSFGLDQELVRITGVDFTRIDGINVMTAQTILSEVGLDMSKWETEAHFASWLGLCPNNSVTGGKVLRRGTRKIVNRAATAFRIAASTLRRSNSYLGAQFRRFRTRLGAPKAITAMAHKLAVLFYRMLHYGQEYVDRGQQFYQDKYRQQQIAFLNRQAAQLGMVVTPAVSV

SEQ ID NO: 394718 - protein, 337 aa, unidentified
MEYFAGLDVSMEETHICILDREGVLIREGKASSTPKSITAFLAEGPVCVKVVFETGRMAPMLFHGLTELGVPVVCIESRQAYQALKSLAGHKTDRNDARGLAHLARTGFYKPTHVKSLSAHAIRSLIAARKKLVGQRVTIDNQIRGLVVVFGVRLPRALSPTFKDAALKVSDGVPGLHAALRGLFAAREAILAAVAAIDSDIKTMTRKSKTCTRLMTVPGVGPITALAFAAAIDNPARFKRSRDVGPYLGLVPKRHQSGEVDYTGSISKRGDVRVRTLLYEAANVMLTRYAAPLKLKSWALAIGARSTMRKARVALAGRLAIILHAMMRDQTDFQAV

SEQ ID NO: 394719 - protein, 452 aa, unidentified
MAKHREKKKAHGLVAAPVMEPNAAGVDIGASEIYIAVPPDRDMQPVRRFAAFTEDLKAAADWLEHCRIETVAMESTGEYWIPLFQILEARGMKVCLVNARHVKNVPGRKTDVSDCQWLQYLHAVGLLRASFRPSGQVCAVRSLMRYRESLVGMAAVHLQHMQKALDQMNLQLHHVISDLSGTTGMAILDAILGGERNPLKLAQLRDPRIKASPETIAKSLVGDYRREHLFTLRQSVTAYRSYQQLLACCDVEIEQMLGEFSDGAGPDTPVLADPKDRHRPRRNEMKFDLRGHLYRIFGVDLTEVPGLNALTAHTLLTEVGPDLSAFPNVGAFASWMGLCPDNRVSGGKVLSSHTRKVNNRAARALRMAAQSLFRSQSWLGQYYRRMRAKLGAPQAITAAAHKLARIVFHMLTNRHAYDETVFAQQEIQNQHRLQQKLMQQAKKYAFQLIPIT

SEQ ID NO: 394720 - protein, 319 aa, unidentified
MKMAKSTTSTGGIDTSKATLDLAVHGGSAALCVTNDEAGWKSTAAHFKRAGVTLVGIEATGGYERGVTRYLQKAGFTVIVMQPVQVKSFAKLHLKRAKTDKIDAVLIAACAHVLGDGHKLPPDARFDALADHLTFIEQLEEDIVRIKTRLEHIADKRLRRIAESDIKRLSKRCAEELQRLQVALRQYDDLAARFDLVQSVPSIGARTALCIVIRMPELGQVSREQIAALAGLAPFDQKSGKHDGQAHIGGGRARVRRALYIAALPGAFRWNQELKALYARLTANGKTHKCALIACARKLLLFANTVVARKTPWEVKAAT

SEQ ID NO: 394721 - protein, 387 aa, unidentified
MTEFFDAHRPATAFDHDSTLVVAMELSGKSWQLGAVIPGVSRRPKTGVKARDMNEVMRVVDRWKAEAVRAGKTIARVVVAYEAGRDGFWIARELSSRGIEAHVMQPASIPVERKGRRAKTDRIDLDMLLRTLLAWLRGEPRVCTMVRVPSVEEEDARRPGRERDKLVRERVGLENQIQSLLCLHGIGDFRPRLKKAAEKLEKLRARSGAALPAQTMAQLRRLMKRHSVASEQIAEIDAARVAEVDAPDPDRGMAMIRLLVAICGMGLETATRLVREVFSRPFRDRRGIAAFVGLTGTPFQSGGMEREQGISKSGNTRVRCLLLQLTWRWLRFQPDSALSRWFFGRVGEGKGRIRKVMAVALARKLLVALWRYLETGVIPEGVRLADA

SEQ ID NO: 394722 - protein, 358 aa, unidentified
MKYVGIDVHKKMCQAAILGEDGELLEETGFMNTPSDIERFARKLKDLGGEVRAVLESTGNLWIQIHDRLEAHGVPVALSSPANSRLISDSRMKTDKTDARALARLHRAGVLSTCYVPGAPERSRRELLRHRLRLVKNRTAVRNRVHSLLDKHGLRVPYKTRFSKKAVRWMKELRLGLIDDAILCSDLALLEVLDEQVASVEAKLAALAVDDPGVRLLMTMTGVDYFSAMMVLAEVVTVDRFRGDKKFCCWLGVTPRVWQSGEKTWIGGIGGLGNKRMRWLLIQCAHTARRYDPRMRRLYERIERRKGGKCAVAAVAHEMARVMYYMLKRGEPYRGVKVDLWERKLKRMERNALSGLRS

SEQ ID NO: 394723 - protein, 468 aa, unidentified
MISMHLHYKRRLIEGKSIVGIDPAKLKHQAAVVDADGNHVGKSFSFDVTHHGYNTTLWQKLRPMLPICNPDNTDFAIETSCNLWITLAFYLRHEGYRVLLVSPLTTYHSRPIMNHDFSRTDPKDAFLVADNARQGFFDLYMSFPTQSNAMHRLSITYSKLRKDLAQNRARLRAAIEQIFPEFLSFVSLNTQTGMYLLKKYLFPDEFLSLNLDEETKAIVGMSRNQYDRQTLLDLQDAARKTIGVKKSGEERIAERLSVNSWIALIEVLTSQMDAVFTALHEYASQLPEYDIIHSIKGISNITASQFLAEVRDIHRFSHYKQIEKSAGYNLRLSQSGQYVGTKHISHIGNKRLAWLLYTMTEETAKWIPEVRAKYLRRQIKRRKHRKNVVASTPQLLKLIMALVKENRHYEVRTEKVAEVKKLEDEYNQIKRQYKKENHSTFTLPSRKEPVLRTEPAEVSEESMIHLSR

SEQ ID NO: 394724 - protein, 356 aa, unidentified
MSSMLQPDPVGAPDAGDIVIGVDTHKDVHVVVVLTVTGVLLGSNSFPTTAAGYRQLLTWARSYGDLRRAGVECTGSYGAALTRYMLSQGITVIEVAYPDKATRRRRGKTDVIDAESAARAVISGSASAMAKTTDGPAEMIRMFKLAKNSALKARTQAINQLKAVLVGTDPALRESMAGLGPKTLLRRCAALAIDAAPTDTAGAAAYTLRLLARRILTLTEEIDELQKCLAAVITHHHPQLLERSGVGPDNAATLLITAGDNPQRLRSERSFAALCGASPVDASSGRTSRRRLNRGGDRQANAALYRIVLSRLHTDPETRAYRDRRLSEGKTKREIIRCLKRYVAREIYTLLQPTPA

SEQ ID NO: 394725 - protein, 379 aa, unidentified
MDCTSTAAPAGSILHCALELSKNTWLLGIQFSDRPQPSLYPIRGGNTEDLMAKLTAARDRCAKLSGRTPSIVLCYEAGYDAFWLARFLKARGFECLVIDSASMQVNRRARRSKTDRIDVGKLLRGLIAWHRGDRQVWSVVRIPSVDEEDLRRSHRERDYLVHERTAHINRIKGLLFAQGIRGINVKRQYKTLHVDKLVTGDGHPIPPRLASEIVREIARLALLQEQIATLERERDEAPTPCTATEKKRAQLMYLNGIGPAISAVMTREVYYRQFDNRRQVAGFLGLAPSPYDSGEVERSQGISRAGRGQVRGTMMQAAWLWIKHQPKSTLTRWFLERTTGQGGRIKRIMIVAVARKLAIALWRFLEHGLVPQGAIMRSK

SEQ ID NO: 394726 - protein, 415 aa, unidentified
MVERCAGLDVHRDNVVATARVPGTGRRGFDQQTRTFKSTLVGLAELAAWLAEAGVTLVGMEATGVYWKTVFQALEERFECWLLNAHHLRNVPGRKTDVKDSEWICQLVQHGLVRPSFVPPPEIRRLRDLTRLRKAQSNERGRTIQRLEKVLQDAGIKLSSVASTTYSKSARAMLEALLSGVTDPEQLAELSKGKMRVKIPQLKDALQSRFTIEHHGVMVAQLLAHIDTLDAALQNLSERIEFVLAPHAQIIELLCTIPGVQAQAAQVLIAECGLDMTVFPTSGHFASWAGACPGHHESAGRRRSGRTRPGPGWLTSQLTECARAAVRTKDTYLASHYAQLRGRRGEPKAIGAIRHDLLVAYYHIVRDQLPYRDLGPDWQRKRYSAEHRARRLQRQLEALGYAVTLDPIEQPEQAA

SEQ ID NO: 394727 - protein, 351 aa, unidentified
MSKRTNSIAVSTIGIDTGKNTLHMIGLDQKGVIVLREKVSRSRIAARLVNVRPCLVGIEAGMATHYMARELVALGHVVKQVPPAFSKPFRQGHKNDFRDAYAIAEAVQRPSTRCVPIKTDDQLDLQALHRVRSRLVGDRTAVINQLRGFLLEHGITVRQGHRFLRQQLPQIMATRADVLSPRMIRIIEDLIEDWAHLDERVERVTDEIEGLARTDVSCGRLMTVPGIGPIIASAMVAAIGDGGAFAKGRDFAAWLGLVPRQMSTGDRTILGRITKRGNRYLRMLFIQGARAIQLHPASWAKHSFGPWLSAAARRLHCNVLTVALANKLARIALTVLLQGRNYETRIKPVAA

SEQ ID NO: 394728 - protein, 403 aa, unidentified
MNAVGIDVSKGKSMVTILRPFGEIVSSPFEIKHTSSDIHSLIKLIHSIEGESRVVMEHTGCYYEALAHQLSAADLFVSAVNPKLVKDFNNDSLRKIKSDKADSVKIARYALDKWQSLEPYSITDELRAQLKVMNRQFHFYVKQKTAMKNNLIGLIDQTYPNANTYFNSPTRSDGSQKWVDFVSTYWHVDCIRKMSLNAFVEHYQNWCKRKKYAFNKSKAEEIYTKTKELVPVFPKNEITKHIIRQAVDQLNSTSVTVETIRTLMNETASKLPEYSIVMQFKGIGPSLGPQLMAEIGDVTRFTHKGALTAFAGVDPGVNESGSYAQKSVPTSKRGSSNLRKTLFQVMDVLIKTMPQDDPVYQFMDRKRTQGKPYYVYMTAGANKFLRIYYGRVKEYLSVLPDPS

SEQ ID NO: 394729 - protein, 424 aa, unidentified
MDTSANVLWAGVDWADEEHQVCVVDTAGKVVEAFAIAHQAEALAGLARRLRALGQVAGVAIETPRHLLVTQLLADGFEVYAVNPSVSHKWCEALSVAGATDDPSQAFALADGLRHHHERLRPLLPDDPATRQLALWCAGECDLIEEQTSLVNKLQALLKEFHPAALEWFEDWTCPSAWDFVVAFPTPQAILGASEKKLYGFLARHHIGASPRWQERIAARTDAPPWPRDPIAETAAPAHVASLVALLRTLQGQLRKFRARIEQLFRDHPDAAIFDSLPGAGRKLAPRLLSHFGTQRERFESARPLQQLSGAAPVTVQSGKHKKVCFRHACQKSFRNALHQFAFCSLRKSEWARASYHRARERGQSHAHALRTVGYQWLKIIYRMWVTRTPYNEAIYLASLIRHRSPLIAWMQSEKNGEKSSKRT

SEQ ID NO: 394730 - protein, 353 aa, unidentified
MRKMQEFIAKGKKIFVGLEDSKRTWKVCARSDKMPVDEASMPARYEVLKAYFQRNFPECDIKVMYEAGLQGFWLHDMLEEDGIDCIVTPPNKLTCAKDNRVKTDKRDARRLAQNLENGDYVSCKVPDRERREDRQILRTLNQVQKNIKSTKNRIRKLLDYHGLNDGLKIGAWYDKDYLELRNMNLSKSLKISLDVLLSFLELQLKSEKELMAELHEFCEKERYKQGVISKKSAPGIGWLTAIRLTLEWGDMSRFKTGKHIASFAGLTSSEYSSGDTIRRGRITAQSNDQVRSWLIESSWTAIRKDPILREKFQNVLKNTGSKKKAIVAVARKLAVRLWSLEITGQPYCTGVIE

SEQ ID NO: 394731 - protein, 424 aa, unidentified
MREEGLSMAEEIEWFVGIDWASQSHQVCLVDARGECLGERAVAHGGLGIEELCDWLIARTGATPEVIGVAIEMTQGPVVEALLERGFCVYGINPKQLDRFRDRFTVAGAKDDRRDAHVLGDSLRTDRHAFRRLSNDEPVIVKLREWSRMADDLQQERTRLASRMREQLWRYYPQMLELADDLAADWFLDLWNQAPTPAKAARLRQTTIERFVKAHRLRRWQAPEVLRILKQKPLSVAPGVVEAASDHIRTLTVRIRLVNQQLKAAHRKLDELCAQLVPSEEDEPGQQCEQRDVVILRSMPGLGRTILAVLLAEVWQPLRRRDYHALRSLSGVAPVPRRSGKTCVVVRRYACNKRLANALYHWARLATQHDALSRRRYAALRQRGHSHGRALRTVADRLLSVACTLLEQQTLFDPTYEVREAAGA

SEQ ID NO: 394732 - protein, 371 aa, unidentified
MRDNVRTKFVGMDVHQKSISIAIADDGPDGEVRLYGKIKNTVEAIDKVIRKLVSTGAELHFVYEAGPCGFALYRHLTGNGFCCIVAAPSMIPKKSGVRIKNDNRDAIALARLHRAGEITPIYVPDTEDEAMRDLTRGRNDARIAARKAKQRLHSFLLRNDLIYNGKKKWTKSHYNWLAQLKMKHPAQQVAFQEYIEAINECSERIIRLDEQILKAADEWRWAPTVKALQALRGVSLLTAVNMVAEIGDFNRFQNPKELMAYLGLVPSEHSSGDRIRRGGITKTGNSHARRICVESAWSYRYQARVTQLLLKRHEGLPKDILQIAWKAQLRLCTRYRRLRARGKASQVVVVAIARELVAFMWDIARRIPAVA

SEQ ID NO: 394733 - protein, 436 aa, unidentified
MRGCRCSMIMGFTKPIEHFNLQRKKVITMNTLYVGIDVSSKSNVVYLMLPNGDKHSNFSVANSHEGSTQLVKRILSALTSHSLDTVLIGLEATSVYGDNLVYFLREDATLAPFNRKIHVLNPKQVKKFHDAYNDLPKNDYVDSFVIADCLRFGRINKEVYIGDYRYKALQNLTRARFFAVQNLVKEKQRFMNVLFKKYSMMTQEKVFSDTFSTTALAVYDEFESAEALANMDLHELTDFIIEKGKNRFPDPDAVAKAIQKAARSSYRLPKTVNDSVNQVLSISITSMKALESQIKEFDKAIKAQMELLPNVLISIPGIGPVYSAGIMAEIGDINRFNSQAALAKYAGLAWKQHQSGGFESEVTRLIPSGNRFLKYYLCEAAFSLVRCDKEYSDFYHLKYKEVNRYQHKRALALTARKLVRLVFALLKDNRLYRPAK

SEQ ID NO: 394734 - protein, 408 aa, unidentified
MRVIGLDIHRVFAEAVTLEDGRLTRLGRIEMRRDRLAAFARSLTHDDHVVIEATGNAAAVAEVLRPHVGRVVIANPQQVRLIAHAKIKTDRIDASVLARLYASGFLPEVWAPDEQTQALRRQVTRRNQLVRQRTRLKNIVQSILHSHLVPPCPTADLFGPKGRAWLVAQVLPADERHAIERHTREYDRLGEDLGVVERDLARSTLADEHAKRLMTIPGIHMVVAVGIMAAIGHIERFASPQQLVSYFGLNPSVHQSGNGPVHRGRITKRGRGHARGMLVEAAWVAARVPGPLRAFFLRIRARRGQHVAAVATARKLAVLTWHMLRRSEDYAWVRPALHARKLRGLELSAGHPAQRGQRGAAYAYNLNTVRQRERRRVEQAEKAYERLVKGWTQHGPKVRTGAAKEERR

SEQ ID NO: 394735 - protein, 341 aa, unidentified
MRTLYVGMDIHKNFIQAAAMDQTGNIIKEQQFKSDAKEIKRFVKSLKTQKIHAAIEATCTWYHVYETLDALGVETTLVNMRRTKTIAESKIKTDKLDAKTIAQCLRTGFIATAYIPPKTIMEQRNILRHRMSLRKEIARYKNKVHAILLRNGIQHSDYSDLFGVGGMKFLRSITLPDSEKYSLTSYLNIIETLIHEKTQTAEKIETLCKHNQQAMLLTSIPGISYYGAMIILTEIGEIQRFPHPKKLCSYAGLVPRTIQSGNHVYHGRILKECNQNLKWILGQCTHIHIRHCPNSSITRLYYRVENKKGRNKAIVAASRKLLTCIWYMLMKSETFKYSNDD

SEQ ID NO: 394736 - protein, 395 aa, unidentified
MFIVGIDIAKRSHEAIIIAEDGQVVRKAFSFRNNCTGYNLLLEQVRRLTLVKSQIVFAMESTAHYWLALYARLLKDGYTVMVLNPIQSHSLRELYIRKAKTDARDSLIIADLVRFGRCKASNVPQDKILALRELCRSRAYLVDMAADLKRKLIALLDRIFPEYESLFDSVFSKASIAVLSKYSTPQKVKNAHLGKLTDLLTESSNGHFGEWKAHQLKEAACSSFGIDDSGGVYSTLLGMFLEQILSLTAQADSLEKQISVFFQEFNNPLTSIPGVGTVLAATILSEIGDITRFSSADKLLAYAGLDPSVKQSGEFKSNQNRMSKRGSPYLRRAIWLASTVAVHRDPMFQTYYEKKISEGLHYMNVIGHVSRKMTAVIFAVLRDGQPYQPILQSAG

SEQ ID NO: 394737 - protein, 385 aa, unidentified
MQASTQTSTICTPTREQSATFFVAIELSLKGWLVCIHSPDRDRLSHYDIGAGDCDKLLALIEQARARVTRALGVKPEVVSCYEAGYDGFWLHRVLVAAGVKNHVFDPASIAVERRGRRVKTDRIDNESMIRTLMAYLRGEPWVVRVVRVPSPAQEDARRLMRERERLVKERTAHVNRIKSLLRTQGLAAGHPKRADWLTWLEAQCDHRGRPLGQCLVAELKRQHQRLRMICQQVKALEDERASAMPQALVTKATALTRLKGIGPNFATNLTGEVYWKDFENRRQVASYVGLAPSPWQSGGLSRDQGISKAGNRRARCTAIQLAWLWLRHQPDSELSQWYRARVGDARGRLRKIMIVALARKLVVALWRYLETGLVPTGAVFKKGK

SEQ ID NO: 394738 - protein, 339 aa, unidentified
MNHTAVGVDIAKSVFQVYWVDPHTGEVVNKAVKRDRFLVSFTNREPCLIGMEACGGAQHWARQLTKMDHQVKLMPPKFVKAFNIGNKNDPADARAIWMATQIPSKPVAVKTEAQQAVLALHRMRQQLVKFRTMQINSLRGLLAEYGEVMARSREALDKAIPEILAKLSDRLPAMLIDTLREQWNGLTGLDRQIAGIEQRLQAWMKDDVACQTIAAIPGVGLLSATAAVATMGDATAFRSGREFSAWLGLVPKQTGSGGKVQLLGISKRGDTYVRTLLIHGARSVLRHPGRAGAWVEQLGKRRPFNVVIVALANKIARTIWALLAHDRQYGREYMSSKSL

SEQ ID NO: 394739 - protein, 358 aa, unidentified
MMKVTTIGIDLAKDVFGLHGVDGEGRVVFKKRLVRNLLLEFLSKLPRCLVGMEACSSAHYWARKIEQLGHRVRLMNPRFVKPYRKSDKNDANDAEAICEAVTRPSMRFVAIKSAAQHEVQALHRVREQLLKSRTALVNQARGLLAEHGIVAPQGIARARRLLLEILADPQRHGLSGLFRETLQEVAERLRFLDERVSAYDDRIERVFKQDERCRRLAKIEGVGPLVATAVVAAVGNAREFKSGRELSAWLGLVPRQHSSGNRSQLLGISKRGDRYLRAILIHGARAALRRADHKRDQRSRWAMRIKLARGYNKAAVAFANKNARIIWALLTRGENYRPPATSVASAGAARIILAQVQA

SEQ ID NO: 394740 - protein, 310 aa, unidentified
MPTPPFQIVAVDVSKDSLQIKTDSDSFAVAATPEGLAKLLKFIQKLQHPLVVCEATGGYERHLINHLHKAKIASRVLNPARIRAFAESEGIKAKTDPIDAEMILRFAIEKNVQPGPEPTALQQELTALMDRRSQITGEIAREKNRLEKACKIIANSIKRTLKFAEAELKRLEKSIRETIASDFTLTHYAKTMQSVSGVGEITTWTIITYLSEITEIGRNQLIAMAGVAPYNKDSGKKSGKRSIRGGRPKVRRALFMAAHTAASSNAVIKPYVQGLLGRGKPYKCAIVAAMRKLLLHLQSLLKKAQISLAS

SEQ ID NO: 394741 - protein, 345 aa, unidentified
MTTMNYIGLDVHKKTISYCVKDVSGRIQQEGKIGSTRRELDCWMKTLPQPWTVAMEATIFSGWIYDHLLPHATQIKVAHPLMLRAIAAAKKKNDQIDASKLADCLRCDFLPECHMMPRAIRDRRRTLRYRHLLVRQMVQMKNRVSGLLMETGVEYNKQRLHKVSYFRELLSANGEVPPSIRPLLKLSRETIERCQKTEYALVSSLQRDPVLADRIKRLRTVPGVGPITALTWALEIGDVSRFGSIKKAISYCGLCGDERSSADKAMRMPLSKQRNKHIQRALVEAAKLAPRQSHEMAVIYDQERQKGNSNRATLAVARKMVAYLLAVDRQQRDFVPAEERRTTAT

SEQ ID NO: 394742 - protein, 434 aa, unidentified
MRLCIGLDLGSKSQSEAVAVDESGRMVGEPVRFTLEKSSMDEMVATLYGGALPEEVLFITESTGTIWRSLAGYLSSRGHGFFLLPPQKTHDLRRFCKRYTKTDTIDAYTLAKMALVHPEGLFRPSTMEPLWHNLRRGAKKEAKIARLIGDYKRTIQVKAEIALPGISSVVGDCDSPLAKCLYTKYLDPRKAVKLGRARVDESLGKVAGLNKKLFSEIWRCIETAADMDSDCDYDDLRLDIEEEFDVLECLKAQWESVKNRNLRTYRRLDPGKLLCTVYGVGDTLAQAILAGIGEGERFKSIKQFLSYTGFTPRVEESGQKEAKGARTTKAGPPWLRRVLHLAADVARQWDPQLAEVYYRCMVSKGHAHTKALCIVASRLPTRIYAVVKEQRPYELRDADGRPVTAREARAIVEARLRCRKRCVASEEMPWATTP

SEQ ID NO: 394743 - protein, 465 aa, unidentified
MKSKPEEQNKRATNHPTQHHWHEMNRKQRREMMRKMQNEDLSLEVIHPDAGGIDIGNESHYVAVPPSRDSQSVREFGCTTAELKAMAVWLKQCRIRTVAMQSTGVYWVAVYDILEQAGLEVYLVNARDTKNLPGRKSDVQESQWLMKLHTYGLLRNSFRPSPEIRVMRTHWRQRNDLVQSAGRHIQRMQKALTQMNLQLANVLTDISGATGQAIIKAILAGERDSHKLAQFRDPRVKASEEQIAQSLEGNWQEDLLFVLKQEHEGYEFCHKQMAECDRQLKQYLQQREDRSQGAPLPEEKRKGRLKKKRANKPQFDLREGLFRMTGTDLTRIDGIDVMTAMTIISEAGWDMSKWPDEDHFVSWLRLCPDNRISGNKVIGKGRLPTNNPISIALKMAASTLRQSKTYLGAQFRRFRTRLAWTKEQPSTSFDTESYRSSASRPKPKSSDTESPQYRRRPNKEEFLAR

SEQ ID NO: 394744 - protein, 356 aa, unidentified
MFYSGVDLHRRSLSICTVDDSGTVVGRTKIKTDPALVTDYFHQWPGDHRAVVECTTGWYWFCDLLRSIRVTIVLAHAKYLKAISYAKVKTDAVDALTLAQLLRMGYIPEAHQLPPEYRALRDLLRQRMVMEHKRTNIIQRISSILAQFNITSLPMSPSQTGFADFLAECSITEEYRMTLLMYHQQCFQATEHRKQLERYFKARLRPTPTVQLLMSIPGIGDITGSIIAMETGDIHRFADAKHYCSYCRLVPGAKDSGGKHSHRSGSKDGNQYLKYAFTEAAIKAMMFYPEIKHFATRLERRSTKAIARTVVAKELAKITYYVLTRQQEFQTFKGILIEKLRDWPRARKPVRLTGDT

SEQ ID NO: 394745 - protein, 374 aa, unidentified
MTAVMIGVDPHKGSHTAVAIGPAEEPLGKQRVRASAVQAEELVAWARAWPERTWAVEGAGGLGHLLAQQLVAAGERVLDMQPKLAARVRLLEAGNSNKNDPNDALSVAIAALRSRTRREVTADDHAAVLKVWSKRHRDLARARNQVACRLHAVLCDLIPGGAPKEITAAQATGILEQITPPDAVATARSELAAEFVADLRRLDGQRRDTSKRLAAAVRASGTTLTNVFGVGPVNAGIVIGDVTDVTRFPNRDHFASCNGTAPVEVSSGDRKVHRLSLRGNRRINHAIHMAAITQIRHRHSDGRAFYDKKIAEGKTRKEALRCLKRRISNAIFARLLADARTAAARAKGPGGQPGNDSDSSAAGSSPERRLFGQV

SEQ ID NO: 394746 - protein, 312 aa, unidentified
MTDKTSPVHAGMDIAKASLQLHLQSKSFDLPNSPEGHAQLLKRLSAIPGAHVICEATGGYERAVVAALHAARIPVSVLNPARVRQFARASGELAKTDPIDAAMLTAFGQAFTPAPTEPRTAVEIKLAALVTRRMQLIELRVAEEQRAATCADPALCKLFTPWLAQMEKQISKVEALIEELLKEHAPLAGQVQRLDDIMGVGRLTAVMAMATMPELGTLNRRQAAALAGLCPYNRDSGQWAGKRCISGGRIEVRRALYMAALSASRSNHLLKAFYDRLIAAGKPVKVALTAVMRKLIVLMNHLLKNPNFSLAT

SEQ ID NO: 394747 - protein, 412 aa, unidentified
MPVPEALFYVGIDWATETHAVCVLNAAGRIKTQFMIDHTAAGFADLLRRLSRLAGNPGDVPVGIERPDGRLVDALLEAGFPVVPVSPNAIKTWRDGEVLSGAKSDAGDATVIAEYLRLRAHHLRPAPPYSAQTKALRTVVRSRDDVVDMRVAATNQLSALLDMHWPGAKVIFADVESPIALAFLTRYPTYASAQRLGGKRLQAFITQHGYSGRRSATELLTRLRSAPAGVLDPAISAAAREAVLAMVAVLTAINGALKALDASVVAHLGEHPDAAIFTSLPRSGQINAAQVLAEWGDSREAYDHPDAIAALAGVTPVTKASGKYRAVHFRWACNKRLRKAITCFADNSRHESPWAAKVYAEAIARGHDHPHAVRVLARAWIRVIYRCWNTNTPYDATKHGNAVTLLQPQTAA

SEQ ID NO: 394748 - protein, 405 aa, unidentified
MARVFVGHDWAEAHHDVHVEDEIGKRLARVRLPEGVEGVARFHELVAGFVEDPADVVVATETDRGLFVGALVAAGYQVLAVNPLSTSRYRERHSTSGAKSDPGDARVLAELARTDAHNHRPIAGDSDLAEAVKVLARSHQSMIWTRQRQVNQLRSTLREFYPCALAAFDELASGDARAVLAIAPTPALGRRLSRSKIAAALRRGGRQRRIDERVVEIQIALRAPQLEAPAIVADAMGASVGALVAVIAELSTQIDRLEAGLADRFEQHPDAKVIRSLPGLGMTLGARVLGEFGDDPNRYADAKSRKNYAGTSPITKASGTRRVVLARYARNRRLADACYLWAFATLTASPGAREFYDQRRTAGDTHHRALRALANRLVGIFHGCLRHRALYDEHTAWSHRNALAA

SEQ ID NO: 394749 - protein, 435 aa, unidentified
MTSHCQFYNYKYQEVFSCLSKSSNNCCGLDVHKTWIFACIGITDSNNRTEYKQARFSSFTKGLNELCDWLAKYNCKDVCMESTGKYWIPVFNILEQRSLWVTLSHPKYTKPMKGNKTDRKDAKWICDLYMCGMVKPSFIPPADIRELRDLVRYRFKLTCMITGEKNRAQNCLTVSNLKLDDVFSDVFGKSSRSITEQILQHPGETFDVAPFVDGRCKTPIVEIQAAIDGAISKQQAVKLRQFLDHIDELNKHISEVEQEILRLSDKYEAALNLIRTVPGFDKNPLTAIQVLSEIGGDMSVFPTAKHLVSWAGCCPRNDQSNQKIKSTRISRAGSYFKPVLVQVANALIKSKKHSEFTNRYKRIKAHRGHKKAIIAICRMILTAIWHILSDLKPYTSEGFLESRPVKKEKVLSTSQALNLLKQRGYIIKDEPLAVS

SEQ ID NO: 394750 - protein, 779 aa, unidentified
MKSPQQSPLPAKEQRPGGTNREEFPWGVRASPGLNHQDRAPVQGRPAHETAGSGETMQPELTFQHYTGIDWATEAHRICLLDHEGRLVAKTTIAHSGDGLAQLLAWVHQHGAVPARTAVAIEVPRGAVVETLTERGFSVFHLNPKQLDRFRDRYSTAGAKDDDRDAFVLASALRTDLALFHPVPVEPESLIQLRELFRAADELRGEMQRHSSRLREQLNRYYPQMLVLCPAAQQPFLWDLLEAAPLPASAAALEPERVQGLLKARQIRRLTAAQILATLGRPALPLAPGAALAASQHALVLVAQLRIVRQQRDLTLKRLREVLRHLRAQRNDGARPSDVEIIESLPGAGELTTAALLTESAQALAERDPEALRAYSGIAPVTRQSGNGAASPCATPAISGSATPSTSKPCAACAAIRSAAGITMRCARPDTPTRGPCAASPIACSPCSSPCCAKAPCTIPGSAKPGAPAMSSFPRRPAMSSHPPPDRTLGALQRHLAALPCARYELRLIDNLSRQCRASRWWTGAQLLTPRLVAFLRARNREGCDIYFRPYQGDWNAGYLLLDFDAAPCPLAHMRASGHAPCVVVETSPGRQQAWVCIAPSPALPAQATALARSLAQAYGADPASADWRHLGRLAGFTNRKPQRQTKTGQPPYVKVLWTGQADLVMTGPPWDQPLRVQASQVRVDTASEHFPEPGEYARWLPRAGVWMPVTDWSVADYRVARALLAAGLTPARTMAVLRSGSTGFPRRHADPDGYLWRTVLRAARELQHPFAFSSAPGK

SEQ ID NO: 394751 - protein, 415 aa, unidentified
MEGCPRYLIGIDWASSKHDVCVLDPCGAIKASFVVSHTAEGLAELMRRLHRYGDSVSLPIAIERPSGVLVDTLLDDGFPVVPIHPNALKATRPRYSAAPAKCDPGDAYILADVLRTDGHRFRSLRAPSDRIKALRATVRTRDDLVATRVRLANQLRSLLESFWPGAAVVFAGIDTPIALAFLDSYPTPISAARLGEKRMERFLRRSRYTGRRSAAELLQRLRSGAAGQAGDLESETKGRLVRNLIAVLKPLVTQIRELDELIATHLAHHPDGDILQSFPRTGTINAAQILAELGDDRLRFATQDQLAAEAGVAPLTFTSGKHRGVACRFACNKRLRRALTTWADNSRHGHPWAASVYRNARARGCDHPHAVRILARAWVRVLWRCWQDVTPYDIDHHGRARPFLVSVEELPSAAP

SEQ ID NO: 394752 - protein, 405 aa, unidentified
MRVVHERCCGLDVHQKSVTACLVTPDGRELRSFGTATAELRGLVGWLLEAGCTHVAMESTGIYWEPIFNIIEDTQIVPMLVNARHMKALPGRKTDVKDAEWIADLLKHGLLRGSFVPERDWRELRQVVHERRNLIEERARVANRVMKLLETGNVKLKSVISDVLGVSGRAMLEAIARGETDPQAIAGEAKTHLKATSDEIERAVDGLTRPHHQFMLTMQLRHLDQLGQMIDAFDAEIERRMHPFLGAIAGLDGIPGVGLRSAQEIISEIGVDMSRFPTANHLCSWAKMCPGLKESAGKRGRTGIGQGNRYLRSTLAEAAWAASHTKKSYLRSQFWRIKARRGDKRAVVAVAHTILRISYYLLRDGGTYQDLGPNYFDERDREQATKSAVRRLQRLGYQVTIEPAA

SEQ ID NO: 394753 - protein, 352 aa, unidentified
MKEVSKERQISVVGIDLAKCSFHLYAVDAGGQPRLSKKLTRARLGAYVANLSPCTVAMEACGSAHHWARQFRSYGHEVRLIAPQFVKPFVKSNKNDAADAEAICEAAQRPSMRFVAIKTLAQQDIQAIHRMRSLVVDRRTAQTKQIRGLLLEYGIEVAQGRPAMQRRLPEILEDADNGLSPRFRSELHGLAEELRHLNERVAHYDAQIDAIARGDRQARDLMTIPGIGPKGATALLAAVGEDATLFSNGRGLAAWIGLVPRQHSTGGRDRLLGISKRGDVYLRNLLIHGARAVLRTLEHKEDRTSLWAKALKARRHTNVAIVAMANKMARVAYAVMTTGKPYDPAIGTVATD

SEQ ID NO: 394754 - protein, 435 aa, unidentified
MNCIDDIRLEQFQQLKKEIRGSEEYLIVGIDVAKEKHRAFFGTAQGKTLLKNVVLDNTIEGFEKLDAYVDRVKVQYSLPKVVFGIEPTADYHKPLAEHLLKCGLMVVFVGGMAVKNNRQLLNGRWDKNDDKDSANIADLIAQGKCMFYEYPLMTLQNVRVLNALKRRLKKREHGISAYIRNHILAQYFPELDKYYGSSETLAVVRECLDPSAIAGMEYDDFCRTVAPGKMTLARERRVGAIWKTAVNSVGCTMGEAAFHEAQIAVDSLKQVRQEIKAVEDKLEDACLEFSEYTYLLSIPGFGPDVSAKVLGAIGDPHRFTSGKQVLRLAGLDLCAKRSGKTSNRATPIVSKQGKSDLRCALYQAAFIASIKSKDFIPYFTNKLVGRAKEKGIGTKMRVKLAAKLLIIAWTLMKKKEYFDPKCLKLEKRGELKTAA

SEQ ID NO: 394755 - protein, 323 aa, unidentified
MGAVVNQIPSSFASPLFVGIDVSGPFLDIAYHGSVETFRLPNAPEGFAELINRLLPLKPELIVLEATGKLERAVLQALCQAGLPAVAVNSTWVREFARSAGQLAKTDRIDARVIARYGAVMKPKVRPLTDEQTQQLQALILRRTQLIEMLTAEQNRRKRAHKSALPSIDEFIQFITQRIKDADRDIDSFLHTNELWRKNEALLRSTPGVGKTTAATLIAFLPELGSLNNRQIASLVGLAPFNSDSGTHRGERHTKGGRHFVRRALYMACVAAQRANPYLKAFCDQLRARGKKTKVAFVAGMRKLLTQLNAMMRDGTAWNPPKP

SEQ ID NO: 394756 - protein, 338 aa, unidentified
MAIVMGLDQHRAQITAEWIDTDTGEVSRSRISPAHRAGVRKFAERFRGQELEVALEATTGWRFVAEELRRVGAVVHLAEPAETAARRGNKKRAKSDRADARHVRELLMIGRLPESWIPPDHLLDLRSRVRLRHTLSHQRGEWQQRIQAVLYHHGCPQRRNLMTAEGLQWLKAQPLPAGAREQVTVALGMIDALDAQLAPLDKELRAYARRQLGCKALMKHFGVGELTAVTILAELGDVDRFSSSREAVRYAGLDITVHQSDQRRSPGHLSRQGPPALRWALFEAAQSAARQGSPDRDYFAQAAERLGANRACLSVARKLLKRSYHTLRELGEEALQPA

SEQ ID NO: 394757 - protein, 458 aa, unidentified
MKNFYLGADVSKGYTDFMILDAKKRRIEEGFQLDDTFDGHQKLYHILSALCDRHPNAQIHAAVESTGGYENNWFNSLVKFQSSLPLKTARLNPCGVHNNSKAGLERNITDPISAENVAKYMIEHPENVRYQQQDPLASLRKQWSFVKMLLKQKTQLLNQLESNLYAANPEVLGYCKNGVPNWVLSVLARFPTAAKLAKAKKSSLASIPYVTEQKAKALIQGAKKSVASATDQITAQIIKATVKQIQQLAKAIESQEKILTETCSIPEVQLLKTFPGISDISAIGLILEIGSVERFATAKKLASFFGLHPRYKQSGDGSWGFHMSKQGRVVPRQILYMVAMVTIQCNPLIKEIYLKHTEKGMKKKAALGLCMHKICRIIYGMLKHNTAFDANIDRNNRKKSLMGNTVKSHKDKRRRYQSYDAKAPISGKHNKKRKGQKQSQSDNIANNGIIKASAPASA

SEQ ID NO: 394758 - protein, 343 aa, unidentified
MVYIGMDVSSKEFVVHAIGPRKQEVFEGRIPPSGAGLRKLIRDLGVGPKLFVFEAGNQMKWIALTLMRQAGVRIHVVHPNEVKWISQSNGKTDQVDARKLAHLGWGNLLPRPVHIVEGTTRQLRELVSAREQLQGKRVALINALRGYIRQEGVRFPAKFFQRLGWKASLEKLSVGPTQGLIFKSFMEAIDALKRSEEELTARLEEIQDDRCDLLETIPAIGKIASRVLVGALDDARRFDNKKCVANYGALTPTIYQSGGTTNLGRINRDGRQEVRKVLLQCAHTIQRMVTHDAAPLREFFERIEKRRGKKRAVVATARKLLTTAYGVLKSGVPYDPERLRAFA

SEQ ID NO: 394759 - protein, 420 aa, unidentified
MNPPTATTGIDAGKTHAAVIIPTAAFTESKRGKPAWRSAGVELTITNTRADFEKLTDAMPPGSPAFIEPVGYYATALIEYLSTHGHPVYYVPGTTTKAARPALHYTSSNDRTDARTLAAIGWLHLTTGQYPCRKADERSDLDSYLLAIARQLDQATRDCTRTINRTRQIMHAIAPELEELTPILLGAPTQQAPHRPRPNLLAAYPDPRELANLTDDQLHANLPTRNARDHMRAAAATTIGSRSPYLQIALATQAAAYSAHLAQRLTALSLLEEAAHHHPLYALLSTIPSISDASIAVLAGVIGDIANFNNKQQMRVALGTYTHRHQSGTSVDEAKTGNKGNRLAKRIIYLLAMSLIARKRGAIYETYQRRKSAGRDHNIANSRRQIADRIYAMLKANEPWNDELRPETEEEEEEGERGNK

SEQ ID NO: 394760 - protein, 391 aa, unidentified
MVCIGIDVAKDKHECCILDSEGTTLVDCFTIPNNMDGFKSLLQTIQDCSQKSDKIKVGLEATGHYSYNILGFLLDNDLPVYVMNPLHTNLYRKSLSLRKTKTDRVDAKTIATMLLSDVDLKSYTDTAYHNEELKSLTRYRFDKVQERAKLKQSVSRLVTILFPELEQLVSSIHGTSIYAFLSEYPGAKQISEAHLTRLANILVKTSRGHYRKDKATHIRDAARTSIGSVMPAKSLELKHTIKLIQELTSEINEIEDAIRKIMDELKPPILSIPGMGFHSAAMILAEVGDFSNFNSPDKVLAYAGCSPSTYQSGKLTNCYAHMEKRGSRYLRYALYTATKYVCYWNPVFTEYLTKKQAEGKHYNVALSHATKKLVRLIYALQKSGKAYLAVT

SEQ ID NO: 394761 - protein, 395 aa, unidentified
MFYCGIDIAKYKHEASVIDSNGKPLFDSISFSNSKDGCEKVLALFQKLEVTSDSVVIGMEATGHYWLSVYEHFSGLGYDVKVFNPIHSEALRKMYLRPTKTDSKDSFVIAQVIRFGQYSPSTMSDENIIALRQLSRYRLALVDSCGDCKRRIIALLDQVFPEYGKMFSDTFGATSTEVLLNCQTPEDMLDISTEKLTELLRKSSKGRFKETKAMELKTVAKNSFGVSFAKDAFSFQIKQLVEQLVFIEIQIKELESEISILLNETNQVITTIAGIGETLGAIIISEIGDINRFNAPNKLVAFAGLDVRVNQSGEFSGTRNKISKRGSPYLRRAIWLASTRAAFCDPILSEYYQSLRARGKHHLTAVGAVARKMCNIIFVILKENRPYHSIPPKKL

SEQ ID NO: 394762 - protein, 383 aa, unidentified
MAKQNDLSRCLVTLEQDATVIAVIEIGQSSWLVAGIVPGLERNPLKKLSPDQDALLQLLHRWQKEAVQAGHTIKRIAVAYEAGRDGFWLARWLRAREIEAYVIHPSSVPVSREHRRAKTDRLDTELLKRAFLGWLRGEPKHCSMAAIPTLADEDAKRPGRERQSLVGERTRIINRLKANLARLGIRSFRPNLAQASSRLEALRTPEGSAVPTNTLAEMQRDMNHLRFIKQQIKEIETSRAKRLAAAPNEQRHAMVRLLARVVGVGIDTADMLAQEVFSRNMRDRKALARYAGLTGAPDESGKKRRERGLAKAGNARVRRGMIELAWGHLVHQKDSALTAWYRKRTSDARGGTRKTMIVALARKLLIALWRLVTTGGLLLRPAA

SEQ ID NO: 394763 - protein, 405 aa, unidentified
MFCGIDWAAETNAVCVLDHTGRKLVVFEVAHTQEGFAQLTSRLGRLGDPAALPVAIERPDGRLVDRLLEAGHPVVPVQPGAIKAWRDAEVLSGAKHDPGDAELIAEYLRLRRHRLRTLAPFSPQTRALRAVVRTRDDLVEARVAATNQLSACLEAFWPGANGVFADVESPISLAFLTRYPTPESAASLGEQRMAAFMVKHGYSGRRPAGELLKRLRAAPAGLTGSVEVEARRDAVLALVGVLGALNTAIKDLDRSVVAHLGEHPDGEIFTSLPRSGRISAAQVLAEWGDCRQADADAEAVACLAGATPVTKQSGKHRSVSFRWACNKRFRKAITTFADNSRHASPWAARVYADAVARGCDHPHAVRVLARAWIRVIWRCWTDRVPYDPAKHGAAAKLTEMTASAA

SEQ ID NO: 394764 - protein, 418 aa, unidentified
MTVDSVAQKRSAIKPDTLVIGVDLARHTHVARARFYDGSYTRPVKVPNTRAGFLALTEQIGAWKSRPDSSVIIGVESTGSYGVNLVRWLSEYGCRVVLVPSLHVCREKELLDNGRGTNDDKDALIIADLVARGQYLGFVALSGACLELRPLVSLRSRLIRERTGWLNALHQAVDVLFPEFETIFADLKPPSVRLVLGRFGTAAAAQAYSPAEMRQMLARDGVSRLSLAKLKRLQAAAAESIGPLQVSTSQERSLHEMLKTLATLEERIAGLEAEIVRLLEQLPEAEYLMSVKGVGAMTAAVILAETGGLGQYSCAAAVLKLAGFNLYQNSSGQYQSGRHISKRGRSQLRRALYMVAVQHARRGWPLQPYYAALVERGKPKTVALTAVCCRLVRLLYALARDGRCYSECPPKVSRPAAA

SEQ ID NO: 394765 - protein, 392 aa, unidentified
MTATHSGNCTTQQGVLYVAFELGWTEWKLAFTTGHGQKARFRSMSARDLPKLQQEIARAKERFGLAADAVVRSCYEAGRDGFWLHRYLSAGGIDNVIVDSSSIEVNRRQRRAKSDQLDAGKLLSMLLRHHGGEKKIWSVLRVPSVAAEDGRQLHRELEALKDERTQHNNRIKGLLASLGVAVANVDKNFAEWLVAARLWDGTAVPAEMHQRLLREYERWQFVDRQIKTQEKTRRQRIRADGTAHVDQVRSLLELCGVGLNGAWLLVHELFGWRRFANRRQVGGSVGLTPTPYHSGDSKREQGISKAGNRRLRRLLVELAWCWLRWQPGSDLSLWYARRFGPGNQRSRKVGIVALARKLLIALWKYLEQGELPKGAKLCAWQPKVKARPAQAA

SEQ ID NO: 394766 - protein, 365 aa, unidentified
MSDQSRTKRRESVSANAACETVTVGVDLGDRKCHICIVDAKGEIVKEEAIATSPAAFKDYFKKLPTPTVVAIEVGPHSRWVSQVISECGHDAIVANASKVKFIFANNGKNDRVDARSLARLARVDRHLLFPIHHRSNHAQFALSVLRARDALVRARTRLINCVRGLVKPTGVHLGAASADCFPLRAAKQIPAELQFSTALTLEQIQSLSDSIAVYDQYIEHLVETQYPKAKLLQQIPGVGALTSLAFILTLDDPTRFPKSRQVGCYLGLRPRQDQSGDSNPQLGITKSGDEFLRRLLVNAAHYVLGHFGSDSDLRRWGLAIAARGGKRAKKRAVAAVARKLAVLLHHLWVTGDVYEPFHNTGKAA

SEQ ID NO: 394767 - protein, 411 aa, unidentified
MEQNGVVDESTRFVGLDVHRRYATVAAVDSKQQVVLTARRIDFNDFDEWVRKHLRRTDVVTLEATSNAWHLYEMLVPLVASVTVANPIQVALIAKARVKTDPRDALTLARLLAVGMLPSVWVPPVEVRELRALGGHRRRLIKQRTQARNRLRAVLFTHNLFPPAGEAFGPANRPWWEGLDLPASEKLRVRHDLSILDCLEPLVKGVDAELVRQSSLAPWAEQTAFLVQLPGIGVHSAMQLLAAIGDIERFDGPHKLVGYAGLGARVHSSGEEHYGGRITKQGRRDIRTTMVESAWVAVESHTYWKALFERLAVRVGRPKAIVAIARKLLVVVWHVLAKQVADREAVAEQVAGKFLEWSWKLGRVNRDGLTSGAFIRRELCRLQLGDKVTAISRGKRKFPIPLSERADQAVG

SEQ ID NO: 394768 - protein, 344 aa, unidentified
MSEVTTIGLDIAKNVFHAHGADERGAVIISRKLTRSKLLDFFAGQPACVVAIEACGGAYHWARQLQSMGHEVRLIPPAYVKPFVKRNKNDAIDAEAICEAAQRPGMRFVAVKSEEQQAAGLVFRTRDLVVRQRTQLINAIRGHLAEYGWVAPRGTAHMTMLADLLEDEEMASGLPDAARPMFKLMIDLLAELDKQISLLDREIARRAKEDEDARRLMTIPGIGPIAATAIIALASPIETFRKGRDFAAWLGLAPRQHSTGGKQRLGSISKMGERTIRRLLIIGGSSMVRQACRFGAPAGSWLERMLAPKPLMLVSVALANKMARMVWALLTKKEDYRAPAAVAA

SEQ ID NO: 394769 - protein, 392 aa, unidentified
MRFIGIDIGAESHVVAVVDEAGGVLVKSTPFSEDAEGYAKLRALLGSPEETLCAMEATGHYWQNLFAFLAAEGFQVALLNPLRTHRFAGEDLRRAKTDAIDAVGIARFAQQKRPVVTPLPDEATLELRELVRLRDRMVQDMGDRVRQLHRTLDLTFPEFPRRVRDLTSFKATGLLLAFPTGTAFRDTSVEAVAELKYDGRHRIGEDLARDLCELAGRSVGRHDGPSYRLQTRYACEDIATLRERIKGLDGDIQRSLDQHRVGQLLTTIDGIGSNTAARMIAEVDLLAFRDAGALAAYVGVAPSVNHSGKRTPQRGAISSIGYAKLRAKLWMPTLQAVRKNAWLPRFYEGLVARGKSKKLALIAAMRKLLSAMLSVARSGKPFEPRLPEAPTA

SEQ ID NO: 394770 - protein, 376 aa, unidentified
MQAAQVKGYEDKTVMYMAMELSNRKWKLGFGNGSKLRRKSIEARDRCGLLAEVALAKAKLGRPADARVVCCFEAGRDGHWIHRWLESEGFEVLEIDSSSIETARGRKHVKTDRIDVDKLLDLLIRHYCLGLRKAFAVVRVPDTAAEAAQRLHREDEYLLKQRTRISNRIKALLVTQGITELRLGPGFAERLERAKLWNGEGVTAELQRELLRLHGQYGVFVDQLQELQRAYAAELLTDTPVAEYRRRLERLKSVGPKSSRLLAAEVFGWRTFANTKQVGAMSGLTPTPSQSGDTRTEQGISKAGNRRVRRTMIELAWLWVRWQPDSALSQWFNRRFAHGGKRMRRIGIVALARKLLIALWRYVEHGVLPDGAVLKA

SEQ ID NO: 394771 - protein, 343 aa, unidentified
MQHYAGLDVSVRETSVCIVDATGELCREVKVPSHPEDLARVLMDPAWQFERVGLEAGPLSQWLFNGLAEAGLPLVCIETRHTKAFLKAQVNKSDRNDARGIAQMMRVNLFRPVHIKTLASQKRRALLTARKLLQEKAVAIESDMRGLLRNFGLKVGQIGKVKFEARIRELVDGVPDLEELMEALLEARASLREQFARLHRKLLAIVREDDVCRRLMTVPGVGPIIALAFRTTIDVPGRFRKSKAVGSALGLTPVQHQSGESSRVGKVSKCGDAMMRTLLFEGAQTMLTRSVKWSWLRAWGMKIAKSRGMKKAIIAVARRIAVIMHRMWIDGTEFHWTRGGASA

SEQ ID NO: 394772 - protein, 409 aa, unidentified
MDQVLERVAGLDVHKKTVTVCVRVPGPRGGRRQEVRTFGTTVPELLALREWLETQGVTHAAMESTGVYWKPVFYILEESVTCILANAAHIARVPGRKTDVQDCVWIAQLVEHGLVRGSFVPPAPIRDLRDLTRARKALSQDRTRAANRLHKVLEDAGIKLASVANDVLGVSGRAMLEALVGGTTDPTVLADLARGKLRAKLPALRHALAGRFRPHHAFLVGQLLAQLDFLEEAMAQVSAQIDEVITPFQAELERLDAIPGVNRRTAEVFIAEVGVDMRQFPTAKHLASWAGLCPGNRQSAGKHKVSPTRRGDRWLRTALVEAALSASRATDSALAARYRRVMRHRGHKKAVIAVAHAILISAYHVLARQIPYRDLGPDYYDHRHAERVRRRAIAALERQGYRVSLEPAA

SEQ ID NO: 394773 - protein, 377 aa, unidentified
MNDNTKYVGMDVSKEKIAVAVADGGSREPARYWGEIPYRIEYIRKLVERLGKVEQLQVCYEAGPTGYLLERQLASMGVACVVVAPSLIPKQPGNRVKTDRRDALRLAELLRAAELTPVWVPGEEDEALRDLVRAREDAKEDLLRAKHRIGKLLLRHGIHEPLGVRAWSAKYRVWLKGLKFDSSALQTTFDEYRLSIEEIEGRVERLESEIHTQAQKSKHAPVIQALQAFRGIQEIAAATMVAEVGSFLRFRKASQVMAYSGAVPSEHSSGAEVRRGKITKTGNNHVRRIAIECAWSYRHPATMSAAIKKRQEGLPASIQAIAWKAQVRLCKKYRHLIFDKGKSAQVAITAVARELLGFVWAAACEVEKQGLEQASAA

SEQ ID NO: 394774 - protein, 397 aa, unidentified
MIAVGIDVSKSKSTVAILNEDGSIRAKPFDVHHVADELQALVDYIKRTSEPPTILMEPTSHYHYPLLKAFQEAELPVCLINPYQMKKYGDTELRKAKTDKRDSLRIAQYALEKSYSLIPYTPQDQKYEDLRFLSRQYGQRISTLTAAKVQLLSLLDETMPGITTILPLKSRDPDNCVLLRFIKRFKSFDVIRKMGKTRFLDSYQVLVKKTKDRFAGAKGLAIYELVLNSVTTRGENPLSAMTQDQCVDLVSTSQKAADEINLQMRIIAETIPEYKVLRSMAGVGDRLGPIILGEIGDIRRFHSGKALNAYAGNDAPPYQSGQFESRNRHISKRGNPALRKACFEVMQALKLTKPQDDPVYLFLLKKEQEGKPYNVAKMAAVNKFLRIYYARAMELYK

SEQ ID NO: 394775 - protein, 343 aa, unidentified
MSEVTTIGLDIAKTVFHAHGADERGRGVFSKRLTRAKLLAFFAAQPRCIVVLEACGGAHHWARELTALGHEVRLIPPAYVKPFVKRHKNDAVDAEAICEAAQRPTMRFVAVKSEEQQASALVFRTRDLLVHQRTQLINAIRGHLTEYGWVAPKGPAYVSMLSDLLDDELGASLPPAAVSMFRVMLDLLADLDERITALDKEIAQRAREQETARRLMTIPGIGPITATALLAMAPAAETFAKGRDFAAWLGLTPSQHSTGGKQKLGATSKMGERTLRRLLIIGASAVIIQATRRGTAKGSWLEQMLARKPRMLVTVALANKMARIVWALLAKGGTYRAPMAVAA

SEQ ID NO: 394776 - protein, 346 aa, unidentified
MKITTIGIDLAKTVLQVHGVDKHGKAGLKKQLKRKDVLSFFANLEPCLIGMEACGSAHYWARKLSALGHTVGLMAPQFVKPYVKTNKNDRNDSEAICEAVARPNMRFVAVKTAPMQAVLALHRARQGFVKARTAQGNQIRGLLAEFGIVIAKGIGHIAKRLPEILEDGDNGLPGMMRELLQRLGANLKDMDKQVGELERQIVLWHRENEASRKLEAIAGIGPLTASAMVATLGDAKSFKNARQVPAWLGMVPRHDGTGGKVTLGAISKRGDVYLRTMLIHGARSVVAHIDERKPDQADEWLKKLLARRNKNVAAVALAAKNARIAWALLAHERSYQHDYVVTRKAA

SEQ ID NO: 394777 - protein, 368 aa, unidentified
MSNHSHYKVGCDAHKYFSLFAVLDRHAKVVQRTRVNHEPGTIQAFLSQLPPGTPVALETVGNWYWIVDEIEAARCVPHLAHAAKAKAMMGYVHKTDKLDADGLGILLHNGTLPSVWIPPGELRDERELPRTRMAFSKIRTKLKNRVHATLAKYALSLDTDSDIFTAKWRPQLLALLQQLPPETCRCAHQELELLDLVQAHIDRLEARILERARRTPSIQLIQSIPGPAEILSIVIDRELGSIDRFSCPKHFAGYAGTVPKVKSSAGKTHYGRMIKQCNNYLKWAFIEAANVVVRQRHHPNWRIKYVVHLYERTRQRKGHAVAVGAVARYLAESTYWVLKKGEPYKEPLPRHLAGSKSVVPPRQARTRA

SEQ ID NO: 394778 - protein, 459 aa, unidentified
MVLGHVGDIGESVKADILFERLRLEVAHPNAAGIDVGSASHFVAVPPDRDDQPVREFKAFTEDLEALAEWLSACAVDTVAMESTGVYWIPLFELLESRGFTVYLVNARHVQNVSGRKSDVLDCQWLQQLMSYGLLSGAFRPKGEICVLRALSRQRDMLTQYQAKHIQHMQKALAQMNIQLGNVISDIAGETGQKIVRAIVAGEHDPVKLAKLRHQRIRASEEQIIKSLKGNWRQEHLFALQQAVALYDAYGQAIAQCDQQLEELLRRLACHPAPAQPEKRRGRPRNAAKFDLRTALFRLCGVDLTRIDGIDTATALKVLAEVGPELSRFKSAKHFASWLSLCPGTKISGGKVLSGASKRATNRLAQALRMAATSLHHSRSALGAYYRRLCGRLDKPKAIRATAHKLARLIYTLLTKGTEYVDQGQDYYEERYRQRVVHHLSRKATAMGFRLIPLEGITA

SEQ ID NO: 394779 - protein, 280 aa, unidentified
MSDSIVGIDVSKETLDANCARGWRKIFANSPDGWKLVLSWLKAMGSKQAHVCMEATGRHSLGAALALYDAGHVVSVVNPAQIRDFARTKLGRNKTDKVDAALIRDYAALFNPAPWTPPSPAMRRLCELHTVRAGIIGSRTEWKNRLGSGLGDSTATGLAAMTIKHFTHQLETIDRAIGETIDQDAALRGRRDLLLSVIGVGETLAASLLAEMPEPGALRRSGEMVAYAGLNPSHHRSGTSIDRPTRISKIGGSAFGRRCPQCVSIPPSRPSSRDSKPRAA

SEQ ID NO: 394780 - protein, 359 aa, unidentified
MSTQSKPFSFKGQKIFVGLDVHLRSWSVTVLSEQAVLKKFTQDPSPAALNKFLTNTYPDAEYYSVYEAGFCGFWIHWELCNLGINNIVVNPADVPTMAGERLRKTDAVDSGKLARSLRAGELKGIYVPDSATTEIRSLIRLRDSLTKDQTRHKNRIKAHLRYLGIDIPEEFCRPGRTWTNRFVLWLKGLELETEYGKKTLDLLIAQYEDLRGQQLKMMKELRVLSRTERFDKPLQFLMSIPGIGQLAGLTILSEVDDISRFKDAAHFASFIGMVPMCYSSGEHDGTGNITVRRHAKLRWLIVEAAWITSRKDPVLSAAYVEYCRTMKPSKAIIKIARRLVNRIYFVMKHQQPYVNCYVS

SEQ ID NO: 394781 - protein, 392 aa, unidentified
MDRLIERCAGLDVHKATVTACVRVPDGAGGRHQEIRTFSTTTAGLLTLRDWLASYGVTLVGMESTGIYWRAVYYLLEDDFTCWLLNAQHLRNVPGRKTDVADSAWIAQLVEHGLVRPSFVPPREIRQLRDLTRYRKAMIQERTREAQRLEKILQDAGIKLSSVASDILGVSGRAMVTALVEGTHDPDTLADLAKGALRKKLPELKEALEANFRSHHAFIASEILTHIDYLDEAIERLSGEIERVISPFAQQVALLDTIPGVNRRTAETLIAEIGADMGRFPTHRHLASWAGMCPGNNESAGKHRSGKTRKGSKWLRHALVESAGAAARTKGSYFSAQYSRLKGRRGHKKAVIAVGPCWRLESGSSLPPTSRIRSASPRSRTCRRGASGSRSR

SEQ ID NO: 394782 - protein, 355 aa, unidentified
MNNLRYVGLDVHRDTISAAVLDTEGKLIMQSVVLTRANAICDFLNGIRGTLHVTFEEGIHSAWLYDLLQSKVARVVVCDPRKNKLLKSGNKGDLIDARKLAELLRNNSLSPVYHGELSALEVQRRVRSYSMLTEDTTRIMSRVKAVFRGQAIPCPGKSVFRPDRRESYLVQLPTMALRQRAELLYRELDAVHRLRLQAKREMLAECRKHPAMKWLQSVPYLGKVRAAVLIGRVQTPHRFRTKRQFWSYCGLALETHDSAQYHVVHGQVERKPRFVQVRGLNWNHNHDLKGLFKSAATMAAYRDGIFHEVYCGMLAKGMRPEMARLTLARKIAAITLKIWKEGGTFNAEQVKPQAA

SEQ ID NO: 394783 - protein, 354 aa, unidentified
MEKQYIGCDAHRRYSVFVVMDDKGQASKPVRVEHDRSELREYLRRLPAGSRVAIESTGGWYWLVDEIEAAGLKPQLANAYQAKQRMTGRNKTDKFDARGLAMELLTGTLPTVWIPPAELRDLRGLMRTRLALRSCSTQVKNRVSAALNRYGLKKPDEDGDLFTGRGRVHLNSHIQSLPEETREATLHEWILIDEIGEHIAALEKRIEQRIGQREDMRRLKTLPGVGRILGATLLLEIGDVDRFPSAPHLASYAGLVPTVHSSGGKTWHGKVPRSANLFLKWAFIEAANCIVVHQNKLKGRHVVNLYQRLKAAKGHGKAAVAVARHLAEASWWILTKQQSYREPNRAPIASSAHG

SEQ ID NO: 394784 - protein, 307 aa, unidentified
MANHVTKITLGIDVAKDQHIIYNWQTQQTIKLRNQPNDIKTWLRSFHGPVRIAIESTSNYHLTLVDEALALGYEVYLINPRQLVHYREAVNVRNKTDPLDAWLLARYLEHEASQLRPFQPRDPRAQRLWGLIVRRATVVKSRQQLQQSFAEVKVSIQGVLTQFQHLLLRIDRQILTLIRELGWWSHYQYCLSVPGIGSANASALVTAYHRGAFSGSDAFISYLGLDVRIRESGHFKGRRKLTKRGEPEIRRLLFCASHPARHYQRFADYYQRQLDKGLSKIAARMILGRKLARIAFTLMRNEEVFMN

SEQ ID NO: 394785 - protein, 340 aa, unidentified
MTILMGLDQHRAQITTEWLDTATGEIGRARVTPAHREGVRRFLGRFAGQELEVALEATTGWRFVVEELRRVGAVVHLGEPAQTSALRGNKKRAKTDRADARHLRELLMIGRLPESWIAPDHLLDLRSKVRLRHTLVDQRGEWQQRIRAVLYHHGLPHRAELHLLSGEGRAWLGEVDVPDAAREQIMVAIAMTEALETQIAPLDKQLRAYARRQAGCRALMAHYGIGELTSVAILAELGDCRRFSSSRQAVRYSGLDITVYQSDGRRSPGHLSRQGPPVLRWALYEAAQAARRPSAPDRGYYEQAAERLGGNRACLAIARKLLLRSYHTLRELGEEALQPA

SEQ ID NO: 394786 - protein, 338 aa, unidentified
MTYIGFDHHKKWTQAAAIDDQGKIIREMRVLNDSSSLKGFLKGLPKPLKGVVEAGPTWGWIYDTLTELGVKMIVANPSAVRAIAEAKIKTDKIDARMLASLLRVGLIPEVYVPTEEVRSQKMLWRERIWLVRMHVRLKNRIHRLLNHYHIEVPEFSDLFGAAGRRFLEELKLPEPGNRILNAQLKLLQSYRLQIEEVQRWAVKATQGHPNRAYLESLPGFGKVFAPIVALEIDDPKRFANPAKLASYCGLVPSLYSSGGKSWQGGIGKEGNHWLKWAFIEAAWAAIRSSAYFRLVYQRLRQRKTAQVSIIACARRLCEIAYHLLKERRCYEERPLRCA

SEQ ID NO: 394787 - protein, 341 aa, unidentified
MSEVSTVGIDLAKSVFQVHGADSNGTVVFRKKLRRDEVLGFFSTLPRCLVAMEPCASAHYWAREIAAFGHDTRLIAPAYVKPFVKRQKNDMADAEAICEAAQRPTMRFVQGKSAEAQASGVIFRTRDLLVRQRTQLINALRGHLTEFGYVVRQGIGHVRKLVEIVDDPTSDIPAEARPVLVVIAQSLQALQSQIVLLDREIAARAKADPVAKRLMTIPGVGPVIATALVALAPSASTFRRGRDFAAWLGLVPRQHSSGGKERLGRPTKMGERSLRRLLIIGASSVTKVAARDPDKASAWLAGMLARKPRMLITVALANKMARTVWALMAHGGSYRAPAAAV

SEQ ID NO: 394788 - protein, 344 aa, unidentified
MLHSVGLDVSQKTTAICVVDAEGKRTWRGTCGTSPEQISRLILRHAGADAKVGVETGAMTPWLVHGLRTAGLNVACLDARRVKAALQMRLNKTDQNDAEGLAQVVRTGWYRSVHVKSLDAHQARSLLGARAQLVGMRTRLANMIRGVLKTFGILPGANGGLRFDRRVEASIASTPEVAAIVDPLLQAWRQLREQIAVFDTAIQRRVRADATCRLLMTVPGIGALSSLAFVSTIEDPERFSRSRAVGAHLGLTPRRYQSGEIDRSGRISRCGDALARTLMYEAAIVILYRVKRALHLKDWAMAIADRAGPGKARVALARKLSVILHSVWRSGEPFRWEAQQGLPA

SEQ ID NO: 394789 - protein, 337 aa, unidentified
MRHIGVDLHTNSLTVCFLEEGKEERFTTYKVEELWQFQQELQPDDVLAVEATGNSNFFYDHLVDYVEEIVVVAPNQFDVIRRSVSKTDKNDARALAFFLSKGMLPRARVKKKEYRELASLVETRDKLVKLRTVLLNKIHGLLNAQGIKIKKESLSSKKGLLRTLDYPLSDVARIECEIIVEQVQQLNKSVARIDEASSDQAKKLDGFENIVSIKGVGEKSAAILLSVIGDVNEFESENKLAAYFGLVPRVSNSNETERSGRITKRGSKIGRTTLVQCALVAIRYSNYLREFYERIKARRGSSKAIIATAKKLLGVIYHTLKNKWVFKDFPNFVIKNT

SEQ ID NO: 394790 - protein, 397 aa, unidentified
MREPQEIEDEEHEQTWERVAAVDVAKASGMVCTRVAHPSRPGRRLTKVWEVPATMGAISELGEHLAGLGVEKVTVESTSDYWRPFLYLLQAGGLDVQLVNAREVKNVPGRPKTDRLDAVWLAKLTERGMLRPSFVPPAEIRQLRDDTRLRADLTQERARHYQRLEKLLEDALIKVSSVASTLDGLSVRDMLEALIAGERDPRVLAGLARGKLKAKHGALAEALAGRFDDHHAELARMLLDQIDTLGGQIGTLTTRIQELIAAIPAAQGVDADGTTGPGAGSSPDAVVLPAVARLDEVTGIGPGTAQVVIAELGLDMGVFPTPGQLVSWARLSPRTLQSGAKTRGGKTGKGNPYLKGVLGEAAAAAAKTDTFLGERYRRLVKRRGKRKALVAVAAPSW

SEQ ID NO: 394791 - protein, 420 aa, unidentified
MSKQSKNSAATQSGLQLLPEEKIFVGCDVHAGKYAVAFWAAQRGEWVCEWVQNDDDQALIKRLDPLRTHVVRVVYEAGPTGFSLARALRAAGFPVEVIAASHTARPAVAPDKSDRRDARELARLASQPGLLHPVYIPSEQEEQDRQVWRIREQHKTLLARTKQRLKALLLCHGLAAPAGLKHWSKAGVEALRAMALPEALRWSVDELLLTLEEARKAVMRANRKLRQLAKSERYKERVERLRTVPGVGPIVSMGFLLELLNLERFEDRRALSRFLALCPKVGRSNEQSWSEGRPELGQAVLRSLLVEAAWRWRRGDPYARMLFERYLANTAMKQKAIVALAHKLAVILWHLAKGKLPYLPGLQNVPRAVAGLAPKKSPPARKAEAQRAAPPREQTAPAKPPRARGKGAEGKAAAEVAASV

SEQ ID NO: 394792 - protein, 343 aa, unidentified
MQAVTTVGLDIAKSVFQVHGVDAAGQVVIRRQLKRRYVLAFFEKLPACLVGIEACASSHHWSRELKTLGHTVRLMPPAYVKPYVKRQKNDTADAEAICEAVTRANMRFVATKTPVQQSCLTLHRTRHLFIRQQTAVINVIRAHLAEFGIVAPVGRKGIETLLDVVANPTDKRVPVIARACLAALGAQLRRLKEQILEFDRMIMAWHRSNEASKRLDAIPGVGPVLATALVASIADPKAFRSGRNFSAWIGLVPKQHSSGGKDRLGNISKQGDRYLRSLFMAGALAVIRYAKIHGTMHRPWLTALLARRPTKVAAIALANKMARMVWAMMTRGERYKDPIALAA

SEQ ID NO: 394793 - protein, 339 aa, unidentified
MKLYAAIDLHSNNSVLVILDENDKVIYEHRLPNELPCILAQLTPHKESIEAIAVESTYNWYWLVDGLMEAGYTVKLVNTVAVKTYDGLKYTGDEHDAKHLAHLLRLGILPTGHIYPKQERAVRDLLRKRAQLVRCRTAQILSIQNLVSRNRGKGISTDDIRRLDEEMITNICGGDATRILAIKSNLAVLRCLDEQIRGLERVVLAQAKLKPAFKKILTVTGIWNILGMTIMYEAGDMERFTKVGNFASYARCVSSSRWSNGKKKGEGNRKNGNKYLSWAFVEAAHFAVIHSERIRRFHQRKKAKTNGVVAVKAVAHKLARACYHVLKNQVPFDEGRAFA

SEQ ID NO: 394794 - protein, 415 aa, unidentified
MKTFAELTHFAGLDWAKDHHDVVIVDRQGLIVAQFTFPHSAAGWQQWRQCVSSYPALGVALETSSGPAVEQLLDSGVTVFPMNPRSAQSYRQRKAPSGTKTDQLDGWSFADGLRTDGQGWRPLAPLDPLVQELRLLCRDEVELTQQRTALVNQIQQALGEYYPAALEAFDDWTAPYTWEFVKAFPTPADLVKAGRRRWQNFLHAHKLYRPQTVDARLEAFAQATALTASPAITRAKSRLVLTLAATLLELEKHLEQYRAAIAQLFAEHPDHDLFGSLPGAGEKLAPRLLSEVGQDRHLFEDAQGLQCLAGTAPVRFQSGQVDRARIRWHCNKHLRYAVHLWADCSRKYCTWAQTYYQAHRAKGASHASALRRLGQRWLKILWTMWQEHKPYDPERHSRNQQKHGSWLLKLEPAKS

SEQ ID NO: 394795 - protein, 349 aa, unidentified
MRYFQPAAETRFYAGVDLHARTLFLVILDHTGQLRYARNLPANPQAFRKAIAPFRDGLVVGCECMHCWYWLADTCRDDHIPFLLGHAWGMKAVHGSKTKCDRKDAEAIARLLKGGNFPLAYAYPKERRGLRDLLRARLRLVRQRAELYGHIHTARRQLNLPPVSNDVKYKSKRAAITADIDDACVRRRVEADLSLLEPLDSTIRRLEKDIEVAARQHYATEMAVLQSTPGVGLVIALTILLEIDTLERFDTRQQFCSYARLCGARQESAGKTVGQGNAKQGNAWLKWAFSEAAVLSAQKNERIGKYLDKLSSRLGKAKALSALAHKLGRAFYHMLQKKEVFNIDKFLRH

SEQ ID NO: 394796 - protein, 343 aa, unidentified
MLTNNVIAIDLAKNVLQACHISVHGELLSNKPLSRQKMKEFLAKAKPSIVAIEGCCGCHYWGQLAEKHGHQVRIINPKKVKGYLEGHKTDHNDALAIANAAIQIGIKYSRPKSLEQQSMHSLESSRRFLSRSVVSLGQHIRGTILGYGVANPRGEKGLKASVQTALDGETSIPANVVSVLSMLWNQYKELKAQLIAFEKEKNALTRQIEPCQRLMEIEGVGETTAAMLYTTLGDGKRFKNGRQASAFVGLTPKQHSSGGKVFMIGIDKCGGVKELRSLLYLGAMSYVGRLPEKPKTQKDAWLRSIIERIGFKKACIALANKVVRTAWAMLRYETEYKPVLLTN

SEQ ID NO: 394797 - protein, 350 aa, unidentified
MDNHKFAAADVHAATTTFAVLDDSGKFVMETVVETKAESLLSVVKSISGAVHLTYEEGTHAAWLYDLLRPHVAELLVCDPRKNRNDSGNKSDRIDARQLARWLRSGDLSPVYHGQDSTRILKELVRGYENLVVDSVRTKNRLKAIYRSQGESTSGGNVYRLEKREEWLSKLRSSGLRSRAEWLYSQMESLDDLRGEAEKAVLREAKKHRPCSLVKSVPGIGPIRSATIVAHVATPFRFRTKRQFWSYCGLAVVTWGSSDWEIDVETLLQKRRPVATRGLNRNHNRYLKKVFKGAVNDARAFRPHLDSLVGSGMRESMARLTVARKIAATTLAIWKKGEKFVLSKAVIRSE

SEQ ID NO: 394798 - protein, 343 aa, unidentified
MQVVTTVGLDIAKSVFQVHGVDAAGQVVIRRQLKRRYVLPFFERLPPCLVGIEACASSHHWSRELKALGHTVRLLPPAYVKPYVKRQKNDAADAEAICEAVTRANMRFVATKTPEQQSGLTLHRTRHLFIRQQTAVINVIRAHLAEFGIVAPVGRKGIEELLNVVTDSSDKRVPVVARICLATLGAQLRRLREQILEFDRMIMAWHRSHEGSRRLDAIPGVGPVLATALVASVADPKAFRSGRNFSAWIGLVPKQHSSGGRDRLGNISKQGDRYLRSLFMAGALAVIRYARINGAKHRPWLTALLARRPTKIAAIALANKMARMVWVLMARGERYKEPVALAA

SEQ ID NO: 394799 - protein, 347 aa, unidentified
MNITRIGLDLAKNVLQVHGVDERGKALLRKRLKRGEVVAFFARLSPCLIGMEACGSAHHWARELAALGHTVRLMAPQFVKPYVKANKSDARDAEAICEAVGRPSMRFVPVKTLEQQSVLSLHRARQGFVAARTAQANQIRGLLSEFGIVIAKGIRQIEGRVPEILEEAENGLCGMNRALFQRLFEHFRQLDRQVKQLEEQIHAWHREQVDSRRLAGIPGIGPLTASALTAAIGNAREFAHARQLAAWLGLVPRQASSGGKDRLLGISKRGDVYLRTLLIHGARSVLRRTRACPDPAQGWLAQLVDRRNPNVAAVALANKNARIVWALLAHGREYQPGYVGARLPTAA

SEQ ID NO: 394800 - protein, 433 aa, unidentified
MRQVPRALVKFNSFTFTRKEVIIVSNSLLVGIDVSLNDNKVRILHPDGTSLSKFTVPNSVPGAKTLSQKITGVMEKNRFDDVVIGLESTSVYGDPLVYFLKQDASVNRFNTKIHVLNPTQVNKFKMFYPDLPKTDDIDAWVIAEHLRFGRINKEVYMDDRYKALQKLTRARFHTVQSLSREKNWFLNNLFLKFSSLTQEKIFSDRFGATSSSIIEEFFSVDEISYMPIEELVDFINKKGKGRFKNPDEIAKAVQKAARSSYRLPKTVTDSVNQVLAVSFLAIKAYKEQLKIFDKAIEEQFKLIPNTLMSVKGIGPVYAAGIVAEIGDIHRFKDQAALAKFAGIAWTKHQSGNFTAANTHLIKFGNRYLRYYIMEATNKVRMHDPEFKRFYDLKYSQTPKTPHKRALALTARKFVRLVYALLHDNRLYTPPKGE

SEQ ID NO: 394801 - protein, 410 aa, unidentified
MLKIVHPICCGIDVHKKFLVACIATTDDKGVTTYKSSRFSTFTNGLRKLSEWLCANSCTQVCMESTGKYWIPVYKATCKITLAHPKYVKAIRSKKTDKKDAKWIENLFKHDLVAGSFMPPLPIRQLRDLMRYRFKLTNFSSSEKNRIQNCLTVSNIQLANVVSDTFGKNTMAIIDHLLENPDDKDFDFVPLLHVSMLGKVDDIRLALDGMITSEQRQKMNIILQHYEDLGKCKFNLESLILSLIEPYARELSLVCTVPGIKNLFSAIAVISEIGVDMSVFPTAKHLCSWAGVTPQNNESAGKKHSVRISRAGVYIRPLLVQCANAVVKSDKHPEIKSRYLSIKKRRGHKRAIIAIARILLTAIYHILKKGEPYNSELYKKAETIPASHEITVEQAILIAQRDGYSIIKEQ

SEQ ID NO: 394802 - protein, 400 aa, unidentified
MLSIGIDVSKGKSTVCGMKPGGEIVYTPFEVQHTREGMSELVSLLRSSGEEVRAVLESTGSYHCPVVAALLENGIFVSVVNSLRMKRFCSQSIRKVKTDRIDAMQIALYGLAYWQELQPTRLPENTYRELQLLARQYYQMTSILIKAKVDFNAICDQVLPGMQELMNDHAGRHKLSEFVLRYRHTTHILEMGETRFRKDYCKWAEKKGYRNCERMAVLIFATAQNGIPVLPNAPSTQIVITEAIRVLHTVEASRDAILTQMQALAKTLPEYSLVREMPCIGDTLAPRLIAEIGDVRRFHSKRALIAYAGIDAPPYQSGKFCANNRHISKRGNRYLRKTGYEVMQSYVMHKPANDPIFTFIEKKRSEGKSGKLAMVAGLNKFLRVYYGKVTELYRSLPAIE

SEQ ID NO: 394803 - protein, 400 aa, unidentified
MNIIGIDVSQGESHATLITEEAEKVAFKFKHNKSGFQILNSYISSNTIIIFETTGVYSAQLTAYLKSKKVELYELNPLEAKLRMASLRRNKTDKNDSFKLALLGATQLTEIKNHCNKQSALPYASLRILSLRYKQLIKCRTRILNFLRSSLELTFPELNQIFKKAYAVLALQVFRMYCHPDFLAGLTLKEMTNRVYQFASRRIHKDVIQSYCAQVWLAAKDSYPAVPADSLEIEIISEYCDEIESYNKEIAYIQSKLIKTAVGLDDFKVISSIPGAGQLNSALLLGFTGDIARFDNYKQLNAFLGLDLNRYQSGKYGKGDTINRRGSSQGRAVETDMIRSMLRNQGKIQNHLVDYYYKLKKPPFNNHDKVALIACANHLNRTIINLVHTHQLYNYSKAIH

SEQ ID NO: 394804 - protein, 309 aa, unidentified
MQTADSPQPIGTVQVFIYDCSGLQALQTWLLGNSVPALQLHAVMEATGVYWERCAHFLHDLGCMVSVVNPAQIKFFAQSLLRRGKTDRMDADIIARYGAIMRPKAWKPPAAELEALKLLVHEREAIVKELTQAKNRRHSFKQRQEADPLVVQLTEARITFLTGQVEALNRELRARVEALPDLQRQVELLQSLPGFGFLVSLTVLVETAGFNAMETSRQLAAYAGVSPAPNQSGAMIKCGRISNIGNPRLRRIVYLASVAATRTQSKEKAFDQRLREQGRPGKVAIIALARKLLCVGFAVVQSGCPYDPT

SEQ ID NO: 394805 - protein, 407 aa, unidentified
MKYFKDIDNFVKDKMVYCGIDVHQSRWNLCYFCDGEVVEKLRIHGESDLLNKHTQRLFGQAKSVKFVYEAGFSGSWLHRRLTDLGYECIITPPSRIPTTNDKVKTDKKDAEKLARYLAGGLLKKVFVLPPSVEADRQLIRLRAGYKIKMTRVKNQMTSLLHLHDLKWNPENGCRWTKRFVSWLEEVEFPEHNLRIVLNQYLIEYRSLRDQIAQITKHIRKLSRQNEYQKYFKILISCKGIGLITAITFLLELGDVLRFPSTVQFGGFLGLTPSQHTSGDKIRLGHITHEGNAHIRRVLIESAWTVIRYDPFLREKYDRIKSRGTNGKKAIVAVARSLAIRLRQCLIHPRCKNLILDLTTRAYKEGSNEPDDYGDVGHMTDALGYIVHRRFPVKFRREGIPKVHLWAS

SEQ ID NO: 394806 - protein, 388 aa, unidentified
MFFLGIDIGKNTHVASLLDEKAKIIFKAYSFANTLDAAEALLVKLEPYKDSLEIGMEATGHYWLSLYSFLAEHKFIVHVLNPIQTDGWRKGIEIRKRKTDVIDSVLIADLIRYGNFLETSLADEDILSLRNLSRFRVYLVNSVSDLKRKAIAVLDQIFPEYASVFSNVFGQTSKELLKSLSLPSDYENLSATKIEEVLSNITQKKKASKTISTLSDKASRSFGISFCKDSFAFQLKLIIEQICFIEEQIASVELEIDQLMSKLGTNIKTIPGVGSVIGAVILGEIGDIERFDNPSKLVAYAGLDASVSQSGEYEVSSGKLSKRGSPYLRKALYMAAQRAEFCDPVFHAYYEKKRNEGKHHLVATNAVARKLCHTIYAILKKDVPYEVQ

SEQ ID NO: 394807 - protein, 343 aa, unidentified
MSKISIVGLDLAKNVFQVHGVDASGGVVLRRQLRRGAVEKFFAQLPPCTVGVEACGSAHHWARVIGHYGHQVRLMPPAYVKPYVKRNKNDGRDAEAICEAVSRPTMRFVPVKSVEQQATMAVHTTRALLVRQRTMVANSLRAALSELGIVAAQGIKGLRELMAKLEAPHEEVPEIMRGALLLLAKHWQALEADERVLEQQIAKAARSDREARRLMEVPCVGPIIASTVLAKVPDATVFRSGRNFAAWIGLTGRDHGTGGKHCPGRISKQGDRMLRALLISGASAYLRHQRTRGVSDPWLRDLLARRPYKVVMVALAAKTARIIWAMLVKGEPYRDRASAPAAA

SEQ ID NO: 394808 - protein, 333 aa, unidentified
MGFEPGPSKEGSWMMPQNNLVVAGIDVAKDKVDVCIRSLSLRRTFPSTAEGRRELASWLRRKKVSKAVMEASGGYEREWAKALRDVRIEVRIVDPKRVRSFARSAGRLAKNDTIDAEMIAWFAETFGEVPGQAYDAAREKLSQIVNARQGLLDLQTKLQNRGEHAGPEPVQKMHARLLKKIAAEVAKLEAVIAAMIKATPHFAGLAEIIESVPGLAGTTSAGLIARMPELGQVSNKVAAALLGAAPYDDDSGRRRGERHIKGGRRKVRNLFYMACLGAATQHNPVLKAFYRRLIAKGKEPKVALVACMRKLIVILNTMIARHQKWDANLHVLG

SEQ ID NO: 394809 - protein, 354 aa, unidentified
MMIIGCDYHPAFQQIAFVDTDTGELRERRLQHREEAEKFYRDLATQGIKVRLGMEASGQARWFERLLAELNFELWIGDAAEIRTKRVRKQKTDRQDAQLILKLILKDDFPQIWVPSWENRDLRQLLWHRHRMVQARTRIMNQLQAVALNEGLRCKKRLWRDAGREQLEAFRLAPWASRRRRDLLELLDRLNPTIADLTQTIEQEAEKCPEARRLRTHPGVGSLTALAFVLIIGKAERFQCGKQIASYLGLVPLEESSGNRRRLGHITKQGNALLRFLLVEAAQVSARSIPEWRHKYFHLAIRRGRKIAKVAMARRLAVQMFWMMRKGWDYEQVRKFGSHAGQPGNRDGVHSNTE

SEQ ID NO: 394810 - protein, 332 aa, unidentified
MSVYVGIDVHRKRSQVAVINQDGEVLANRNVPNGVEPILRVIGDLPSGTPAAFEAAFGWGWLVELLEDYGFEPHLVHPLQCKAIASARLKNDKVDAAILAQLLRADLLPEAWIAPPQVRQLRALLRHRIQLVRLRTLLRNRIHAVLAGHGHDRPAGYWSGPGRDWLASLDLPAVSAEVIADALALIDALESVTGRLDAEIRGHARSDPRVTVLTALPGVGPFTALVLLAEIGDITRFGSARKLAAWAGLTPTVRGSDRMVRHGHISEQGSVWVRWILCEAAQTAKRSPEFAARYQAIARRRGKKIATTAIARKLLTRACHLLTDASSDGAPR

SEQ ID NO: 394811 - protein, 332 aa, unidentified
MTSTWVGIDMGKRSFTAWVAGSRRPLATFSNTQEGWERLATSLDPAQAEAAVRLVVEPTGGYEAALVRFALERGFGVSLVNPARVREWARSEGRRAKTDRQDARMLADYGQDKEPPAWRAQAEEMSELDSLLRRRVDLEGMLRQEKNRKEALEHRPGVARGVPKSVDRLIETLEGELGQIEGAIKELQAKHTLLESQAELLDSVPGVGQKTVLPLLVLLDRWQVLTQGHGDAKGLVAYVGLDPKPFESGSSVHKPAAISRMGDRVLRRQLVMAALGGTRGDNPLRAFYQGLVARGKPKMLALVAAARKMLVWAWAVYRHQSAFRTDLHPLKA

SEQ ID NO: 394812 - protein, 408 aa, unidentified
MQGAHPVCCGIDVHKDTLTACLRRVDANGQVSKERREFATTYTSLLTLSDWLVEQHCPIVAMESTGVYWKPVYHVLVGTVEVYIGNAHELRSRPGKKTDKRDAAWLAELFAHGLIQPSFVPPPAIGALRDVTRTRVALVQTRSQSKNRVHKLLEDTNLKLGSVVSDLFGVTGRRMLAALVAGARDPQVLASLALGALKHKRPQVELALTGQFTAHHGTLLGLLLELIELLDRQIATLDQPIGELMMPLHAQLAQLDSIPGVDIIAARDILAEIGTDMSRFGDAARLASWAGVCPGNHESAGKRYRGKTRKGNRYLRRVLGPCAWGARKTPTFLGRTFRRLEVRIGKKKAALAIAHKILVIVYHLLATGSCYEEARYDHYHPKQEARERQRAIKALERLGYTVTVERAA

SEQ ID NO: 394813 - protein, 366 aa, unidentified
MSKSSTAVSNRVEIFKEDKLTIGVDLGDRFSHYCVLNGAGEVIWEDRLPTTPKGIDEVFSKIPANRVALETGTHSPWVSRQLARLGHEVIVAHARNVRLIGDSSRKDDRLDARTLARLARIDPGLLGPVRHRSAKAQIHLTVIRARAGLVSARTALVNAARGLTKSYGERLQKCGTQQMNRESAKGLSQELRDALDPLLAEIESLNARIAEYDRRIEQIAKEVYPQVALLKQVKGVGTLIALTYVLTLDDPHRFRRSRDAGCFVGLRPGRRNSGMSQPQLHISKEGDRHLRTMLVQGAHYILGPFGEDSDLRRWGLRLAERGGKNAKKRAVVAVARKLAVLLHKLWVSGEVYEPLRNNHKVVSRVA

SEQ ID NO: 394814 - protein, 427 aa, unidentified
MSKIETGGHEPEFAVFVGIDWGDQKHVWCLQSRDSTKRETGELKHTPEAVEAWVAQLCQRFGNRPIAVALEQSRGSLVFMLAKYEPLHLFPVPSTMSASMRKALYPSGSKDDPRDADVLLDLLLQHRNKLRRLSPDTEATRRIQNLVEERRKLVDEETEHTNRLTSHLKIYFPQMLNWFEHLDTELVCALLERWPTLEELQRVPPAKLRTFFAKHHCRNQELIERRILALRQSIPAIHDRAVIEAKSAAVKVIVQLTRILLEGIADLDERIEEAAATHPDFFIFKSLPGAGPALAPRLLAAFGSQRERYRNAGEVQTYAGIAPVMEKSGKKQWIHFRWACPKFLRQSFHEWASHSIGYSAWARAYYQRQRSKGVDHHGAVRALAFKWIRILFRCWKERAAYDESKYLAALTRRGSPLVPVVAIANAL

SEQ ID NO: 394815 - protein, 337 aa, unidentified
MKYSGIDLHSNNSVVSVIDETDRVVAEKRLPNDLTKIVALLAPWQAELAGVVVESTFNWYWLVDGLQAAGFTVHLAHTTAIKKYDGLKHSGDETDARFLAHLLRLDILPTGTILPPEHRAVRDLARKRMQLVRSRTSHILAVENITARQYGNRITSNQVKRLDKESINQMHLPEDVALAVRANVAVIATLSSQIDVVEKRLHEKVASNSDHALLRTVPGIGQTLATVIVLEVGPIQRFANPGNFASYARCVDSQRMSNGKKKGEGNTKNGNPYLSWAFVEAANFALRYCDQARRFYERKKARTNPVVARKALAHKLARACFHILKEQKPFDVTRCFA

SEQ ID NO: 394816 - protein, 318 aa, unidentified
MENISQWVGIDISKATLDVYLRPLGKAMKVANTKEDISKLVETLKSYTLNLIVLEATGGWETELVIQLQEADLAVALINPRQGRDFAKATGKLAKTDAIDAQILAHFGEAMQPQILAVESEESRQLGDLISRRRQLVEMRTAEKNRRERARGKALVDIEAHLEYLDNCLEKLNQEIEELTQANQQWLEKVNLLKTVPGIGQVISTTLVSDLPELGQLTAKQISRLVGVAPINPDSGQHKGKRMIQGGRAQIRATLYMGAVVAMRHNPVIKTFYERLVGRGKSKKLALTACVRKILVILNAMVRQNQPWQLADNLPPCS

SEQ ID NO: 394817 - protein, 427 aa, unidentified
MKKIKIDYLSTLFVGIDIGSRTNVISALNFDQDFLIKMVPVANAQGGAEQMEEMVAEVLSQHHEFKTVFIGLESTGFYGVHIANYLSTSEKLAPFSTKVYCLNPNEVKQYKKSFNSLDKNDGIDSFVIADFARVGRIHTEPWRGAQYLALQRLTRHRLHITECIAREKTYMLNNIFLKFSEFAMLNKDEHPFSDKYGATAEAVLTDYLSTEDIVDASVDELVAFISSKSRGRIADPEQTTYLLQKAAQDSCRLDQCLYEPLTVSIGCSFNCISAFEKELKAINAAIQRAVKGLNPTEYQILTSVPGIGPVYASGILAEIGTIKCFKSNDALAKYCGIVWRENQSGEFEAEDTPMNKAGNRYLRYYMIEAAGSVMLHCPEYKAFYDKKFAEVRTHQHKRALALTSRKLIRMLFGLLANGKLYSVEKSR

SEQ ID NO: 394818 - protein, 319 aa, unidentified
MQRNFVGVDVSQDHLDAYVRPAGLRRRFANTAAGIADFLAWVRPHAAERILFESTGPYQKPAVGALLAEGLPAVVVNARQVRDFARAMNYLAKTDRLDAEAIAHFAEVARTTVRPLESQEIRDLRELYDRRGQLVRMLAAEKNQRHSATAAQSSPRVLRSIDKHIDYLEGQIRDLEGRMDRIIEGSAAFRARDEILQTITGIGPQVSRTLLAYLPELGRYSRQTIAALVGLAPFNDDSGTHTGPRHIRGGRSKVRVGLYQAAVAAIRHCPHMKAFYAALKERGKASRLALIAVARKLLVLANALIRDMVPYRAPANSVC

SEQ ID NO: 394819 - protein, 370 aa, unidentified
MKEHSIFVGMDVHKNSIDIAIAEKGREGQLRHFGTIEGSLAALDKVVRKLVSNGQRPCFAYEAGPCGYSIYRHLTAKGFDCAVAAPSLVPRASGNRIKNDRRDSLMLARLHRAGELTAVCVPHDEDEALRDLTRAREDAKIDEKKAKQRLLAFLLRSGNRYSGRAPWSQAHRRWLADLKMPHRCQQIVLQEYIEALSHCSLRLQRLTDQIRQLVPQWRLFPVVQALQSLRGVSLIVSATTVAEIGDFKRFQNPQQLMSYLGLVPSEHSSGEKNRRGSITKAGNTHVRRMLVEAAWAYRFRARISRVLLQRQEGLPQAIRDMAWKAQVRLCARYRRLWAKGKIKAVVTTAIARELCGFIWAIATAVEGPTA

SEQ ID NO: 394820 - protein, 377 aa, unidentified
MATVRFVGLDVHAATIAVAVAERHGEVRSLGVIPHTPDAVRRLIRQLGPPSTLRLCYEAGPTGYGLYWQLIALGAQCDVVAPTLVPVKAGDRVKTDRRDAEKLARCYRAGDLTPVWVPDAAHEALRDLVRAREAAKQDQLRARHRLAKFLLRHGRRPPQRMAPWTQRHLAWITHQVHFAQAAQEATLLDYLHEVEHAAARVARLERAIDAAILEAPPQMRAVVEALQALRGIATISAVTIVAEVGALSRFARARQLMGYSGLGAREHSSGARSRRGAITKTGNAHLRRIVVEAAWAYRHRPAVGKALRARQAALSPAVTALAWKAQHRLCGRYRRLLGKGKCQPQVVTAVGRELLGFIWAIGRAAEADGAPRPAQAA

SEQ ID NO: 394821 - protein, 321 aa, unidentified
MSKFIGIDISKQTFDVCFFDGEHQKFDNNLKGFKKLLRKLVADNKIVMEASGPYYVKLASFLHQEKISVFVVNPLKVKRFGQMNFNRAKTDKKDAQVIRDFAIKMNDELREWKPESKHTTELKQLNTSVELLNKQIHQIKLQMESFEDSGHIAEKIKKGYKKIIKNLQREKENLEEEMERTAKCEYAQTVASLTSIPGIGIKTATMLIAVTDDFQKFDHYKKLIAYVGFSPRIYQSGTSIKGKGHICKMGKSQIRKLLYMCSWTAKRYNKACKVMYDRLRQRGKPERVIKIAIANKLLKTCFAIAKSKGKYQENYIPEVCF

SEQ ID NO: 394822 - protein, 366 aa, unidentified
MEKGITVVGLDAHKVAINVCVLLPGGAAPVVWECPNEKAAVRRMVRKVQHQAPGEVRMCYEAGPCGYALQRWIRDCGASCVVVAPSLIPRKPGDRIKTDRRDARKLAELFRAGLLTEVHPPTEEDEAIRDLCRAREDAHEDMVRARHRVSKFALRRGWSWQGGKRAWSQGHRLWLRSLRFEHREDQVVLDDYLLALEQVEARLKALDDQIEQISQEERFAPVVGRLRAFRGIDTLTAMTLIAELHDFMRFDSARGLMSFLGLVPSEYSSGGKEHRGQITKAGNGHVRRLLIEAAWHYRHRPSVASLKKRRDGVPAEVVAIADKAMTRLHRRFNRFLERGKARPKVAVAIARELTGFVWAAMRPRTA

SEQ ID NO: 394823 - protein, 360 aa, unidentified
MKIVGCDLHAKQQTIAMVDSETGEFTEKTLAHEGNKVREFYAGLEGPVVVGIEATGAMQWFLQLLEELGIECRVGHPAKIRAKETRKQKHDRRDARLELELLMEDRFPTIWMPSSEQRDLRTLLRDRHQWVKVRTRVQNTLQAIALNHALRHGHALWSPVGQKALQALALSRYSSQRRDELLHLYVQLQKRIKELDRQVEEEAKRRPQGLRLLTHPGVGPITALATDVFLGDAHRFATGNQVASYIGMIPCEHSSGKRQRLGKLSKQGNALLRYLWTEAVMHAAAKDPELKRFYRRKLIQKGMGKARIAAARKLGIRLWIMMRDQIDYEEFCRRGKLRQSGEAHAGMPDFNSGPASAVTG

SEQ ID NO: 394824 - protein, 311 aa, unidentified
MEGESWGIIAKLSSESIRRNRNAVAIAEGGRGGEVRYLGEFPATEAATRKLVAKLTTKYRHLTFCYEAGPTGYGLYRLITSLDHECQVVAPSLTPKKPGDHVKTNRRDGVSLARLARAGELTVVWVPDERHEAMRDLSRSRQAAKKDLQGKRQQISSLMLRLGRYYPGKKTWGPAHMKWLMSQKLEYREQRMVLEELLQGIRQEGERVERLEQAIREAVPEWSLAEVVTALQAMRGIDLIAAVVILAEIGDLSRFQNPRELMGYLGLVPSESSTGDKVKRGGITKAGNSRARRILVEAARSYRYPSPLHDA

SEQ ID NO: 394825 - protein, 345 aa, unidentified
MTIVEARAITGGVDTHADVHVAAALDPIGGLLGVQEFPATAGGYARLLGWLGGFGTVALVGIEGTGSYGAGLARHITAAGVRVVEVDRSDRQDRRRQGKSDPLDAVSAARAAQSGRARGAPKGRDGAVEAIRALMVARRSAAGERTRTINQARALILTGPDDLRARFAKHTAAALIAGLASLRPRPGDVAGQATRVALRELGRRAVFLDGQLERLDELIIPLVSARAPGLLALYGIGPHTAALLLIAAGDHPGRLRSEAAWAHLCGAAPISASSGKVTRYRLNSGGDRQANHALWRIAFTRMGSDPATRAYAERRTAEGKSKAEIIRCLKRYVAREVYPYLRPAS

SEQ ID NO: 394826 - protein, 380 aa, unidentified
MKKLNIGIDAHALTNVIGLAFDDMEDPVLYGKVSADLNCTVDAIRRILKKYDLKKEDVKICYEAGPTGFVLARRLIKLGFDCIVVAPSLIAKKPGEKKKTDRRDARKLANYLRANDLTAVHIPDVDDEVIRDVCRGRTDASQELSRTKKQLKSFLLRNGYKYKGKANWSNAHMRYLRELVMAHPSQKLVLEEYIQRIDALEEQIKRIEDQMATLLETWQRKPLVAALMGFRGFKLVAAMVTVSEIGYFSRFKHPKQLMAYLGLIPSEASSGETRRMGSITKCGNGHARWMLVECAGDYKLPPKISKALSVRQEGLNRDVLALSWRTQNRLSKRWFKLMIKNKNVNKIRTAVARELVSFIWELALLIEGQQTPCASNAVEA

SEQ ID NO: 394827 - protein, 332 aa, unidentified
MEQISRIGMDTSKHIFQLHGVNTAEEPVLRKKLRRKEMFAFLEQLAPTVIAIEACGASHHCARLLQSFGHSVKLIAPQLVKPYLKRGKNDAADAEALCEAMSRPTMRFVPVKTAEQQAALMLVGVRDRLIRNRTQLSNAIRGYAGEFGLTTAKGKAHLDPLLERIQADESLPALARELFAVQGQEYAQLQAQIDQVDARLIAWHRADECSRRLAKIPGVGPIGAVLLTMKTPEPELFRSGRQFAAWIGLTPKDHSTAGKVRLGGITRAGDQGLRSVLVVGATTVIQHAQRGGRPSPWLTELLKRKPPKLAAVALANKACPGEGRGRRASPGN

SEQ ID NO: 394828 - protein, 419 aa, unidentified
MNKLFVGMDVSLNDVKVHILDQEGNDASSRFSVENNPHGCDVIVSRILECCNKYNIQKVFIGLESTSVYGWHLQYYLADHSALKPYQPSITTFNANIINAFKKSLGNLPKNDWIDAFAIAEKLRFGRLPKSCSVDFRYLALQRLTRHRFHIVNSIVREKNYFLSNLFLKFSGLCQNKVFSNNFGATATEIFNEFFTLDDIAARPLDELAGFLVDKSKDRFDDPEATAKLLQEAVHKSYRINATVDDSLNFVIKSCFDNLQSLEKQKKAVEKAIINEVKGFNNEFLCLTSVKGIGPTIAAGLISEIGGISRFDNDNALAKFSGLYWSEYQSADFKAEDTYLKRTGNEYLRYYFIQAADQLRKYLPEFSQYYARKFKESKTHKHKRALVLTARKTVRLVFALLREEKLYKSPIMKGDDCIS

SEQ ID NO: 394829 - protein, 342 aa, unidentified
MTDTMIGVELAKNVFQLHGASMTGQLKFRKKLTRPQFRQFMANQPPAVVVLEACGSASYWARELIKLGHEVRLIAPQYVRPFVKRQKNDAADAEAIVVAAQRPEMRFVQPKSEGQQACAVLFRARERLLHQRTELVNALRSVLYEFGHAVPKGLAHLKRMAAILEEPNSDLPALVREECQDLIEQIAEKTARIEAKTKKARGLSLLTDTARRLQTMPGVGPQTALAISGFAPPMESFKCGRDFAAWLGLVPRQYSSGGKERLGRVSKAGQADIRALLIIGAMSRLTWLARKSIPEASWLARMLARKPLMLVAIALANKMARAIWAMLTKKEDYRDLARAVAA

SEQ ID NO: 394830 - protein, 408 aa, unidentified
MERPAGLDVHNASVMACVRVPGSGRRRVEHVAEFRTTVQGLLALRDWLEAHGVDQVAMEATGVYWKPVWALLEDRFSCLLVNARHVKQVPGRKTDVQDAQWLCRLLEAGLLRASLVPPKPVRTLRNLTRYRKAQIRDRQREMNRLHKVLQDTGIKLDLVATDLMGKSGRAMLDALIAGTTDPAVLADLARGLLRKKLPALREALEGRFDSDHAVLVGRILAHIDYLDEAVDELSVAIEKQLGPLAPAVELLCTIPGVGRRAAEVIIAETGGDMTAFPTAKHLVSWAGMCPGNDESAGKRRSGKTRKGSKWLSQTLVECAKSANRGKNTYLAAQYARLRARRGANKATIAVCHSILTAVWHMLRTGETYTDPGADFFARRDPERTRKRLVDQLQRLGYTVTLQESAPAT

SEQ ID NO: 394831 - protein, 403 aa, unidentified
MQHVIAFDVSMGKSYMVIYNAQKQCIFESEINHSKPDFEELRKRIDQLMNENKKSPHIVFEATGVYSRQLERFMQDNKFEYFLLNPLEAKLQCDSLRIHKTDRSDAHQLALTHFTASRREKTGTDNLFYQLKSLSRFYSELDDELSLIRSRMHKVIQLTFPELEQIFTTKSDLFLNFVQLFPHPDFVQNLSKTVMKNRIRKNTNKNISISIAEKKAMEVLAAARYSYPAVRQDDVLCEQLKSYAKRYQELLHQKEQCITKMVRLAESRTEYPIILSFPGIGPNTAIRLLAEIGDITRFENNKQLNAFAGIDIRRFQSGKTFFKDKINKRGNKHLRKLLFLIIQNMIKLRRYGQNHLVEYYDKLKTQPYNKCHKVASIACVNKLLKLLFYLITHNIHYDYRLTA

SEQ ID NO: 394832 - protein, 368 aa, unidentified
MERKSSKLFVGMDVHKESIDLATGEAQGEVRHYGAIGGDLAALARVVRKLESQGRALVFVYEAGPCGFGIYRWLRSRGHECWVVAPSMTPRQASDRIKTDRRDCLKLCRLARAGELSPVYVPDAADEAMRDLVRTREDAVVMQRQARQRLAALLLRNDVRYNGKTAWTPAHRRWIAEIKLPHAAQHIAFEEYVQAVEEAGHRVARLTQAIEAQRAHWRWTPVAQALAAFRGIQAIHGTRLVAELGDLRRFARPRALMGYLGMVPSENSSGERRRQGSITKAGNSSAWRALIEAAWAYRYPARVSVGIARRQSDLPKPVTDLAWKAQLRLCTRFRRLCARGLHRNKIVVAVARELAGFVWALGQQVAPR

SEQ ID NO: 394833 - protein, 288 aa, unidentified
MKRILRQVAGIDVAQKELVVSLGCKNENYSDEIYAYKVFPNSDKGFVELVNWVKKMSNPGILIQFVMEATGVYHERFAFFLKDNDHQVSVVLPNLISNFSRTLDVKTVNDKTSSAAIAKFGLSRILDQWKRPDPVYKKLKQLSRELDQIITERTVIKNQLHAETAEAEPNKSSLKRSEKHIAFLNKFHAEIKAEIAILIKSDDTVKQSVSLISTIPGIGKLTAAIVLAETNGFEMIRNKSQLISYGGLDVVEKQSGTSIRGKTRISKRGNRYLRKALHMPSLSAVRYN

SEQ ID NO: 394834 - protein, 388 aa, unidentified
MSHRFDASRSLMVLEQDSTIVAVIEMSQSKWLVSAVVPGIERQPLKKLDPDEEALRKLLHRWRKEAGEAGRKIKRIVVAYEAGRDGFWLARWLQARDIEAYVIHPASVAVSREHRRAKTDRLDTELLMRAFLGWLRGEKRHCSMVAIPTAEEEDAKRPHRERGNLVTEQTRIVNQVRAILARFGIRTFRPTLRKAAEKLDGLRTAEDTPLLENTRAELGRHLARLRVVREQIRAIEHERLRKFAAAAGDKGPHAMSRLIARVCGVGVETADMLVNEVLSRNLRDRRAVARYAGLTGSPDESGSRRRERGLARAGNARVRCGMIQLAWRFLRFQKNSALAQWFEARTVDGRGSTRKTMIVALARKLLIALWHLVTTGEMPQGVVLRPAS

SEQ ID NO: 394835 - protein, 344 aa, unidentified
MLYLGVDVHKSRSYVTAMTKEGQVKFRGVLLNEKKEFEKMLQDLREECCAVIETTYCWGVVYDILDSLGVKTKLAHAQKLRAIAESQIKNDVRDSEMLAHLLRTNLIPEVYIPPKEVRLKKNILRERQFLVKTRIALKNRIHNLLTRNHITITGCSDIFGKKGREYMRNIEITKSEKMLLENEVTLLDEIDNRIKNFEKIAKDMTGKNRYVELIKTLPGCGEILSKVIGYEISDINRFRNKKKFEAYCGLVPSEYSSNKIIYRGRVIKQANKYLKWGLVEASWAAIRSSIYFKSIYLNIKYRRGANKAIVGVARHMAGIIYKMLKENRTYEERIYRREKIIAAL

SEQ ID NO: 394836 - protein, 322 aa, unidentified
MSGSILGVDIAKKKFEVALLINGKLKHKVFTNDEEGFEELELWLKKQGANHVHVCLEASSTYGDELAAYMHDAGHSVSIVNPARIKGFAQSELMRTKNDKVDAGLIARFCLAMHPEPWTPAPPEMRQLQSLVRRVDALINMRTQELHRLGTAHKAIEHSIREHVAYLDTQIDVLKRQIADLIKNDPDLKAKKDLLKSIPGIGEATIAAILAELHMFERYDSVGKVVAFIGLAPRQFISGSSIKGKPRLSKVGHARLRKALYMPALVSIQCNPIIQVFYHRLKENGKNGKVVVCAIMRKLVHLIFGILKSGRPFDPNYTTNKA

SEQ ID NO: 394837 - protein, 428 aa, unidentified
MNEEDRTRLEEFRQFRKEVRGSTEYLIVGIDVAKDKHYAFFGTATGKTLFRRLVFENNLEGFRKLLVQAEAMKVQEGLKKVVFGMEPTANYHKPLGEHLIRCGQRVVLVSGVAAHENRKTLDGRWDTNDTRDAANVADLVSQGKCLFYEFPVGVLQGLRDLLSLKRRWKRLEHGMRVRIRNHLVAKYFPELDRYYEQSERVSLAIVRWCLDPSVIAGLEYEVFAQRVAPGKRRLCQESRLQAIWKLAVDSIGCEVGLAVEFEAQVMVEGLRQIREVIQATEEKIEEICSQFPEYSYLRSIPGFGPDVSAKVLGAIGDPFRFQNGKQVLKLAGLDLNAERSGKSSDFARPVISRKGKADLRYGLYQAALIASIRDRHFIVYFTNQLRGREKEPGIKTKMRVKLAAKLLIIAWTLMKKREPFNPDYLKVE

SEQ ID NO: 394838 - protein, 340 aa, unidentified
MPIVGAFDVHRSQLTFDYLDLETGEISRGRVAPADRPHLREWLSRFEDRDDVTFALEGCTGWRYVTEELRRAGVDVHLAEPADTAALRGKKGRAKTDRADAAHLRTHLQAGDLPESWIPPEHVLEARVLVRLYKDLLDERGAWTQRVHATLFHEGVPVPGSLTIAANREKLDVAELSVASRLAVDAGLRQIDRLSGEMEPLRRTFDHLSRHQPGARALRTTHYGIGPVTSVAIWAEMGDCRRFANSDDAVRHTGLDVTVFSSADKRTKGHLARQGPSVLRWALYESAMCASRASSPDHAYYLELKERRDGQLAAITIARKLARRCFHTLAELGEEALSAA

SEQ ID NO: 394839 - protein, 367 aa, unidentified
MKKHTTVKQSLSSTDLWTCTTVAVDLAKQVFQVAGEDALGQVLYEERIKSREAFHAFLCKLPPKVVVLVETGPGAQAWARQLQAQGNLARILPAQLVAKHRSGAKNDRNDALAILRAGRDSRIAAVPIKSATALAMQALHRARQGYVRRRTAMSNQMRGLLMEHGITLAQGDVAISQTLPRVLEDATQPLPDLLRELIDELLGEWRQLGERINVLTGRLESAANEDKTAKRLMTVRGIGPIIATALLAKETEPERFANARQFAAYFGLVPDQDSSGSKVRLGRMCKRGDSYVRSLMVQGAHAVLRQLRPDSEQPDDRRLQRWLSRLGRKEAAVRLANRNLRIVWVLLQNDQTYRRQPADGRQAAPSH

SEQ ID NO: 394840 - protein, 347 aa, unidentified
MGNITQVGIDLAKVVFQVHGVDARGKEVLRKQLKRTQVMTFFAQLPACLIGMEACGSAHFWARKLTELGHTVKLIAPQFVKPYVKTNKNDAADAEAICEAVGRPNMRFVPIKNSEQQALLALHGARQGFVAARTAQANQIRGFLAEFGLVMPVGIRSLERKLPEFLEDGENGLSGASRALFARLFEHYRALDRQVDELEREIHAWHREDTASHRLQAIPGIGPITASALVASVGDAKVFHNGRQFAAWLGLVPRQFYTGGKTNLLGISKRGDVYLRTLLIHGARSVLHSLKRCPDRAEGWLARLAARRNPNIAAVALANKNARTVWALLAHGRSYQAGYRTVHGLAA

SEQ ID NO: 394841 - protein, 365 aa, unidentified
MEQITRSVVAGEARIARVGADLAKRVIQVHAVDGAEREVCRRSLPREKFLPWCARLPVGCVVAMEVSSGAHHFARRLQALGLQPRLISAQLVEPYRSQGATGKNDANDAAAICEAASRPTMRFVPVKSVEQQSMLCVHRLREGLKTERTACINRIRGLLAEFGIVHAQGSEALQRVLTELIEDASNEMNALARRVIQHAQAQWRELDAHIGWCDERIAEHARDDPAVRRGAALMGIGQIGASAAVATVDDFGQFKNGAQFGAWCGIVPSQRSSGGKTQLGGITRRGDAYLRSLLVQGAKSAVFTAHRRDDPISRWALALRERSGWQVAAVALANKNARILWAVMTKAERYNPHHASVKPTAAMTR

SEQ ID NO: 394842 - protein, 338 aa, unidentified
MSLYGGIDLHANNNYTMVTSPEDEVVLGQRLPNDLVTILRALEPYREELAGIAVESTFNWYWLVDGLREAGYTVHLVNTLAAKQYEGLKYTDDRSDARWLAKMLHFGILPTGWICPPEERAVRDLLRKRVQLVRQRVACRLSLRNILERTTARRLSGNALERLSEEDLSGWIEDEHVRLSMTTTVAVIETLNEQIVRLEGVVLKEARQGQAFSVLTTIPGVGPILASTIQCETGDLDRFAGVGHYASYCRLVRSERLSNGRRKGQGLRKNGNAYLSWAYHEAAHFAVRYQPSARRWHEKKRAKTCALVAIRALAHKLARAAYFMMRDQVPYESARLFR

SEQ ID NO: 394843 - protein, 405 aa, unidentified
MLETIVKKVAGLDVHKMVIVATVLLTQEDGETRKETRKFGTFRKHRRQLARWLKRSGIELVVMESTGIFWKSIFETLETAGIKTYVVNARHVKNVPGRKTDVMDSEWLATRARAGLLKPSFIPPKDLRELRLIGRHRMKLHGMLAGEKNRLHKILDDAGIRLGGVVSDINGVSAKEMVTGLIENKPVEELVLCARGRLKAKAEELHDSLSESISERHKFLLQKIQNHIQHLEQEIWEMDDYLFAAMTPYQEQWGIMQTLPGVDKFSAAMLIIEIGTDMEQFGSSGQLASWAGMCPGNNESAGKRKSGRARKGNRSVRRVLCEVANAARKTNSQFKGKYQGLVIRRGHKRTIIAVGHKILRVIYSMLKNNQPYWDPEIDYEALTVKRNAPRWLRALTKYGYLPAGA

SEQ ID NO: 394844 - protein, 386 aa, unidentified
MNVTTIGFDIAKGVIQVHGVDAAGAVTLRKRMSRAAALKFFGGLKPCVIGMEACGGAHFWARELAALGHTVRLISPLYVKPYVKRSKTDAADAAAVCEAVSRPHMRFVPIKSRDDQALAQAYKTRGLLVAQRTALANAVRAHLTEFGIVAPLGPAGAARLIALVRADEEPLPELARRTLLELPDMIETTQARIAAFVARLRKLAATDKASRRLMKIPGVGPAAAGTLRALAGDVTRFRTGRDFAAWLGLTPRQNSSGAKVRIGAISKAGNRELRTLLVMGQMAVSRYAVANPAKASPWLAAMIKRRPPLVVAVAIQDGARHLGHAGARRKLPAAFGLDRGGMTSRQFHGAKALRKRGKCSEDDDGPVARRGEAKPAKRMARHSAFR

SEQ ID NO: 394845 - protein, 308 aa, unidentified
MKLLAIDLGKFKSVACLYRSDDDVTYRTVETRPAVIHDLLVEVTPDRLVVEVGTVTGWVHDLAKALGIDVQVANPNTEGWRWRRVKRKTDRDDALKLARLSTADQLPTVWMPEPRVRQWRALINYRHVLVSRRTAIRNTIRSVLDTQGERPPTGAKAWTEAGLTILNEMARPIENCSPHELWRGQLHTELILLAELARQLRSVEDKLDAVAKTDTRTARLRTIPGVGPRLSEAVVAWSVDPKRFRNARAVGSYVGLVPRRLQSGTYDRSGGVTKQGPGLLRKLLVEVAWIMRQHNPHAEALFRKLSKG

SEQ ID NO: 394846 - protein, 347 aa, unidentified
MLADELDFVVGVDPHRDSHALAVVQVVSGAVLFEAAVSASSDGYANALKLVDQHAKGRRAFAVEGTGSFGAGLTRFLTANGERVLEVGRLRRERRSGGKTDALDAIRAARSVLTQNRPATPRASGEREALRALMAREGAVNAKRAGLCQLRDLLVTTPEPLRSELRPLTRARLLQRLAATRPERRHDPELRGALLALRSVARRVLQLTAEERELAREIETLTRKLAPQLLEQPGVGPLAAAQLLLSWSHRGRISSEAAFARLAGCAPIPASSGQTVRYRLDRSGDRRLNRALHMILVTRRRTHAPTIAYISRRTQEGKTKREATRCLKRYLARNLYRLLEQGAPPAT

SEQ ID NO: 394847 - protein, 481 aa, unidentified
MSKKSSPKKGTRSSSQKAHGKSKPSALSVVNPNAAGIDVGSTSHYVAVPPGSVAEGESAVRKFGGFTPDLDQMVEWLKACGVRTVAMESTGVDWIAPYEKLKAAGLEVLLVNAKAVKHVPGRKTDVQDCQWLQQLHSYGLLRGSFRPDPLVCELRTLVRHRGNIICQAASLVQQMQKALSQMNLHLHHAVSDVMGETGLRILRSILAGQHDPEQLVKLRDPQIKKSTEAEMKKALQGDYRAEHLFVLEQSLAAWEFCHRQIEQCDRKIEEVLKKFPTAAIPAEKPEVIPPLNGGQTRKKKQPQSRRRNEPAMDLAPQLARICGIDLTQSAGLRILTVLSLISEIGLDMSRWPNEKAFSSWLGLCPHNKISGGRILSRRTRKVINRAATALRLAAYGLARSDDWLGLFHRRMRARLGPAAAITATAHKLARIIYHLLKNKEPYVALDSAQYLERIHRVRLGKLKKQAADLGFQLVEEKRLSE

SEQ ID NO: 394848 - protein, 343 aa, unidentified
MEHYAGIDVSLESASVCVVDASGRIVREAKVASEPEALITWFGKLGVEVSRIGLEAGPLSQWLYAGMREAGLPVELLETRHVRDAFKAMPVKTDRNDARGIAQLMRLGWFRPVHCKSLPAQELRAVLTARKLVQGKRHDIEMSLRGILRGFGLKVGPTTPRSFEGRVRQLVEGHPTLLAIADALLLARATLAEQLGKLQKRLVSLARDDTRTRLLMSTPGVGVLVALTYVAAIDDPARFRSSKAAGVHFGLTPKKYQSGETDITGRISKIGDASVRTALYEAANVILTRPVKGSSLKSWAMRVAKRAGMRKAKVALARKLAVVLHRMLADGTQFTADKAAAAI

SEQ ID NO: 394849 - protein, 252 aa, unidentified
MLINTYVGIDVSKLTLDVFIRESKLHKQVKNNLSGFNWLETQTLRSLDTVLVCFEHTGLYSLPLALFLEERNMHYSMISPLEIKRSMGITRGKNDLIDSKRIAEFAFRFKDKVSETKLPAKDIRKVHSLLTLRDKLVTNMKGYAMTYNETLRTMRKEDFPELFSTYENMVASLKAEIKKVENAIKTILKNNLQLWTSYKLVTSVKGIGFIVASYLIVYTYNFTRFDTWRKFACYSGIAPFDYQSGTSVRGKT

SEQ ID NO: 394850 - protein, 392 aa, unidentified
MRFVGIDIASEKHVVAVVDEAGGVLVKPAGFSEDAGGYGKLFELLGTPTEVLVAMEATGHYWKNVFAELTARGFPVALLNPVRTHRFAGENLERTKTDAIDALGIARFAQQKRPEVTRLTDAATDEIRELVRHRERLMQDFGDRTRQLHRLVDLGFPELKRFIHTLDSQLATAVLHEWPTAEAFLGLPWKKLAKFRYDGVHIVGDELAKAIVETAKVSVGHHHGYAYRLQVQHTCEDLDLLRRRLKSLDHDIEGKLGEHEVGTLLTTIDGIGPTTAARLVAELGDPACFRDAHALAAYVGVVPGLKQSGKRTSSRAGLTPMGNARLRAALWMPTLTAVQKNPWLKAHYERLRARGKLPKVALVACMRKLLTAVYSVAKHRRPFVPEVAGGTA

SEQ ID NO: 394851 - protein, 346 aa, unidentified
MRYSTTVGVDLAKNVIQISVVSGRGKELSNRSLTRKKFAEFLGKQKPSLVAFESCATSHYWARAAQRHGHEARIIPAKAVAPFRQGHKTDSNDALAVAEAARRPKIKEAPMKTVEQQGLQAIHRSRELLIQESTALSNHVRSLLMEFGIVIKRGFASLLRAVPEILEDGENELPDLYRPTLHRMYTRLLELREDIEAMTAEVECLARSHPICSKLMALEGIGPIGALLLYATMGSGTAFSSGREFAAYLGLAPKQYSSGGKTTIVGLSKKIGNSRLRSVLILGARAYVYKLKEPKSSKDRWLKAIIDRNGESRAAIALANKNVRTAWAMVTQGTEYQRRQQLEMAA

SEQ ID NO: 394852 - protein, 397 aa, unidentified
MYIVGIDIAKRKHEAAVIDGEGTVIIKPFSFTNNCSGYNRLLAMLAKAKLPLDEVSFAMEATGHYWLALFTRLQKEGFRVQVINPVQTNSIRSFYIRQAKTDPRDALLIAEVIRFGHFSESTLHPENIYELRELCRGRHAIVSMQADVKRKVVALLDQVFPEYETAFTNLFGDTSMAILQTCPTPKELSEMPLEELCHLIEVSSHKRFRMAKAQELQALARNSFGFAMAGDVFSTMIRLYAKHLVFLKQQVREMDRKIAEIMETLDTPITTITGIGPTLGAYILSEIGDINRFSSAAKLAAYAGIDPTMRQSGEYNGVRNRMSKRGSPYLRHAIWLAASSAVLHDPALKLYFQKKRDEGKPYMASVGHACRKMVSIIYAVMRDNKAYTPCIPNEISA

SEQ ID NO: 394853 - protein, 342 aa, unidentified
MEEYVGFDVSKEETAFCVMDKAGKILSQGKALSDPRSLFEALRDHTLCPDRIVLETGTMSAWLARELRGLGLAVDVIDARQAHAVMKLQHNKTDANDAVLLAEIARTGFCRPVSSEAAQVQRMLVKARTHLVRQRRDTENAIRGFLRALGIRFAKGSGKLAGRVREALEERPDLKVMIEPLLASVEALKTQIKRLDEDVVLEARGSPACRLVMTVGGVGPITALAFAATIDDAARFAKSRAVGAYLGLTSRRFQSGEMDYSGRISKHGDAMLRSLLYEAANSMLTVVRRAHPLKDWARRIRKRSSHKKACVALARKLAVIMHRMLVTGEPFRWPQIEAAATA

SEQ ID NO: 394854 - protein, 319 aa, unidentified
MTNNLVSAQDVLGIDVSERRLDVHLLPAEISSSFANDPRGIGRLVAWLGSREGALVVLEATGGLERALLNALERAAMPAAVVNPRQIRDFARSAGLLAKTDRLDARVLALFGQRMRPPPRPSRSAADQRLAGLVLRRRQLVLVRDAERNRRRRVGDAALRRSLDDHLAWLEQEIDRLESLLADQIERSAEGRSRAALLRSVPGIGPVTAASLVALLPELGQLPPKAIASLAGVAPFARDSGAMRGRRTVWGGRQPVRNALYMAVLVAARHNPKIRAFYQHLRERGKAPKLALTACMRKLLVILNALLKAGQPWEARQPA

SEQ ID NO: 394855 - protein, 328 aa, unidentified
MQIIGCDLHARQQTLAILDTSTGVLEERVLGHDGDRVREFYRALEGPVRVGIEATGSMHWFLQLMQELGVECQVGHPAKIRACEPRKQKHDRRDATLLLQLLVEDRFPAIWMPSLEQRDVRALLLYRHQWVRIRTRVQNALQAIALSHGLRRGSGLWSKAGLQAVATLPLTVHADQRRTGLLRLYRQLQSEIDELDKAVAECAENRPQARRLMSHPGVGPITALATEVFLGDAARFADGKAVASYVGMIPSEYSSGGQQRCGALRQARQSPAPLPVVRSGGACGASRPGTAAVLPSEAGAERLGQGQGGGGPQARHPVVDHAARSDRL

SEQ ID NO: 394856 - protein, 347 aa, unidentified
MLSDLVDIVIGVDTHKHTHTAGVIDAGTGGQLGDRTVPTDPSGFDELIEFADARDGVRVWAIEGTGGYGAGLTRHLQARGEWVIELDRPDRPARRHGAKSDPLDAYRAAREALSRVTLASPRAPGSRAALSVRLAARRSAIEAATVAQRQLNALVIAAPESLRCRLRGLSIRSMIPIAARLRGHDSWDTETIETAHVLRALAKRIIALENEAAEHERALATTIKTWRPDLLELCGVGPINAAIVLCAWSHPGRIHSDAAFAMLAGAAPIPASSGQTVRYRLNRAGDRQLNRALHNIAVCRLRYDPTTRAYAERRRNDGKTDREIRRCLKRYIARQLFRQLERPLDNP

SEQ ID NO: 394857 - protein, 350 aa, unidentified
MKTTHPVIIGIDTHKASHVAVAIDTQGTRLATLSIPTNPKGYLELERWSQSLGKVQAFGIEGTGSYGAGLSRSLLAHGHNVIEVTRPNRQLRYTQGKTDSLDAEGAARSVLSGQATARPKTQTGSSEMIRHLKIARDTAVKSRSQAMVTLKTLIINAPADLRDALNHIRGKIALIRHIAAFRPGDIDNPLASVKAAMRALARRWLWLHEEIIAHDKELERLVTERAPELMASHGIATLTVAQMLILVGDDPTRIRSEAAFAKLCGVCPIPASSGKTHRFRLNRGGNRQANAALYRVAIVRMRSHEPTLAYVKKRTKDGKSKSEIIRCLKRYIVREIYSQLCVPKSSQIKA

SEQ ID NO: 394858 - protein, 409 aa, unidentified
MRMFVGLDVSSFDMKVCVLDQEGDQLSAFTVSNDLPGAEVLKERLLELLADIEVDILKIGLESTSVYSFHPSMFLHNDDDLKPYGSQVFVINPKQIANFKKSYPDMNKTDEIDAFVIADYMRFGRNQMSVVKESQYMALQQLTRSRYHLTKAMTKEKQHFLQHLEYKCNTFSKEVDSSVFGHAMMELFLEKYSLDELAQLPLEDLTRFLQEKGRNRFPDPEAVATSIQKAVRSSYRLDKVVEDSIDVLLGTSIELIRSFQKQIEAIDQSITRIMKGLTQTLESIPGIGPVFAAGIIAELGQIDRFPDETKIAKYAGLYWRKHQSGRFTAEDTSLTRQGNHYLRYYLVEAANSVRRQIPEYQVFYQKKYQEVPKHQHKRALVLTARKLVRLVDALLRKNQLFTPERGVNL

SEQ ID NO: 394859 - protein, 370 aa, unidentified
MRHGSTLYVGLDVHKDSIAVAYATTDGPSDPVHVGAIGTRQCDIDVLVRKMQSKSAPLVFIYEAGPCGYWLYRDLTRKALTCVVVAPSLIPRKPGDRVKTDKRDAVTLARLARSGDLTPVYVPDVPDEAIRDLARAREDALRDLNTGRFRLKALLLRNDIRYVGRANWGPEHVRWLARLVLPTPAQQLVFQEYVRPVTERTQLLHRLAAELLEQAKPWRLYPVVDALQALRGVQFTVAITTIAELGDLTRFDNPRQLMSYLGLTPSEYSSGDRRRLGGITKAGNGHARRVLIEAAKAYRHRAKVSEPIQARQQHLPAPIRDIAWRAQVRLCGRYRKLLARGKHPNTIAAAVARELAAFMWAIARTQAVSA

SEQ ID NO: 394860 - protein, 388 aa, unidentified
MNRIIKIGMDVHSKNYTLCAMEPTIGAEDRIFGEVQVAPDYKEVICFIESLKMKLGPDNKYSIECGYEAGCLGYTLYHQLTGAGVKCVILAPTTMLTQQGKRIKTDKRDARLIAQCLCYGGYHPVYIPTGEDDAVKEYLRMRDDHKLALKKLKQQINAFVLRHGHQYSGTKWTIRHVTWLKKLELAPMYRETLDEYLASCEEQEAKIERYDKRIEEIASEARYQENAKKLGCFLGIRTHTALSLIVETGDFKRFAKGNTYAAFLGLAPGERSSSENVNRPGISKAGNTHLRCLLIEAAKGICKGAIGHKSKELRSRQSGQPAEVIAYADKANTRLRSRYYKMIRHGKKKNVAVAAVARELACFIWGMMTGNISIRPTAGTSGPAASQG

SEQ ID NO: 394861 - protein, 390 aa, unidentified
MKDTPQTKRVIGLDAHPYLFSAAALAGPDALQAQVIWHVDRADLRQLERILKRHAQPGDTVVLEASGNSFALAERLYAIGLKAIVLESQAVGRVGKTYCATDRTDAVKIARVYLSGLAHEVWVPNETAAERRELFFAYRNAVCDSVRERNRIWAFLNQQGQRRPRGLRLSTPPALKDLLALRSWTPTQQWLLTELVEAFRSAEARRKRLRARIAEEVTRDPAVFQLVRLLGIRDLVAFALAAFIGPIERFENPKKLVAYFGLNPSVQRSGIGGGTGPLVGNGRGDVRSLLIQAAQSILRYGQGDTHRWAVALKMRKGTPIAVTALARKLTVSVWYLLQGFFTPLTEITPHIRIKVHKIAVSIGKTRLKALGYPRLSAFEEEKLQYLLSPA

SEQ ID NO: 394862 - protein, 307 aa, unidentified
MRFYTKQHQFYCGIDLHARTMYLCVLNQDGEILLHRNMPAGPEPFLKAVAPYRTDLVVCVECIFTWYWLADLCAREGIPFILGHALYMKAIHGGKAKNDKIDAQKIAVLLRGGMLPQAYVYPAAMRATRDLLRRRMHLMRKRAELLTHVQQTNWQYNMPEIGKKIAYKANRAGVAERFADPAVQKSVEVDLALIDYYDELLRDLELALVKTAKQHDAHTLYLLQTVPGIGKILSLVLLYEMHDIARFPRVQDFVSYCRLVKCAKESAGKRYGASGTKIGNASLKWAFSEAAVLFLRNNPAGQKYLAR

SEQ ID NO: 394863 - protein, 368 aa, unidentified
MKPDPQMTLDRYFRQCVGIDISKDKFTACLYMYDRGSDVGCHTESIDFNNTKSGFNQMVKWSRKEAQKGFPLTYLMEPTGVYYESLAYHLHKIGQTVYIVLPNKARKFCESEGIKTKTDAMDARCLALMGCASRKLKPWSPPAPIYRELRQMTRFHADLSQIMTSVMNRMESLNHMEEAGKTVRKNCQKLIEEIDRLMENNDEAIMQKVSEDKGLEARVKRIARAKGLGLTTVVCIVAETEGFHLIENRKQLTSYAGLDVKAKQSGKEDPMHAISKKGNAHIRAALYMPALVAVRYNPQIKAAYGRICQKHPKEKKIGVTAAMRRLLLLIYTLWENGEEYDSTRDKTHTPRKMEKRLEYGPENGGLPF

SEQ ID NO: 394864 - protein, 370 aa, unidentified
MLDTTTFVGLDVHARSIKAVSLDVMTGEVRAATFGYDAGAVAEWVRSVDPGARCVYESGVTGFDLQKRLSGLGVDCVVGAVSKMIKPSADRRRKNDRNDAEFLARMLSVGNVVEVWVPDDECEAARDLTRALEDARDDLSRSKQRLSKFLLRHGLVFDERTPTGRRKGNWTRAHWSWIESIRFAEGADNDALAYYVDAVRRAAEEKARLEGLVEAEARKPRWRRRVDSLRCLKGVDTASAADLVFEAGEFSRFRNARSFAAWVGLTPSEHSSGESDRRGAITKAGNKHLRKTLVEAAWHYLTCSGRPKDLAKGQAPDRGARRHAAKGVRRLVERREALLARGVHGNKANVATARELACWVWAVGLMAEEA

SEQ ID NO: 394865 - protein, 465 aa, unidentified
MATSTKNAQKSQPSHNFKLQALNPCVAGIDIGARSIFVCIGFEDGHQEVREFFTFTRDLKDMVSWLLKNSIQSVAMESTGVYWIPVYDILAQAKLEVTLVNAYYLKTVPGRKTDVKDCQWIQQLHAYGLLRGSFRPDDMGVTFRGYVRQRSRLFELASQQVQLMHKALVQMNLRLHQVVTDITGASGISIIRAIVAGEHDPNKLAKYRNSRLKRAEVEIVKALEGNYRSEHLLCLKHALEAFDFFHSQVLECEKAIEQILNEWKNKQQRESLGTLPSDTCIKDKKKSRVRKTTYNKTPYFFEAEQSLEQILHVDLTEIPGLESNGVMRILAETGSDMSKWPSSKHFASWLGLCPGNKISGGKVLSSKTKPSANKAAQMLRMAANSLHHSKSALGAYFRRMRSRLGAPKAITATAHKLAKLFYTMLREGKGFKEIGQAAYEERFKARNLLSLQKRAKDFGYRLVAC

SEQ ID NO: 394866 - protein, 356 aa, unidentified
MARRSVSSVQQFVKGFEAHPFFIGLDVHKRSYHVALRRMDGKTVTLVCPADPSGLVGVIQRLCIRVGSVVYEAGPTGFGLARTLRAAGIETLMAAPSRIPRAVTAGAKTDRLDCIRLADYGAKGLIRSIAIPSPEQEAKRTLQRRRHDLIDSRRRCKQRIKSLLLYLGLPEPKPSIRWRRGAAEALRALPMDPHARLTLESLLRELAFYDEELRKVDEQLHQRGRQQERLMSCLQSVPGVGDVVATTFMVELFDPERFQRAEEVASYLGLAPMVRHSGEKTPSGRLRPAGQTRLRSLLIEAAWMWRQYDPYARDLYHRFLGRMGIAQKAIAAVARKLAIILWRLYVEARPYRPAIL

SEQ ID NO: 394867 - protein, 440 aa, unidentified
MAKVINFDQMHAHGAGIDVGSKEIFVSIDGEQVVSFKTFTDDYHQCCRYLKEHGITAAAMESTGVYWMSLYSVLEDAGIKVCLVHPRETQQVKGRKTDVKDSQWIQKLFSAGLLRESIVAEGCLKELRMPVRERLDLLEMGSTYINKMQKFLELMNIKLKNVISQIHGASGIRVIKAILDGERDEEKLLSLCDVRIQKNKAEDVKKALRGNYSPHYLMLLKENMRLWDEHQNSIRTIEKEIERLLDRMCADKLHLPVESAPKPARHHNPDIKDLHGKMVRLFGGVNLSTISGINDVTMLRLLGETGSDMSRFPTVKHFVSRLGLSPKNRQSGRMKKRVKSSSNNAGEIFRQSAQSLLNSKYNATGAFIRRLKGRKGSPIAIKAGARKLAQAYYLALTKGLDYVEQGAIKYAQMLKQREIRSLRKLAHKHNCFILELRSVT

SEQ ID NO: 394868 - protein, 404 aa, unidentified
MKVTRIGLDIAKQIFELHGVDQRERAVLRKTLKRDRVLEYFAQLEPCTVALEACGGAHYWYREISKLGHTVRLLPTNKVKPYLDGNKNNANDAAAICEASGRPSMRFVEPKTGVQQDLQALHRVRQVNVRQCTLLANQIRGLLVEYGITIARGLAALNRALPELLEYDEQRLSPMLKQLIAAQWRMLKLHRRQIEVYDRRIAGIAKNDASCRALLKIEGIGPITATALVAATGKGQQFKNGRHLSAYLGLVPGHSNTGNKTVMLPITKRGNRYLRTLLIHGARSALYAARNKDDSRSLWLQRLQSRRGNNIAAVALANKNARVAWAVLRFGQTYRPDMGHVRQSSATPPQQLQRQPQGRLTLKPHGAPSRVQNRHFSGSPPSGEGRFSRWMYFTDKGRTVLELW

SEQ ID NO: 394869 - protein, 462 aa, unidentified
MRQLRLGVDIACRAAHQASLADEAGRFMWSGRKFRTDPEALERLWVSLPSDAEITVIMEPTRNAWVPLASWFKRKGAKVVMVPSEQSADLRDYYSKHTKSDRLDSRILARLPLLHPEGLYVHEHLGPAEPLRRATRLRSSLVKRRSTIVARIDALLEILGPQWHLAFDGELARTTPLRFLAAGYGDPYLVRRLGRARLIRFVHRHSHGKHDARYADAILAAATQTLELWGDEIDYGELADDLAVEARLALALSAEIKELEQRITVMLRALDPNDILRSVPGVGAVNAAQILGRLSDPNRFRSLAGVRSFSGLVPSLDASGHNGRHGRPTKSGDALLREALFMSADAARKIDPTLAQRYHRLMTVTGKHHNSALCNIAPTLLTRIVSCWRSCEPYVIRDLDGTVLTPDEGRKVVSSRYSVSAELRAQRRTSNKPERTGRRSKESLGAPSPGPSTTNHRDVDVA

SEQ ID NO: 394870 - protein, 356 aa, unidentified
MIDIQGLIKALKKFNIIYPKSKIMKKYLTYVGIDVSKAKLDVNILDSNTLQSEHFVIENTSKSIPRFLNSLRKQLDLQTTLFCCENTDVYTNHLATALLELKLDLWIVPAIEIKRSKGITRGKSDKSDARDIAFYSLRNIDKLKLFTLPNIDLQKLKLLYAEREKMVKAMLLLQTTIENKAFTAKEVFKEVSSLNQGLIKSIKSSICKIEARIKSIIRSNEELNKQVKLIRSVPGIGEQTSVYLLIATKGFTAFKNWRQFACYSGVAPFENTSGSSIKGRTKVNHIADKKMKALLQMCAMTSLRHDPQIKEYYNRKKAEGKNPMLFLNNVRCKIISRVFAVINRETAYVDMYKFAS

SEQ ID NO: 394871 - protein, 390 aa, unidentified
MQPTQVQDVTRDEEVLAVSLELASKSWKVGLDDGKRRAPAVHGVEHEKPEGRLEEAIAVIEKTKKKWGLAAGVRVVVVYEAGQDGFWIQRALSGRGYETLVVDAASIPVERRARRAKTDRLDAIRLVLALRAWLRGERDRMKVVRVPAAEAEGQRHLVRERGTLQKEVGQHRDRLRKLLSTVGCWGSVEGELAGRLERGEVTGYGGSALPAALRERLLRECARLKLVEEQLAHLEKTLPQQVPEAVRQRMEQLMHLKAVGPVGAQRLMLELFWRQFNNRREVGACVGLVPQPYDSGESRVDQGISKAGNRRVRALLIEMAWMWLRWQPQSGLAQWFAKRTSGAGSNKRARRIAIVAVARRLAILLWRFLKDGVLPQGVQFKPVKAKLATA

SEQ ID NO: 394872 - protein, 318 aa, unidentified
MDVHSTNYTLCAMEPVLGAEDRIYGEIQVAPDYKAIVAFIASIKMKLGLSDKYSFECGYEAGCLGYTLYNQLTSAGIKCVILAPTTMLTQRGKRIKTDRRDARLIAQCLCYGGYNPVYIPTGEDDAVKEYLRMRDDHKLTLKKLKQQIGAFALRHGHQYTGTKWTDKHIAWLRKLELDPIYQETLNEYMASYDEQEAKIERFNKRIEEIAAQSRYKENVGKLCCFLGIRTHTALSLIVETGDFTRFAKGNTYGAYLGLAPGEHSSADDVNRLGISKAGNTHLRRLLIEAANGICKGRIGHKSKELCARQKGQPADIIA

SEQ ID NO: 394873 - protein, 315 aa, unidentified
MTGPAVWVGIDVSKATLDLALRPTGERWTLANDEAAIQSLVQDLGPHAPSLIVLEATGGFEHAVVAALAAAGLPVVVANPRQVRDFARATGQLAKTDAIDAQVLALFAERVRPEPRPLPTEAAQALDALLTRRRQLLDMLVAEKNRLGFARAVVRRGITQHIRWLERRLGDVDHELGQMIEQSPIWRAKDDLLRSVPGVGPVLSRTLLGELPELGQLNRKQIAALVGVAPLARDSGTLRGKRLVWGGRAPIRTVLYMSTLAAARCNPVIRAFYRRLRAAGKPAKVALTACMRKLLVILNAMVRSNTHWQKAPALV

SEQ ID NO: 394874 - protein, 395 aa, unidentified
MILVGIDIGKNSHYYTIVRKEDGEILSEPSKITNDLKGFDQLVSCFRKYRKTDILIGMEDTGHYHFPLLKHLLDNGYTVALINPVITDLTRKANGEISKTDKLDTLTICDVLCSNRKDRKPYRISKVQRFDLYEQRCLTRHHHNLKEELNVYTNRLQKCIDIVFPEFNSLFSSKYGIVYMNVLKSYASAESIARADIRSLRKCFEFCGRGKRISLTAEKLKAAAKDSIGISSVSEVIQIKHLIAQIELINEQLEEIDKKIEEFSRQTNSPILSIPGISHFSGTSILSELGDIDNFTNHRQIIKYAGVAPLTYESSQFKAQHTKISKKGSKYFRKTLYQIILPVIQQNKVFKDYYALKISQGKSHRCAQGHCVRKLLRVIFHLLKTGQRFDPSILC

SEQ ID NO: 394875 - protein, 461 aa, unidentified
MTARKTKPAPSTPPAVEPVPNRHAAGIDVGDSTHWVCVDDTPDGSDTVREFPAHTPGLGQLVAWLKLCGVTSVALEASGAYGHVLFLTLLESGLDVLMAAPHFTRQIKGRPKTDKRDCQWIQRLHKHGMLPSVFQPDDATHTLRDYVRQRANLGRLSAQHVQRMQKALELMNLKLTKVLGDVTGVTGLKIVRAIVAGERDPHALARLRDRRCKHTAEEIATALTGRYRPEHVTELRLCLKMWDAYQDAVADLDRSIAEHLQTMRHASELPPLAKQTRVRGKKPHDPGFNVREALYLATGVDLTAIEGIDAIHALTLVSELGTDFSKWPTVKHFTSWLGLCPNWKKTGGKVQSSRTRLGKNRAAGALRLAAWGLMRSTSYLGAYLRRQRSRLGAPKAITATAHKLARIVYALMRHGVGYVKQTEQVYAEQTRQKVEKQFHRRAKELGYEVKKVESVTPTLVT

SEQ ID NO: 394876 - protein, 337 aa, unidentified
MNKQTTKQLHVGVDVSQETLDVSARHDSGEPRSGQFANTSAGHRQLITWLTKGGRSARVVLEATGVYSLDLALALDAAKRIAVMVVNPRAARKFADACLQRSSTDATMAVALQEYAARMKFVPWTPPSAAVRELRALARRIATLTEEKTRELNRRHAAGASANTPAVVRNDVAVNVRHLQRRIADLERHAVALITTAAPLQAAYQRLLSVCGIAQTTAIQLLGELLVLPADMTARQWVAHSGLDVRHVDSGRSVHKVPRISKQGNAHLRRILYMPALTAAQREPHVRTFYEQLVAAGKKPMQALVAVMRKLLHAIWGMLKTNTDFDGSKFRKLREAA

SEQ ID NO: 394877 - protein, 276 aa, unidentified
MEMVIGLDLHRSQITFRTVDLRTGEVQRGKIHTGAREAVREWLDRFEPGTDAHFALEGTTGWRFVVEEIERRGFTAHLADPAELSERRGPKRRAKTDHADCELMVNLLLEARLPESWIPPAHILELRALVRLRKTLLDQRIEWQQRLQAQLFHQGVVPGLRLCHPEDRRRLAGVQMSLAGRQVIQTGFIMLDGFDSQLKPLSAQLVGLAKTQPGCRALEGELYGVGWLTAVAMVAELGDCRRFHSADQAVRASGLDITVYESNGRRPGGHLARQGP

SEQ ID NO: 394878 - protein, 373 aa, unidentified
MKMSIGVDLHKTQFTVCFLSEDRRIEAHRLYPTTKSGYEDFFTQCNEFEQESYNLQAAVESTGNARFFRNQLITKGIDVTVVNTMKFKVINESVKKTDKHDAKTLAEFLEKDMLPESQLCSQMSEDIRRILKSRQVLVKATVSIKNQLHGMLMGYGIETKTGQFQSKRERQRILNGLVDHDIYGGAIVAVQPLFEIIDRLSVDIKKLEVVLASLVAEDEDVSLLMSIPGVGLITASTIRAHIDDINRYESAKKFASYMGLAPWVQNSNETIHHGHITKRGPQELRTAMVQCVLGMVRTKSKTENFRLMINYRLMKKHKGSGTSIIATARKLSTIMYTMLKNREPFDPIRMENKKKYLDMQAAALDAAREQKVC

SEQ ID NO: 394879 - protein, 417 aa, unidentified
MQKRVYRGIPLAKFKIESIQEEVSGRRVVFGVDVGKDVMAGTFMTETQKAAANIMWRNPWDTREVLRVLEALPARQIEVALEPSGTYGDPFRHQCAKRGIPVYRVSAKRSHDAAEVFDGVPSWHDVKSAGVIARLHLAGASHEWRERTEDEQELAAAVRVMVMHDSHAHNNMNRLEAMLSRHWPEITAHLGLGTMTLYRMLEVSGGPRWVSENSAEAVKQVQRWGGTFLSSESVKGAVASAKTTTGVPMIAAEESMVREMSAEILRCRKATQKMKNRVTRLVIDHSEARPMAKVIGVRATAAMVASGMNPVHYENPASLVKALGLNLKERSSGKYKGQLKITKRGPGICRFYLYLAVLRLIQREPAFKRWYDAKVVRDGGKIKNKAIVALMRKLTSAMWYVARGDAFEPTKLIPAKG

SEQ ID NO: 394880 - protein, 539 aa, unidentified
MLARWWCEQQTAKPRLPSGDERVLIPSYSVGPGLAASALVPAFRAEPVNEIAFSNRHPGCCSRHTPTPMLKPAIDKSALTDTAKNRKHQPSSRRKGVSIQPVIDPDAAGADIGAREIVVCVPADRDEHPVRSFATFTQDLNALADWLVACRIKTIAMESTGMYWIPLFQILEERAIHVQLVNARHVKHVPGRKSDVSDAQWLQYLHSVGLLKGSFRPPQDICAIRSLARHRDSLLAQAADQVRHMHKCLDQMNLQIHHVINDLTGATGMAIIEAIVKGERDARALAAHRDRRIKASLETVEKSLRGDWREEHLLVLRLSLATWQHLRVQIAELDADIARRVRALDERVDVQARPLPAAGKRRNASANAPALGEALRGEFYRALGTDLTAVPAISVLTVQSFISEIGTDLGKFQSAKHFVSWLGLCPGTKISGGQVLDARSRRGKPRFALQLRQAAQSLHSSHSSLGARYRRLRSRLGAPQALTAMAHCLARIIYKLLTEQRSYDESVFATLEAEHEKRQHQRLQRQATAMGYSLVRVPT

SEQ ID NO: 394881 - protein, 353 aa, unidentified
MTDNTSIAWLGLDAHSRNCVLAQLDDQGNEINDWRFPTDPLQLLKYVQAIPATVKRLMLEESNLARWVAQLLKPYVQQVVVCDARRNRLISHDANKHDRRDAFALARLLRLGEYKPVWQPTDDQRVLFKRAAQAYENSVLRQTRLKLQLKSLFQHWGLFPTGATVFSKAGRSAWLQKLPYDALRSQALLLYELLDQALAGQAQARRLLCQSGRLFPEVQRLRTAPGVGLVGAHLFVAYVQDPHRFAKFSRLAKYCRLSIRDRSSDNKPLGFKQLDRQGNGVLKAISYRAFLQAAKRRSGPLWDFYQASLRHTGSATHARLNTQRKCLLVLWTLWLNGEEFDPNKFSRSKPIDV

SEQ ID NO: 394882 - protein, 427 aa, unidentified
MKKADLLSTLFVGIDISSRSNVVALLDFESQKTLQSFAVGNNQPGAVELANRLADYLRSRKDLTKLVVALESTSFYGIHVANYLSACDVLAPFHTAVYCLNPKAIKNYKKSFIDLGKNDYVDAFVIADFARANRITTKPWRGSQFLALQRLTRHRLHLAKALTREKAYMLSNIFLKFSEFSLLDAEDQPFSNSFGATASSVLTDFLSMEEIIEMPTEDLISYICEKGHNRFPNPEKTASLLQQAARNSYRLDKCLYEPLTVSIASSFTLISTYETEIKAVNKAIEKTLKGIDPNAYQSLLSIPGIGPVMAAGILSEIGYIEAFRNQEALAKYAGLVWRENQSGKFQADDTPLSKAGNAYLRYYLIEATSHVKNHCGEFAAFYQKKYDEVKIHQHKRALALTARKFVRLIFGLLANHQLYSSDRVVQA

SEQ ID NO: 394883 - protein, 325 aa, unidentified
MMIIGIDVSKAKLDALWLKDTTTGANKTKIFANTAQGHAALIEWARHQTKSPPESLHFILEATGVYSEAIAHALYRAGAQVSVLNPAHVRDYAKSIGVRTKTDKKDSGVLARYGATQQPRLWRPEPAEIRYLKALLSRYEAINEDVQREKNRREKAEVIQAVEVVTSIDTVLEQLIKEKKRLEMLINQHIDQHPGLKQDREFLESIPGVGPVVSRYMLSVLRSREFASGPQSAAFLGLVPVHHESGSSVRGRARLSKTGNATVRAKLYMAAVVAIQHNPDIKKQYERLLKNGKTKMSALGAAMRKLVQICFGVLKHQKPYHAQAV

SEQ ID NO: 394884 - protein, 351 aa, unidentified
MQTQTKTESKLWIGIDFHKKTWRVHFRSDTFSGNPFSMEPDTEALHKKVMIEYKGYDVEIVYECGCFGYWAHRKFVSYGWKSLVVNPCDIPRISKQKFTKTDSIDARNLSKLLKAGLLRSVTVPDREREQLRSLFRRRVHTVMYTRSIKSRLKAQLLYFGIKIPIEMDNAAWTKNFKDWVKEIEWEHETGKQMMLSNIKQVEYLHYETNEISNHLRKYCRDNHKKVYNLLRSVPGVGPLTAICFISEVGDISRFKNFKQLACLVGMMPTTYQSSDTNRTQGLTPRALRIMRSYLVEASWQAVRIDPVLRDYYKKHTGKKPNDIIVKVARKLLSRMYGVLRTETEYQIGLIK

SEQ ID NO: 394885 - protein, 331 aa, unidentified
MSPKGLRDQNEKEKQWVGIDVCQKYLDIYVRPQGNLFQVTNDEIGIAQLVQTLKQIDPELIVLEATGGMEVDAAIKLTQAELSVAIINPRQARDFAKATGQLAKTDAIDAKTLAHFADAIRPEVRQISDESSRQLEDLVARRRQISDMITAEKNRRRGKTNSIKTSIDEHIEWLEEQLKEIESQINSAIAINEDWKQKMNLLTSVPGIGEVVAVTLISSLPELGKISHKSISYLVGVAPLNRDSGKFRGKRKIWGGRAKIRCVLYMAALAAVRFNPVIKAFYQRLVNKGKLKKVALTACMRKLLIILNAMMKQNSSWRHEVSPLGKPQVTN

SEQ ID NO: 394886 - protein, 412 aa, unidentified
MEQVLDEAEVVARVAALDVGKAELVCCVRVPHQTMAGQRRQQVRAFATTTPSLLELRDWLSRLGVTLVVMEATSAYWKPPFYLLEDAIECWVVNARDVKNVPGRPKTDRLDAVWLCKLAERGMLRPSFIPPPWQRELRDLCRYRRTLVQERTREKQRAEKLLEDTQIKLSAVISDIFGVSGRAMLEALIGGQRDPSTLAQLARGSMRGKTTILREALTGHFRDHHGYLLRMMLNRIDALSSQIEELTGRIDEAITPFARQVAQLDEIPGVGAIAAQDLIGEIGVDMARLPTAGHLVSWAKFAPRAQPSAGKSKPSTTGKGNPWVGGTLGEAAVGAARTKTFLASRYHRIARRRGKQRALVAVGNSILVIAWHLLSDPGARFTDLGPDWHDRLAPIRRKRQLIAELERLSGKT

SEQ ID NO: 394887 - protein, 359 aa, unidentified
MNETTQPAQRRRIVVGVDTHKHLHVAVALDELGGRIDAQRFAADTIGYRHLIDWAASLGRQVSFGIEGTGSYGAGLASAVRRRGFGTIEVLRTDRRDRRLRGKDDFIDAENAARSVLAGIATAVPKTADGNVEMIRFIKVAKDVAVKARTSAMISLKAAIVNAPPELREQLDGLSKMVLIRRCAALRPGKVTDVTAAAKHALRAIARRWLDLDAEITAHEKILGELTEQTAPQLVAAFGIGADVAAEMLIVAGDNPDRVRSEAAFAKLCGVSPIPASSGMTTRHRLNRGGHRQANAALYRTVIVRIQHHEPTKTYLARRLAEGKTKAEIIRCLKRLLAREIWAHMRPLRRAGTAPSRAA

SEQ ID NO: 394888 - protein, 423 aa, unidentified
MEVMYKRVAGLDVHKDTVVACVRLMTGRKVTRECRTFSTMTEGLGALLAWLTACRCTHVAMEATGVYWTPVRNILSDGGFALIVANAAHIKQVPGRKTDVNDATWIADLLACGLVRASFVPEQAFQELRSLTRTRKQLVREQTRHVQRLQKTLEDANIKLDSVLSDIVGVSGRRIIEAMIAGTRSPHQLAALAERSIRASPKQLYDALHGRLTEHHRFLLKLHLGQWDALDAAVREIDREIDGQIERIDATASDDQPPFRDLIVRLCSIPGVSHLSATSILAEIGRDMSRFPTAGHLIAWAGLCPGQNQSAGKRQSARLRKGAPWLKTMLVQCAWAAKRRKDSYYQAQFHRLRSRRGPQKAICAVAASMLTAIYHMLRSGASHRDLGADYFDRRSPEAKAKRLVNQLAKLGFQVNLQPLDNAA

SEQ ID NO: 394889 - protein, 473 aa, unidentified
MGRNHNQPMSKKTSKQRKQSKKVFIEAAWEPVNAHAAGVDIGSREHWVCVPPQAAERHVRKFGTFTADLEAVAEWLHECGVTSVAMEATGVYWIPLFQILERRGFQVILANARQTKNVAGRKSDVQDCQWIQRLHTYGLLQGSFRPEDPYCVLRTYLRYRDELVGARSTQCQHMQKALHQMNIQLTQVLSDVAGVSGLAIIGAIVQGERDPVKLASLVHRSVRAPAATIQQALQGDYREEHLFVLRQAYELYQTYEGKINACDEQIARETANLPGRVDSTLKPLPARKEGRKPFLDKMAGQDMRQRLYEKFGVDVTAIEGIGVLTGLVLLTEVGPNVSRFKSEKQFCSWLGLCPDNRISGGKVLSSRTRRVVNRASDALRMAASTLERSQSALGGFYRRMKARLGAAEGVTATAHKLARIVYRLIKHGEAYVRQGMEDYENKFRARRLKALQKTAKALGFELSPTRTLPLGVS

SEQ ID NO: 394890 - protein, 373 aa, unidentified
MPRYSTAFGMDVHLRSTTVCALDAETGETVTRRFRGNPWGEVAEWMSGFPGPSLAAYESGYLGFAPQRELSGLGVDCVVAAVSKVPRSAADLSSKNDRNDAARMAKAILSHDISPVWVPSPEIEGLRDLAGAHDAATARLAAAKQRLLAFLARRGYAYGGTTPAGNPRKYWTYDFLRWLDKVRPADDGGIRALAALRNEVEAAAETRDDLLAEYRAAVAAGPLSAEVEALQSIKGCGFALAAAFASEVGDFSRFRSGRQVTSYFGLAPKQRSSADSVRLGGISGAGNALVRRLAVEGSWSYVQASHQPKLMPKGSGVPLEVRMHGRKGSERLLRRREEMLARGMPQAKANAATAAELVRWLWALGAMCREATE

SEQ ID NO: 394891 - protein, 391 aa, unidentified
MICVGIDVAKDKHDCFIISSEGKVLANVFTIQNSMEGFGYLLEKIRACSLPLDKIKVGLEATGHYSYNILGFLLDNGLDTYVINPLHTNLYRKSLTLRKTKTDRVDARTIAAMLMSDVGLKPYTDTAYHNEELKSLTRYRFDKVKVRAKLKSSIARLVCILFPELEKLVSSLHMASVYALLDEFPGAKQIAAAHLTRLTHLLAESSKGRYGRDKAIEIREAARQSIGSVTTAKSLELRHTIRLIRELDAEIAEIEQVIQRIMDKMLSPITTIPGIGYRMGAMILSEVGDFSRFDSPDKILAYAGLSPSTYQSGQLKNCYAHMEKRGSRYLRYAIFNATKFVCLWDPVFAAYLARKRAEGKHYNVAISHAAKKLVRLIYALVKSGEPYRLAA

SEQ ID NO: 394892 - protein, 401 aa, unidentified
MSSKKGFSEFPVVHPNAAGIDIGATFHVVAVSPNCDSTPVRQFQSFTTDLHKLSQWLREVGVKSVAMESTGIYWIPVFEILEADGFEVILVNAREVKQVPGRKTDYNDAQWLQKLHQFGLLRASFRPSEHIASLRAYLRHRERLIEYSAAHIQHMQKALMQMNLQLHHVVSDITGVTGMKIIRDIINGERCAARLATHRDIRCLKSEETIAAALTGNYRDEHIFALKQAVELYDFYQERISECDKQLEQAMAKLNQKKVTPDVPLPKARHRTKQHNEPDFAVRSALYTLTGLDLTQINGLGPYTALRLIGECGDDMSKWATEKHFVSWLSLSPGNKVSGGKILSSKTRRTKNRATTLLRIAAVNVGKTETALGAFYRRLAGRVGKAKAVTATARKLAVLFY

SEQ ID NO: 394893 - protein, 422 aa, unidentified
MVAHVVIGMDPHKRSATIEVIDEREKVLGTGRFDTDRDGYRRLLAAGRKWPDRVWAVEGCAGVGRHLAQRLVADGEAVVDVPAKLSARVRVFSTGQGRKTDATDAHSVAVAGLRTPGLRLVAADDTAVALRLLVDRRDELGVARTVTVNRLHRLLVDLVDGGAKKALSANQAKALLGTVRPRDVVGRTRRQLAAELIADLAGIDRKMKAATAQLTVLVQATGSGLLKLTGIGPSGAARLLGDIGDVARFPTRGHFASWNGTAPIDASSGEQNRHRLSRAGNRRINRVLHIMALVQLRHDTIGRDYYRRKLAAGKTGMEAMRALKRRLSDVVYRQLVADQKRLRRAGDGAAPGGQAGAATSSSAAGSHPNTGTSEKSLPGTAGPQVTPTQRSHRRGFSTLGRPAADALTRPDGAAIDSLKPAS

SEQ ID NO: 394894 - protein, 419 aa, unidentified
MTKKSKNSTLIQIVHPICCGLDVHKDKISACLITVDENGKEQHEIREFSSFTQDLQKMKAWLIVNSCPVVAMESTGVYWHPVYNTIEDAMQVVLVNARHIKNVPGRKTDICDSKWLAGLLRHGLVKGSFIPPEHVREWRELSRLRRTYTESQADFKRRVHKLFITANIKIDSVVSDLFGVTGLNLIDLLCKSEEVTLEKVQECTKGSLKNKAPELYLSLHGYFKDHHRFQLIGMMESIEMFQNQIEQINARLELLTRDHEDLLERLDEVPGIDKKSAQSIIGEVGVTLEEFEKMVAFVAWAGLCPGNNESAGKRKSGRNAVRNHPFKTILIGIAWAAIKTKGSYYKAKYYKLKSRRGAKKAIVAIAHKIAKAIYNIIKYGDRYKDLGEEYLSKPNKQRMLKNLAKKADALGMKLVSCEN

SEQ ID NO: 394895 - protein, 335 aa, unidentified
MDFCYFIGIDIAKDTLDWAVYTQQGLQLSTHTPNTLAGIKTALVEFKILLGWNPKQAVFCMEHTCIYNAHLLESLHELKLAVWLESSLQIKQDGGMQRGKTDKVDAQRIAPYAYRFHDQIRLWEPPREVIQRLAFLSATRQRLTQAYNLLSVPVTEQETFISKSLQKNLKGNVEKSLAALKAERKFVEEQIKELIEADLRLKELFALMVSVPGIGPVIATELLITTNEMQTINDPKKLACHAGVAPFEYRSGSSIRGKTRVSHQARKRLRSLIHMGAMSAIQMKGDLQDYYVRKLTEGKHTMLVLNAVRNKLIHRVCAVVRRGGKYDKNYAPTLA

SEQ ID NO: 394896 - protein, 336 aa, unidentified
MIAVGVDTHKHEHLARAIDGLGQVLGALTITTSLRGYGELAQWLRTLGEGVVVGIEGAGSYGAGLCEYLLAEGFDVVKVERPRREDRRRGKSDEIDALLAAKKVLAADGLSTPRAGGTRQALAALLIAQRSCISERTRLVNQLQSLHTTAPVALRERIGPGNGRKLAARLIKMRARTDAAQSERLIFTVLRDLARRAQELAAQADAYKHELTELISSLDATLLDEYGVGPISAAKLLVCDPKRLKGEAAFARCNGTAPKPASSGQTIRHRLSRAGDRQANNALHTIARIRGRHHEQTRAYLDRRISEGKTPREAMRALKRHISRSLYRRLITIPLT

SEQ ID NO: 394897 - protein, 351 aa, unidentified
MTIISHYIGFDVHKKSVSYCVKTKDGTIVEEGRLRATREALRQWAGQRPEAWHGAMEATLFSGWIYDVLQPFAAKLQMGHPAQMKAIFAGKKKNDKLDARKIADLLRVELLPACYVAPAAMRELRRMLRYRNLVVAQAVQMKNRMSGMLMEVGAEYSKRRLHGKEYFNALVDQLEEVPESVKDLLRLSRGSVEMFETVQRQLLERLQKEPLLRQRVELLRSIRGVGEVTALTWALEVCDPRRFPSIDDAVSYCGLTSALVESAGKQQRGPISKQRNAHLQTVLIEAAKLAPRWNPPLAAVHERELERGHRNRATLEVARKLVAYLLAVDKSGQPFQPRTAPTRETEAQQVA

SEQ ID NO: 394898 - protein, 358 aa, unidentified
MVVVGSDVHKRTHTFVAVDVAGRKLGEITVKAEHQGHDRAIRWARERFGHVDRWAVEDCRHLSDRLEIDLLEAGEAVVRVPPKLMAEQRRLARTRGKSDPIDALAVARAALREPDLPVATHDEASRELRLLVDRREDLVAERTRMINRLRWYLHRIAPGDPAADPAPRTLDVAKTRRALHAWLNAEVAARPGIDARLARDVLADIDRICAQVAALEKEITAAVKAHQAASRVTELSGCAALTAAKIVGETAGIDRFPDEAKYAMHAGVAPIPVWSGRTHGRVRVARIGNRQLNAALHRIAITQLRCHEPAKAYYAKRLAAGDTRPEAIRRLKRHLARIVFNSLKNTPSTATGTLPAAA

SEQ ID NO: 394899 - protein, 343 aa, unidentified
MQAITIIGLDIAKSVFQVHGVDATGQVVIRRQLKRRYVLAFFQKLSPCLIGIEACASSHHWSRELQALGHSVRLMPPAYVKPYVKRQKNDAADAEAICEAVTRANMRFVETKTPEQQSGLVLHRTRHLFIRQQTAVINAIRSHLGEFGIVAPVGRNGVEELLDVVADPSDKRVPAIARACLAALGAQLHRLKEQILEFDRMIRAWHRSSEMSLRLDDCPGVGPVLATALAATVADPKAFRSARNFSAWIGLVPKQHSSGGKNRLGSISKQGDRYLRSLFVAGALAVIRYAKIHGTKHRPWLTALLARRPTKIVAIALANKIARMAWAMMARGERYKEPVALAA

SEQ ID NO: 394900 - protein, 473 aa, unidentified
MTIATTPVCLGIDVACRAEHQATLAVGGKTAWKGRKFSTRPAELQRLWADLGLADPAELTVVLEPTRNAWIVLAHWFRARGARVVMVPTTQSADLRAYYSKHAKNDRLDSEILAKLPLLHPEGLREFTGPGSADPLRRLTKQRSTMVKRRTAVYSRLDALVELLGPAWYAVLGSNYGKAALMVLARYADPHAVIRLGQARLTRFLVRHSRGFWREDHARALILAARETLTLWTGPDGVAGMDFAELAADIAAEAEQARFLTEQIEDLDERIANLYDQADPDAIIASAPGVGPVVSAIIAGRLGDPHRFTSLAAIRAYSGLVPKVAQSGQSHHQHGLTKAGDPLLREALFTAADSARRTDPQLAAKYKRLMSTDRHHDSATCHIATVLLTRIATCWRTGKPYILRDVDGREVSQAEGRAIIKERYKVDQKKRVAAAGRRIQPRRKQGTDRESQRSQSAPTSRPATTTISSPQVA

SEQ ID NO: 394901 - protein, 310 aa, unidentified
MEAIYVGIDVSKDRLDVHVLPSGQSFAVARDGKGLSELIEQLVAMRPQLIAVEATGGFETIVAAAIAGAHLRLAVVNPAQVRHFAQAVGKRAKTDPIDAAVIARFAEAVKPEPRELPDEAARLLSELVGRRAQVIEMLVAERQREKRASAVRVRKSLARHIAALEKELPDIDRDIDTMVRGSPVWREKEDLLISFPGVAHRIARSMLADLPELGRLTRRQIASLVGVAPFTRQSGQWRGKSMIAGGRPFVRAAIFMAAMSAIRCNPVLRQFYQHLLARGKPRMVALIAVARKLLTTLNAMLRDKRPWQPA

SEQ ID NO: 394902 - protein, 350 aa, unidentified
MKKNSEISSYSEKEVFIGIDVHKKTYSVVSIVSGAVVKKWRTIAKPEQLTKQIQSYFPGAKIYSAYEAGFSGFVLHRQLEQAGIENIVVNPASVEVTINNRVKTDKRDALKLASLLEARRLKGIRIPSQQQEQQRLLTRTRQQLIEERTAIKNKIRMKCHQLGLIEADESRRMSHKLVEEMLSKSPSPEFSLAIEAYWQIWKTIETEVKKLEKRLESQAKEDPNEKIYRSAPGIGPLGARILSNELGSMSQFNNERQLFSYTGMTPCEHSSGESTRKGHITRQGNSRVRWLLCQAAWRAIREDLDLKEYFERLHPRTGKKRAIVAVARKLIGRIRAAFRQNTLYCLTPIT

SEQ ID NO: 394903 - protein, 409 aa, unidentified
MVRYVGLDVHKVWTQVARHLPDGSVQRERIGTSPELLRQFAQTLGPQDVVALESTTNAMPIARLLRRRAGQVLISNPMKTHLIAKSHVKTDKVDADVLAQLAKSGFLPTVWQPPEDVELLRRRSAYHGALGRQITRVKNRIHAVLARHLVEPPVRDLFCDRGRAFLRQADVPEDEKLQIELDLQVLETLEAAREVAHKELARLAHAQPQAQLLMTIPGINYTTAVGILGAIGDVGRFSEPRKLVSYFGLNPIVHQSAQHCYTGRISKQGRCMARWLLVEAAHCAVRPAGPLRGYFHRLKKAKGTNVAIVAAARKLTVIIWHMLTSGEPYRWAPERTTREKLGLMHYHATGVRRKGGPRKGAGRSEFYGTGLRGRTVRAGRDKRCLARAQKDYERFVKERKETPRPPETT

SEQ ID NO: 394904 - protein, 387 aa, unidentified
MTKNKGRVVGLDVHPDSFAGAVVQGRDPASAVVLSSSTRVQLERLEQWALRHTSTEDTLVLEASGNAFAVAARLRAIGRKVEILDSHRAGKVGKVYCANDRVDAVKIARIYLSALSPIVWQPDEKTLERREIFSAYQGVVKESTRAKQQLRSMLNEHCVRLEKGFRLCHPKAITCLLKLREWTPARRMLLQQLHATLLAARARRTLLRRHMAQEIVAEETLMRLTRLCGINLITLYGVVAAVGDVRRFPHSKKLVAYLGLNPSVSQSGNFEGSGALKRHGRGALRALLIQSGKKLLEVNNPLQKWGLAVASRRGRNKAAVAVARKLCVALWHVLMGHVIGALERLDTLETKLSKFATEIGPAALRAFGYNNKADFVEKKLYVLRSYP

SEQ ID NO: 394905 - protein, 317 aa, unidentified
MTNQSLTIGIDVGKMFLDIHIHPVNQSFRCDNTKGGHKTLLAYLQEHQVPENSVAVLEASGGYERPVWICLQSAGYTVHLVQPMRARNFIRARGILAKTDKIDAQALACFGSSGLTKGSTLPDKTQLGLRDLSRSLQNLRKHAGQIKEQIEKATHPITVKALKALHRSCQRQAEKLENVLQNMIEECPKLFNLTQLFCSMPGIGNYTAMILVAELPEIGQCSKTQIAALSGLAPYTKQSGAWKGKSHIAGGRKQVRNALYMAALSAVRYNPPLKTFYNRLKDNGKTFKVSITATMRKMIVALNSMAKNNSAWETNHA

SEQ ID NO: 394906 - protein, 430 aa, unidentified
MKSNTQNAKIEAITEKTLVLGIDVGSEMHYARAFDYRVIEYSKKPFKFSNTEAGFATFKEWVLDLKERHEKDKVVPGMEPTGHYWFNLGKFLQDNEMKPMLVNPHHVKKSKELDDNNPTKNDRKDPKVIAGLVREGRYMIPYLPEGVYADLRTASNIRFQLQAELTRIQNRISRWFNIYFPEYKTVYGKPDAKSGMLILKAAPLPEDILTLGIDGVNQIWRDAKLRAVGKARAKTLIEAAEHSVGSKEGAVSARMEIRMLLEDYESRNTRLQEVMVLIEELVRKIPMAEKLLEIKGVGIRTVSGFLAEVGDISRFNNPKELQKLAGLALVENSSGKHKGETTISRRGRKRLRYLLFEVAMSLVAKNPEFRELHNYYTTRRLNPLKKMQSLMAIAAKLIRVFYVMLTKGVDYDPKKMVSDIKRPAVYLQAA

SEQ ID NO: 394907 - protein, 398 aa, unidentified
MNHNISTYIGIDVSKDKHDICIKNNDGNVLKHFQIRNTKRDLDKLYTIVNKLKSDSGDDTDAFFGMESTGTYSLPLYSALKRDGHLVKLYNPIQTNGYRKIAIRKTKTDPIDAAIIADMLHHQEPPVSTAIDNLELFQLRELCRVRQRNVEKRTKCKIQLIRDIDTVWPGYQSIMKSAYGETSIALLKEYSVPLNVAAKPFKEIYEMIKKASRSQITETRAEEIYKHAGNTLTVPEIDSIISIEIKALISEIELYDEQILTIEKMMVQTMKQIDSKITTIPGIATITGATILSEIGDINRFSSAKKLVAFAGLDPIVYQSGKFENKTGHISKRGSPQLRRALFLAANVTRRNDLNFMDYYNDKIDRGKHHYSAVNATAAKLLRVVYWVLKNDKEYKVK

SEQ ID NO: 394908 - protein, 424 aa, unidentified
MSNLGFRIYPLCLRVFVAIFSSLCSLCPCMLTSTMDKGSIAKAALGESSVARRAESCRRREIERAQTHEVVTEHDPRRRCGTSPNSRKSRRRPTRSASSHLQDWECTMEEQIFIGIDVAKDTFCVCSSPAAVNLSLANSSSGIKQLVKALKPNNVELIVLEATGGYERPIVAGLLEADFKVVVASPRQVRQFARGIGELAKTDPIDARVLARFAQIVQPKPRPQFSRKTEELADLVTRRNQLTALRTKEINREQTVRHPRVHKSVRKMIKTLNYQIAEIDQLITEHITSDEELSNKDKILRSTPGVGPQTSAILLSQLPELGLLNRQQIAALVGVAPYDFRSGRFTGQSRIWGGRKEIRNMLYMAALTAMRCNPVIKHFSERLISQGKKFKVVITACMRKLLIILNTMVHNETLWQSEKKPKNN

SEQ ID NO: 394909 - protein, 350 aa, unidentified
MLIIGCDFHSRFQQIAMVDMETGELFKRRLEHSNGEAERFYAGLHRPVRVGMEATGYAQWFERMLAKLGHELWVGDAAEIRAAMVRKQKTDERDALHILDLLLANRFPRIWVPSPAERDVRQLLRHRHKMVCLRTSVRNQLQALAMGQGIYRKRKMWTATGRTELEGLRLDPWASRRRQELLQILDRLDPCLAELDRAVAKEAEQRPAARCLMEQPGVGPVTGLMFVLTIGPVERFRRSKQVVSYLGLNPRESSSGGRQRLGAISKQGNSMARFLLVEAAQTASLYDEELRRDYRRLKFRRGTAVAKVAIARKLAVRLYWKLRKHSSLIPPARMQGSPEHPVVGASLSGN

SEQ ID NO: 394910 - protein, 416 aa, unidentified
MKKHSNSGKKSEPKTNRAKSRGPVQRDTKEVLAELVGKLKEKLDPKKMAATSAGEQHQRGGLRPNLDRLTVGVDLGDQWSNYCILGLEGETLAEGQLRTTQEDIAEFFQALNAARVVFEVGTHSAWVQEVISGCGHEVLVANPRLMDGSKRRKRKNDRIDANKLARLGRVDPESLYPIQHRSREVRQDLVMLRARDALVAVRTEIINTTRGLVKSMGTRLPKCSSRSFAHKGEEAVAVEMREALLPLVRLAATLSADIKEYDKKIEELGREKYGHTALLRQVKGVGPITALAYVLTLANPQRFVKSRDVGPYLGLVPKQEDSGESQPQLGISKAGDTMVRKLLVGSAHYILGPFGPDTDLRRYGLRLCERGGKNAKKRAAVAVARKLAVLLHRLWVSGEVYEPLHNAMSAPIAAAA

SEQ ID NO: 394911 - protein, 341 aa, unidentified
MKYIPVGVDIAKHLMQVHFVDEHTGEIIDKQVKREKFLEYFSNREPCLIGMEACGGSHHWARELQKLGHKVRLLKGRFVKAFVMGNKNDVMDARAIWLAVQQPVKSVAVKSEEQQATLGLHRMRQQLVKFRTAQINALHSLLLEFGETTHKGRAALAKEVPEALERLKERLPLYLINMLDEQYQRITELDEHLDHIEKQLQAIARQNETCQRLLNIPGVGPLIATAAVATMGDASAFKSGREFAAFIGLVPRQTGSGGKIRLLGISKRGDKYLRTLFIHGARAAALLTKEPGPWITELKKRRPASVAIVAMANKLARTVWAIAAHGRKYDKNHVSIRLINR

SEQ ID NO: 394912 - protein, 427 aa, unidentified
MKYALIQVLPDDPPGGVVAGIDWATADHVACVVDMAGRITDRFSVCHDRAGIDALISRLRKSGAAEIAIERGDGVLVEALLAAGLTVVVITSRQVKNLRSRYRSAGAKDDRFDSFVLADTLRTDRARLRPLIPDTPATTALRAAVRARKDLVAHRVAACNQLRAHLAVAFPAAIGLFFDLDSPVSLAFLARFGSQDAAGQLDEQAIDGWLKTIPARGNTAPASVLCARLRAAPGGVTGEDGAAHARITAALTATVSMLAAQVKTLETGIGIQLAAHPDAHIFASLPRAGMLRAARLLAETGDSRSRFPDPQSLAALAGVAAVTRQSGTHLSHAFRWAVSRQLRDAVCDFADGSRHASAWAASVYDAARARGKDHPHAVRILARAWIYVIWRCWQAGTAYDPAKHNALQRILQQQAANAVATDSGDTR

SEQ ID NO: 394913 - protein, 318 aa, unidentified
MYQNFVGIDISKDTFMVAALGDKKTQSFHNVLSGFNAFCQSYEHLLPSALVVLESTGGYEMPLIRFLLAKEVPVHRADTRKVKYFIRSLGTQAKTDAIDAEGLAQYGSERHARLACFTLQPIEQEKLQQLTQRRLDLKHYLVQEKNRQQSPHENTFVKETCRLLIEAIETQSKSLEAEINQLIQGNSVYQAKQSVLQEISGIGPIIANSLLALLPELGLLGRRQIASLVGLAPYPYESGKKVGHRQTRGGRQAIRSILFMAAMTAARSKGKLGQFYQKLIANGKKKMVALTALMRKIVVIANAKIRDWNLSLNGTQPV

SEQ ID NO: 394914 - protein, 343 aa, unidentified
MELYVGMDVSLKETSICVVDGSGEVVFEGTVTSEPVAIAEVIRSKAAGALRIGLETGPTSTWLWHELRALGLPVICIDARHAKAALSMQINKSDRNDAVGLARIMQCGWYKEVRVKSVACHEIRAVLNSRGLLVKIKRDLENQIRGLLKNLGLVIGKAGGNVFRRRAEELIGGQGLLGEAVRPLLEVREKVSREIAALQQKLLDLARNDADSRRSMTVPGIGPITALAFRSAIDDPSRFRRSRSVGAYIGLTPRRHASGEVDWSGRISKCGDRMLRTYLFEAAGVLLTRVAHWCKLKVWGHRLWKRIGFKKAKIAVARKLAVILHRMWRDQTDFIWSSKETPA

SEQ ID NO: 394915 - protein, 315 aa, unidentified
MTTSSGRYVGIDVAKDRLDVAVLGEGQVSQVPNDSEGIARLTGKMQELAPELIVVEATGGYQREVVEGLFQAGLAVAVVNPARVRQFARACGLLAKTDKLDALVLAEFGQRVGPRRYEGKSEAGKQLSALLVRRRQLDEMLKAEQNRLRRLSQSLKSSAERIITCLKEEKKALDEQIQQFVKEQEDWQEQAEILTSAPGVGKVTTATLLAELPELGKMDRKKIAALVGVAPMNFDSGKKRGYRKTKGGRGDVRSVLYMATLVATRYNPVIRKEYTHLLARGKLKKVALTACMRKFLTILNAMMRDRQPFRSAALA

SEQ ID NO: 394916 - protein, 409 aa, unidentified
MMKQNIIFGIDVSSKSSTVCVVIDRIKQGETFKITNDSFGYQDLLDRLNQYLITPLVVFEATGVYSLSLQAFLEDYHIKYLKLNPLKAKKLMDNNLRHNKTDKVDAYRLALIQFNAPQKLRAPQPKEYHELQNASRYYEELTQALIINKNQLHRNLQSTFPQIESILSTSSGRVYWTIVSLFPHAQYVLNHNENQVFQSLLAISGIGRQRAHYLTTRLYALARQAYPYDNESSITIRAIQRNIANLLSLSAERDNVINYMEKLAMQANARSLNIYESIPGIAKTTAVRLVAELGDLRRFDTSAQIDAFVGIDPGRYQSGEKDSHLGITKHGNHLARKILYRTITQMETVKATQPCHITDYYDKKKRSSNSRGYKKIAIASVHKLIRTMFALIKHDQLYDYNVATHNQGL

SEQ ID NO: 394917 - protein, 367 aa, unidentified
MKKISTVAVKQSKNISGKKLTIGLDLGDRSSWYCVLDEAGEVLLEQKLSTTPKAMKDVIGAMPRCRIALETGMHSPWVSRLLSDLGHEVIVAHARNVRLIGESRKKDDRLDARTLARLARIDPQLLSPVKHRSAKAQADLTVIRARAGLVRSRTALINTARGLTKSYGERLRGCNPRNMNPEKAQQLSPELQAALEPLLAAIESLSERIHEYNQQIEKIARESYPQVARLEQVKGVGTLIALTYLLTLEDPHRFRKSRDVGGYVGLQPGRRNSGKSEPQLHISKEGDPYLRTLLVQGAHHILGPFGADSDLRRWGLKLAERGGKNGKKRAVIATARKLAVLLHRLWVSGETYEPLRNSHQSAMPAAA

SEQ ID NO: 394918 - protein, 362 aa, unidentified
MDSNGFGDFLKTIRSYCEDLSKVMVAMESTGCYHINLFSFLSSQGIRTMVVNPLLIANFAKLSLRKTKTDKKDAMTIARFLLDHHEEVSHLSLSQDHQDLRDLSRERESLCHLMAATKVEIKRVLRTTFPELDSIGNLYTGAMLRFLQQYPSARLVRGAKRRAIAKALKGPYAGDKLTYSSEDILRAAKTSIGTVSPAKEIIVQGKIATLLHLQERLDEMTKLLTDLRKATRIDDLKILRSIKGVGLKTAAPFLAEMGEVQNYASHKKLIAFTGIDPSLHESGNYIGISKLSKKGNRHLRRAVYLMAAAVASKNPFFKAYFLRRKREGLPPQKALFATAHKLLRVIFAMLSNRTYFKPKEVI

SEQ ID NO: 394919 - protein, 340 aa, unidentified
MNATTFGLDIAKRTFQMYWIEAETGEVVNRRFTKQQLIEFLGQRAASRVALEACGSAHWWARKIAALGHQVVLLHARFIRPFVQNNKTDATDARAIWTAAQQPGMRSVAPKTADQQAMLGLHRMRSLLVKSRTMQVNQLRGLLYEFGVTLRAGRLAGLAEVRERLGEIEQIVPGILFCALRDQLQFIERIEADIRKLERQIVAWQRQEAACRRLSAIPGIGPLTATALVATIGDPAAFKSGRELAAYLGLVPRQSGTGGKVRLGGISKRGDSYIRMLLIHGARAVLFKSRSKEAWCEQLSRRRPANVVAVALASKMARTAWSLLANNRTYQKDYALQKTA

SEQ ID NO: 394920 - protein, 329 aa, unidentified
MSALVCGLDVHKDSTYATILNPEGKIVNQTRMSNERVLPYLSHFDVGKVGMESSNQIAPLFRQLTAKGYNVVVSHPKKTRYIAEAKIKSDRVDSKAIAELVRLDALPLAYFPEGEIAKLREKVRRRAFLVRSRVKLRVKIKSVLTYEGLKWPSDHGLFTQQGVEWLYGLNLDSVECYLRVLKPLDEEIKLLSKELVGIAEDDEDVKLLMTIPGIGYYSAVLMKSEIGNIERFPFAERLCSYAGLVPSTHASGKTVWHGGITKEGSRWLRWVMVEAAQTHVHRYDTSITRAYNRIAEKRGKKIAVVAAARRLLMCSYSVLKNKKPYYDQA

SEQ ID NO: 394921 - protein, 439 aa, unidentified
MQILYSRCCGIDVHKDSVTACVLVYADGKEPEVRRKEFQTHFKALLNLKMWLLAQKVTHVAMESTGVYWKPVWQALEGHFELILANPYQVKTVPGKKTDVRDSQWLAELLAHGLIKPSFVPPRATRELRDLTRYRVKLVEERNRVHNRIHKVLEDASIKLDTVASDILGASGRAMIKAIIAGQEHPDWLADHAKGTLRGKRPELRLALRGRITDHHRLMLRELMEDLEFVERKIQRLDAEIASKVDIETLARLATIPGIDLITAWTLLAELGTDMSVFASPRHAAAWAGLCPGNHESGGKRLSNRTRKGNRWLRRALCQSAWAATRKKNCYLAAFFYRKAGKHGIRKAIVATAHRLLLIAFCILRDRTEYLELGDNYFDRLHPERTRNRLVRRLQRLGLDVFLRPLAAAPALPPLPPTSKKRGRPCKCAERLIPCKHIS

SEQ ID NO: 394922 - protein, 394 aa, unidentified
MKLIGIDIGKNKHFFCIMDKDSGEIVSQPASFSNDKEGFDFLLQKIKSYPKNSVLIGMEDTGHYHFALLKYLLDLQYTVALINPKTTDFNRKMQGGITKNDKLDTINICDVLDTPERKKQYRITKVNKFDLYEQKQLTRQHHNLKEELNVYKNRLQKSIDIVFPEFNSLFKSKYGTVYMNILKTFGSAENIANTDIRTIRKCFEIDGRGNRISLTPERLKERARSSIGISSIAEVIQIKHLSAQIELIEEQLSEIDKKIEEFSIQNNSPILSIPGISHFSGTSILAELGDISNYSKPSQIIKFAGVAPLHYESSQFNAQHTAITKKGSKYLRKTLYQIILPVIRHNPVFNKYYQLKISQGKGHRCAQGHCVRKLLRIIYHLLKTNQQFDPQLLR

SEQ ID NO: 394923 - protein, 308 aa, unidentified
MTIHHTYVGCDIAKAVIDVFDPLSRRFSRVANEAAALARFAAGLAPNSFVVLEATGHHDRALRQALAKAGIACVRINPMTVRRFAQARGHLAKTDRIDARILSEMGAMFCPDADTPPCPGRERLVALARRRDQLVAARALELRHRDETTDITVLADIEAAIVGLSQRISALEAEIASHIETLDELAEQAERLTSAPGIGKVTAITLLAHMPELGTISPKAIASLAGLAPCNNDSGTRTGRRSIRGGRPRLRRALYMAALGAIRANQRFKAFYQAIAQRSGSKKCAIIAVARKLITILNAMIRDQKHFA

SEQ ID NO: 394924 - protein, 449 aa, unidentified
MAMLVKREKLPQEQQVASIPVVYPRACGIDIGSGSHYVAVPGGEVREFKTVTKDLEAMAQWLQACEVDIVAMESTGVYWIPAYELLESRGFEVRLVHSRHVKNVAGRKTDVIDAQWIQQLMSFGLLAGAFRPAQEVCALRALSRHRDTLIADQARQVQRMQKALTQMNVQLATHLTDIVGETGQNILRAIVAGERNAYRLAKLRNYRVHATEAQIAACLQGNWREEHLFVLGQELRLFDEYQALILAVDRQIEAMLGRLKRFAVELPKHKQKGGRSKHAPAFDSRQALYLWAGVDLTRIGGIEVSTALKILVEIGWDLSRFKSSKHFANWLGVCPGTRISGGKRISGASKRIPNRVAQALKLAAQGLRNSRCSLGAYYRRMAARMGTGKAITATAHKLARLVYAMLTKGEDYVERSEAQYEEQMKDRTLRYLERKAATFGFRLEPNAAV

SEQ ID NO: 394925 - protein, 312 aa, unidentified
MAKPVTKITLGIDVAKDQLVICQWGCEQLLTLVNQPAEIQAWLETLCGPVRLAIEPTSHYHLAVVEAALACGHQVYLVNPRQLVHYRYAVDVRNKTDAVDAWLLARYLEHEAAQLRPFRPQDRRAQRLWALLTRRATVVQSRQQLQQSFAEVRLSIQALLSQFQQLLQRLDQQIQHLLRELGWWPDYLRCQSIPGIGPANAAALVAAYHRGAFAGSDAFIAYLGLDIRLRESGRFKGKRKLTKRGEPELRRLLYCGSNAACNHPRFAAYRQRQLDKGLSKIAARVALARKLARIAFTLMKNQQSFTDQPKIA

SEQ ID NO: 394926 - protein, 412 aa, unidentified
MRRVIGLDIHRTFAEAVAWEDGRLVRLSRVDMTRTALEGFGKGLRPSDEVVVEATGNAMAVVRVLSPFVARVIIANPLQVKAIAHAHVKTDKIDAGVLASLHAAGFLPEVWTPDPETERLRRLVARRNQVVRHRTRIKNEVHSILHAHLIPRCPHADLFNRRGRDWLARQPLPADEKATIDRHVRELDRLAEDLDVLDREVAQDAIGNPSIERLITITGVNVTVAAGLVAAVGDIRRFASPQKLVSYVGLNPRVRQSGLGLAQHGRISKVGRSHARAMLVEAAWAAAKAPGPLHAFFVRIRARRGHQIAAVAVARKLAVLCWHLLTKETDYLWARPALVAIKKRSMELQAGQPARKGNQRGPAYAYNVKELRNREMLVATQAERAYEHFVGQWRPRGPGKGVRERLNPARHE

SEQ ID NO: 394927 - protein, 424 aa, unidentified
MSNAVYSSQSEFAAFVGIDWADRKHVWALQVSDSLLFEQGELDHTPEAVEQWAAALARRFPGRLVAIAVEQSRGALCFMLSKYEHLVLYPVHPNSLASYRKSFRPSGAKDDPDDASLLLDLLVRHRDRLRRLNPDTVETRTLQFLVEDRRKLVDERTRISNRLTDYLKLYFPQMLDWFDQVRSPLVVDMLERWPTLEELQRAKASSLRQFLTRHNCRSQSKIQERLERIRRAVPATRDAAVLTAGRSAVTTLVQLLRQLNGAIRAYDEQIQQRAQNHPDFAIFDSLPGAGPALVPRLMVALGTQRDRYQSAYQIQCYSGIAPVVESSGQQLWVHWRWCCPKFLRQSFHEWALHGKSHHTAVRALAFKWIRVLFRCWQDRTPYDETKYSHALQQRCRKPASPQPVAVDLQLKKVAGFWKLSANPS

SEQ ID NO: 394928 - protein, 441 aa, unidentified
MAVRKVFELMYPNAAGIDIGSASHYVAVAADRDEQPVREFKSFTEDLLAMADWLSGCGIDTVVMESTGVYWIPVFELLESRGFAVYLVNARHVKNVSGRKSDVLDCQWLQQLMSFGLLSGAFRPTEEICVLRALSRQRDMLLGAQGRHVQHMQKALTQMNVQLANVITDIVGKTGQAIIRAIVAGERDPVKLAQFRDRRIQASEEQIAKSLRGNWREEHLFSLAQALKLFDAYQQLIGECDQRLEQLLLQLARHAGEPEPNRNKGRQKNAPKFDMRTALFRVCGVDLTRIDAIDVSTAFKVIAEVGPDLSKFKTVKHFCSWLALCPGTKISGGKRLSGASKPSANRLAQALKLAATGLLRSHSALGAYFRRMAARMDKPKAIKAAAHKLARLIYTMLTKGTEYVDRGQDYYEQQYRQRVVANLQRRATALGYQLMPSAKPA

SEQ ID NO: 394929 - protein, 322 aa, unidentified
MRYIGIDVSKATFVVAYSSDKGGEIRTFNNTTAGIRQFIGTLPKDGSIHCVMEATGNYSALLLYMLNVAGITVSMENPLKVKNFAKALLSTVKTDKSDARLITLYGEKMNPRPFKVQGEAILRLRQKRTVIRQLTKQITAMSNLRGSLACLPVPDKGATHTVDETIEFLEKRRDRLQSELTDLVEVEFSRQLALLTTIKGIGITLATALIITTGGFTYFQNAKQVSRYLGICPTYEQSGTSVNIKGHINRNGDAYTRGLLYIAAWPASRFNAQCKETYTRLRQNGKPGKLAMIAVANKLVRQAFAVVAHDKEYIDGFVSNRP

SEQ ID NO: 394930 - protein, 359 aa, unidentified
MKTQRNEISFKGQSIYVGIDVHLKSWSVAVLSQTSVMKKFRMDPNPEGLKTYLSNNFPEADYYSVYEAGFCGFWIHDRLTSLGINNIVVNPSDVPTTGGERLRKTDAVDSVKLARSLRANELKGIYTPDVASLEIRSLIRLKNSITKDMTRQKNRIKSTLRYLGVEIPKEYTEPFSNWSKRFILWLREVQMNTSSGRDALNLQIEQFEALRKQKLMMTRKLRALGRSDRFKDDLDLIMSVPGIGMTTGMALLAEICDVRRFTDGAHLAAYIGMTPMCHSSGENDGTGDITLRKNAIMRCNLVEAAWVAIRQDAAMNLFYTECCRRMVASKAIVKVARKLVNRIYYVLKRRKKYVNNVVS

SEQ ID NO: 394931 - protein, 430 aa, unidentified
MEQVDSIRLQEFRQVKKEIRGSDKYLIVGIDVAKEKHNAFFGTATGRTLHNGLFFDNTVEGFEKLLTMAEALKVRHDLTKVVFGLEPTANYHKPLGEHIIKCGHLVVLVAGAAVKNNRTLLDGRWDKHDTKDSANVADLISQGKFLYYEYPVQEMQDLRNLLALKRRLKKEEHGLQVRIRNQLLARYFPEMDRHFGTAVSLAIVGRCLDPSMIAGMEFDEFRRSIAHGKMNLAQQKLLHAIWEIAPESIGCHVGDEVLFEAKVMVQKLNQVRETIKEVKDKIKDLCMQFPEYPCLLSIPGFGPDVSSKVIGAIGNPFRFTSYKQVLKMAGFDLCANRSGKNSNSITPVISKQGKGDLRYALYQAALVASFNDKNFITYYTNKLRGRHREKGIGTKMRVKIAAKLLVIAWTLMKKKELFDPKYLNKGDTTV

SEQ ID NO: 394932 - protein, 428 aa, unidentified
MVRWQAPASAEGSRVMVYVGVDIAKVDHVVGAVDERGERVCRPMGFKNSEAGFERLCAWLEGVARDAEDAVVGMEATGHYWMACYSYLTAKGYSVAVVNPMQVRAVRDLRGRSRVKNDRVDSELIAETMRVGQCDPTRLATEEVQALRLHTRYRQGLRDAIAEAKTQAKCLLDSYFPEYEGAFSDEFGAASMAVLGKCPTAVECRRARTSTLARIISEASRGRLGEAKADELKSRAKSSVGIDLAWEAASLEVRGYVARIEFLEAEVAKLDRVIEEALRELEPLVLSIPGIGVTNGAQIVAEIGDVSRFRNASALVSYAGLNPGVSQSGRFEATDVHITKKGSAYLRRAIWLAASRAYQHDDALGDFYARKRSEGKSHREAVTAVARKLCHIVFAVMRDQRPYDPTRPGKDPARGASQKQSLFDSQGT

SEQ ID NO: 394933 - protein, 427 aa, unidentified
MNEIESNSIDRFRQFKKEIRGSKEHLIVGLDIAKRKHHGFFGDANGRTLLKGLIVENSAGGFRHLLTQVRFYMDREGLSRVVFGLEPTSVYHKPLAEHLIEQGHLVVYATNEAIKKNRSLIDGRWDKNDTKDSANVADLVAQGKCHYYDLPELRLRDLRSLLLFRKRLKKQLHSCRVRIRNNLVAQYFPELDWFWNNAAAENLAIVRWFLDPGRIRQLSCEQFIVKVTTHNGGLRQQRRLQHIWEAAGQSIGCRPGLAMALEAELVVEMLQSVQAQLSRVERDIQKIAEGFEEYDYLKSIPGFGPYVSAVALAAIGNPHRFENRAQLIRLAGFDLSANRSGEKSKAAVPVISKKGKAGLRYALYQAALVASSLTSDFRAYYSRLLDGRQREKGIRTKMLVKIAAKMLVIAWTLMKRKESFNPAHIQA

SEQ ID NO: 394934 - protein, 416 aa, unidentified
MLFVGDDWAEDHHDLVVIDDNQKVVARARVPEGPAGITAFTDVIARAALKTVTSDDDLDDDAVEVMVGIELNHGPWVQALVAAGYQVFGVDPLQAKRFRESWSNSKTKSDSGDALGLAELVRSRHRTLTTVGADSEGSAAIRILAREHQRAVWDRTRQTNRLRSTLREYHPAIVTIAAKYDLPLHDKTILGLLTLAPTPTAGAAITVRQVLPLLARRHDKDAKAAWIVQALRQPQLPVGPEIVEAYAITVRAATRVISSASSHIAELEEQVNAHFSRHPDAEIYLSQPGIGQVIGARLCGEYGDDSTRFRTAKDRRNFAQTSPLTRQSGKLRIVCARKAGNDWALDAAVRQANAAIMHDKHAHAYYRRQRDRGVKHNAALRQLANKLTGILHGCLARHHRYDPAIAWANADLEVAA

SEQ ID NO: 394935 - protein, 415 aa, unidentified
MLKIVYPICCGIDVHKTFVVATIATTDRENITTYQTKRFSTFTQDLRSLAMWLSNNQCVFVCMESTGKYWIPVYNILEPSCQITLAHPKYVKAIRGKKTDKKDSIWIADLHKHGLVPGSFIPPVDIREIRDLLRYRSKLVSFASSEKNRVQNSLTVSNIMLSSVVSDTFGKSSSAILSHLLKHPDDKDFDFRPLLHGSMLKKQDDIALAIDGTISQVQAGKITLCLSHMDDIKSYIAQIEATAMRLAASYSGAIEIIQSVPGISQLSALAILSEIGADMSAFHSAKHLCSWAGLAPSNDQSAGKKKSVRISRAGVYIKPLLVQCANAAIKDKTFPHYRTRYEAIKHRRGHKRAVIAIARMMLTAIYHMLSTGELFNPALYEKAQSKPGFVASSEEHAVKLLQRLGYSVVKIPESA

SEQ ID NO: 394936 - protein, 356 aa, unidentified
MSVYLGVDFHARTQTVCWCDQADGLVHQRTLDHQHDDVRGFYTQFAVPAVVGLEATGYARWFHRLLESLGHRLLVGDAYVIRKCALRRQKNDRRDAELLLDLLLHGDFPAVHIPPMASQAVLRLLRYRQRLVEIQTKLRNGTQALALNHQLRLGPKLWSKQGQQQLLALELDDTDVLQREHSLELLTQIHTRIRTIEKELTLRADQDTRVRLLRTHPGVGLLTSLVVVHALQPVTRFDRARRVAAYCGLDPCETSSGETVRMGHISKQGNRLLRHLLVEAAHRAVHCKTDNDLRNFYFRLIERKKNAAVAITAVARKLVLRLYRMLRENIDYTEFRRRGREARRARKTASPVVGGC

SEQ ID NO: 394937 - protein, 407 aa, unidentified
MEVLHPRCGGLDVHQQTVVACARVVAGSSVAHDVRTFGTTTPALLALSDWLAAHGCTHVAMESTGVYWKSVWHVLEGSFELVLANAMHIRNIPGRKSDVNDATWIADLLAHGLIRGSFVPPAPVQELRDLTRTRKQLVREITQHTLRIQKTLETANLKLTGLLTDILGVSGRAILQALVAGETDPERLAGLVRGRVKASRADLVAALHGRVTAHHRFLLTLHLSQIEALETAVSAVEARLGDALAPFRTAVDRLITMPGVSETVARVLVAEIGFDMTRFPTAGHLISWAGLCPRLDESAGKRLSTRTRRSNPWLKTTLVQAAWAAARKKDGYLRAQFLRLKSRRGPKNAILAVAASMLIAAYHMLKDDVDYRDLGADHFDRRDKTKLANRLIQRLHQLGFTVEVRAA

SEQ ID NO: 394938 - protein, 416 aa, unidentified
MNAAGIDVSGRKSTVAVLRPFGEVVKLPFDVRHSAEDLAALAAQLKSIDGETRVVMEHTGRYYESVAKVLHEAGIYVSAVNPLLIKEYGNNSLRKVKTDKADAMKIAKYALDNWAELRDYTPMDTIRYDLKTLNRQFQLASKQKTATVNNLIALQEQSFPGIRKLFDNPVRSDGTQKWVDFTHDFWHVDCIRSGSQNAFTERYRKWCKRNRYQFSMEKAAEVYALAKSAVVLVQKTSVTKTLVQEAANQLTAISRSVETYRSEMNKLASQLPEYPVVMEMYGVGESLGPQLMAEIGDVRRFARKQSLIAFAGIDPAPSESGDYCSRSNRTTKRGSPYLRKTLFNIMKVHLQRAPADEPVFQFLDKKRTEGKPYYVYMTAAGNKFLRRYYGKVMAYFSTLEELPPVDMDSTGLRHAE

SEQ ID NO: 394939 - protein, 358 aa, unidentified
MKIVGCDLHARQQSIAMLDTETGEFPEKIVRHEGNAVREFYAALEGPIVVGIEATGSMQWFLQLLEELGIQYRVGHPAKIRAAATRKQKHDRRDARLILDLLVMKDRFPEIWMPSMEQRDMRTLLRDRHQWVKMRARLQHTMQSIALNPGLRQGPGLWSGAGQSALQALPLAHYTSQRRNALLSLYAQLQKRIQELDKVVEAEAQSRPQACRLLTHPGVGPVTALATEVFLGDPNRFRTGKQVASYIGMIPGEHSSGKRQRLGKLSKEGNALLRYLWTEATMHAAGKDPELKRFYRRKLIQKGMGKARVAAARKLGIRLWIMLRDQIDYEEFCRRAKLRQEGEAHAGMPAFNSGPALQ

SEQ ID NO: 394940 - protein, 355 aa, unidentified
MNSLKYIGMDVHLASISIVVLNAAGKLIMEVTIETQAAALLDFIRGVSGTLHVTLEEGTYAEWLYDLLLPQVAEVVVCDPRRTPRRRGENKSDRIDARQLAEWLRVGTLKSVYHGNPSRGALKELAKSYLALVGDTTRVMNRLKALYRARGIACKGTRVYSPTLRPEWLNQLREPGVRRRAELLYQQLDLLRPLRQQAREAMVAESRQQPAHKILRSIPSLGPVRVALLMAILQTPHRFRGKRQLWTYAGLALVTRSSADYQLVNGQLTRSRKPVLIVGLNANHHHALKAIFKDAAAGALLHPGPLQEFYAARVAQGIKPELARLTLARKIASLTLNLWKKGERFNAKYLKPQAA

SEQ ID NO: 394941 - protein, 346 aa, unidentified
MKPNSQMTLDKYFRQCVGIDISKDKFTACLYMYDIASDVGCHTESIDFANTKTGFNQMVKWSRREAQKGFPLTYLMEPTGSYYEPLAYHLNKIGLTVYVVLPNKARKFCEYEGIKTKTDAMDARCLALLGCANRKLRPWEPPKPIYRELRQLTRLRASLVKMQTQLRNHIEAVDHMESASKEVRKSYEKLLDTIDRQLEKNEQAIETKVAQDKELEARIKRIATAKGIRTGTVTCIVAETQGFYLINNRKQLTSFAGLDVVARQSGKDDPKHKISKKGNAYIRAALYMPALSAAYCNRQMNQTYMNICDRHPDTKMIGVTAIMRKMLLLVYSLWKSGEEYDETRDS

SEQ ID NO: 394942 - protein, 345 aa, unidentified
MKYYVGLDVSLATTAICAVAENGAIIREGVAASDPDEIANWLDQLGLAFERVGLETGSTAAWLYSGLRDRGVPAVCIDPRRLRAITKTMRIKNDRNDARAIAHCMRVGWYSVVHVKSEVSQVVRMLLTNRRTLLIKQIDIENEIRGTLRVFGIRLTGRVTAGPFEARVLELIAKTPHLEAIVRPMLVARTALRQQCAVLHKMVLDMVRKSATCRRLMTIPGVGAITAVTFLTTIDDPARFHRSRDVGAHLGLTPKKYASGETDRNGGISKCGDAAMRAVLYQSALALLTRSKKYSAIRVWGLGIAKRRGLRRAAVAVARKLAVLMHRIWADGTEYRWQREAVVEA

SEQ ID NO: 394943 - protein, 347 aa, unidentified
MSRNLSPSESMVSVGLDVHKDSVQVCVVDHAGRVLSNRRVENDVAAIVGAAGGLRPVHGVALECGTGVAALADALIQKTGWDVHLCHPGYVRRMRQNPDKTDFSDSHLLADLVRVGYLPRVWLAPPAVRDLRAAVRYRQQIVDRARNTKLRIRALLRDHRVPDVPRWLWTQHGLAWLRNLRSLPPLAGWVLENHVEELVIDLARLAKATARLREVAAHDTWISGLLTQPGIGLVTACVLRAEIGHLQRFRTGKQLARFCGVSPCNASSGARQADAGLVQGCSRLLRATLIEAAHRLGRHHPRWKAFKAHLKARGKAGSVIAAAIANRWVRGLFHELQAVEQTVPVAA

SEQ ID NO: 394944 - protein, 388 aa, unidentified
MPQTPNDLSRSLTALEQTATLVAVVEMSQASWLVAGMIPGLERQPLKKIAPNEAALLSLLQRWQEEAIKICQTIRRITVAYEAGRDGFWLARWLCSRGIEAHVIHPTSVAVSREHKRAKTDRLDTAMLIRVFLGWLRGERGHCGMVAVPTLEEEDAKRPSRERENLVGERTRIINRMKSALVRLGIRGFKPELRRAPQHLEKLRTPENVPIPLRTLEELRRDMARLAMVRAQIEAIEQIRLQRLEQAPQDVAHAMVRMLANIIGVGVETADMLVREILAKELRDRRALARYAGLTGSPNESGSKRREKGLAKSGNARVRRGLIQLAWRFLRFQKDSALAQWYRTRIEGAKGARKTYLIVALARKLLIALWRLVTIGEVPQGIVLRQAA

SEQ ID NO: 394945 - protein, 367 aa, unidentified
MGWMAPLRHLSAMLLAVRESAANGEPSMGEVTTIGLDLAKHVFQVHGVDADGGTVLRKSLRRAQVLTFFSRLPPCLVGLEACATAHHWARELRALGHEVRLMPAQYVKAYVKRNKNDAADAEAICEAVQRPTMRFVAIKTAEQQAGVLLHRGRERLVRQRTGLVNALRAHLAEFGIIAPQGLRHVGKLIAIVRDDNDARLPGLARQVLMVLAGQLEQLEAAIAALERQLVAWHRVNPVSQRLATIPGIGPIIATAIAATVTEPGQFRSGREFAAWLGLVPRQNSTGGKTRLGGISKRGNQYLRRLLINGASANLLRSRATKADPWVIGLRRRRPSLVVAVALANKTARIAWAVMQRQQPYQRMAAAA

SEQ ID NO: 394946 - protein, 414 aa, unidentified
MSRVIGLDVSKHFAEVAVLVPGQETPERRRFPAQPAAIRAFALELGPEDRVALESCTNAFAFHRLLCQHAGQVVVSNPLKTRVIAEAKVKTDKVDAEILARLLAADFLPSVWVPDQATDHLRHLVLHRQGLVTQRTQAKNRIHAILHRNLIASEMTDLFGKAGRRFLQRVELPDEERRLLDADLRALDFFTKEIAAAEISLAKAADQDPDMHRMMTVPGLALTSAVGLKAAIGDIRRFKAASKLVSYFGLNPSVYQSGLKAYNGHISRRGRSHARTICIEVAHQLVKAPGPFHAFFERLRRRKPYNVALTAVARKLVVLVWHMLTRGEDYRYTPPALTRRKLAQVHKLATGEGLARATATKPAPKPADDKRIGLQAEREYQGFIHERFGESGPPLPGHPEPSETKKRRSRQKSA

SEQ ID NO: 394947 - protein, 439 aa, unidentified
MEAINHEYDFAAFVGIDWADRNHAFSLQGRQSSTIEYGAIEHTPEAIDAWAVELAQRFGQRPVAVALEQVRGALVFMLSKYEHLVIFPVHPATLANYRKSFRPSGAKGDPHDAKLLLDVLIRHREKLRRLDPDTPETRTLQFLVEERRKFVQERIRLSQRLTSYLKLYFPQVLNWFADISSEIAGRFLERWPTLEQSQKAKVKTLERFFIDHNSRRREKIQHRIEEIQHAVPATRDRAVIVSGSSAVLALVKILEQVRHAIASYDEQIEELARQHPDFEVFDSLPGAGPALVPRLIAALGTRRDRYCTAHDIQCYSGIAPVVESSGKQHWVHVRWSCPKFLRQTFHEWALHSIASSSWAKAYYEQQRLKGKSHHSAVRALAFKWIRILFRCWQDRKPYDPVLYEKAVNVRSQERGTRSAAVEIEWKQCAGFAKLSAVTA

SEQ ID NO: 394948 - protein, 411 aa, unidentified
MSDSIFVGIDVSTKSNKVCILDQQGNRLAKMSVDNNSDGSGRIVKRVIEALCKTNCSNVSFGLEATSVYGDGLIFFLKQEPSLEPYNTKVFLLNPKQVNNFKKAYSDLPKTDDVDAWVIADCLRFGRINLREVYFDEQHKALQRLTRARYFVAQNIVREKNRYLTNLFLKFSGMYQENLFSNNLGTTAMELSGNAFSLDEIVHMPVDELASFINTTGKGKFADPEALAAEIQKAARSSYRLPKTVENSINQVLAVSAMSIQGYLQQLKTLDKSISTLMEAIPNTLTSIKGIGPVYSAGILSEIGSINRFKDQASLAKYAGLSWSRYQSGNFDADNTHLINSGNRYLRYYLIEAANLVRRHDPELKRFYELKYRETLKTPHKRALALTARKFVRLVYALLRDQRLYSPPRVR

SEQ ID NO: 394949 - protein, 346 aa, unidentified
MKKAKSIIKISYGIDISSDDFTASQGIYYSDLDREVFIIKKFKNTTRGFDKFLAHVKKQKSKINPDGTIQTWFVMEASGVYYENLAYYLHEKGQKVHVALPNKVKSYIKTLENKSKTDDLDSLAIAQYGLEKQINQWVPPSAEMKELKELSRELSSLKDMSTQAKNQNHAREKAHDINSSSSKRIKEIIKYLNKQIKKVEKDIETAVKSNSELKEKLDKITIIKGIGLQTAVMIIAETNAFEGIENRRQLTSYVGLDVKENQSGKKAGRACISKHGNKYVRKGLYMPALSCKKHDKKFKDLYERVCERHGWKIKKIGIVAVMRKILHIIYALWKNGTAYDPNYKMA

SEQ ID NO: 394950 - protein, 338 aa, unidentified
MIVIGLDVHKQSVTAVAVDEAGRPLGEKLITVGSEELLGWAAALDEVRLWAVEDCRQLTRWLERQLLALGEDVVRVPPKLTVSERRAGRTRGKSDPIDALAIARAALREPDLSRPQPGEQASREIKLLVDHRDDLVDQRRRTQQRLRWHLFQLDPTYVVPLRMLGRSSHLERVSRWLARQEQELQVRLARELVASCRALNRQVAELDQQLEQRVKETAPRLLELPGCAAVTAAKLLAEIGPIDRFRSDAQLARHSGVAPLEASSGRTQRHRLDRGGNRQLNAALYRIAITQARYYAPARDYLERKRAEGKSRREALRCLKRLLIRVVFNTLKTSPALT

SEQ ID NO: 394951 - protein, 357 aa, unidentified
MGQVNELDFSGTTIFCGIDVHKKSWRVNIQDGEFELEDFSQNADVVLLHKHLKRKYPGASFKLCYEAGFSGFSAQRWFSSQGMSCLVVNAADVASNDKERRRKSDKIDARKLCEHLQSKKVKSIHIPALHWEHGRCLVRARSRIVSNQTRSKNRIWQLLHFSGLPLPQDYDARQYWSKRFVKELKETDCGSKELKATLDLYIKDYEQTKTLLLEATREVRKMCRQVEYQSQISLLRTIPGIGEINAAVLLFELQEVSRFKHLDHLCSYAGLVPDTADSGESKINKGITNRNNHYLRTALVESSWSVIRKDPALLMKYKGYCRKMEKNKAIIRIAKRLLSRINYVLKTTKEYVTCVVG

SEQ ID NO: 394952 - protein, 461 aa, unidentified
MKPVDGDDSAERGRLQGLPVVRTKVAGIDLGSERHWVCAPTEDGVGREVADFGGTTGELMRLAEWLKRRQVESVAMESTGVYWIAPHEVLEGQGLEMFLVDTRQLARVPGRNKKTDPTDCEWIQRLHACGLLQSSFRPAEEICMLRTLVRDKATLVAESSDWVRRMQKSLDQMNVRVHRAVSSIEGATGMAIIRSIVEGERDPRALAKLRDPHCRKSEEEIAEQLSGHWREDHLFSLRQALKMYDGIVERISEYEAEILRKLESMERPEHQGKSAPPLRNANKARMIRQRGQELKRQALYRMSGMDATQIDSIGVETIEVVLSEYGPDLSRFPDEKHFISHLTLAPRVPMSGGKPLKKRKRNSASTRVAAALRMAALALRNSDTALGAFYRHIAQRLGADVAVFASARKIGTLIFRLFRWGQPYVDQGAEAYEANHHQRRIKALKTKAKQLGFQISPATAS

SEQ ID NO: 394953 - protein, 345 aa, unidentified
MKPTTIAVDVAKSVLEVAVSLKTGRVSERHRLSGAQFARFLGRRKPATIVMEACGMAHHWGRQAVTSGHRVLLLPPHAVRPYVPRNKTDRTDAKGLLEALRNEAIRPVPLKSVGQQAIAALHRLRSTWIATRTARLNTLRAILREFGFPIPLGSHHVVPHVRRLLEDPDSGLPDSLRPVLQAAAEEIRALEQRQRTVERQLAAIAEETPVVARLQTIPGVGVLTATALVAFVGDIQRFPTGRHFASYLGLTPRESSSGLRRRLGAISKRGDSYLRMLLIHGARSILCHAQRSASPRRLQAWALRLQQRQGHNKAAVALANKLARIVWSVWKNGHDFTQVTGRELD

SEQ ID NO: 394954 - protein, 433 aa, unidentified
MLKLNYMSTLFVGIDVSSKTNAVYAMDFEENKYISSSFGNNQPGADQLVNMIAECMQKHKNLDTVLIVLESTSVYSVHISNFLSASEVLMPYRPYVFCVNPKAASNYRKSYIGMEKTDPTDAYLIADFGRVGRTKKLEPWRGGQFISLKRLTRHRMHLSECITREKTYMVSNLYLKFSELQLLEGDDKPFGSLYGATSSAVLTEFLSPQEIIDMPEEELLTFLAGKSRNRISDLSKTSELLRKAARDSYRLDKCMYEPLNISLASSFNCIHAYQKEIKLIEQAIEKCINGMNPNALLILQSIPGIGPIWASGILSEIGDITVFHSSDALAKYAGLYWPKGDSGDFTSEDNKMSKAGNPYLRCYLGEAANSVRKHIPEYADFYARKYAEVTKHQHKRALALTSRKLVRLVFGLLVKNQLYTGEKLDTEYNIESN

SEQ ID NO: 394955 - protein, 347 aa, unidentified
MSHKTTASVAHTIGIDTGKNTLHLIGLDDKGAIVLREKIARGRIAARLANVPRCLIGIEAGMATHYVARELIALGHDVKQVPPAYAKPFRQGHKNDFRDAHAIAEAVQRPSTRCVPVKTDDQLDLQALHRVRSRLVGQRTAVINQIRGFLLEHGIAVRQGLRFLRQQLPDIMAKRSDVLSPRMVRIIEDLSADWRHLDGRIEHVTEEIEVLAQGSEGCRQLMTVPGIGPLIASAMVAAIGNGAAFAKGRDFAAWLGLVPKQMSTGDRTILGRISKRGNRYLRTLIMQGARVILLRPANWTKHSFGPWLTAAANRLHHNVLATALANKLARIAWTVLMQARSYEARVN

SEQ ID NO: 394956 - protein, 412 aa, unidentified
MTAKDQFAAHVGLDWADKKHDVCVQFKNGDRIFHVIEHTPEALDIWLNELHQRVKGRIAIAIELKKGPVVYALQKYPFVTVFPIHALSLARYRQAFWPSGAKDDPQDAELALDLMLRYPHKIKAIEADNPDIRLLQQLVEQRRLLVEDKRRFVNRLINTLKQYYPQPLEWFSHRDSSLFCELIIRWPSLQQLKRARSDTIRHFMNAKGGPAVAYTEARVASIASAIPLTTDKTVIEANALMATALASQIKLAGDLIRTYDERIESLFDTLPDAELFKSLPGMGPCMGPRMLAALGDNRDRFNSAEEIQNYAGIAPVTERSGQKSWVHWRWQCAKFVRQTFVEWTAKTVNSSYWARLYYQGQREKGKSHQSAIRALAFKWIRIIYRCWKTKTRYDEAKYLLALEARKSPLLKP

SEQ ID NO: 394957 - protein, 349 aa, unidentified
MDHITRIGMDTSKRIFQLHGVDAKEGVVLRRKLLRGDMMRYFERLPPTLIAIEACGGSHHWARELGKLGHEVRLIAPQHAKRYVKRGKNDAADAEALCEAASRPHMEYVPVKSADQQAALMLAGVRDRLVRNRTQLANAIRGMAAEFGLIAAKGIGHVLPLLDRIAADLAVPTLARDLFAAQGEEYAALEARIAQVDAQLQAWYRSSPMAKKLTSIPGVGAVIASLVVMKTPDPHAFQSGRDFAAWLGLTPKDHSTAGKVRLGGITRAGDESLRSLLVVGATSVISHLRRKPQPGARPWLEKLLDRKPPKLVAIALANKMARIIWKLLTSDAVYDPTHPSPACRPALAA

SEQ ID NO: 394958 - protein, 432 aa, unidentified
MKFNQSNKQNQRISRISETTLVIGTDIAKHNHVARAFNYRGIELGKRCLFQNDEPGLLNLLAWAESIKQEHGLTDVLLGVEPTGHYWFPLFHFLKQHGIEVVLVNPHHVKKSKELDDNLPTKNDIKDAKVVAKLVIDGRYTQPQLPEGVYADLRVLMNQRDRLCGDLNRVKGRIHNWLDRFFPEYTQVFKDWEGKASLITLQNFPLPQDVIAAGETTIVATWKKNGVSRAVGPKRAELLDRKARKSIGLTEGATAARHELAMYLEQYAMLCRQIEQLMELVADLVEQIPGAAHMMSIPCIGLITVAGFLAEVGDLSGYDHSQQIVRHAGLSLRENSSGLHKGETTISKRGRCRLRALLFRAALTMVAKNPEFRALHMYFTTRRENPLKKKQSMIAISSKLIRVLFELGRKQKNYDASKVLGPHREAQLQAAA

SEQ ID NO: 394959 - protein, 386 aa, unidentified
MYFVGIDISKYKHDCFICTETGEVIEENLSFTNTNEGFHQLLNLLKSLDNSQQIRIGFEATGHYGMNLKLLLEKNNYSFMEFNPALVKQFIKGQTLRRTKTDKKDAMLITKYLISVDYKPHPKQFYHKFALKSLSRKREKLVKQRSYYLVQLTNILDLIFPEFKPLFNNEFSVTSLYILNKYKTVEKIKNMKDFDSIRKVSKGKFSYSKFLQIKEAAKNTVGCSDEYLEFDLENMIELHNNINNKIKKYDDKIETIIKELNPPTLSIKGIGPISCAGIISEFGDISRFKSADAMVAFAGIEPSISESGTESHTGKMVKHGSGHLRYHLLNAADYIFMHEPIFTEFYYKKRNEGKSHRVALSHVAKKLVRIIYKLESENIIFKSDIK

SEQ ID NO: 394960 - protein, 337 aa, unidentified
MELYSGLDLHSRNTYIGILDTDFKRVFKKRVSNNVDLILEALEPFRDQLKGLVVESTYNWYWLVDGLMDAGYGCVHLANPSAIKQYEGLKHSDDKHDAFFLAQLLILGILPQGYIYPKEDRPVRDLARKRMFLVKHKTAHIVSLQSLIARCCGQRISTNQIRTLTVADLRQLLKEEYLFLSAQANLNIIAFLIQQIKVLEKAIKKKVKLDKAFEQLMSVPGIGFILATTIMLEVGDISRFAKVGNFASYCRCVSSQRLSDGKSKGSGNRKNGNRYLSWAFVEAAQLGRRYSQRFCRYYDRKAAQTNTIVATKALSNKLARICYYIMRDQVPFKKELF

SEQ ID NO: 394961 - protein, 353 aa, unidentified
MKKITRVGIDLGKHVYQVCGMDASGAVVLQRQVKAPRLMELMSRMEPCLVGMEASCGAHHWVEKLSDLGHDVRMMSPQFVRPYVKSNKSDYHDAEAICEAVSRPTMRFVPYKTKERRALQQVHRSRETMVRLRTQLSNQLRGFLREYGIVLPQGLAVIKREVPAIASDPERALPGNFRALLCMQHQALMQVDEQVADLTAMLERESKENPLCERLMSIPGIGPMVSTALVASVGSGWAFSSGRQLSAFLGLVPRQASTGGHTRLLGISKRGDRYLRALLIHGARAVLRTAHKGERTRLKEWALDVKRRRGANVATVAVANKLARIAWAVLQHDERYSDERHVGGRARVSRAAA

SEQ ID NO: 394962 - protein, 355 aa, unidentified
MTASYEYHIGVDYHKSYSHLVVQDSAGKTLRSGRVKNDRQSLGGFLERYRENSHAVVEATRNWMVMYDWLDDICDDVVLAHPLKVKAIADAKIKTDKIDATVLAHLLRADLVPEAWAPTDKARELRVALRERMFYVRLRTMTKNRIVTVFDRYPEQTAQLKKLGDLVGKAGRAQLAQVRVSEIDRIQIDRGLEFIADIDGRIKQSEATIRAMTKANANVKLLKTIPGIGEFFARLIDAEIDDISRFRNAKKLAAYAGLVPSTYSSGGKTFHGRIIRQGNKWLRWAFVEAVTPAIVTDPQLRAQYEHLKFRGVNKARVAVARKILTIAFQILRDQRAYEPRGTSPMEGASTISRLS

SEQ ID NO: 394963 - protein, 328 aa, unidentified
MQGKVSSERTAMATVYVGIDVCKEWLDIHLHPLGRSFRVTNDTAGLRRLKRELDALGQMPRSALRIVMEATGKWHRAVQRSLHADGFYVSVVDPLRARLFAKACGFLAKTDRLDARFLAIMGEALKPAQTPPLDQALEALQELVNARSAANGERTALSNRMKTAVTAFLRKELTRRLGALDTHIARLDAEIERSIGADPEMRRRLDILISIPGIGAVTAASLIAGLCELGACSGKQAAMLTGVAPLACESGERAGHRAIRGGRPAPRNAIYMAALSASRHNPDLARFAERLKKVGKPNKVVLVAVMRKLIVLANTLITKNRIWTPNPP

SEQ ID NO: 394964 - protein, 332 aa, unidentified
MIYTRKHLLSPPIDKNGQIVKRRNLINDEAEILHFFLTLDDDTQVVIESTANWYWLYDLLTEHGMDVVISNPVKTKAIASARIKNDKLDSHMLAQLLRADLVSTVHVSSQQTRQLKELLRHRSKLVRDTVRMKNRIHSIMAKNNLRVPVSDLFGCRGLEFLSQAPLPQYQRRQVDTYLNLYTQLKEQVEALTKQIKQQAESNQKAQLLMTIPGVGAITAMFMIAEIEDIARFKSYRHLASYAGLVPRLDASADKQRIGRITKQGSPYLRTALVEAAQAATRTKSRLNVFFRRRIVRAGYQKAIVATAHKIIKYAYYILRDQTPYRESIDASA

SEQ ID NO: 394965 - protein, 400 aa, unidentified
MLLFFEVITMIFVGIDVAKDTHYAAVSDDSGAVLVKPFAFQNNAEGFCLLLKKLSEFDRSKLLIGLESTGIYSENLICFLYESGFRLAVVNPIQTATLRKTAIRKTKTDKVDTMLIIKSLMVNSYRLYSQRDADSLKLRTLCRFRQNLKKSKARMKIQLAEYVNLVFPEFGKFFKSGIHIAASYALLKKYSSPKEIAALRTSTLCTLLSKASHGRFGKDTAEALKSLALSSVGVKNPYISIQIAQTIAQIELLEQQIKDLNSAIEEAMESINSVLMTVPGIGAVNAACILGEIGDIKRFSKPCKLLAYAGLDPTVRQSGQFTAKSTRMSKRGSALLRFALINSAWQLTLNDTTFKAYYDLKRSQGLNHYGALGHVAHKLTRVIFKLLTSDTPFNPAKLVA

SEQ ID NO: 394966 - protein, 338 aa, unidentified
MMKKAASVVPFGKCHSLGIDVSKEGLDVVGINAIDAWQRKLTNQKRDIEQLARGLIKAGYCGKIICESTGHYHLLLALVFSRYGLDLRIVNPLQSSKHQTGRIRKTKTDPVDGYVLATMSTTERDLPKTANLQPKQVLARLKQGQLQSLDKQIQRLSRSLAAYRETYEQLDMTTGQAFQSLEQALKQLRTAKRQLEAELEQAYLDSAQAEDVTRLRSIPGYSALVSAMIAGAFDREVKSERSWIAFAGMDISIQQSGQWVGRGKLTKRGNSFFRKRFYGAAWGAIMNYPEVRHYYDQLKSQGRHHVETLCIIARKLLRIAYAVLVKGKTYDSAVAFPV

SEQ ID NO: 394967 - protein, 335 aa, unidentified
MSELATVGIDLAKSVFQIHGVDENGLVLVRRQLRRSQLLAFFQNRPRCLIGMEACAGAYDWGLRLQEMGHDVRLMPPSYVKPYVKRGKTDAADAAAICEAVTRPSMRFVAIKSESCSLVMVLHRTRDFLVRQRTQIGNAIRAHMTEFGIKTAKGAQNVKRLKEQVDQLPQAARMPLILLFEQLSEADMRIERLTGEIEETYSQSETSQRLAMIPGVGLSATIIAATTPNVDNFDCARDYAAWLGLTPKPHSTGGKQRVGGISKMGNRYIRRLRYLGAMAQIMLRRRLKRESGSDRLSGMLMRKKTKIVAIALAHRMARMIFAVLRDGSRYEPQAA

SEQ ID NO: 394968 - protein, 418 aa, unidentified
MKSNKTEKITSINKKTLIAAMDIGKKVHYGYFRDSSGHDIKPFGFHNTREGFDKFWTRLCKFKEKQMLEEIVIGFESTGPYAEPICHYLRKKSVNLVQVNPMHTKRIKELTGNSPNKTDKKDPRVIADVMSLGHSLTVIVPEGAAAHLRRLTQARERAMERRTAMNNQLQHLVFLIFPEFVHIIKPSTKTGMYLIKHYADPKKLLFAGIDKLNAIIKKVSRGKLGTDRAKQLHEAAKKTVGIKEGKESILVETNYLVSKIAAEDHYIKDLEKQMSVYLKKIPYSHIILSIKGIGPVTTAGLIGEVGDFRNFKTISEVLKLAGLDLYEISSGNHQGCRRISKRGRVLMRKLLYFAAINTTRKNGILHSTYQRHLAKGMPRIKALIAIARKLLGIIFALVRDHSNYIADYSEQLMLKKAA

SEQ ID NO: 394969 - protein, 372 aa, unidentified
MLYAGVDVSKNKVSVAVLTSGGTKLTSGDFDITTEGLRLLELTLKHLKDEISMAIEQTGTYSMPVILYLMERVEGLRIYLVDGLNFNRFIKLEGRKKQDKADAVSLAEYLRRGLPARLITSKDIKAYGLKVLISEREHLLKVKNQIENRLRQLIETIFPDSKTLSKPVFWSEIRKGRAILDWKRLTDKAEVLSTILRERKIWLEIVHSLEETEKEINAFLRAYYPEDVEILKSFGFSETTIAYFISVYVDVERFKDVKAFKSYMGLGLRIYQSGKKEKNVVNSYTNKYIRKLLYMYVIQAVRERSNHRRVKDYYLRQVEKSGSKKKAIIKTAGKVIEWVYYCLKHKEPFKWEANYETQQENLSQVNSGQTED

SEQ ID NO: 394970 - protein, 336 aa, unidentified
MENIALIGIDLGKNSFHIHCQDRRGKAVYRKKFTRPKLIEFLATCPATTIAMEACGGSHFMARKLEELGHFPKLISPQFVRPFVKSNKNDFVDAEAICEAASRPSMRFVQPRTESQQAMRALHRVRESLVQDKVKTTNQMHAFLLEFGISVPRGAAVISRLSTLLEDNCLPLYLSQLLLKLQQHYHYLVEQIKDLESQLKRKLDEDEIGQRLLSIPCVGTLTASTISTEIGDGKQYASSRDFAAATGLVPRQYSTGGRTTLLGISKRGNKKIRTLLVQCARVFIQKLEHQSGKLADWVRDLLCRKSNFVVTCALANKLARIAWALTARQQTYGFVE

SEQ ID NO: 394971 - protein, 389 aa, unidentified
MFFLGIDIGKNSHVASLIDDKKKVIFKAFSFSNSTEGASSLIKKLEPFCDSLDIAMEATGHYWINLFSFLLQKNFSVHLINPIQTDGWRNSTEIRKRKNDTIDSILIADLLRYGDFIESSLSNEDYLSLKNLTRFRSYLISSTGDLKRKTIALLDQVFPEYEKCFSNVFGKTSKEILLSFTTPQEFENISSSKLSKALENITMKKFAKKKIEELSEKAKTTIGVKFCLDSFSLQIKMLIEQISFIETQVESIEEEISTIMTKLNSPITTIPGIGPVIGATILGELGDISRFSNASKIVAYAGLDSVVSQSGNYEAKSMSISKRGSSYLRKVLFQATLIAEFCDPVFSDYYQKKIAQGKHHLVATNAVARKLCYTIFAVLTKNEAYKIQQ

SEQ ID NO: 394972 - protein, 372 aa, unidentified
MNYNTVYVGMDVHKESFSLCAYTIEAEKASQYQRTEADYKKVLNYLEFLRTIYGDDANFICGYEAGCFGYTLYHQLTANNVKCIILAPTTMLEQRSKKRIKTDRRDAEIIAKCLAQHNYSPVHIPTAKDEETKEFLRMRDDHKLALKKVKQQILAFCLRHNYRYDGKSHWTAAHLKWLKALTPEALYKEILDEYLLTYQTLSDKIERLDKRIEELATQDEYREAVKKLCCFIGVKTHTALSVLVEVGDFKRFASAQHFASYLGLVPGEDSSGDDQNRLGITKAGNRHVRLLLTEASQCYARGQVGFKSKELKSRQSGNTPAVIAYADKANERLRRRYYKMVLNKYKKHNVAKTAIARELACFMWGMMTDNIA

SEQ ID NO: 394973 - protein, 412 aa, unidentified
MKDLLEISCGLDVHKEKIVACILTGPLGKPTRSEIREFSTLIPDMIALRHWIVSKNCHHVAMESTGIYWMPIYEILEDAFSGDITLLVVNARHMKNVPGKKTDMRDSEWISTLLRAGLLNGSFIPEKRIREFRDLNRYRKSVIRDITSQKNRIEKFLQSSGFRLSSFISDIFGASGRNIILHLIEHGQIDKTALDSCLKTKTRNRIDEILMSVNGTLSEHQKAFLRILMTHYDSLKKHLAEIETSLEEDMAPFTLQVEQLNSIYGISTTASCAIIAEIGIDMKPFKTAEHICSWAGLCPGNNESAGKRKSTSVTKGNPYIKSMLCEIAWVIAGKRNTYLSAWYWRIKQKKGAKKAIVALARKLLVIIYTMLKQGTLFDESCFETRRKHCEQKQLSRYIRELEKHGYHVEAQS

SEQ ID NO: 394974 - protein, 404 aa, unidentified
MWYAGIDWADTHHDALVIDEKGHQVGSLRIAHTPAGMNQLNAFLERILGAASQEEMVCIIETSHGLLIAHLLEAGWPVYPVNPRTVDRKRGASGAKTDQIDAYLLAKTGRADLADLHRLRPDSAKVAELKQLTRDQQALIQMQTRLVNQLTACLKAYYPVALELFSKLQQHSTLMFLQTYPTPAAAMAASAEQICQVLKRAGHPQALQVAPKIVERLHQPHLQADAVLTRTKSRLMLVLVSQLLPLLAQIAQYDKEINTLFLTHEDHLIFASLPRAGKRLAPRLLAEIGDHRERYQDAGSLQKLAGTSPVLYQSGSYCKAHRRLGCIKPLRNALQQFAWQTTQSEAWARAYYQRKRTEGKSHTVAVRALANVWVRIIFAMWMHQQCYDATIFEQAQQQHAHRAA

SEQ ID NO: 394975 - protein, 346 aa, unidentified
MDQIIRIGMDTSKRFFQLHGVDAAERVVLRRKLSRDQMLTFFRKLPPTLVVMEACGASHHWGRVLGAMGHDARPIAPQLAKPYVKRNKHDPADAEALCEAGGRPHMRFVPVKTAEQQADLMLASTRARLIREHVRLANTIRGHAAEYGLVAPTGPGRIPDLLARIAKDETVPLLARELFAQFGEDYARLQAQITAIDARLLAWQKENPIARRLEAIPGIGPVTASLLVMKVPDPKSFRSGRDFAAWLGLTPKNHSTAGRQRLGVITRAGDESLRSLLVVGATSVVNQTMRRTARRPITWLVALLARKPAKLAAVALANRMARIAWKLMTSDEAYDPVRLHRLPAAA

SEQ ID NO: 394976 - protein, 316 aa, unidentified
MSASPLFVGIDVAKAELVISLGPSSDLLTVSNDEGGIRHVLEHLQTARPALIVLEATGGYETAAVAALAAAGLPVVVANPRQVRAFAKAMGKLAKTDSIDAHVLALFAERVRPAIRPLPDEALRMLDALLTRRRQLIEMLVAERNRLAHALPPVEKSLKQHIRWLERRLADVDSDLDQTVQQSPVWRAKEDLLRSVPGVGPIVSRTLLADLPELGALNRKQIAALVGVAPLAKDSGTLRGKRMVWGGRAPVRAALYMGALIASRHNPVIRDFYQRLVAAGKPKKIALTACTRKLLVILNTMVRNNTRWGERYALSA

SEQ ID NO: 394977 - protein, 334 aa, unidentified
MENIALIGIDLGKNSFHIHCQDHRGKAVYRKKFTRPKLIEFLATCPATTIAMEACGGSHFMARKLAELGHFPKLISPQFVRPFVKSNKNDFVDAEAICEAASRPSMRFVQPRTESQQAMRALHRVRESLVQDKVKTTNQMHAFLLEFGISVPRGAAVISRLSTLLEDSSLPLYLSQLLLKLQQHYHYLVEQIKDLESQLKRKLDEDEVGQRLLSIPCVGTLTASTISTEIGDGKQYASSRDFAAATGLVPRQYSTGGRTTLLGISKRGNKKIRTLLVQCAVVFIQKLEHQSGKLADWVRELLCRKSNFVVTCALANKLARIARALTARQQTYEA

SEQ ID NO: 394978 - protein, 382 aa, unidentified
MNTMTRPNESTAPACGLLLAFELGQRSWKLGFTVGMGQRPRIRQIPAGAVGALATEIERAKKRLGLSSDSPVMSCYEAGRDGFWLHRCLVAQGITNHVVDSSSIEINRRARRAKTDRLDLAGLLSLLARYVLGDRRAWRVVRVPTVAEEDARHLSRTLEALTQDRTRLMSRLKSLLATQGVSLPIDAQFLHRLEAAHLWDGTPLPPGLQERLSRTWTQLQEVDGQIRDLKALRLTRPEHLTPATSRALAQLLTMRAIGPIGASVLATEIFGWRRIRNGRELGALVGLVPAPYQSGETDYDQGITRAGNAHVRRVIVQLAWGWIRHQSGSALTLWYQQRFGGGGKRLRKIGIVALARKLLIALWRYLETGVVPDGAQLKPTEV

SEQ ID NO: 394979 - protein, 415 aa, unidentified
MLFIGDDWAEGHHDVVAQDDAGKTLARRRLPEGADGIARFHEMVASCMGEDAEPDPARVIVVIETDRGPWVKALAAAGYRVYPANPRQAARHKETVANSGKKDDFFDAGCLADMGRTRLHQMRELAADSDVAEAVKIAARAHQKLVWERTRHLLRMRSALREYFPAALEAYADLTLAGKDALELLAKAPDPESAARLTVTQITAALKRAGRRGDLAQRARDIQAALRAPHLDQPDVIAEAYAASVQAAAAVITALNEQVKIMEAKVSGLFRRHPDAGLHLSQPGIGDITGARILGEFGDAPGRYASAKARKNYAGTSPLTIQSGKKKTVHARYIRNRHLIDALHAQALSALSVSPGARAFYDDLRARETGHDDAMRRVASRLVGILHGCLKTGREYDEATAWSHRAETPEAAEAA

SEQ ID NO: 394980 - protein, 421 aa, unidentified
MRAVALDVHRDFCEVAIVAEGRLRSAGRIQTRPEALELFAQSLDRRDWVALEVTGNAWAIARILEPHVAQVIVVSPSDTGIRQARAKTDRLDARALARLLWAGQLDGVWTPDERIRAMRRRLARRSQLVRARSRAKNEIHAVLMRGLKDRPPASDLFGVKGRAWLAEQHLALCERETVDSAMRQVAFLDAEIAEVERLIAAEALSWPEVKRLMTVPGVNVIVAATFMAAVGDIRRFPDRRKLTAYLGLDPRVRQSGVGPATHGHISKQGSSSARHALVEACWSTVRQPGPIAGFYQRIKARRGHSIAIVASARKLACLFWCLLSRGEDYAFAQPSLTKKKMRRLELTAGAPRWQGGRSVWSTNAAMRHAERELALQAQRAYERTVKDRQQKKGASATPGRASRGSSREQVARQTPRPKSAL

SEQ ID NO: 394981 - protein, 345 aa, unidentified
MTIKTVGLDLAKNVFQLHGVDDSGNVVLRRTLRRTQVTQLFAQLPPCIIGIESCSSSQYWARKLIGLGHQARLIPPQFVKPYVKSNKNDANDAAAICEATGRPQMRFVPLKTPEQQSILAVHRIRESFVQGEDGLCQSNSGHHGRVWTHAPQGIGHVSRSAGEQVSHAADPVPGMVRDLVLKLLEHLRYLERRIAELELVIKGWHRHNADSQRLAGIPGVGVITATALVATIGDARQFKSGRHLAAWLGIVPRQHSSGGKERLLGISKRGDVYLRTLLIHGARVVLRHLTAPPHKVGIWLIRLGNRAHPNVVATALANRNARVVWALLVHKSSYDPALPGRACSG

SEQ ID NO: 394982 - protein, 415 aa, unidentified
MLILGCDIGSETHYMRAIDTRGRELSKSAFSFNNDPEGFRNALEWAVQLAAKHNKSQIVLGLEPTGHYWFCLAAWMISKGISVVQVNPYAVKQTKEIEDNSQLKDDRKDPKLIANLVKDGNYGMPYLPEKVYAELRRLSMFRDQLMEDRIRFINRLHRELKIYFPEYKDALGKVDGVFSLELLKEAPFPADLLALEEDGIRQIWRNAKLKGRGYSRAKEIIQYAETSVGIKDGADAGSQAVKWFVERILELSKKLADIENQISRKCRELPHAENILEISGVGETILSGILAEMGDISRFDDAREIQKLSGLSLVACNSGKHKGETKISHRGRKRLRYWLFQAAKSAVAHGEEFKGLHVYYTTRAENPLKKMQSLIVIACKLLRIIYTILKKGVAYDPQKMLKDIKRMSPQETWTL

SEQ ID NO: 394983 - protein, 447 aa, unidentified
MLSFEDSAIRVAACSERADRRKTLEEKEVEKPIRAWIGIDWADEKHDVSVYDVASGKQEALVIRQTPEALQEWLGQLRAKYEGGYVAVVLEQGRGGLLNALMGCEFLVLYIINPKSLSSFREAFYGSGATSDPVDAELMRDMVRQNPSRFRAWRPDDVLTRSLRLLTEGRRDLVNQSTALTNQLTALLKGYYPQALRWVGTLDSGWACDFLEQWPTLQSLQSSSRRQMLRFYEKHPRASVDLEQQLKQFQEARALTQDEAVLEASALMVQALVSQLRPLLASIAEFDRKIAAIFRRHPDRPIFESFPGAGAALAPRLTAAFGTDRDRFQAATEMQELSGIAPVTEKSGKKSFVHWRYACPKFVRQTFQEFADHSRRWCKWAKAHYELLRQRGKSHNAAVRALAYKWIRILFRCWKDRQPYRDEVYTKSLFKHGSPLASLLAESVEKP

SEQ ID NO: 394984 - protein, 384 aa, unidentified
MTTAAHESTIREQASELLASFELSQTSWIITIRLPGSERLSRHSLKAGDTAALSALLARQRERSERTLGQACGVVTIYEAGLDGFWLHRWLTAQGIDSHVVDAASIAAPRRKRRPKSDGIDGETLLRTLAAWRRGDPRVCSMVAPPSVADEDRRRLVRERAQLISERTALTNRINGLLLNQGITGYQPGKRDAPARLASLRTGDGRPLAPHLTAEIGRMLERLGLLRSQIRQVEAERDALQAEEQQSNPLGPIAMLLTLSGMGPELSAMLGLECFTHRFPGQRQVGAFAGLAPTPWRSGSVQHEQGIGKAGRPRLRAMMIEAAWLWLRYQPDSALSRWFRAKAGEARGRARRVAVVALARKLLVALWRYVTQGVLPEGARLKAA

SEQ ID NO: 394985 - protein, 354 aa, unidentified
MRTYYVGMDVHRASIVMVVLSGAGKLVMQAVIETGAERVRGFLKQLRGKVYVTFEEGTQANWLHEVVRPLVTEVVVCDPRHNKLMHSGNKNDRVDAQKLAELLRLGSLKAVYHGDSGVRTLKELVRNYDCLVSDTTRVMLRLKAIYRGRAIPCLGHDIYRSDRRAQWLEKLREPGARQRAGFLYAQLAALKPLRHEAKLVMVKEARGQTAYSWLMSVPQLGSVSVAQLMAVVGTPHRFRTKRQFWPYVGLAVVTRTSADHEVVNGVLRRSRRPIATRGLNRNHNHLLKKVFKSAASSACHSGPFKAGYDARVAQGMDPSLARLTIARQLAAITLAVWKRSEKFNTQRMKQQIAA

SEQ ID NO: 394986 - protein, 351 aa, unidentified
MPRTSTVHAVTTIGIDMGKNTLHMVGLDKRGAIVLREKVSRGRIASRLANLPSCLIGIEAGLATHYVARELAALGHAVKQVPPTYAKPFRQGHKNDFRDAHSVAEAVQRPTTRFVPAKTGEQLDLQALHRVRSRLVSERTAVINQIRGFLLERGIIVRQGLRFLRQALPDILAKRTDVLSPRMVRIVADLAGDWRQLDERIEPVTDEIETLAKSDDGCRRVMTVPGIGPIISSAMVAAIGNGATFARGRDFSAWIGLVPKQMSTGDRTILGRITKRGNGYLRTLFVQAARVILLRPASWPKHSFGVWLARAAQRLHRNVLATALANKLARIAWTVLAQGRGYEARITKPAV

SEQ ID NO: 394987 - protein, 308 aa, unidentified
MSATIEVVDGHEKLLGSGRFGTDQAGYTAMRSYATNWPERVWAIEGRNGAGRPLAQRLLEAGEQVVGVPAKLSARARLFDTGHNRKTDARDAHSAAIVAVRTPTLWVLSPDGDLEALRMLCDRREELTRARVQTVNRLHRLLAELVPGKSKKDLTALQGKAILASVRPRDIAGKTRRRIAAEELADLVAVESKMKKVTAELKVMVRARDSRLMDLNGVGPVVAARTLADVGDIARFADRNRFVSRTGTAPLVKAQAEDDNAVFLARNEQTGGWFQVCGQPTSMRLPCRNYQCRTRHKDGLQLRNDQPW

SEQ ID NO: 394988 - protein, 368 aa, unidentified
MSVRIITCERSTLVNDEKYIGLDVHQATIVVAVMDSTGKLVMESILETKAATILQFFAGLRGTLSVTFEEGTWSAWLYDLLHSRVDKLVVCNPRKNALLKDGNKSDRIDARKLAELLRGNQLKPVYHGETGVRMLRELSRSYLTIVKDLSRVMNRLKAVYRSWAIPCAGRDVYYRRHRAQWLAKIREAGVRRRAERLYEQLDMLQHLRQQARRELLAESRKHAITAKLRQIPYLGPIRVALAVALIQTPHRFRTKRQLWAYSGLALETRTSAEYRFVEGPVRRSKKLLSIRGLNKDHNHDLKGLFKGAATMASVRPGPFQDFYTAALAKGIKPTMARLTLARKIAAITLTLWKKGENFDADKLKSQAA

SEQ ID NO: 394989 - protein, 431 aa, unidentified
MLKINPLSTLYVGIDVSSKSNYVCALDFYKNKYINSSFANNQPGAEELALKILECLKEHPDITTIVAALESTSVYSIHIANYLSSCEELMRFKPYVFVLNPKCTANYKKSYIGLGKSDPIDAFVIADYARAGNIESEPWRGSQFLALKRLTRHRLHLVECMTREKTYLVSNLYLKFSELQMLEGDDQPFCDIYGATSSSVLMEYFSPEEILDSSEEDLIAFLAKKSRNRIKDISKTADLLKKAARDSYRLDKALYEPLNVSIASSFNCIETFKREIKVIDNAIEKEIKGLNLNAFIILQSIDGIGPVFAGGIIAEIGDITAFHSSDALAKYAGLTWKSNQSGDFDGEDTPMIKAGNRYLRYYLGEAANSMRKHNVEYGTYYRKKYNEVPKHQHKRALALTSRKFVRLVYGLLARNQLYSGVSLDTSIKDSN

SEQ ID NO: 394990 - protein, 369 aa, unidentified
MSTNGITFVGMDAHKKAINVAMLLPGRHEPVEWQLANEPAAIRRLAKKLQREAPGEVRCCYEAGPCGYVLQRQLEADGVVCEVVAPSLIPVKPGERIKTDRRDALKLARSLRSDDLTAVHPPTSADEAVRDLCRCREDARKDLMRARHRLDTFLLRRACLYTLTRRRWGQPYRAWLTSLKFEHAADQVTFEDYVRTIEQAEERLRRLDEHLTAVAAQDPYRQPVGWLRCFRGIDTITAIAVVAELHDFRRFLTARALMAYLGLVPSEHSSGQRPRRGAITKAGNIHVRRLLIEAAWHYRHRPHVGVGMRQRRKDQPDRIIALADRAQDRLCRRFRALIAHGKIPNKAVVAVAREWVGFIWAALYPATQA

SEQ ID NO: 394991 - protein, 344 aa, unidentified
MEIMTIGLDLAKTVFQVHGVDAAGKAVVRKALRRAQVLPFFEKLSPCLVGIEACGTSHHWARELIKLGHDVRLMPPAYVKPYVKRGKTDAADAEAICEAVTRPTMRFVPVKSPEQQAALSMHRSRDLLVKQRTQLVNMMRGVLAEFGIDIPQGLHRALEMARAIVEGEAPDVPPDAVKVVARLSQQALDAHAQLREIERDLLAWQRKSDLATRLLTIPGIGPIGATALAASVTDPHQFRSAQQFAAWLGLTPLQSSSGGKERLGRITKMGDKYLRKLLVVGMTSLVRRAKNQPRAVDPRLVTLLARKPMRVATVAMANKTARIVWAVMVRGEVYKEHHVPALTA

SEQ ID NO: 394992 - protein, 346 aa, unidentified
MKIIGCDFHPSFQQIAVFDTETGEITEHKLVNGNGEAERFYRSLPVGSLIGIEACGNSHWFIDLLGQLGHEVWVGDAAKIRASYVRKQKTDRRDAAHILTLLLENRFPKLWTPSRQERDQRQLLIHRHKLVQIRTRIKNSLQHLALNQGVQKKQKLWSKEGQKLLIQLPLQGWTAVRRQDCRELLAQLDERIAKLDKAAELAAEAHPQASLLMQQKGVGPITSLAFALTIGDVSRFPHSNQVASYLGLIPSEHTSSNKRRLGSITKQGNSFLRMLLVESAQSVTRCDPQFRKHYLHLCRNKHKAVAKVAAARKLAVRLYWVLRTDQNSQNAVHIESSPRVPLVGAS

SEQ ID NO: 394993 - protein, 448 aa, unidentified
MATRKRNSYLRNKKAVLSKINYNVAGIDLSSEDMFIAVIEKNVRRFTTFTNGLEDAVVYLESEGIEKLIMEATGVYWIPVYEYFEGKGFNISLVNGAHAKNVPGRKTDVLDSEWLRELHTYGLLRASFVPDEKIRELRYYVRLRDDHISMGASHINIVQKNLDMMNIKLHKVIDSVMSVSGLLIVQAIIDGERDSERLWDLCAENIDHKKKEGVIAALKGNYRQEYLFGIKQALEMWQQYQEKQKQCDAEIEKILRKLTADIEVPLDLGKEKPIKKRNKPAIEDFHLLMTKLTHGKDTTTIAGINDYSALKLISEIGTSLDKFKNDKYFTSWLGLAPSVHQSNKTKRKKGRRHCNRAGMIFRQMEVNVGNGKHTALSSFYKRIRARAGTMVAIKATARKIAVYFYNLMTKGLQFVEEGTRRYEQRYAEQQEKYLQRKASEMGYMLIKA

SEQ ID NO: 394994 - protein, 345 aa, unidentified
MELQTIGIDLGKTVFHLVGLNRRGEVVVRKKFSRKQLLHFTANLRVDLIGMEACGGSHFLGRALREQGHAVRLMPAQYVKPYVKTNKSDFIDAEAIAEAVARPTMRFVPIKTDDQLDLQSLHRVRERWVMRRTAIVNQIRGLLLERGITLRKGRRHVDAALPDILEDADSKLSVALRMLLAQLKLELDQMAMRIGEADALLNKTTHENEACQRLVTIPGIGPVTATALIAAIGNGAAFRKGREFAAWIGLVPREHSTGGKQRLLGISKRGNSYLRRLFIQGARAILQQRTKQNAGLSAWLAQLVGRTHRNVAAVALANKLARIAWAVLAKEERYQPQALTSLEAA

SEQ ID NO: 394995 - protein, 309 aa, unidentified
MEIQQVIGADISKKSIDFAIHHAGIHLKVANDHQGFAELIKWIKKQKVDLSKTLIVMEHTGIYSYRLEQFLHQKTLSFTKVPGLQIKLSMGMVRGKTDKVDALRIARFGFEKRFDLKPASPRDASIERLKMLSTTKDKLIRTRASLLTSVNEYQEVCGLKDGDLIVTSQRKLIKEMSNQISKLEAEIESIMDKSPNLINNYRLLMSIKGVGKVVALNTILKTENFTRFRDGRKFACFCGIAPFEHSSGSSIKGRTKISHLADKGMKTLLDLAAKSAIQHDEELKQYYQNRIGKGKNRKSSINVVRNKII

SEQ ID NO: 394996 - protein, 461 aa, unidentified
MELRVAMSGRWSYAALNPDPGKQRGRGQESVCKTPVALSDHVDRFGQAISRFCTINMCAHRGPRIVEWNATHNHQGILSSPLSEGNEEEEEERMIERVHGIDRHKQFSTISVLNHQGEEVQFQGACREFGKYVEGLGPTDAVVLEASTGSFWWADQIEAKGAKCFVMDPRKFRIIKDSWNKTDKQDARNLAKALWVHVVTGEFGIPTVYKPTGVVRDLRKLFAQYCLLNRQIATHKNNAQAIFVENGVELKKELKCRLFAAKSGLELLKEMNVSAASRVCLELTLQVLWKVEEAKERLAGEIMLAGEALKSEVELLISIKGVTPLIALAFLADVADVRRFRTLRKMNAYLGLVPRASNSGGKSRPGHITRESRKLTRTILTQCVHHVAASSPFLDRFYRQLRDKRGTGRARIAVIRKLCGMMRRMLLSGEQYRWMDRSLYDKKLRQYERVLKRVKEERTAA

SEQ ID NO: 394997 - protein, 480 aa, unidentified
MNVKARRTKKQVNVENQAINLLSKEELNKKIEVVEKELRSYTWRELETNGKFAKNDKLSFITDDMLIAGCDIGSETHYIRAIDVRGRELSSGAFEFSNTSEGFANARAWVLALAAKNDKKQIVLGLEPTGHYWFALAAWMISNGISVVQVNPYAIKQSKEIEDNSQLKDDRKDPKLIANLVKDGNYGMPYLPEKVYADMRRLSMFRDQLTEDRIRNINRLHRELKIYFPEYMDAFGKIDGAFTLEVLKVSAIPTDITVLGAEGMKNIWHNAKLRGRGYSRANEIVSYAEKSVGLTDGTDVGREAVKWYAEQILRLDEQLSEIESALHEKCREIPYAENILAINGVGENILAGILAEMGDISRFDDVKEIQKLSGMGLVACSSGKHKGQTKISHRGRKRLRYWLFQAAKSAVSHADEFKQLHEYYTTRSNNPLKKMQSLVVIACKILRVIYTILKTGTTYDPQKLLKDIKHPAASQAPMAA

SEQ ID NO: 394998 - protein, 326 aa, unidentified
MQGQVSPEQNATAPVYVGIDVCKAWLDVFIHPNGQEFRVANTTSGLKHLCRALSLHMVAGIVIEATGKYHRAALDCLYASNHPVSVVNPSRARWFAKAKGEDAKTDRIDARMLALMAADLKPAATAPAPKIMEELQELTRARQNAIEDQTGLSNQLGETQNRLLGKELKHRLTSLASHIERLDAEIARLIKQEPRLARRQAILISIPGIGKVVAAGLLADLAELGSCSGKAAAKLAGLAPIARESGQTTGQRHIWGGRGGVRRSLYMAALSASRHNSCLKTFYDRLIGNGKLFKVAITAVMRKLVVLANTLLTEDRHWMPETPKST

SEQ ID NO: 394999 - protein, 455 aa, unidentified
MTKPKEQKYEQMPVLNEHAAGIDVGSREHYVAIGQGKEHVKRFGVYTAELEELCQWLKQHGMRTVAMESTGNYWKNLFIMLQQHGLQPILVNGSFTKNLKGRKTDVQDCQFIQRMHTLGLLPDSFQPDIFTEQLRNLTRHRTMLLSQAADTSKRIQQSLRLMNLRLDIAVSDITGKSGMNIITAILKGERSPVSLAALCDVNVKKSREEIAAALTGFYRHDYLFQLKQNMGTWQFIQQQIRDVDQELNNLLEKHLQDSNKNNRNYTPGENAKKKKKQKNNPAFDIEKKSFQLFNGVDLIEVPGISHGTALTIISEMGENISLFNSAKSFCSWLRLAPNKKKSGGKVISNKIKQGSNILSVALRSAANTIGNMKKEIPLTKFFKRLHFKYGRAAAITATGRKLAVIIWNMITKCQPYQPLSNEIYDHRIRHLTLKNIQKKIIKLKIKPEDLQFAIA

SEQ ID NO: 395000 - protein, 402 aa, unidentified
MNAVGIDVSKGKSMVAIMRPFGEIVSAPFEIKHTASDINSLVELINSVEGESRIVMEHTGRYYEVLAHQLSKANLFVSAINPKLIKDFDNDSLRKVKSDKADAVKIARYALDKWQNLKQYNVMDELRNQLKTMNRQFGFYMKHKTAMKNNLIGILDQTYPGVNTYFDSPARSDGSQKWVDFASTYWHVDCVCKMSKNAFINHYQNWCKRKKYNFSQSKAEEIYGKAKELVPVLPKDDITKLIIKQAVDQLNSVSTTVESLRTLMNETASKLPEYPVVMAMKGVGTSLGPQLMAEIGDVSRFTHKGVITAFAGVDPGVNESGSYEQKSVPTSKRGSSVLRKTLFQVMDVLIKTHPQDNPVYQFIDKKRAPGKPYYVYMTAGANKFLRIYYGRVKEYLSSLPES

SEQ ID NO: 395001 - protein, 359 aa, unidentified
MNKNSMFFVGLDLGDKHSYIAILDQDGELIEETRLPSTKASFHQRFSTLPPCRVAMEVGSHSRWASYLLKELDHDTLVANARKLRAIYDNPRKGDRVDAEILARLARLDPELLSPIHHRSPQAQADLAVLHSRDALIRSRTLLINHARGIVKSSGARLPSCSANCFASKAAPAVPEALRPALSPILETISALTQQIREYDRKIEQLCQDQYPETKLLRKVSGVGPITALAYVLTLEDPKRFIKSRDVGPAIGLVPRRDQSGDHDPQLRITKTGNVFLRRLLVSSAQYILGPFGPDCDLRIWGLKLAERGGKNAKKRAVVAVARKLAVLLHHLWKTAEVYDPFYQSQKEEAGSAALPTVA

SEQ ID NO: 395002 - protein, 341 aa, unidentified
MGQVGTIGLDIAKHVFQAHGADGSGAVLFRKKLRRAQVLAFFAAQPPCVVAMEACGGAHHWGREISRLGHTVQLIPPRYVKPFVKRQKNDAADAEAICEAAQRPTMRFVTVKSEDEQAEALVFRTRDLLVHQRTQVINAIRGHLCEFGIVVAKGAQNTGLLAAQVEEPASGLPKSVRSMLGILIAELRRLDERIKDLDREVMHRAKTNATARRLMTIPGIGPITAVALVALAPAAATFKRGRDFAAWLGLTPQQRSSGGKERLGRITKQGERTLRRLLIIGASAVARWATRHGAISGSWLRRMLSRKPPMLVRVALANKMARTVWALLAHGGVYQAPAAAA

SEQ ID NO: 395003 - protein, 349 aa, unidentified
MEHYVGIDVSLELSSVCVVDVGGKIVAEAKIESHPDAIVNLLRRLGLSIERIGLEAGPLSQWLRAGLTKGGFETVLLETRHVKAALSAMTVKTDRRDARGIAQLLRMGWFRPVHCKSPGSQEVRALLVARKQLLGKLLDVEFSIRGILRGFGLKMGVVTRTSFEGRVRELCAGQAMLEQIAEAMLAARAALRKEYSKLHKAMLALVRRDAICRRLMSAPGVGPLVAITFRTAIDDPARIRKSKAVGALLGLTPRKYQSGETDVTGHVSCVGDTMARTALYEAANAILSRVTRFSALKRWGMDVAKRRGMKRAKVALARKLGVILHRMWMEGTSFRWTKEASQAPQIARA

SEQ ID NO: 395004 - protein, 362 aa, unidentified
MAKAMTLVGLDVHARQTHAAVFDPVSGELCVSRLRMPPVEVVAFLQGLGPAVRAVYEAGPTGFGLARAARERGVDVRVAAPGSIPKGAGDRVKTDRRDAVRLARLLAAGELSFAFVPSVADECFRDLVRCIEDARGDLMRARHRLSKFLLRRGERYGGPGGAWTAGHLRWLRAREFADACSQATFVDYLAAVELLAGRRGSLLETLERAVPDSGHAPVIARLRCFRGIDTLSAAGLAAEIGDFARFPRPALLAGFLGIVPSERTSDSKRRQGSITKAGPGHARRLLVEAAHHYRYPPRVGQTLARRQHGQDARVLAIAWRGQRRLHQRWQHLHQKRRKPAGVVAIACARELAGFLWEAATLD

SEQ ID NO: 395005 - protein, 370 aa, unidentified
MLNTTTFVGLDVHARSIKAVALDAMTGEVRSATFAYDAAAVAEWVGSLDPAAKCVYESGVTGFDLQKKLTALGVDCVVGAVSKMIKPSADRKRKNDRNDAEFLARMLSVGNVVEVCVPDDECEAARDLVRALDDAREDLKRCKQRLSKFLMRHGYVFNEATPTGRRKGNWTAAHWAWIRSIEFPERADNDVLAYYVDAVRQAMEDKKRLERLVEAEASKPRWKKRVDSLRCLKGVDAMTAADIVFEAGEFSRFKNARSFAAWLGLTPSEHSSGESARQGGITKAGNKHLRRVLVEAAWHYISASPHPKDLAKGQVPDPAARRHAAKGIRRLVKRREEMLGRGVHKNKANVATARELACWCWAVGRMAENG

SEQ ID NO: 395006 - protein, 311 aa, unidentified
MEQSTVIGIDVAKEHLDVHVRPTDEAFRVPNDDAGRATLVTRLHALRPMVVVLEASGGYEVPLAAALASAGQPVAVVNPRQIRAYARAVGQLAKTDRLDARVIALFAEAVRPAARPVPDEQARALGELIARRRQLVDMLVAEQNRRQLVRDRRLQRHVDAHIAWLEEALRRLDHDLTTLIRATPAWRETDDLLRSAPGIGPVTAGTLIADLPELGRLDRRRIAALAGLAPFARDSGVFRGRRMITGGRPQVRRVLYMATLSAIRFNPTIREFHQRLVMAGRPGKVAVTAAMRKLLTILNAMLRDRRPWQPA

SEQ ID NO: 395007 - protein, 352 aa, unidentified
MKQDTVTADLQTIGLDLGDTRSTLCVVDPQGRLVEEKSVSTTREALTLRFRRPRARVVMEACGQSNWISALIEELGHEVYVVNPRQLHLITRSVKKTDRNDARLLARLGRADIGLLQPTHRRGLDCQAARTVLNARRALVQTRTRLVNTIRSAAKSYGFKLRGCSSKTFAKLANTNLPQQVRTLVQPLLDAILNLDQYIERYNAEVERLGREHFPQTNVLRQIHGVGPQVALAFVTTIEEPKRFARSRDVGPYLGLTPRRDQSGDSDPHLKISKHGDGSTRSLLVGAATAIMRDTAPDTDLKRFGERIAGGTSRRDRGRARIAVARKLSVVMHRLLLTSEVYEPLRHAQTAG

SEQ ID NO: 395008 - protein, 454 aa, unidentified
MQKQDSYDYYVGIDCAQNKHDFAMKNNQDKFLIKKGHFSNTLQGYEKFLNTVLSKCLNKDKILFGMEVTGIYGTNLYERLKSDGYHVVMISPDSVKNYRDYKRLNKTDKIDSACIAELLLNGDAQIVHVEKNGYTDLKAYIRRRNALKVTCTQETNRFLAKVCLYFPDLLKVFPSGRATLKAIFSIYPTPYSIIEADFDELVSVLQKASKNKFGVDKANELIHAARNSIVVRKSISDGELYNIHSLIDSIDSLESEIRNLEKIIDSKAEEFPAYHVLLTLTGCGTITAATIVAEIGDISRFHKASQIVSLAGLYGDNSKSGSSVNKRGKISKKGSRYLRHAIYMVAEFARRNNPIFKAYFTRKKNGDRTKHTLAVNAVANKLCKVIYSLMKNQSTYIIQYRDLAKLSESTQNEFFQNAETDFSAKTRRKKYLYEDEYGELHEFVFKSLKTALIE

SEQ ID NO: 395009 - protein, 355 aa, unidentified
MDKYIGFDIDCKKTVVCVVKKDLSKRYYTIGPDVDSMKNFLLDQKKGFSGKTHLVFEVSGQAGFLYDSLIDSVDSLTVANPSQMTWIFRTAKKNDRIDAYKMAKLLCFDEVPSVYMPGKEVRQWREIILHRKKTFTKLVQVKNRIRATFKGQGFNKPLHKGGWWKKSNLQWMRDVCSHDIGEFDLWHLQVRNLLEEFDLLNMQIKNVTAYLDRYLDTQPGGKLLMSIPGVGPRTAETVLAYTDDVSRFDNYKQYCSYFGMVPKLDESGSCRRLGHITKHGPSAVRWVTCESSWMAIRKSKALNAFYERVRCGADGRKKIAIVAVGRKLLSIMRAMLISGELYNEELVERMLKQAA

SEQ ID NO: 395010 - protein, 471 aa, unidentified
MLTVVAGAVADIGLQPRVRRRVWRDDPGGPRTVAASTNPSIRFHLVLPGNLQFSSGGEAVKRIRERVAGLDVHRDTVVACCQVKQPDRSIEVTKQSFSTTANGLGQLAAWLSDAGVDTVAMEATGVYWKPVYYCLEGLFDELWLCNAQHVKNVPARKTDLSDAEWLADVAAHGMVRPSFVPPPEIRELRDVTRYRKTQVEARAKEIQRLEKTLQDAGIKLSSVASKVWSQSSRAMIEAMIDGERDPVVLAQMAKSRMRAKIPQLEEAFSGHFGSHHALVCRQVIEHIDFLDRSIATLTADVTERLCPFEAAVTILCSIPGVSRSTAEVMIAEMGVDMTRFPTSGHLCAWAGVAPASHESAGKRHPVGTRQGSTWLQRALVEAARGASRAKGSYLSAQYSRLARRRGSNKATIAVAHSILDVSWHLLSTGALYDDPGARFFELRHDPAIEAKRLQRRIEALGFKVSIAPAAA

SEQ ID NO: 395011 - protein, 459 aa, unidentified
MNRKRSKPKIDRKMPMVHPNAAAIDVGATMHMAAVRPDRTPEPVRSFGTFTTDLHRLVEWLKECGVETVVMESTSVYWIPIFELLDAHGFTVFLVNARDAKHVPGRKTDVSDAQWLQRLHSYGLLRASFRPKGQISELRAYMRQRERLLEYAASHIQHMQKALTEMNLQLHHVVTDITGATGLRIIRTILAGERDPKVLARLRDYRCHSSAETIEKALTGSYRAEHLFALEQALALYDAYHEKASACDARIEAVLKELSIGRGRCSGTELPSPRRSRTDQANALAFDVRAALFALLGKDITKIDGLGPYLSLKLIAECGDDLSAWPSPKHFTSWLCLAPSNKISGGKVLSSRTRRSGSRAAALLRLAAVTVGRTDTALGAFYRRLSARIGKAKAVTATARKIAVLFYNAVRYGMEYVDPGASFYETRYRTRVVDNLHRRAKAFGFVLMPLEAPPSVVVS

SEQ ID NO: 395012 - protein, 367 aa, unidentified
MGWMAPLRHLGAKMPVGQKPPANREPSMNEITTVGLDLAKNVFQVHGVDAEGTTVLRKQLRRAQVLAFFSRLPRCLVGMEACATAHYWARELRALGHEVRLMPAQYVKAYVKRNKNDAADAEAICEAVARPTMRFVPAKTAEQQAAVLLHRGRERLVRQRTMLVNALRGHLAEFGVIAPQGLRNVGRLIAIIRDEEDARLPGLARQVLQVLAVQIEQLEAAIAALEKQLMGWHKSNPISQRLATIPGIGPIIATAIAAMVAEPSGFRSGREFAAWLGLVPRQNSTGGKNRLGGISKRGNQYLRRLLINGASANLLRSKATNADPWVIGLRRRRPSLVVAVALANKTARIAWAVMHRQENYQRMATAA

SEQ ID NO: 395013 - protein, 340 aa, unidentified
MQSYQKNYLGIDVSKPYFDVSLLIVIEYQKQELKTARFSNDSVGLKSFQKWLKENKVSMDNHTLCVMENTGVYHRLLWQFCSTNNITIHIGNATHMKWSFGIARGKNDVIDSKRICQYAFKHADELRATPALNPVFLKLKDFITSRTKLLEQKNGIKKYLNELKLSNDKATQKILEHSFKASLEGVEKSILLIEKEIDKIIVADEKIEQNYNLIITVPGVGKFTALYILCCTNNFATKISGKQLASYAGVVPFEHSSGISVKGGNHVHKMANKELKKLLHMCSITSIKYYPEFRAYFDRKKAEGKNGMSVLNAIKNKIVLRVVAVINKQKPYVDNYSQAA

SEQ ID NO: 395014 - protein, 313 aa, unidentified
MITEEVYVVGVDVSKATLELGCFSLTLPPSIPNTPAGFKILLKSITKCITPVHIICEATGPYHGPLVRFLHQAGIKVSVVNPRLTRDFARARGKQAKTDAIDALLLADYGRTMQPDPTTPPEEHVVLLDELVTRRAQLVEDRARERNRLEQASAPDVAASLRLHIRHLDEQIKKLFKRIAEVVEKHPSLKAKVSLLAQVHGIGTLTASVLLATLPELGTLSKNEVTALAGLAPFNRDSGAFRGKRSIHGGRIGVRCAIYMSALCASRGNPILKSFYQRLRAAGKPHKVALVAVMRKLLIYLNSLLKEHSLSPA

SEQ ID NO: 395015 - protein, 416 aa, unidentified
MMNAKQKSQTYWVGIDWGKEKHTIVVSTAQRKIVARLVTDTTLEGLDALVAFLREFDSIGGIAIETTRNPVVVRLLEEGYTIYSINPILSKNWRKCTSVAGAKSDERDAIVLATELARRHEDLPKMTLKDNRVQEFLGLCEALRCLIDQRTSHLQRLRELLQRYYPAALEFWEGLDSPTAWKFIKRFPTPECLAKTRKNTLIAFLRANKIGLKPLWLERIEASKKATEWPVSFTAAGDEIMTLACVGQLFALRAQIQCLEKKIAIQGDSFQETALIKSLPGAGDALAPAITAIILNIAKEDKETLSSLRCLAGIAPVQDESGKRVGSFMRRRCNKRWRNIFHLFSWCSINHSRWAKAFYDICRERGDSFGNTLRKLADKWIRIIACMLRENKPYDEQKYIESLRKSSSPVYERLCG

SEQ ID NO: 395016 - protein, 310 aa, unidentified
MDSITVGIDVSKDRLDVAVRPSGEVFVVERKGAGLELLVGRLQALSPHIVALEATGGFETVVAAALAAAGLPVVVVNPAQIRAFAKALGQRAKTDPIDAGVIAHFAEATQPELRPLPDQATQLLADLVARRRQIIDMMTAERQREQRACVPRLKKSITRLIKVLEKELMSVDTEIDDAMRGSPVWREKENLLASVPGVGTTIARTLIAELPELGRLDRKQIAALAGLAPFTRQSGQWRGRSFIGGGRTTVRRALFMGAMVAKKHNPVLKAFFDRLLAAGKPKMVALIAVARKLLTILNAILRDNRPWQTA

SEQ ID NO: 395017 - protein, 412 aa, unidentified
MKKHTYRSKNVNKINFSQIKERLANEPVVFAIDIAKEKQYGLLSNASGTVSEFIRWNHPEQTVELLSALKGLECPIDIVLESTGTYGDALRFQFRNCGFNIYQMNAKRVKDASEIYDGVPSQHDAKSAMIITRLHREKLSQLWVELSDDERTMNALRREYDLHQSQYQRNQNRLEAYLNRHWPEVGYLLSLDSVTLENLLIEYGSPDRIAADAENAANNMRQWGRCLLSDAKIEAVINSACNTLGQACIESEVHYLQALAEEMRHSRLQQKQVKKALEDSVSSDDELNPLGALIGMVTTAVLLSCHLDPRKYDCARSYQKALGLNLKEKSSGRHVGQLKITKRGSSVARSYLYFAALRLIKNNPVVKTWYLNKVDPRAKNKTIIAVMRKLSKALWYVGRGEEFDATKLFTVS

SEQ ID NO: 395018 - protein, 342 aa, unidentified
MKDIMIGVDLAKNVFQVHGALRTGEVQFRKKLTRKQFPVFMARQEPCLVIFEACGSAHYWAREMEALGHEAKLIAPQYARPFVKRQKNDAADAEAIVIAARQPEMRFVEPKTVEQQSRAAVFRSRERLVHQRTADVNALRALLYEHGHVFPIGTRYLNRMTALLEDETSDLPELIREECEDLLAQIAEKTARIAERTAKLKTLASQSDKARRLQTMPGVGPLTAVAVEAFGPDMAQFKTGRDFAAWLGLVPRQHSSGGKERLGRMTKAGQADIRRLLIIGAMSRLNWLGQRTIAEGSWLSRMLARKPKMLVAITLANKMARQIWAMLTKNEDYKDPALAVAA

SEQ ID NO: 395019 - protein, 351 aa, unidentified
MKSMTKQIQGEALFVGIDLHKRRWHVTIRTADVEIFSSSIAGRWEELKKVLNRFKGCRIHAVYEAGCFGFWLFDHLTKYGVDCIVTPPSLIPQEHGNRVKTDRLDSRKLARLLAKGLLKSIWIPSAKERFHRQVIRRRRQLVGDRVRTQNRIKSELYFYGINLPAPRSKWSQVYFSNLQRIKFKNHWMQKSFNQLLGHYEFLSAQIDKQTQLLKQLSQLPLYRDRVKILCSIPGIGLLTAMEILLELQDISRFRRAEQLAAYVGLTPSQYSSADKIRMGRITGAGKNTVRSALVESCWILIRKDKAMRKKYETIKARAGGKRAIVAVSRKLILCIRRLLIDNRPYVYESVS

SEQ ID NO: 395020 - protein, 327 aa, unidentified
MEREYIGIDLHKAFFQACAISATAERRWAQRWPTTPLGITAFLTRCSASSHVAVEASSPTWAFVDRIVEQVGAVHVVDTRKTRIKAGYAAKTDRLDAQRLADALRRDSIVGIYYPPPAIRDLRELGRHRCHLARLQASLKQRIHALLLRQGVSAPKALFTQRGTRWLDALQLPGWAGSELRGLRHVLTDVRGQLVPILAAIRTVAATDPIARVLDQAPGFGPVFSVTLRAEIGTITRFPDGRHLASDAGLVPRVAQSGRRQWSGRITKVGSPWLRWTLVEAAIHQFRRPDAFGRWARRLAVKIGMLKARVAVARALCGEVFAAWPRA

SEQ ID NO: 395021 - protein, 396 aa, unidentified
MATIGIDIGGHAHVAARCREGEPQADRKILRIGQSRAGFAALDAWLAAEPEPIELVVMESSGHYWMPLAAHLRRSGIPVAVVNPLAARYFAKSRLGRTKSDPADARSLAEMAMRDTPKARDPLAGVELRQSARFVMTLVTEQAKVCQRLYRLIELGFPELRELFEDPTCRTARAVLRLAPTAQAATRRRPSTLAHANGTAGHRRLGQAKAERLAAAAADSIAVPELDAEATFEIGLLLDQFDLLERQIEAAEARVAGLLDGDLSRRLRTIPGVGPAIAATLIAEIGDIGRFDDFDQLLAFAGVHPAERSSGGKGASPETSWHMAKAGNSYLRAAAYRMAVAGVQHNPVIAAHYARKRAAGKSPMNSLGHCMRKALSIVWGVWRNGQDFDPNWGVGA

SEQ ID NO: 395022 - protein, 356 aa, unidentified
MQTQVTKKIDFTGQSLFIGLDVHKKSWSVTVVVDGIEHRTFTQPPDPKALNNYLQRMFPGGAYNSAYEAGFCGYGIHRELNSLGIKNIVINAADIPTSQKDKLQKRDPVDSRKIARELEKGSLRGIHIFDRDLEELRSLNRTRFYLMRDLRRSKNRIKSFLQYYGEPLPQEFDNNQWTLKFVSWLKQVQMKTPGGQDAFSYLIRSYEHQREQMVSLSRQVRVRIREYDNELYSLLKSISGIGPLTSSALMTEIGDINRFPHIDHLSSFVGFVPRMRESGETTHTGGITFRCNSFLRTLLIEASWQAIRQDPALMQYYHRHLVNNKGHKVIIKVARKLLNRIRYVMKNKKPYETGVA

SEQ ID NO: 395023 - protein, 377 aa, unidentified
MERLKFVGLDVHAETIAVAVAEEGGEVRALGIIPNREESIRKLVRKLGPVEQLRFCYEAGPTGYALYWQLTRMGAKCEVVAPTLVPVKAGDRVKTDRRDALKLARNYRAGELTPVWVPDAAHEALRDLVRAREAAKKDELRARHRLNKFLLRHGRRPPMGVKLWTMKYLEWLKREVHFEQMAQEATLLDYLHEVEHAAARIMRLDGAIAEAVKLAPTKMRAVIAALQALRGIAHVAAVTVVAELGELSRFARAKQLMGYGGIVASEDSSGERTRRGGITKTGNAHLRRVVVEAAWTYRHRPAVGTSLRKRQEHVSEEVKEIAWKAQQRLHQRYRKLLAKGKNKGVVVTAIARELLGFIWAIGIKVEAAQKESLQRAA

SEQ ID NO: 395024 - protein, 339 aa, unidentified
MGDAGYVGIDLHRRRSVIVQMDAAGEVLSTTRILNDKELLARELERAGPDTKVVMEATYGWYWAADVVKATGAELHLAHPLGIKGFNYRRVKNDVRDATDLADLLRMHRLPEAWVATPEFRELRELVRHRFKLVSARSGLKNGIHAVLGKQGVELGIGDIFCIEGRRRLEKLPLDPAFRLRVDAQLRLVDAFDEEVDTVDAELRRRLKDHQGFHAIQAIPGVGPVIGATMVAEIGDVSRFSSPRHLCSWAGLTPRLRESDTTSKSGRITKQGSRVLRWACIEAACRTHPNHLRRWGDQITERKGNRLIARTAVARKILTLAFYGLRDGEIRCLAKAEAS

SEQ ID NO: 395025 - protein, 395 aa, unidentified
MFIVGIDIAKRSHEAIIIAEDGQVVRKAFSFRNNCTGYNLLLEQVRRLTLVKSQIVFAMESTAHYWLALYARLLKDGYAVMVLNPIQSHSLRELYIRKAKTDARDSLIIADLVRFGRCKASNVPQDKILALRELCRSRAYLVDMAADLKRKLIALLDRIFPEYESLFDSVFSKASIAVLSKYSTPQKVKNANLRKLTDILMESSNGHFGEWKAHQLKEAACSSFGIDDSGGVYSTLLGMFLEQILSLTAQADSLEKQISVFFQEFNNPLTSIPGVGTVLAATILSEIGDITRFSSADKLLAYAGLDPSVKQSGEFKSNQNRMSKRGSPYLRRAIWLAATVAVHRDPMFQTYYEKKISEGLHYMNVIGHVSRKMTAVIFAVLRDGQPYQPILQSAG

SEQ ID NO: 395026 - protein, 452 aa, unidentified
MEKKKEEVWQIVYPHSAGIDVGSRFHMVAVGQSDDQVRKFGINTDDHNLMIDFLKVHQITHVAMESTGSYFQTLFLALQEAGFEVSLVHGSHTKGIGGQKTDVKDCKWIQKLFTYGFLKSCFLPSNATMEIRTLNRHRNNLIDESSRLLNRIGQCMRQMNIRLDVAINDLGGKTGQSIIQAIVEGQRDGNKLAILADSRIRKSHQELAQYLQGRWNDNQLYILKDLHQAYQYVRNRIENCDQQMKNCFDQIIESQGAEEAGKINLTKKQKSRNSSSLNVCTTSYQYYGVDLMEIECVSEATVMSLLAEVGRDIFKFSTASKFVSWLRLAPNNKKTGGKIISSKTPQTTNKFTLTLRNAANTISRKKTGYLLHFFQKIAYKKGRGAAITATARKMAVIIWNMITKKQPYKPIDMDQYKLKKRQRTLKTINKLIKHMEINTDELIIGSQRLAGS

SEQ ID NO: 395027 - protein, 339 aa, unidentified
MIHVGVDLHQRFCYMTALEARGKIIHSGTVENEKAALRRYFRQFGRREVQVAVEACGFWPGFREVVEPEVERLVLVHPQRVKAIASAKLKNDRVDSATLAHLLRCDLLPESWKADRETQARRQQVRLRATLVRQRTRLKNKVHAVLHQQGLRAPVTDLFGKRGRQWLAQVKLPKTGRQAVEVCLRMIDRYREEIEEQNRQLREQWRGDQRAQWLTTIPGIGMYSAMLLLAEIGDIRRFQDKRALCSYAGLVPRVRESAGKPQARGGITRQGSPWLRWILVEAAQVATRSSPAAQHCYERLRRKKHPHVARVGLARKLLVAVYALLHDGVAFDEAKFAAV

SEQ ID NO: 395028 - protein, 346 aa, unidentified
MKQITTIGLDLAKQVFQVHGADAEGSPLFSRKLRRAEVLRFFEKSPPCLVGMEACGGSHYWAREIAAFGHDVRLIPPIYVKPFVKRGKTDAADAEAISEAVTRKTMRFVPVKSADQQAAAIVLKTRALLVRQQTQAINALRAHLSEFGVIAAVGTARIAALVEIVRDAADARLPKAAHFALAEIANQIEALTRQIETLERAIVAEAKRDEDMRRLVTIPGVGAITAASIKALVPDPDGFKSGRHFGAWLGLTPKPHSSGGKERLGGISKMGNPMLRSLLVLGATSVLRHARGNANAPQWLIALLARRPFKVVAVALANKMARTIWALLTKGGTYRNPGAVSGAASV

SEQ ID NO: 395029 - protein, 395 aa, unidentified
MRHILSFDIAKDKSVYCFIDELRKVIIDATLIEHKKDEFDLLFNKVKNHSNLIVIMESTSIYHLPVENYFRSKGIDTIVMNPKLVKQFKDTLNKSKTDKLDCFKIARCYLGTIDNFYQKQDEYFMYNPLARQYWSLIEGQTRLKNRYRQLIDIVFPEFALIFNDLYDDLALNFIHDFPHPVLFVNRRIDYLMNYLKEKNGTTQAFRFKNKVLKMKELASNSLCFVAFDSYQVQNLVQVIEMIQYHKSEINKIKNQLINDMKDKELFKIINSIPGFGEFSTALFLAEVGDITRFDDKYQFISFIGIDSVTSQSGVSAYHGPISKTGCKFGRTILFNIVTTVLQISAHTDKTNPIYLFFRKKQSEGKHHYKCIIACETKLCKIIYKLCSSNCLYENK

SEQ ID NO: 395030 - protein, 375 aa, unidentified
MCERAVLTNRPSLDLIPFVLKGLEPVGERGTDPVSSLNPNSCTGFEPEPSKEGSWMMAQNELVVVGIDVAKDKVDACIRSLSQRQTFPSTAEGRRDLIAWLRKHKVGKAVMEASGGYERDWAKALRGADLEVRIVDPKRVRSFARSAGRLAKNDAIDAEMIAWFAETFGEAPAQAYDADREKLVQIVNARQALLDVRTELQNRNEHSVPDVVQKMQARLLKKIALEVAKLEAAIAAMIKATAHFTELAEIIESVPGLGEGTSAGLIAAMPELGQVSNKAAAALLGVAPYDDDSGKRRGERQIKGGRRKVRNLFYMACLGAATQHNPVLKAFYRRLIAKGKEKKVALVACMRKLIVILNIMIARGEKWDASRYAVG

SEQ ID NO: 395031 - protein, 350 aa, unidentified
MNVNHYIGLDVHKKSISYCVKTADGTMVEEGKLRATHAALREWAEKRREPWHGAMEATLFSGWIYDALKPYATELQMGHPAMMKAIGASKKKNDKLDARKTADLVRCNLLPVCYVAPPEIRELRRMLRYRNVVVAQAVRLKNKMSGLLMEVGAEYNKQRLHGKEYFSELLDTIEEVPESVKDLLRLSRGALEMFQTTQRQLLDQLQKQPLLAQRVTLLKSIRGVGEVTALTWALEVGDPQRLTSVGHAVSYCGLTSALDSSADKQQRGPISKQRNAHLQTVLVEAAKLAPRWNPQLAAIHAREIQRGHRNRATLEVARKLVAYLLAVDKSGKPFQIRTPATVEQEVETTA

SEQ ID NO: 395032 - protein, 484 aa, unidentified
MTILPPFPNSSEPQPRYIGLDLHSEEIQLHVTLADGSSLRPVRFATSAANVNQLRSELSPQDAVAMEATTNAFTVARLLKPSGARVMVSDQRKTKMIAEAKVSTDKIDARVISELLRVDYLPEVWLPDEQTEELRHLMSDRQSNVDRRTEVKNRIHAILHRRLLKCANLFDSKEGKALLDNLESEDSPLSVVERSRLKLSREELQHLEQLVVENDRSIARFVVADGALHHRLNRLLTIPGVSLVVGAGLLAAIGDVTRFKKAKLLPSYFGLVPSTYQSGSSEGYHGPITKRGRKQARWLLLEAAEHTVKAPGPLHAFYLRLKKKRNHNVAKTAVARKMAEIIWHLLTQDEDYLYQIPKLTQDKQARVLYLATGQKAQGGIKKGEKRSALYGTGLKGSRVKKAVAGEAATQAEEKYQALVAERAAGHKTHSPDGQCLIRQQQTALDPLRPQAADWETEIARIRDRILNQTPKKEIKRRQAGVSAK

SEQ ID NO: 395033 - protein, 362 aa, unidentified
MSSSVTAIVADVYRYVVGVDTHAATHSYAIVAAATGALIDQATFPTTAAGLGRARDWIGRRTEGDLDGVLVAAEGTGSYGSVLSDVLEQVGYRIVEAPTPRRERGHGKTDTSDAVLAARSTLAVPLSRLRDRRGGQAHTALRVLTVARDQLNADRLRCINALTALVRSHALNIDARRALTTSQITTIASWRRRDEPLGVATARTEAVRLAKRILVADDELGDNRNQISGLVADQAPELLDLHGVGAITAAVILTVWSHPGRIRNEAAFAQIAGTCPIPASSGNTVRHRLNRGGDRRINRALNTIVLTRMRTDADTQTYVQRRLGEGKTNKEIRRCLKRYTSRQIFRTLAAAHRPPKVAEPAT

SEQ ID NO: 395034 - protein, 387 aa, unidentified
MIYVGIDIAKLNHFASAISSEGEILLQPFKFTNDYDGFHLLIQKLDSLDSNNIIIGLESTAHYGNNLVEFLVKHNYKVCVINPIQTSTMRKNNIRKTKTDKVDTYIIAKTLMMNSHHFFSQHDLSIMHLKDLGRFRMKLIKKRTQGKIQLTSYVDQAFPELQYFFKSGIHQKSVYAVLKEAPSTTDIASMHLTHLSHLLKVSSHGHFKKDTATELRILAQKSVGCNDSSISTQITRIIQLIELLDSQVHDVESEMELIVNSLDSVIMTIPGIGFINGGMILGEIGDITRFSNPSKVLAFSGLDPTVYQSGNFNACHTKMSKRGSRPLLYALINAAHNVVRNNKTFKDYYDQKISEGKSHYNALGHCAGKLVRIIYKMLTDNVPFNLD

SEQ ID NO: 395035 - protein, 484 aa, unidentified
MDPRVMDVIVKRCAGLDVHKEIIVACVRLMDDAGKVRKSVKTFKTMTGDLRRMRAWMEAQEVTTVAMESTGVFWKPIFNVLEGHFDLLLCNAGHIKNVPGRKTDVKDSEWIAQLLQCGLLKGSFVPHRAQRDLRDLTRHRAQLASEHTREANRIHKVLEDANVKLSAVASEVLGKSGRAMLWALIEGRENPKQMAEHALGQLRGKIPQLREALDGHVTDHHRFLLRTHLEHAEYIERQIAALTERIETLIATGALDPAPSSTGDGALLAEAAMPESSDGQEAGAAQAAPQREVAPPEPSDETGEAPAALEEETPQGPVPFADAMDFLDEIPGIDRVAAAAILAEIGANMGQFPSPQHLASWAAICPGNNESAGKHKSGKTRKANRWLKRVLTQAAWAAVHVKKSYFCAQYHRLARKRGKKRAIIAVAHSILLTAFHMLSRRQHYRELGADFFDRMNPERLKQYHVKRLESLGFNVTLEKADEAA

SEQ ID NO: 395036 - protein, 344 aa, unidentified
MSGVITVGLDIAKHVFHAHGVDDQGRALFSKRISRGKLLDFFAAQPSCTVALEACGGAHHWARQLTQLGHEVRLIPPAYVKPFVKRQKNDAIDAEAICEAAQRPNMRFVAMKSEQQQAAGLVFRTRDLLVRQRTQLINAVRGHLTEYGWIAPKGPSHVAELAHLIEEKRMAGSLPEAARAMFRLMLDQLASLNGRIAVLDKEIARRAREDEVSRRLMTIPGIGPISATAIAALAPPVETFAKGRDFAAWLGLTPVQRSTGGKQKLGATSKMGERTLRRLLIIGSSAVVQQANKRGAPKGSWLEQMLARKPRMLVTVALANKMARIVWALLIKQEDYRAPVAARA

SEQ ID NO: 395037 - protein, 392 aa, unidentified
MDSPPPRHHSATVAFEEANGSEGETMKKHSSKQASLSSTDVESCTTIAIDLAKQVFQLAGEDATGRVIYEDRIKSRQAFHDFLIRLPSTVAVLMECGPGAQAWARLLQTQGNPVRILPAQRVAEHRSGAKNDRNDTHAILRAGRDSSIAAIPIKSTAALAIQALHRVRRGSIKRHTALGNQMRGLLLEHGVSMPQGDAAIIKQVPRCLEDASLPLPDLLRELLDELLADWLSLGERIARLSKRLEATAREDKVAQRLITIRGVGAITATAIVAKQTEPSRFASGRMYSAFFGIVPDQHSSGNKVRLGRMSKRGDGYIRSLMIQGAHAVLSQLKPDSDQPDDRRLLRWLSRLGRKEAAIRLANRNLRIIWALLQSDQVYQRKPNSKPEAAMSL

SEQ ID NO: 395038 - protein, 464 aa, unidentified
MSRKRNKGLSLGDRPVEQPCAAGIDIGAREIFVAVHHDPDEKPVRRFGTFTEDLERMTDWLERCGVTTVAMESTGVYWIPLYEILDRRGLKPCVVNARHMKNVPGRRTDWHECQWIQFLHSVGLLRAAFRPEDQVCAVRAILRHRQQLVEMAAQHVQHMQKSLTQMNLQIQHVISDITGTTGLAILDAILAGERNPAELAKLRDPRIKASQATVQKSLFGNWREEHLFTLGQSLELYRSYQGQIVAAEQKIESVLDQFTPRADPEQKPLPADKKKNRSSAKRRRKAGHPAHFDVRTEAYKLFGVDVTQIPGLESNVLPLFGEVGRDMTRWPTADHFVAWLALCPDNDISGGRVLWRGVRKANNRAGEIFRMAAQSLHRSQTPIGNYLRRLKARLGPAGAITATARKIATIFYSLVRSQVEFDNSLWQASEAERQQRLQRKLTSQARRLGYQLVPIGASPGAANA

SEQ ID NO: 395039 - protein, 325 aa, unidentified
METKKLCCGIDVSHTKLDVCYQNNLGELFHLQVGNNKQGFAKILEHTGVDYHFVMEATGVYYIRLAFYLHSQGCELSVVNAIAIKRYIQMHLERNKTDKKDAGWICRYAIEQRPAYWQMPDNAYFESKQLYNAIREYTEQIKRFNNQLHSLRLLPVPSKDTIKSLEKIIVQMEKEIKQLEQKLQLLLEQWQPDQLKNVSSVKGIGKRAAAMLIVFTQGFKHTQNHRQLISFAGLAPTQYSSGSSIQGKPRIYKRGGKNLRDVLYMCSMNAMKTNTACKALYERLRANGKTGKQALIAVCNKLLKQVFAVVKNNSLYQPNYCSAKP

SEQ ID NO: 395040 - protein, 394 aa, unidentified
MIYAGIDVASTKHDIVILSESGELFKKAFSIKNDLDGYKKLLSEISSAKEFFNDLNVRIGLESTGHYSRNILHFLILARFEVMFINPLLTNMDRKAASVRKTKTDAIDAKAICMFLIRNQNDFKPYTLSSYHIDELKTLVRQRKSLKTQINKEMNLLHAYVIQAFPEYYKIFKKINSKASMEVLSRYASLSEFKRARLETLIELIRKSSQGHHGMREAQMIKELTSSSIGIDSSALSFSIKQTIERILMIKDQVCDIEHEIIHHVDDSKTTLLSVPGVGYTTGAIILAEIGDIHRFKTDDQLLAYAGLDPSVYQSGNFEGSYKISKRGSSILRWAIYQAAQAAVKFDPVFKAYYLKKKSEGKRHRVIIGHVTKKLLRVIHSILKNNTTYSLNTH

SEQ ID NO: 395041 - protein, 366 aa, unidentified
MKKTSTVQVNGNMIFKGHKLTIGLDLGDRWSNYCVLDEAGEVLLEQKLPTTPEAMKQTFERIPRSVMALETGTHSPWVSRLLRELGHEVLVAHAQKVELISKSKRKDDRHDARTLARLARIDPELLGPVRHRSAKAQIHLTVIRARAELVSARTALVNAARGLAKSYGERLRKCGTEQVSRELAAELSAELREVLEPLLKEIESLNERIKEYDARMDKIARESYPQVALLKQVKGVGTQIALTYVLTLDDPHRFPKSREVGCFLGLRPGRRDSGQSQPQMHISKEGDPYLRTMLVQGAHYILGPFGEDSDLRRWGRRLAERGGKNAKKRAVVAVARKLAVLLHRLWVSGEVYEPLRNSHQAMRAVA

SEQ ID NO: 395042 - protein, 341 aa, unidentified
MTEVSMIGLDLAKMVFQAHGADAAGNVAFRKTLRRPKVLEFFRTLPPCVVAMEACGGAHHWAREIGRLGHRVRLIPPAYVKPFVKRQKNDASDAEAICEAAQRPTMRFVAVKSEAAQASGAIFRTRDLLVRQRTQHINAIRGQLTEYGLVTSKGPAHLPRLLALAEEAGSSLPVDARAMVDLLADMVTLLGQRIIRLDQEIARRARTEDAPSRLMTIPGIGPITATAIAALAPPAETFRRGRDFAAWLGLTPRQHSSGGRQKLGATTKMGERTIRRLLIIGASALVRQTSRRAPPPGSWLAGMLARKPRMLVITALANKMARTVWALLARNEVYRAPAVVA

SEQ ID NO: 395043 - protein, 359 aa, unidentified
MLSQSNKIDFNGQHFYVGLDVHLKSWKVSIMAEKLTLKTFSQDPKPELLYHYLVKNFPNGTYHSAYEAGFCGYWIHNKLKALGIDSIVVNPADIPTTDKEKVSKSDKRDSKKIAKCLRNGELKGIHVSSLKTLEDRCLVRTRGTLVKDLTRNKNRIKSFLYFHGIEMPERFKQSSTHWSNRFLNWLRSIELAEYSAKKSLALIIDESEHLRLIILEATNGIKELSQSETYVNHVRLLRSIPGIGILTAMIILTEIEAINRFDNFDKLCSFIGLVPTTHSSGEKDIIGEITIRGNNFLRSAIVECAWIAARKDMALNKSYHDYCRRMEPNKAIIRIARKLLNRIRYVLKNNQPYEYSVVK

SEQ ID NO: 395044 - protein, 337 aa, unidentified
MDRRYVGIDLHRRRSVIYAMDADGEKLFCERIDNDALRLLEVVSAAGDGAEVVIEATYGWYWAVDLLRDAGFNVHLAHPSGNDWGKRRVKNDERDARDLADLLRLGRLAEAWIAPPAVREARELVRYRARLVQLRSGLKAQVHAVMAKEGVLPETSDMFGPKGRQLLDAMELGDAYGVRVESLRDLIDGYDREVAMLERRIHELLRDDRGYQAIQALDGVGRTLGAIFVTEIGDITRFRSPEALCSWAGLTPRHRESDTKVVRGKITKQGSKLVRWAALEAIVRYHGGPPLRDGFHRIAERRGTNKARIATARRLMTLIYYGLRDGEIRCLQQRAVA

SEQ ID NO: 395045 - protein, 418 aa, unidentified
MKVVYPICCGVDVHKTFLVATLITSQGIIPHYSKKRFSTFNKSILQFKQWLIDNNCYDVCMESTGKYYVPVYNLLEDTIRVIVANPKWVKAVKGNKDDKKDSKWIGDLFRLGLVPGSYIPEKPIRILREYTRYRSKLVSCSSSEKNRFQNAFTVCNVALDAVVSDMFGKSATFITDYLISSDTFDPEYCTSLLQKSLKKKADTVVESIQGYQMTQAQKERIIMVRSHLDYVTKSIAELDEKLDKLVEPYDGAIKLLCTIPGINRASAITIISEISTDMSQFTNSKRLCCWAGLTPGNNESAGKKKSVRITRAGIYLKPALVQVAHAAVKSDKSPYYKIKYEHICKRRGKKRAIIAIARMILTAIYNMFVTGEVWNPTDLYKIDMPQEMQDKQKEKAIKQAAKFLISLGLIKATDISVA

SEQ ID NO: 395046 - protein, 370 aa, unidentified
MSREVQYIGLDVDDKAFHGAIMATYGNEVMQFVCKPNIGALLKKLGSMKVEKEKLRICYEAGYLGFTLCREFRKNHIYCDVIAPSLIPDTRGKKVKTDRLDSVKLAQLYRSGLLTSVHVPSQEDEAERDLIRSRNFLMDQCRRLQKHILALIRRHGMHYKGETGKKRNWTITHIEWLETQSGKLTDSNLQKNLCNLLHHYKQCTAQIDVYNEEIESMANSEKYKKKVKALVCYRGIKTQTAMTLITELGDIKRFSHPEKLTSYCGMDITEYSSGGKEKKYRMTKMGNKHIRTAVIESCQLACNAPRVGPDLRRRRQEIDPKMIDVADRCMKRLYKKGTRLLHENKIKNKVKTACAREMLGFIWESLRAVA

SEQ ID NO: 395047 - protein, 391 aa, unidentified
MIYIGIDVAKDKHDCFITNSDSKVLFKAFTIFNNLDGFNDLYQKIESVMDDVTKVKVGLEATGHYSYNLLGYLIDKGLPTYVINPLHTNLYRKSLSLRQTKTDKVDARTIASMLMSDVNLKSYSDTSYHNEELKSLTRYRFDKVKERAKLKTSVSRLVCILFPELEKLVPTLHMASVYALLSEFPSAKHVATAHLTRLTNLLSESSKGRYGKDTAITFRDSARASIGSNMPAKSLELKHTIKLIQELDSEIDEIENEIKIIMDEINSPILSIPGINYRMGAMIIAEIGDFNRFDSPDKILAYAGFSPSTYQSGQLDGAYAHMEKRGSRYLRYALYNATKYVCHWDPTFAAYLAKKRAEGKHYNVAISHAVKKLVRVIYHLEKTKQQYIKAA

SEQ ID NO: 395048 - protein, 376 aa, unidentified
MENDSTLYVGLDVHKDSITVGYAIGMGDVELLGKIGTMQIDVDRLCKRLLAKSRQICIVYEAGPCGYGLYRRLVEKGLDCMVCAPSLIPRKPGERVKTDRGDAIKLVRSLRAGDLSAVHVPTVEDEAFRDLARAWSAAREDLKAARCRLKSFLLSHGVHYLGRADWGATHRRWLSTFSFDSAWQQLAFDEHRRTIEDRLAQCERLEAALREAVANWRFYPAVLALQSMRGIQFTSAVGLASEMGDLSRFEHPRQLMSWLGVTPSEHSSGSKRRQGSITKTGNSHARKMLVESAWSYRHLARVSIDIQRRHEGIPKAIVDRAWDAQLRLCRRYRKLVARGKSAHVAIIAVARELAGFIWDIGRLGMSLASPQCSQPA

SEQ ID NO: 395049 - protein, 366 aa, unidentified
MKKNSTVTTKRNEIFKEPKLTIGLDLGDRSSHYCILDETGEVILEHGLPTTPKGIHQVFSRIPRSRIALETGTHSPWVSRQLTQLGHEVIVAHARNVRLIGESSRKDDQLDARTLARLARIDPGLLGPVRHRSAKAQIHLTVIRARAGLVSARTALVNAARGLTKSYGERLKKCGTGQMNRKMAKGLSQELRDALEPLIGEIESLNGRIAEYDRRIEQIAKEIYPQVTLLKQVKGVGTLIALTYVLTLDDPHRFRRSRDAGCFVGLRPGRRNSGMSEPQMRISKEGDRYLRTLMVQGAHYILGPFGQDSDLRRWGLRLAERGGKNAKKRAVIAVARKLAVLLHKLWVSGEVYEPLRNNHKVVSAVA

SEQ ID NO: 395050 - protein, 399 aa, unidentified
MLAVGIDISKSKSVAAILNQDGSMHTSPFEFHHTQPELDAFIKYILNSNQSATILMENTGHYHYPVLKAFQEAGLPVCMVNAYQIKKFGDMDLRKAKTDKKDAVRIARYALEKSYSLVPYTSMEQKYEDLKFLARQYNQRMLTLKTNKVFLLNLLDETMPGITNILPLTTRTPETSLSVLFINRFKSYDRIKKMGKSRFLDAFEKIARKSRNRQTKTYGLAIYEAALRNITTRGENEYTLAAQDQCLELVCESQKAADSIILKMKTLAETLPEYAVLRSMAGVGDRLGPLILAEIGDIRRFHSGKALNAYAGNDAPPYQSGTFESHNRHISKRGNTALRKYCFEVMQALKLTRPQNDPVYLFLLKKEQEGKPYNVAKMAGVNKFLRIYYARAMETLKQQ

SEQ ID NO: 395051 - protein, 315 aa, unidentified
MKKHAKPDVGVFAGIDVSARQISVARLQRGEENPAFTTFANSASGHTALVAFLLHAGDGLRVCLEASGNYSLDVALMLHAHRQVEVSVINPRRARRFAESLGERSKTDPVDAYLLCQYAARMPWESWQPPSSTALRLRAITRAIESLGVMHTQENNRAHALSSSQALPALVLRERQRHQHYLEHRIKQLRREACRLIARDPELDRYYRLMLTVPGIAQTSALQILGELAVLSETSDARQWVAFSGLDPCHFSSGTSVEKRPRISRGGSRYLRHALYMLSGVIRPFAERTTGQYRMPASVRTRLVTLHCRFIGDPS

SEQ ID NO: 395052 - protein, 391 aa, unidentified
MIYVGIDVAKDKHDCFITNSDGEALFNVFTIANNLEGFNDLFNKIISVETNPDNVKIGLEATGHYNYNLLEFLIDKGLPTFVINPLHTNLFRKSLSLRLTKTDKVDARTIALMMMSGVNLQSYSDKSYHNEELKSLTRYRFDKVQERAKLKTSVARLMVILFPELEKLVPTLHMASVYALMTEFPSAKAIAEAHLTRLSNLLQKTSRGHYTKNDALLIREAARTSIGTSMPAKSLELKHTIKLIQEISSEIDEIEQQIELIMNTLNSPITTIPGINLRMGAMILAEIGDFSRFDSPDKILAYAGLSPTTYQSGQLDSSYSHMEKRGSRYLRYSLFNAAKFVCIWDPTFSAYLAKKRAEGKHYNVAVSHAAKKLVRVIYQLEKTGQPYIKAS

SEQ ID NO: 395053 - protein, 465 aa, unidentified
MKRQHRRRVPKPRQSSAALERLHPHAAGIDCGSAEHFVAVPSDRGPTPVRSFPTFTGDLQRLAEWLTACRITHVAMEATGVYWIPIFEILDARGFQVILVNARHVKNLPGRKSDVSDCEWLRDLHILGLLRGSFRPADGIVALRGYLRHRATLIESAGSLVQRMQKALVQMNVQLPLVVSDITGVTGLRILRDIVAGQRDPQQLAQHRDYRCHATEAEIVAALTGNYRPEHVFVLQQNLNLFDIYQQHLATCDAAIEGHLAGLVATATPPSTSLPTARRRQKPRENEPRFDVRTPLHQLTGVDLSQIDGIGPYNALRLLAEIGTDMTRWPTEKHFTSWLTLAPQNKISGGRLLSSRTQPSANRAAAIFRLAAMNLGRTQTALGAFYRRVAFRIGKAKAITATARKLAVLVYRTLKDHILYADPGADAYNAQDRTRIVRRLRHRAEHLGFGLVNLSTGEVVEGSVS

SEQ ID NO: 395054 - protein, 408 aa, unidentified
MKLFVGIDVSSQRLDVCFADSEHQVLHETPLPNDITGASEIKAIILKLAKKVHYDVIKVGMESTSVYSFHPATFLAEDAELKELGIEVIVQNPKAIARFKGLFEEDKTDIIDARRIADFLRLGLHSTTVIKEEKYVALQRLTRSRYQLIEQMTECKQHFLENLYYKCNTLTRDAETSVFGATMMDLLTESLSLGEIAEMDIEDLAAMLQQKGRGRFSNPEKLAKAINKAIRDSYRLGKVLEGSVDVVLATYAMMIKTLKQQVKELDKAIEKLLEIIQESQCLLSIPGIGPVYAAGILAEIGQIERLEDQAKLAKYAGLYWKRKQSGNRESERTSLTRTGNHYLRYYLVEAANSVKNREPVYNEYYYKKYDEVPKHKHKRALVLTARKLVRLVDVLLRNHQLYTPERSV

SEQ ID NO: 395055 - protein, 443 aa, unidentified
MKRRCFGLDVHREFAQVAIWQDGVVRQAGQVAATPEGLRLFADSLAPTDEVALEATCNTHAIAKLLQGRVGRVVISNPQKTRAIAEAKVKTDKVDAAVLAELLAADYLPGVWLSDEVTHALRRQVARRANIVRQRTRLKNQVQAILHRNLIPRCPATDLFGHKGRAWLAERQLPADERQAVSALLRQLDFHGQELKLIEAELARVALDSADVKRLMTIPGVDATVALSIVAAVGDFGRFRTPEQLVSYLGLNPRVRQSGGQPASHGRITKQGRAHARGMLVEAAWAASKTPGPLRAFFERIRARRGMQIAVVATARKLAVLCWHLIAKGEDYAFARPSLTAQKMRRLELRAGLPAKRGRKGKAAGYSLKEVRERERALTEQAEQAYRQQVADWQAKAPGRARKGVAATNGARLSRPSDGAAARQDSAPDPALRSGVDHAHSPA

SEQ ID NO: 395056 - protein, 356 aa, unidentified
MKYLGIDVHVKTTVCCLVDGDGTVVERTKVPTTAADLTALLQRLTAEDELLAGQEIGKLSHFVYDTFTAAGVKLLSFNAHRLRMICSSRKKNDKRDAYWIARCLQSGMMPHPVYIPTGEVRLLRSLLSQRQALVVERRRWLSRARSYLQAAGYKTRVTRSVPGLIESAISQPDGLDEHLAQSLDLCARMENTATLELHRVEQQLRARTQHNDAINRLKTIPAVGDRVGVMLYAWIGDVTRFPDASELASYAGIVPSSWQSANTLRTGRITKEGTPQLRSVLVQAGHVLLWRCQSAEAAPLKAKAERVHTARARRKIAVVAAARHILRLAYYILRDGTRYDPSRLHSTTKEVQPPAA

SEQ ID NO: 395057 - protein, 345 aa, unidentified
MIIGCDFHPSWQQVSWLDTETGETGEQKLVHAAGGAKLFYQQLAAPVLIGMEATGNSQWFIELVQDLGHEIWIGDAAQIRASYVRKQKTDKRDAAHILKLVVEGRFPRLWTPDREQRDLRQLVLHRHKLVEIRSRVKNELQHLSLNKGMQRKCKLWSQAGQKLLRELPLKPWAACRRADLLGLLEMLEQQIGKLDQAVQQAAEEHPQAQLLMTQPGVGPNTALAFVLTIGDVRRFRRGKQVASYLGLIPREESSGGRQKLGAISKQGNRLLRSLLVEAAQIAVRFDPGMKKQYLHRCHQKPKGVAKVAAARKLAVRLYWMLRTQKPYPEIVRIESSPRVPLVGAS

SEQ ID NO: 395058 - protein, 371 aa, unidentified
MAQSSKTLYVGLDVHKESIAVAYAPEDRGAEVVSLGPIGTRQCDIDKLIRRLESKGAALVFVYEAGPCGYGLYRYLTGKGFACHVVAPSLIPRKPGDRVKTDRRDAMTLARSMRSGDLSAIYVPGIEDEALRDLSRGRDDAMQDLKRSKRRLKSFLLRQDIRYEGRATWNAAHLRWLAEVVCPTPPQQIVFQEYVRAVTEQSERLQRLERELHEAVKGWRLYPVVEAIQALRGVELTGAVILMTELGDLTRFDTPRQLMSYLGLTPSEYSSGARRRQGGITKAGNTHARRALVEGAWAYRYPAKVSRHLQLRLEKLPPEVQAIGWKAQVRLCKRYRQLTARGKHVNQVVVAIAREMAAFAWAIARLVPRAA

SEQ ID NO: 395059 - protein, 470 aa, unidentified
MKSTAKKNNAQLNSHLSSEEIAAMSKKAFEEATAITWRLAEVRRCLTQNDKISLVDDKTLVIGADIGSEKHDIRAFDNRGREFSRKAFEFTNDEAGFVLAKEWMVTIRKTYHLHKIMVGMEPTGHYWFNLAAWLIKEGITVVMVNPHHVKKSKELDDNLNRKTDKKDPKVIAGLVHEGRYSIPYLPEKVYADLRNLNKLRSMNTEEITRSINRLDRWLSIYFPEFRTVFKDVTGTGSLFLLEKAPLPEDIVSLGADGINKLWREAKLRGVGYSRALKIISAAERSIGCREGLNTARQEIRWILDGLKRYLEYDRDYLAQIEALSKQIPYVDNMLEIKGLGIRTIVGIFAEIGDISRFASVKPIQKLAGLALVEDSSGKHNGQTIISRRGRKRLRYHLYQAALSLIGHNAEFKEVYKYYLTRKENPLKKMQALMVIACKLLRVLYTMVTKGIKYDPGKLLGDIHRTQETAA

SEQ ID NO: 395060 - protein, 350 aa, unidentified
MIVGIDVHKRSHAVALIDERGGEVGVLTIANSPAGYETLICWLRDHNAAQAVIGVESPGSYGRSLVAALAAVGFEVLHVPAWRTHRERRHLGPGKTDPGDALAIADVVRRKRAELGPALEPEIVRAIATLELQRRRFVRDRTQTIQRLRADWTQFDPVAEASVVRCDRPKVLRRLKQLKLGDGLAERTAASCIRQLARDVEDFNRRIAELEAETRALLAEHGNPVEDLLGAGDQIAASLIAHAGDVRRFKDAAAFARFCGAAPIPCGSGETSGRHRLHRGGNRQLNAALYRIAIVQQRHHPEAKAFLARKVSEGKTPREARRALKRHLSNVVYRRLLAWANSAPSMNLLT

SEQ ID NO: 395061 - protein, 351 aa, unidentified
MFILGVDYHPSFQQIAFLNQETGECGERRLDHSDGGAEKFYRGLQSQGVHVRVGIEATGYARWFERLLAELGIELWIGDAAEIRTLRVRRQKTDRHDAQLLLKLLLEDRFPRVWIPNPENRDLRQLLWHRHRLVQMRTRILNQLQAVAMNEGQRWKKRLWNKRGRALLENLQLAPWASRRRQDLSELLDRFNPVIAELTTAIEREANKRPEVVRLMTHPGVGPLTALAFVLIIGDPFRFARGKQIGSYVGLVPCEDSSAGRQRLGHISKQGNKLLRFLLVEAAQVAVRFDLDWRRRYLHLATRRDRRIAKVAMGRKLAVRLFWMWRKGWEYSQVVEFGSNAGQLEATPGGQ

SEQ ID NO: 395062 - protein, 324 aa, unidentified
MERQGFVGIDVSSGWLDVAFRPGTELVRVNNEPRAITRLVRMLERRQPELVVLEASGGYEMAVLERLLAKEIPVALLNPRQVRQFARASGRMAKTDAIDAEVLAHFAEVMKPQPRRWADLETRQLRALVNRRHQLVQMVTAEQNRRRLALAVVRDGFGATLRCLKLQITAINKQLAALIRQVPGLRQKAELLCSAPGVGEVATATLLARLPELGSLDRKKIAALVGVAPFNRDSGRFNGKRAIWGGRGDVRTVLYMSTLVAVRRNPSLRDFYRRLRGAGKTTKMALTACMRKLIVTLNAMVKHETPWRCPPSISSKASRYATQR

SEQ ID NO: 395063 - protein, 345 aa, unidentified
MQESFYVGLDLGSSQCYQSIINSDGALRLARSIPTSEHHLRAAFAHLNGDVRVHLEASELSTWVASIIKPLVAEVIVSHPRSLAWIGKDSNKDDKIDAKKLAELLRLGRVHQVFCQSDNPRQTFKYLVTHYEQLSREQARFKSKIKARLRTLGIIRKDSHLFSTLGQTALLDEIKSVSIKQMLTQSFAVLNQMLASFDEARAAMIEFSQQFREVELLQTAPGVGIITACRFVGYVQTPHRFSNKRKLWRFCRLGVTRRESNGKRLAHPKLDAAGVGSLKDVSRKVFEAARITKSANSFNQFYEMSLANTKNAVHARLSTQRKILATLRAMWIGNQPFRNDLTEIG

SEQ ID NO: 395064 - protein, 345 aa, unidentified
MKHYCALDVSVKETAVCIVDETGKICREVKVASHPEDLISVIKDARWQIERIGLEAGPLSQWLYEGLAKAGLPVICIETRHAKAFLKAQPNKTDRNDARGIAQMMRVNLYRPVHVKTLTSQKHRALLTARKLLQEKAIAIANDIRGLLRNFGLKVGLVGKVKFDERINELVEDRPDLREIMQPLLAARKLLREEFTKLHKKVLDLVREDEVCRRLTTIPGVGPVVALTYTATIDIPGRFTHSKAVGSVLGLTPKLNESGESKRVGRVSCCGDAMMRSLLYEAAQVLLINVKKWSWLKAWAMNIAKRRGRQKAVVALARRLSVIMHRMWSDGTEFRWTRESLPVAA

SEQ ID NO: 395065 - protein, 369 aa, unidentified
MAGGRSPIVTEACCDQAEVGQTEEEDVEQCVGLDVSLEQTSICVVDGNGKTLWQGKCASTPEAIAAAIRTRAPEVSRIGLESGPLSAWHWHEMKKLELPVVCLDARHAKAALSMQLNKSDRNDARGLAQIVRTGWYREVMVKSMDSQVVRSLLTTRAQLVRIRVDLANQIRGVLKPFGLVAGKGSGQPFVERVRSLVAGGPLQEVAEALLSAWQAINSQISTLSRRLIVIARQDMVVRRLMTARGVGVLVALTYVSVIDDPQRFAKSSSVGAYVGLTPRRFQSGEDDYTGHILKHGDALLRTYLFEAAGTILHRVAKWSTLKAWGIRLVKRVGAKKATIAVARKLAAILHRMWKDGTEFRWSSNEAQAA

SEQ ID NO: 395066 - protein, 329 aa, unidentified
MFVGLDLHKNYLQAAVMDDQGRLLSQERIPNRDECIEEFTEKRLKDSHAEIVIESSSNWYHIYELLSKIENRHVVLSNPVKTKAIASAKVKTDKVDALTLANLLRTGYIPESYIPPRHIMDLRELVRYRTSPVRMRVEAKNKIHAILLQNGTRLKEKPFTIGFVEELRRLGDYRIDGYLNVISSLNHQIQTVSSTIKREAREDESTRLLMTIPGVGYFSALLILSEIGDANRFPDSHHLCSYAGLTPSTHSSGGVTYHGSITRSGSRYLRWILTECAKAHIRTRRDSQLARFYTKLAKRRGGSKAAVAAASKLLRIVYWVLKEKRPYHC

SEQ ID NO: 395067 - protein, 354 aa, unidentified
MSQNPNAGIAIVGIDIGKNSFHIVGLDQRGAIVLRQKWSRGQVEARFANMPPCLVGMEACVGAHHLSRKLKEFGHDARLMPAKYVRPYSKGQKNDFRDAEAIAEAVQRPTMKFVATKTADQLDLQALHRVRERLVSQRTGIINQIRAFLLERGVAVRQGQRFLRAELPRILATPPNVLSPRMVRIIENLAGDWRRLDERVQNLSDEIEAVARQDAGCERLMSVPGIGPIISSAMVAAIGTGDGFSKGRDFAAWLGLVPRQMSTGDRTILGKISKRGNRYLRVLFVQAAWVVLIKPKSWERHGLKSWIEAAKKRLHPNVLAIALANKLARIAWGVLAHGRNFEARMDTNATAQAA

SEQ ID NO: 395068 - protein, 409 aa, unidentified
MTPSSSSSATRNNSFWCGIDWGGRFHHLCVLDGTGQQLLSRKVAHTVDGLAVLVGLIASFTGAVRIAIERAEGLLVEYLQHHCDAEIYCVSPKISARARERYRMAAAKSDEFDAYVLADTLRHQYAQWRPLAVPSPLLAELTAVSRDRQRILDMQVDTENRLRSILDAYHPCPLHLFSALDRDITLSFIRSYPTPVQAGRITAARMGAFTSRHGYSGRHKPETLVARMQPHLLSASDGTVAGKALAAKAFTEQLALLNTHLRAHDKRLGELLEAHPDTPIFTSFPGIGPVTAAVLISEMGEERSRFPSAPSLLAETGLAPVTKVSGRTRQVRFRYAANRRMRHAIDWWMFVAVREDLWSADIYQHARAAGQPHHRALRGLGARWCRILWRCWHDHNPYDPAIHHRATAA

SEQ ID NO: 395069 - protein, 347 aa, unidentified
MDHYAGIDVSLEASSVCVVDGAGKILREAKIASEPAALIGWFASLGLDLARIGLEAGPLSQWLYAAMKEAGLAVELLETRHVRTALQTMPVKTDRNDARGIAQLMRLGWFRPVHCKSMAAQETRALLTARKLVQSKLYDIEMSLRGILRGFGLKVGPTTPKRFARRIEELVAGHSTLEVIAKAVLSAHAALLRELDMFEKLVRAMARRDKRARLMMSAPGVGAIVALTYVSAIDDPARFSSSKRVGPHFGLTPRKYQSGETDVTGRITKIGDAGVRTALYEAANVILTRPVKGAGLKSWAMKLARRAGMKKAKVALARKLAVILHRMWIDGTAFDARKAAFAGVAAA

SEQ ID NO: 395070 - protein, 453 aa, unidentified
MARRATSGTKKKKNSGIFERINHNAGGVDAGAEFHWVAVPEERATPSVRKFSTLTSGLYQLADWLVEVKVDTVAVEATGVYCVPLMEVLEARGIKVLLAKPSSLKSVNEHQKTDMSDSQWLQMLHTFALLRPSFRPTQLVAVFRSYSRQRRMLIESASTSIEHMKKALTQMNVRVDQAVSDVTGVTGMSIIRAILAGNRDPQYLASLRDPRCAMSEEGIAEALHGKYSDEHLFALDQAVRTWDHYQVLIAECNGRIEEHSETFEKKASRQDIPKPRRVEHLRKNVLPFDARSLFFELLGQDLTQIDGLSSGTVCTFIAEVGTSLDSFSSVKKFTSWLRLSPGSNTTGGKNKSGKNRSTTNRLTTALQVAAQSLERSKSANGAYFRRKKAQLGPEKAITATAHRLARMIFYTLKYQRPYVDPGPDYYLTRHREKVFKSLQKRAKELGFTLVEAA

SEQ ID NO: 395071 - protein, 421 aa, unidentified
MKELRAKRVRTVKEGTLIATVDIGVASNTGYCTTLDGRGTKSFRFDNTKEGFEKFWCMTIASKSRFGCDEVLVGYESTGPYAEPLVHYLANKQVKIVQVNPMHTKKMKEVNDNSPLKTDDKDPRVIADIIRLGRALTIVVPEGDAAYLRRLNNARERHVGERTAFLNQLQQLVFLIFPEFKKVLKDMKGKTAQHILKSYTTPERIGTLSKEALGEEMRKRSMGKFGIKDAESLIGLARETVGIKEGLAGIFMDIRHILMQLEAEVRFIAEIEAEMGATLKRIPCSVRLLSIKGLGTVSVAGLIGEVGDFSKFSTQSEIMKLAGLDLYEISSGKRKGQRRISKRGRSLLRKILFYAAIQMIRKNGIMYDYYARLTGRGMERMRALIAVSRKLLRIIHAIVRDNRDYVGQYQAPERRVIKKAA

SEQ ID NO: 395072 - protein, 425 aa, unidentified
MDYTQNKKIMQITETTLIIGVDIAKKDHYARAFDWRGIELDKTISFRANGTGFNEFMDWIDSVKLKHYKNKTVIGIEPTGHYWFTFGREVLGKEYTLVQVNPFHVKRSKELDDNTPSKSDRKDPKTIAMLIKDGRYQIPYMPVGNYAELRNMNNLREEMIKKIWSVKNKMIRWLDINFPEFLNVFSTWEGKTALVTLDKLVLPSEIKKYTKEEILKIWRENDIRRGVGIKRAEKLLDESMRSVGVTEGKNTAKFEMSLLLREYKELRDILEDIESKLSEMTLIIPGAKNILEIKGIGIRTVAGFFAEIGEIKRFRHPKQIIKLAGLNVGENSSGKHKGQTKITKRGRKRLRALIFRAVLPLIATNEDFRELHKIYTTRKVNPLKKLQSIMVIGCKLIKVIYTLVVKDTAYDSSKMFKDIKRLEVA

SEQ ID NO: 395073 - protein, 368 aa, unidentified
MRHEQGLQQRQRPGRSGGAGLVYAGIDTHADSHHVAVIDAHGRAVDDVRVEATARGYREVVRFLSRWPGVVLVGVECTGSYGAGVTRALTEAGYDIREVNRPNRFDRRARGKTDVFDAYSAAEAVLSGRATAVPKGGDGLVEALRALRTTRSSALRERTATINQIKAMLVAGPESLRARYRGLSNTKLTTTLASSRPPAQPVTAEEATAYSLRVLARRYRMLSEQVTDLKAQLTRLLDGHAPALMAVYGAGPDTLSQLLITAGDNPARLRSEAHFAALAGACPIPASSGKTNRHRLNRAGDRQANSALYHIVIVRMAHHQPTRDYVARRIAQGRTKMEIIRCLKRYVARQLYRLIHDTLSGQHPSLTA

SEQ ID NO: 395074 - protein, 428 aa, unidentified
MNIEVTTRREQFCQIKSEIRGSTDCLVVGIDVAKDSHHAFMGTSTGKSLLRKLIFENNLEGFRKLLERSEAIKNQNALCEIVFGLEPTGNYHKPLGAHLIGCGCHVVLVTGKAVKNNRELLDGRWDKNDIKDAANVADLVSRGKCLYYDFPSSDINELRQYLSLRRRLKKEEHSLRMRIRNTLLAQYFPEFDRFYSACESESLAIVRWCLDPSRIAGMDFEQFFSMVTVRRRGIAQKLRLQKIHRLAVESVGCSMGPAAELEAALLVEKLKEVRRQLKQIADQMEDICLEFTEYSWLLTIPGFGRYIAARVLASIANPWRFNSSNQLLKLAGYDLGANRSGKKSAKAVPVISKRGNSELRFALYQGAHVASTRNRHFIRYFTRMLQGRERERGIKTKMRVKLAAKMLKIAWTIMKKKESFDPEYLSMN

SEQ ID NO: 395075 - protein, 347 aa, unidentified
MVTLGTDSHKQSHTVVAVDENGRQLGELRVAATPAGHREAWGWARQWRERRWAMENCRQLSRGLERDLLVAGEAVLQVSPKLMGRSRRSGRQLGKSDPIDAMAVARVALREPNLPVARLEGKSRELKLLVDHREDLVGERTRIQNRLLWHLHELEPGLQIASGGLTRKVVLNEVNRRLQAHQGVVSEIARDLVERLAELTLSVNRLQRRIEVLAAELAPTLMSLPGCAGLTAAKLLAETADVHRFHSSGAFAMHNGTAPIPVWSGNQQRHRLNRGGNRQLNVALHRIAITQLRLGGEASAYVARRISLGNSKAEAIRSLRRKLSDEVYQRLRLDRSEPLAQPTGVAA

SEQ ID NO: 395076 - protein, 347 aa, unidentified
MKFYTKQHNHYCGIDLHARTMYVCIIDAMGQVVFHKNMKANPHTLATAIEPFQDDICIAVECMFTWYWVADFCEDNNLPFVLGHALYMKAIHGGKAKNDKIDSYKIASLLRGGTFPMAYVYPRPMRSTRDLLRRRMHLMRKRAELLAHIHNTNSQYNLPEIGKNLRYKSNRSLVENRFDDQSVQKSVDLDIELINFYDTQLSSVEWYIHKHARAHDYHSHMLLKSFPGIGDIISLVILYEIHDINRFPTVQDFASYARLVKCKTESAGKTYGTSGAKIGNPHLKWAFSEAAVLFLRCNPKAKAYLEKLAKKHGKGKALSILAHKIGRAVYFILKRKKPFNPELFLAA

SEQ ID NO: 395077 - protein, 317 aa, unidentified
MIVLGVDIAKRKFDCALLTGERFRTKVFENNTVGIEACLGWVTRHAGQPVHACLEATGPYAQALAEALYDAGHTVSLINPARSRAFAESLGLRTKTDAVDARMLARLCQALKPEIWVPAPKSVRELQELVRRLDALIEMHTQETNRLAVAHEAVRGSIEESIAFLDRVIAEIKEAIAQHIDQHPDLKAQRDLLDSIPGLGPATCAWLIAELNAKRFTCARSAAAFAGLTPAHRLSGTSVHGKPRLSKRGNAQLRKALYWPAITALRCNPIVQALGKRLRARGKHPMAIIAAAMRKLVHIAFGVLKSGKPFDPSLAGA

SEQ ID NO: 395078 - protein, 421 aa, unidentified
MENTAARKLKQVPEGYLIIGVDPHKKRHAAVAITRDFTTRDKFKFDNTREGLETMLRRARMEMVKLDCRGVMFAIETGGHYWRNIAYFLDEQGIPFRFINQFTLKRRREGKDLNRRKNDYRDSEVAAQLLCTGEFTESTIPQGVYAELRTAHNAYRRLVKERTRITNLLKGLLDGLFPEFTLVFKDPCGLTALSVLSTCAIPGVIAGMTEEEFVATIEAKHQGRLMRKKLRELHYVARASIGIAAGARPVSAEISFLIEKLELIRGHICIIGRTLVSLVDETEEGKYLLSIRGLNYIAVAGLLAELGCFKAYRSAKQMIKMAGSNPTESESAGKRGSHTPMSKQGRPVLRYCAWTSVIPMLRLNSDFRAWAKQRRERPAHANPLNGREIVGAALNRLLRLAFALVKNQTYYRLPQLVQVTG

SEQ ID NO: 395079 - protein, 331 aa, unidentified
MQPGEGIIGIDISKDSFDMVLRSVRGEAHRVFANNQKGFTAMIVWVEKQPERIERICMEATGSYWEGLAEYLDERGYPVSVVNPYQIKRYGDHLLNRNKTDKADASLIAEFCEKDLERLRRWKPYPAEIKALRSMERRLDELQSMKQQEQNRLKSGVSDPVVIESLEENLKHLEEQIKALKEKIEDHMEQHPDLKAKQRLLTSIPGIGKQTANKLIAEIRDIEDFASASQLAAYAGLSPRQYRSGSSVYKQTRISKQGRSQLRTCMYMPAVVAADHNPIVMDLKRRMLASGHAKMEVIVAAMKKLLHLVYGVLKHGIPFDPEYVQNSTLIP

SEQ ID NO: 395080 - protein, 373 aa, unidentified
MNQNVIYVGVDVDDERYHGSALDKRTGEVLDFQCRPTLKGLVQQLNKVQQYFGGAHFKLCYEASYVGFSLQRDIKARGFDCEVVAPSSIPRRAGKAVKTDRIDAKELAEFYANDLLTIVAAPDAQTEQDRDLLRSRQQLIQQQGKIRKHIHSLLRRNGFHYKPETQCKTHWRTHHYGWLDKTIAGCSGSLKVNLSLLLRQLRSLDDILAAYGDEVEALAATPRYREPVKALTCYKGIKHLFALTMITEIGDVTRFAHPRLLTSWIGMDIREYASGGKSNRFGITRQGNRYLRTAFIEANQRGYRSARISKDIKARRANCAPEDIAIADRCLRRLNKKGNRLLFAGKHPNKVKVACAREMVGFVWESLNRVAAA

SEQ ID NO: 395081 - protein, 346 aa, unidentified
MLYAGLDLSRKRLDVCLLDEQGARVVVTAAPPDADGLRGLAERLAGHGEPIYAALESMNGARFVRDELAQLGWEVALADAQKVKGLAPLAAKTDRIDAYVLAELARRDLVPAIWLPSPAVRAERERARFRLHLVRHRAALKARIHASLIAYGHPCPVSDLFGTRGRALLDSFALPEAWRASTAASLRLIEHLDDEIGACEAELRRLGADHRYVPLLMSTPGIAWILAYTIASEIGEIERFATPKKLVGYTGLCPRVYQSGACDRRGPLAKNGPEYLRWALIEAAIHAARHPAYAAHYEATKRRLGRQRGAKVARVEVARKLAEAIWYMLTRSETFAPAGPTAALVA

SEQ ID NO: 395082 - protein, 412 aa, unidentified
MQILHSCCCGLDVHKKQIVACLMFTDSAGKRQKEIRTFGTMTVDILSFSDWLASAGCTHLAMESTGVYWKPIYNLLEGVFEILVVNAQHIKILPGRKTDVRDAEWIADLLQHGLLRASFIPSPNQRELRDLTRHRSTLVAERARIVNRLQKVLEDTNIKLASVASDITGASARKMLQALLDGERDATILAAMAKGRMRSKQALLEQALSGRMREHHAFLIAEHLGHIDYLDDSITRFTTEINERLTNESKEVELLDTIPGISTRTAEILLAEIGTDMTRFPSAKHLSSWAGMCPGNNESAGKRKTGKTRKGSRWLRQVLTEAAHGAASTKNTYLGALYRRLAPRRGTRKALVAVGHAILVIAYHVLKRGEPYQDLGANYFDERDQQNVQRRLVRRLEQLGYQVNLVTTTGIS

SEQ ID NO: 395083 - protein, 398 aa, unidentified
MQTLVECGCGLDVHQATVVACLLTLRKGEKIHKQMRTFGTATRELLSLRTWLLGEGCTHVAMESTGVYWKPIYALLEGVVEVVVANAHHVKKVPGRKTDVKDAEWLADLLCHGLLRSSFVPPKPIRELRDLVRYRRKLVQSQAAERNRLLKVLEDSNIKLASVATDVFGLSGRLMLRALIEGRTTPQEMAALAKGRLRNKIPQLELALEGNVEEHHRFLLELQLQRLEAAENDLATLEQRIQERLEPYATQLQLLDEIPGVDWTVAAVIIAELGVDMTVFQTVSQLVSWAGICPGNNESAGKRKSGRISRGDVYLKSALVEAANAAARAKGTYLRDKFYRLKARRGYKRALVAVAHKILVAVYHILSQNVSYKELGDLYLDKLNKHHLTRNLVHRLER

SEQ ID NO: 395084 - protein, 391 aa, unidentified
MVCVGIDVAKDKHDCCILDSDGTIRADCITIPNNMDGFKQLLQTIRDCTKRSDKIKVGLEATGHYSYNILGFLLDNDLAVYVMNPLHTNLYRKSLSLRKTKTDRVDARTIATMLLSDVDLKSYTDTAYHNEELKSLTRYRFDKVRERAKLKQSVSRLVTILFPELEKLVPSLHIASVYALLSEYPGAKQISEIHLTKLTNLLATASKGRYGKDKAIQIRDAARTSIGSVMPAKFLELKHTIKLIRELTSEIDEIEVSIQKIMDELNPPILSIPGVGIQSAAMILAEIGDFSNFESPDKVLAYAGCSPSTYQSGKLTNCYAHMEKRGSRYLRYALYNATKYVCYWNPVFAEYLAKKRAEGKHYNVALSHATKKLVRLIYALQKSGKAYLTAA

SEQ ID NO: 395085 - protein, 408 aa, unidentified
MNSLFVGIDVGSKNNVAYLMKPDGSKHSGFSVQNNLGGAKLLSEGIVSALKSMQLSDVVIGLEATSIYGDSLVYALREDGSLGRFQRKIHVLNPKQVRKFKEAYPDLPKNDWVDAFVIADHLRFGRIAKEVYVDDYRYQALRTLTRSRFDVIQNLTREKQRFANYLFLKCSGIAQAKDIQNTSATTIALMEHFESVDDLANADLNELTAFIFKAGRGKFADPNATAKAVQAAARGSYRLPKTVNDTVNQAMAVSITSMRALKEQVKTLDNAIEQQFEIIPNTLTSIPGIGKVYSAGIIAEIGDVHRFDSQASVAKFAGLVWTQHQSSEFEAETTHLIKSGNRYLRYYLLEAANSVRRCDSEFQRYYDLKFHEVNRFQHKRALALTARKLVRLVFRLLKDNRLYIPPEG

SEQ ID NO: 395086 - protein, 438 aa, unidentified
MSNKVIFNLDDLFISVGIDVGADFSWMSIALPNQQFVGKPYKILHNSMDSLATAVSKIKEAEELYSLESRIFLESTGIYHYPLFCYLRDKGFNCSVINPIITKNSTNINIRKVHNDRFDSKKAALVGLKPDLKVSLMPSDLALNCRNLCREYYDLMDSRSAYVNKLQGELRMAFPQYLGIFSKVTINTSLTLLETYTSPSAFIKADKQEIIDTIKSTARFGLTYAQNKYNAIIQAAHEANEFGYIIDSNIKRIRLYISFIRKYDEEIGSILEAMHELVNANEDTDFVKQIHLIETFKGAGFLSAVSLMGEIGDFSAFSKPKQLFAYFGLDPAVKQSGKFEGTKIQMSKRGSAIARRVIHTLTLQSISVSRTGEAKNPVLRDYYLKKCGAKPKLVAMGAVSHKVCNIIFAILRDNKPFEIITPQEHIKQYNAAKCDIAA

SEQ ID NO: 395087 - protein, 343 aa, unidentified
MQTVTTIGLDIAKSVFQVHGADAAGNVIVRRQLKRRYVLPFFQKLPPCLIGIEACASSHHWSRELQALGHTVRLMPPAYVRPYVKRQKNDAADAEAICEAVTRANMRFVATKTPEQQSCLMLHRTRHLFIRQQTAVINAIRAHLAEFGIVAPVGRNGVEQLLDVVADASDKRLPEIARACLLALGAQLRTLKVQILNFDRQIIAWHRSNEASKRLDEIPGVGPALATALVASVPDPRAFRSGRNFSAWIGLVPKQHSSGGRDKLGSISKQGDRYLRSLFTAGALAVIRYAKIHGTKHRPWLTALLARRPTKVAAIALANKIARMAWAMMARGDRYKEPVALAR

SEQ ID NO: 395088 - protein, 310 aa, unidentified
MQVLHSRCAATDVHKDSVTVCVLVYSGSEPEVRHKEFATHWKGLSNLRLWLFAQKVTHVAMESTGVYWKPVWQALEGHFQLILANPYQVKNVPGRKNDARDSQWLAELLAHGLIRPSFVPPRATREIRDLTRYRVKLTEERNRIHNRIHKVLEDACIKLDTVASDIPGASGRAIIQAIIAGQEHPDWLADKAKGSLRGRRAELRLVLRGRITDHHRLMLGQLMEELDSTERRITRLEQAIAPQMDAQKIARLCTIPGVDVITAWTLLAELGTDMGVFSSPKHAASWAGLCPGNHESGGKRLSNRTRKGNR

SEQ ID NO: 395089 - protein, 368 aa, unidentified
MEEFISSFVGLDVHKDSIAIAVAEDGREAPRFVGTVGHEIKQLLKALHSVGKPESQLVVYEAGPCGYGLVRQLRSRGYGCEVVAASKLSRRPGDRIKTDRRDALTLARLARSGDLVRVAVPDERDEAIRDLSRAREDALRARLKARQQLKALLLRHGRRYTGRSSWNPTHERFLSTIRFSQPAQDIAFAEYRLAVREGHDRVERLTEALRTQTEQWRMKGLVAALSSLRGIDFIAAVTLVAEIGDFRRFSHPTELMGFLGLVPSEYSTGDTQRQGDITKTGNSHARRVLVEAAWNYRFQARLSRLMHIRQERQPKAIRDIAWRAQLRLCHRFRRLRSRKLHQNKICVAIARELAGFIWAIAQQVTVAA

SEQ ID NO: 395090 - protein, 413 aa, unidentified
MSVTDPVEPARPTAGVDWANTEHAISIVDHDGEQIDRFPIAHDAAGLRALVRRLLSAGVGEVGIERPDGPVVDALRQGGLVVYVIPPGQLRNLRSRYGSAGNKDDRFDAYVLADVVRTDRRRLRPLLADQPGTTALRQTVRARRNLVAHRVAVANQLRAHLQICLPGAVGLFADIDSPISLQFLERFGSQDRADWLSAKRWASWLSSVSYSGRTIPDTFHTRLTQAPRGTSGPAADTAAVLTAAFVAVLRTLGTQIEALAASITGQLDLHPDAPIFTSLPRSGRVRAARLLAEIGDARGRFPTADSLACLGGVAPSTRQSGKTKAVTFRWGADKQLRDALCDFAGDSVKANPWAADLYRQARDRGHDHPHSVRILARAWVNIIWACWTTNTPYDPDRHGALQRLLNQDQPMAA

SEQ ID NO: 395091 - protein, 423 aa, unidentified
MEVMHERVAGLDVHKAMIVGCVRIMAGGTVGRECRTFETTTAGLLALLAWLVESGCSHVAMEATGVYWKPVWNILSDGAFELMVANAAHIKNVPGRKTDVNDAMWIADLVACGLIKASFVPEEEIQELRSLLRARKQLTREQTSHVQRIQKTLEEANIKLDSVISDIMGVSGRRMIEAMIAGLRNPFKLAELADRGIKAPPKVLYDALHGRLTEHHRFMLKLYLDQYDALAAAIVKIDQAVDAAIARMDAEVAAGQATFRALIQLLCTIPGISTLSATVILAEIGRDMSRFATAGHLVAWAGLCPGQNESAGKRKSSRLRKGAPWLKTTLVQCAWAASRKKDSYYKAQFNRLRAKGGPKKAICAVAASMLTAIYHMLKDGTEHQDLGADHFDRRSTEIKAKRLVAQLGKLGFAVELKPLAEAA

SEQ ID NO: 395092 - protein, 345 aa, unidentified
MSQQHFVGLDVSVKETAICVVDPQGRVVHRAAVESHPAVISQHLLGLGLTLGRVGLEAGPLSPWLYAGLVEAALPAICVETRHMHAALSARINKTDRNDALGIAQMMRVGLFKPVHVKTPASQQRRLLLTSRKLLQRKVYDIENDLRGQLRNFGLKVGMVGAVGFEQRVRDLVLDLPVIAAVIIPLLAARSALRVQLAKLHKMLLDEVRADPVCRRLMTAPGVGPVVALTYRACVDNPARFSRSKCVGAHYGLTPRLYQSGETARIGRVSKCGDAMMRAALYEAALVLLTGSRRRWSTLKAWGMSIAKRRGMQKAVVAVARKLAIVLHRMWRDGTDFRWSPAQAA

SEQ ID NO: 395093 - protein, 435 aa, unidentified
MDADSIETIDDDPEPVARVAAIDIAKASAMVCTRVPSDKHPGRKMQNTFPVAATTGAILELGDHLACQGIELVVMEATGVYWKPFFYLLEDRGLTCWLVNPRDVKNVPGRPKTDKLDAIWLAKLAERGMLRASFVPPKPIRELRDLTRLREVLTADRTKYRQRVGKVLEDACIKVDDVVSDLFGVSGRDMLDALTNGQRNPTTLAELARGVMKRKKPALIQALTGRFTDHHAGQLQMLLLLHDTLTAQIDQLTCDIQALLDAIDPPPPTTGTGMTIRERLDEIPGVGPATAAVIIAEIGTDMTCFPTEDHLACWARLTPRTIQSGTREKHTKPGKGNRWLKGPLAEAATAAAPTKTFLGARWRRIAAHAPKKKATTAVARTILTYAWHIIADPNARYIELGPDWHTRHIDPARKLRQHRRELERLGYTVTLTTTT

SEQ ID NO: 395094 - protein, 322 aa, unidentified
MSVSVLGIDIAKQKFDAALLVDGKTKHKACKNSVEGFESLMIWLEKQGIQKVHACLEATGNYGEDLAIYLHEAGHIVSIVNPARIKGFGQSELIRTKTDKIDAALIARFCLAMKPGPWIPPPPEIRSLRALVRRVDSLIDMRSQEKNRIGTAHEAVSLLIKEHITYLDQEIEKIRQQIADLIGQDHNLKRKHDLLDSIPGIGKATIPHILAELDDLEKFNHVRQLVAFIGLAPKETLSGSSIKGKPRLCKIGHARLRKALYMPALVSIQCNPVMIAFYNRLKSKGKNGKVIVCAIMRKLVHVIFGVLKSGKKYDPNFQPISA

SEQ ID NO: 395095 - protein, 321 aa, unidentified
MNRVLVGVDVCRDFLDAHARPSGLPKRFDNTPAGIEQLVAWLRSLAPERIIFESTGPYQKAAVGALLAADLPAVVVNARQVRDFAKGTGQLAKTDAIDASILAHFGEVVATVVRPLPSQEILEFRELCDRRGQLVRMLASEKNHRHAAQGASPKVIKNIDKHITFLQRQIDDLEERMDRIVADSESFKAKDEILQSIVGIGRQVSRVLLVHLPELGKGTRRSIAALVGLAPFADDSGASSRIRHIRGGRAKVRMALYQAAVAAVRYCPSMKSFYASLKARGKATRVALIAVARKLLVLANALLRTGIPYQRPTNSVCLKNV

SEQ ID NO: 395096 - protein, 387 aa, unidentified
MIYVGIDIAKQKHFASIMTSDGEILIEPFAFTNDYDGFQILLNKLSFYPQKDLLIGMESTAHYAENLTCFLFLRGFHICIINPIQTASLRKSNIRKTKNDKLDTFLISKALIMNHYRLFTQHDMESLKLKNLCRFRQKLMKARTKVKIQLLTYVDQLFPELQYFFKSGIHGKACYALLKECSNPDRIADMHLTRLTNLLYKTSKGHFNKQTAIALKELARSSVGTKNDTLSLQISQSIIQIELYTSQLEEVENTIDDIMNRMDSVIKTIPGIGNLNGAMIIGEIGEIHRFEKPCQLLAYAGLDPAVYQSGNFNASHTRMSKRGSKLLRYALVNAAWQATLVNKTFKNYYDLKISQGRAHYNALGHVAHKMVRVIHKMMTDNVEFNLA

SEQ ID NO: 395097 - protein, 403 aa, unidentified
MNNVAGIDVSKGKSMVSVLRPFGEVVAKPFSIGHTGSELKELADYLKSLDGETRVVMEHTGRYYEPVARFLHEEGVFVSAVNPKLIKDYGNNTLRKVKTDKADSRKIARYGLDNWAELRQHTPMDTIRMQLKTLNRQQSLYSKTKTMMKNNLIALLDQTYPGVNALFDSPVREDGSQKWVDFATTFWHVDCVRNMSLTAFAERYRKWCKRHGYNFSQSKAVEVHAGAQDLIAMLPRDALTKTMVRQAIDALNAISTSLERLKAEMQALAAQLPEYPVVMAMHGVGDSLGPQLMAELGDVTRFTHRNAITAFAGVDPGADQSGTHEAKSTRVSKSGPPELRRALFLVMDCLLKTQPQDDPVYRFMDKKRAEGKPYLVYMTAGANKFLRIYYGRVKEYLAQLENS

SEQ ID NO: 395098 - protein, 394 aa, unidentified
MTAAYTGNVSTPGGVLHLAFELGWTHWKLAFTIGYGQKPRQRTIAARDLAALEQEIAKAKKRFQLADAAPVVSCYEAGRDGFWLHRYLTARGITNVIVDSASIEVNRRKRRVKSDKLDADKLVNMLIRYRAGERKVWSVVWVPSVVDEDQRQLHRDMQELKDDQTRHNNRIKGLLASQGLALEVVDELLPSWLGAARLWDGTALGADLQRRLVREYERWQFVHRQVLDLTRERRRRMLCDATAHVDKVRRLLGLAGLGVNGAWLLVYEFFAWRELQNRKQAGALVGLTGTPYQSGGREREQGISKAGSKRMRKMLVELAWCWLRWQPESALSQWYARRFGTGQGAARKIGIVALARKLIIALWKYLERGEIPAGARLVDWRSKLIRHKVNKPAA

SEQ ID NO: 395099 - protein, 354 aa, unidentified
MLSWTEKLSFSRVEQLQVELRRKLRRSDLIAFFEKQERCTVVMEACGAAHHWARILSGLGHTVKLIAAEAVKPFVKKGKKNDAADAAAICEAASRPDATFVPVKSVAQQGILALHTTRSLLVKQQTMLANAIRGLATEFGLVVPRGLHNLEPLVELVNTDEAMPKQARQAIAELHDRFGELTKSIKAFEVAIVAHARSDATARRLATIPGIGPITASLIAATVVDISLFKTARQFAAWLGLVPRQNSTGGKTRLGRISKAGNREIRKLLVLGATSMVGRADGWNSAVGAWLRDILQRRPVRLVTVALANKMARIAWARLAKAPASRLRLVGRPGEGVMTRKEVYRPQGGIAVAA

SEQ ID NO: 395100 - protein, 375 aa, unidentified
MLPPYQQRMLAGGTEDKEHAMSQNLDVSPAAIGIDIGKNSFHIVGQNQRGAIVLRQKWSRGQVEARLANLPPCRIGMEACVGAHHLSRTLKALGHDARLMPAKYVRPYSKGQKNDYRDAEAIAEAVQRPTMKFVATKTADQLDLQALHRVRERFVGQRTGIINQIRAFMLERGIAVRQGLRFLRAELPSILATRTDALSPRMLHILEDLSADWRRLDARIEDLSSEIEALARQDKGCERLMTVPGIGPIISSAMVAAIGTGDAFSKGRDFGAWLGLVPKQLSTGDRTILGSISRRGNRYLRTLFVQAAWVVLVKVGPKHWDRYGLKSWIEAAKKRLHHNVLAIALANKLARIAWAVLHKGRAFECVKTNEAYRPA

SEQ ID NO: 395101 - protein, 430 aa, unidentified
MGLSKQSREKMNTTHLSSEQSEESIKYVCGIDIGSQSCSGCIMKPKKEMVVKPITFANSKDGWRKLLEHLGQLEASPDQIAIGIEATSRYHENLYEELRRRGYQMRLLHPGQTHHFHQQQGLRAKTDRLDALTIARVLLSGEERAGYLPNDQVATYREVVRLHTQLSEEVARYQNQIQALVVVLFPEFFQVFADPCLPTALAVLKAYPHAQAMGQAGVEAVYQVLRAVPATHFGYPTAEKLVKLAQGSYSSGRALSGRANSLRILCDQLEHTQANLRRLEEEMEQLVRTDPRTHGLQQIAELGPKTVAVLRAELGEVDRFAHTDQAVAYAGMDVKIKESGKWKGKAKLSKRGSGLLRQMLYLAALRSIRLEGSAFGAYYHHLVERGLKKMSALMAVMRKMVAVATHLIQTGEDYDPSKVWIGIAARGVAL

SEQ ID NO: 395102 - protein, 336 aa, unidentified
MSRRLSADGKTETHVSVVDRDGKVILEARTPTAPKTIAAALAKGPAVERVLFETGRMAPMLFHGLTALGLPVVCVESRQAYQALRSLAAHKTDRNDARGLAHLARTGFFKPVHVKSLPSHAVRALLIARKKLVGQRVTLENQIRGLAVAFGVRLPRGLSSGFAEKAMAAGCGIPGLDGAMRGLLAARDAILKAIVVINTDMKSLERSSSACRRLMTIPGVGRLTALAFAAAIDDPDRFRRSRDVGAYLGLVPRRYQSGEIDYTGSISKCGDARLRTLLYEAANVMLTRYRGSLALKTWALDIARRSTMRKARVALARRLAVIMFAMLKHGAEFEPA

SEQ ID NO: 395103 - protein, 344 aa, unidentified
MSNLDTCGIEVSAKELVVRLRRQEDLEPLRNFTNTPEGHTMVLRYLRRAGRVVRVCMESTGLYGLDLALALSAQEGIEVMVANPRAVRHFAHALMKRSKDDQIDAAVLEQFAEHMPFKPWQRPSVAVLALHALARRLRELVEMQTAEKNRQHAAGLSQAIPAVVRRDLARSLRAQERAIERLTRQARQLIAQDPQLAERFELLDSVPGIGETSAVQLLGELGVLAPDLQARQWVAYAGLDPRHYTSGTSVHKKPRISKTGNKHLRHALFMPALVAVQHDPHLRAFYQHLLAQGKFKMQALVAVMRKLLHALHAMFKTHQPYDGSKLFRLKSAPAQEVPGALVAR

SEQ ID NO: 395104 - protein, 430 aa, unidentified
MDEVNRNRLEEFRQLRQGIRHSEEYLIVGIDIAKDRHHAFFGTATGKTLLRRLVFNNDHEGFRRLLDETEALRVRHGLKKVVYGMEPTANYHKPLGEYLITLGRTVVLVSGVTVKRNRESLDGRWDKHDVKDSANVADLISQGKCLYYEHPSAELRGLRGLLSLKRRLKRQEQSYRVWIRNHLIAQYFPEMDSHYGRSEREGLAIVRWCFPASQITELDVKPFIQRVTSRRIGMEKRRRLEGIWEKAGMSIGCEGVPGVDHEARVMVEGLRQIREAIKETEDKIAELCQQFPHYQYLLTIPGFGPDVSAKVLGAIGDPDRFENGKQVLKLGGLDLSADRSGKDSDKAIPEISKRGKADLRYALYQAALVASYKNRGVMIYYTNKIRGREKEKGIHTKMRVKLAAKLLVIAWTLMKKKEPFNPAYLRAELN

SEQ ID NO: 395105 - protein, 366 aa, unidentified
MQKTSTMRRTANKIFKGRQLTIGMDLGDRWSFYCVLDESGKVILEEKLATTPETMKQTFARIPRSRIAMETGTHSPWISRLLTQLGHQVIVAHAQKVDLITKSTRKDDRHDAKTLARLARIDPELLGPVRHRSAKAQIHLAVIRARAELVRVRTALINGARGLTKSYGERLPKCGTQQISREFGTGLSTELREVLEPLFREIESLNERIKEYDRRIEKMAKEIYPQTELLKQVKGVGELIALTYVLTIDDPHRFRKSREAGCFVGLQPGRRNSGDSEPQLHISKQGDEYLRTLLVQGAHYILGPFGEDSDLRRWGRKLAERGGKNAKKRAVVAVARKLAVLLHRLWVSGEVYEPLRNTQKVIREFR

SEQ ID NO: 395106 - protein, 334 aa, unidentified
MHFIGVDISKKTLDMEVLNHSGEIQKKSKLGNDEKSVIDFFDGLIQEDPSFKWGTTIVCLEHTGIYANILLGFLVKMKTNICIEMALQIKNSQGMKRGKSDQIDAHRIAQYVFKNQHEVRLWAPTRPQVQKMKALLTLRERLVRISNQLEVPLNEGDGFIDLSIQKELHASSKASIRAVQKDIEKVERGIDELIRQDATLKKQFDLLTSVTGIGSIIACNMIVTTNEFKSITEAKKYACYAGVAPFENTSGTSVKGKPRVSKLANMDIKKLLYLGATSAIQHSQELKGYYERKVAEGKKKMSVINAVRNKLISRAFACIRDQRPYEKIYKHTLA

SEQ ID NO: 395107 - protein, 395 aa, unidentified
MSNRGVPPDRVIIAIDPHKASWTAAAVGTSLQPLATIRVPVSPRGYRDLRRFAARWPRAEWAIEGGCGLGAPLATRLFADGIGAVDVPAKLATRVRMLSTGHGRKNDAADAVSVAVAALTAAGLRAVAVDEAITALRALVEHRDDVVKIRTQTANRLHVLLTQLLPAGAPRQLSAEIAAQSLRSVRPRTPGPRMLRRLAAELIVEIRHLDRRIAAATGDITAAVAASNSTLTELCGIGDLTAGKILARVGDITRFPSAAAFASYTGTAPIEVSSGDVVRHRLSRAGDRQLNFCLHIMAITQIRRDTPGRAYYQRKRAAGKSHKEALRCLKRRLSDTVYRHLHREARARSATGPGGHTGASTESSATGSTPTAGSSDKSQPGPAGTEPTTHQPRST

SEQ ID NO: 395108 - protein, 338 aa, unidentified
MNIVFLGIDLAKNLFQLCGLNQAGKPVYTKRTGRKELLQTLANIPACLIGIEASTGAFYYWQREFEKLGHKVRVISPQYVKPFVRGQKNDGNDAQAIVVALMQPTMQFVPPKSPEQQDIQALHRARQRIVNHRTATVFQIRGLLLDRGIPIGSAVSRARRAIPLILEDAENGLSSRMRRTIAELYDLFNDPGRRIHFFDKEIETVFRQSEACQRIAKVKGIGPETATAVVAIGKGTEFKNGRHFAAWPGLVPRQHSSGDRQVLMNMTKKGDKHLRTLFIHGARAVVRVATNNNDGHMNQWVNRLKERRRFNKTTVAVANKNARIIWSMLRNDTGYQVV

SEQ ID NO: 395109 - protein, 313 aa, unidentified
MSEPLVYVGMDVAKATLDLYAPLVPQAKSRSFANTTTGHGALVRWLQSLGLIHVVCEATGGYERAAVGALQAVGLIVSVVNARQVRDFARATGRLAKTDRLDATVLAAYGACIRPMPTVAPTAAQGQLTELVTRRQQVLALRGAEHNRLEHITHPAARRQIQRHLIQLDRHLEQLITWIDQLVHTQPVVAQKVSRLSSVVGVGQLTAVVLLALVPELGTLNRRQVAALVGVAPFNRDSGPHRGRRQIGGGRAAARRALYMAALVAAFRHPRLRPFYQHLVAAGKAPKVALVAVMRKLIILLNRLLQQPTFQPT

SEQ ID NO: 395110 - protein, 389 aa, unidentified
MYYVGIDVSKYKHDCFIVTGDGVIIHDAFSFTNDRDGFQTLLSALTPLGDHSKIRIGFEATAHYTLNLKLFLENAHYSFMEFNPVLISKFTKSQTLRRTKTDAIDCASIARWLMTVEYKPYPSGFYHIYSLKSLTRLRDSLVRQRSFYIVKITNVLDHTFPEFKPFFSNKFSKTALYLLENYTNAEKMSHMNSQSYENIRRISRGKFTPSKFLELKSLAANTVGESNEMFDSQLSSLLTLYKATVKEIESLEKDITDLILEANPRSLSIPGVGPLSAAVIYAEFGNISRFSSPQKMLSFAGLEPSFYQSGTSAHGGHMVKRGSPYLRYTLMNLCIPLMKYNIVFAEYYAKKRSEGKHHRVACTHLAKKFIRILYKLEKDKTDFDPDKLR

SEQ ID NO: 395111 - protein, 387 aa, unidentified
MQIADRSEAPTAIRTDLGAIFVSLELSRSTWLITSLSPGSGEKMSKHSVRGGDIAALLKRFTQLQEKTQARTGKRFEIIVIQEAGLDGFWIHRVLQSKGIDSHIVDPASIATSRRRRRAKTDRIDGEALVRALLAYKRGEPRVCAMVKVPTPEEEDRRRLCRERKVLIAEQIEHVNRLKGLLFSQGISGYEPLRRNRWTRLEELQTGDGRPLPKHLTAQIRRELNRLELLLEQIKAVEVERDALLAAEETSAPAPAAILLNIRGIGPEFAAVLWSEGLFRHFDNRRQVAAYAGLAPTPWQSGAVDREQGVSKSGNPRLRTTLIQLAWLWVRHQPRSALTLWFEARVKRNGGRLKKTTIVALARKLLVALWKYVTAGVLIEGAAMKVA

SEQ ID NO: 395112 - protein, 344 aa, unidentified
MNATTVAVDLAKSVFELAVADAQWNVSERARLTRRQFERWFHNRAVRLVVMEACATAHYWARMLRRRGIEVRLLPAQYVRAYVKRNKTDAADAMALLEAARARDITPVAVKSVEQQALQALHRLRSGWMTTRTRRINTLRGFCREFGMEVSVGAAKGLAQIGRLLADEHSAIPAMLRAPMRLALEEIRLMEARIDALERELAAMAKQSEPCQALASIPGIGLLTSTAMVAAVGDPRTFRSARHYASFFGLTPREHSSGEHRYLGRISKRGNRYVRTLLTHGARSVLRAATVARRAGRQVNRLRTWALAVQARTNHNKATCALANKLARIAWAVWVKHERYQAAA

SEQ ID NO: 395113 - protein, 340 aa, unidentified
MTGLYAGSDLHSNNNMIGLIDEQGRRVFRRRIPNDREMVREVLSPYKGDIVGIAVESTYNWYWLVDTWMDEGYKVHLANPSAIQQYNGLKHADDKHDAFWLAEMLRLGILPEGYIYPKQERPIRDLLRKRGHLMRLRTSLVVSLQNILSRNLGRKMKVNDVKGLQQDRVTPLLEGSEDLAMAGRISKETIDFLTHQIDQIERRIEKTVRVKEAYRFLQTLPGVGKILALTIMLETGPISRFETVGDYVSYCRKVPSQWMSNGKWKGSGNTKNGNRYLAWAYAEASDFARRYYPEPRAYYQRKRQQTNAVVAHSALAHKLARAAYYVMRDQVPFDPEKLFR

SEQ ID NO: 395114 - protein, 397 aa, unidentified
MYIVGIDIAKRKHEAAVIDGDGAVIIKPFSFTNNCSGYNRLLAMLTKAKLPLDEVSFAMEATGHYWLALFTRLQKEGFRVQVINPVQTNSIRSFYIRQAKTDPRDALLIAEVIRFGHFSESTLHPENIYELRELCRGRHAIVSMQADVKRKVVALLDQVFPEYETAFTNLFGDTSMAILQTCPTPKELSEMPLEELCHLIEVSSHKRFRMAKAQELQALARNSFGFAMAGDVFSTMIRLYAKHLVFLKQQVQEMDCKIAEIMNTLDTPITTITGIGPTLGAYILSEIGDISRFPSAAKLAAYAGIDPTMRQSGEYNGVRNRMSKRGSPYLRHAIWLAASSAVLHDPALKLYFQKKRDEGKPYMASVGHACRKMVSIIYAVMRDNKAYTPCIPNEISA

SEQ ID NO: 395115 - protein, 481 aa, unidentified
MAKASRTSLSSHPQAHGPRKKSWRQRQTDYFRQRYPRIEEMEIIHRQAAGIDLGGKKSHFVALEIGSEVEVQEFGMTTLQLCAMVEYLLEHAVTSVAMESTGVYWMPVCELLEHAGVEVYLVNPTHAKNVPGRRKDDKMDCRWLQKLHKFGLLSASFRPAKEIRPLRSFLRHRQCLVELSADHLRRLQKLLDMMNVRIHKAVSDLGGATGMRILHAIVAGETDPVVLAAFRDARCACSEDQLREELTGFYPEHLVKQLASVLRLYEGLLEEITRVDADIEDALKSLAPVPAADLAAQVAADAHAWPKGKHAPAFNTSAYVEIITGQDPTRLPGIGPQQSLRLLGELGQDMEKWPSVKHFGAFITLAPVDKISGGHLYASHTRPGTHPAAVIFRQAASRVVQQEGAALAAYYHKVAKRRGKARAMTALAYKIARMYFYLMKNGWAYVEVGEKHYEESYRQQQMAALQKRAKRLGCVVTPMAA

SEQ ID NO: 395116 - protein, 339 aa, unidentified
MGKAVVSSQAFCGIDVSAAMLAAAVQRVDREGVEQREFANSAAGHKQLIGWLLKRGAAVRVSLEATGIYSMDVALALERTGGIEVAVLNPRTVHQFSQAVRRSKTDKADAMALAEYSLRMPFVPWRRPSPIVLELRALSRHIAALSKDHTRLSNRLHAAEGSAATPRCVRQDLNRSMDGLRKRILRLRKQAVAMVRQDAELLRKFQLLVAMPGIAETSAVQLLSELAGLDPEMSARQWVAHSGLDPAHRVSGTSVHPPSHISRRGSSYLRRALDMPALVGVCCDPYLKAFYRNLQGRQKTKLQALMAVARKLLHAIFGIFKTGTPYDGAKLFPQLILTS

SEQ ID NO: 395117 - protein, 433 aa, unidentified
MGLIVPTTIHPEREDQPLPYEWFVGIDWGSQQHQVCILDRDRRLVGERTVDHDGASLAQRAAWLWTVSAGHPQRVAVALEVPRGAIVEGLVERGFHVFAINPKQLDRFRDRHSVAGAKDDRRDAFVLADSVRTDRPSFRRLQLDAPHLLLLRELSRVEETLLEEFRRSANRLREQLHRFYPQMLQLCSAADEPWLWDLLHLAPTPAHAMLLSEAQVQRVLKAHRLRRLKAPAVLACLQAPALPVAPGTAEAAQAHCGFLLPCLRVLAEQLQTCSQQVSALLSTLAEEPGEGESPSDVAIVLSLPGVGRKITAWLFAEAAQPLAERDYQVLRTHGGVAPVTKQSGKRRQVVMRHGCNPRLRHALYHMARVAMQRDAHFSSVYAALRAKGQRHGQALRNIGDRLLRILMAMLRHRTCYDASRIRCAPVAQMGQKM

SEQ ID NO: 395118 - protein, 403 aa, unidentified
MDRCAGLDWAKDTHQVCVLEADGEPLLQRGFAHGERDLDGMCELLVELGVKHIAIERPEGVLVERLLEAGLVVLPIHPNQLKAARPRFRAAGGKSDAFDAFCLAELARTDHRRFRTLAPDSAETKALRALTRAREDLVKTKVSLTNRLQAELDAFWPGAALIFRRLDSPIALAFLERYPSPTDARALGEKRLAGFLIRHGYCGGKSASELLAKLRSAPRGRARETEETARRTAVLSLLTVLRPVVEQIGLLESRIADAVRAHPDGEVFLSLFRNPDSTLTAAKLLSEIGDRRERYPSAEARAADAGMSPVAKESGRRKVATFRRACDKRLRDAMTTLADSSRLHDPWAKDIYLRARGRGCDHPHAIRVLGRAWLRVVWRMWQDGAPYDPHKHGARKRLNAARG

SEQ ID NO: 395119 - protein, 409 aa, unidentified
MNVIHERCAGLDVHKQTVVACRRVMSGAQVTREVRSFPTTTRGLLLLADWLREAGCTHVAMEATGVYWKPVWHVLEGEFELVLANAAHIKNVPGRKSDVNDATWIADLLAHGLIRASFVPPGPIQELRDLTRTRKQLVREVVQHKQRIQKVLEDANVKLGSVVSDVLGESGRRMLRALIAGEQRPDKLAALASERLAASRDTLAEALHGRVTRHHRFLLKQHLDMVEHLEKTVGEFEAQIEAALEPFRAVIERLVTIPGVSATVASVIVAEIGVDMQRFPTVGHLISWAGLCPGLNESAGKVKSRTLRDGAPWLKTVLVQSAWAASRNKNSYLCAQFLRIKSRRGPKKAIMAVAASILTAAYYLVRDPVAYKELGPVYLLRLDHERTAVRLTQRLRNLGYEVEIKKAAA

SEQ ID NO: 395120 - protein, 396 aa, unidentified
MISVGIDVSKGKSTVCIMKPCGEILESPFDIGHTADELDSLISLIKSFDEETRVVMEDTGHYHLPVATYLSSHNIFVCCVNALRMKKFCSQSLRRAKTDKIDSIKIASFGITYWNELVKAYPSNVIYDELKFLARQYYQVTGMLVKSKVNFSNLLDQVMPKINDVLSNQGENHKLTEFVNRYIHFQNILNMGEMKFTSDYCKWAKKKGYRLNERKAAEILALAQNGIPTLPNSQSVKIAVSEAVKLIHSIEESRNTILAQMQDLCNTLPEYSVVKEMDCIGDTLAPRIIAEIGDVRRFKNKHSLIAYAGIDAPPYQSGAFHASERHISKRGNSYLRKTGYEIMQSLIKHKPADNAVYDFIQKKRSEGKCGKEAMIAGLNKFLRVYYGKVMEFYSEH

SEQ ID NO: 395121 - protein, 310 aa, unidentified
MEQTYIGIDVSKDRLDVHVRPSEEAFAVGRDGEGLAALIERVGMLDPYLVVLEATGGFELTVAAALVAAGVPLAVVNPRQIRDFARATGQLAKTDALDAKAIARFAEMVRPEPRAVPDEQARALGELVARRRQVIEMMTAERNRRRQLTSRRLIKSVDRLLAVLLKELAELDRDVGEGIRGTPAWRERDELLRSVPGIGDIVSRTLIADLPELGRLDRKQIAALVGVAPLNRDSGKMRGRRTTWGGRAKVRSALYMAALVASRHNPVLTAFYQRLVSAGKAKKVAITAVMRKLLTILNAIIRDRRPWQTA

SEQ ID NO: 395122 - protein, 394 aa, unidentified
MKLVGIDVGKNSHHFCVMDKETGEFNVTPTSFSNNKEGFDFLINSLKPYSKKSILLGMEDTGHYHVALLKFLLSNGYTVALINPKTTDLTRKMEGGITKNDKLDTITICDVLDTPERKKQYRITKVDRFDLYEQRQLTRHHHNLKEELNVYCNRLQKSIDLVFPEFNTLFSSKYSIVYMNLLKTFGSAEAIASTDIRTIRKCFEIKGRGNRISLTPEKLKECAKNSIGISSEVETIQIKHLVSQITLIKEQIAEIDKKIEEFSITNNSPILSIPGISHFSGTSILAELGDIGNYSKPSQIIKFAGVAPYHYESSQYNAQHTGITKKGSKYLRKTLYQIILTVINNNPVFKKYYLLKISQGKGHRCAQGHCIRKLLRIIYHLLETGQSFDPALLR

SEQ ID NO: 395123 - protein, 444 aa, unidentified
MRSREADHYCIVAVDAAKYVNTAIICTIYGDILKGPFEFDGSSTGFQVLKTEIDRTREAYQLTDVILGIETTAHYYEDLVRVCDEEGYLVRVVNAATTAEERRKLLNYSKTDRVDLNAIVQTLLQGHGETSRKKREDLEQLQTLTRARRRMVDEQTRCINRIRLYMDHIFREFQGKNVRRDGKNQLVKVFDEFTSKTSLFLMKHYPHPSDILALGQEGLRNLSKTHNLKLRQTAIERLLTYAEESISKPKEALTSELLLLRLKLDEYELIRRQIAELEEVIEHLLLLTDGGILLSIPGIGVTLAAELTAEMGDLEAFTSASQLIKMAGTNPVVKQSGGKAASHFAISKQVRAPFRSVVYQAGKCTALFNPEMNAHYQRLKERGKLTGQAFIAIGNRILRLAYAMRKQQTLYQSQQPDYVLQKVIAGKLRNQAKQALFYDRFVIQ

SEQ ID NO: 395124 - protein, 445 aa, unidentified
MGKGSSGMTRGDRRRNARRERLRGLLPRDGAVIGIDLADEKQAIAVVDHDVRVLARKTVRVKAFRLGEALDWAAGQARVKGFTAVTVACEPTGPRWLQVQRLCAERGLPMVCVQPLVSHIARQQQDFTSHKTDEADCVMIARLAAELHCYVPEELDEVWADLRHLGRRRVALITSGTASVQRVRDFLSVAWPVAAEACAQPFNSVTWLAAMQVVTSRCGGEPENLAALGLEAFTALVRSAVPGWGGQRVCGPVCRAVFTALTSTEGVVRAHRRGLLRRIAAELGDLQRARAQQRETEAAMVACLAGLGLARLGEIPGLTAAGAAAILAETGDPNRYDTSSSLVKHAGLSPSDNASGAFDGEAHISRRGRPGLRLTVWRAVWPMLIHNPVMAAKYAAMTQAADQAAAEAQAGGTGRAGHATSAAEAARRRRAKARVACAAALLRWI

SEQ ID NO: 395125 - protein, 398 aa, unidentified
MRIVGMDIHRSFAQVAILEDGLITRQLRVDLVHDRLVAFAKTLSREDEVVIEVTGNSAAVERLLRPHVKRVAVANPRLVRAIAYARIKTDKIDAETLAKLHAAGFLPEVWVADENTYGRRRQMAERAGVLAQIVRIKGRMKAILHANLIPPYKGHLFGKSGQRWLESLPLPPEEYALLQRLIAELERVTKQLLEIDKVVAQEALDDPRSLKLMTIPGVSSVVASTVLASIGDIARFPSPDKLSSYFGLTPRIRQSGERPARHGRISKQGNRDARKMLVEAAWSAKTAPGPLRAFFNRIQRKHGPGVAAVATARKLAVMIWHILTTGKDYAYARPAFTAMKLRKVALKAGAPRAYGRLARVGTTGSRNSASGKLATSHASSRPTSGWWRPGRRSQKKLS

SEQ ID NO: 395126 - protein, 490 aa, unidentified
MKGHSTTKSQRTKYRFRRGAKLPKHLECINQNAAGIDVGSREHYVCVPDDRDVQPVRTYGCYTPDLEAMAQWLGDCGIETVAMESTGVYWIPVYRVLEAHGFEVYLVNARHIKYVPGRKTDVLDCQWLHKLHTFGLLSGSFVPSHDVDALRTYWRQRKNLVQSASRQIQHMQKAMTQTNLHLHVVLSDIGGVTGMKIIRAIVNGERNPDKLAALRHPSVRKSAGEIANALTGHYRDEHIFALRQAVELYDVYQDKIADCDRQLQQRLSQLETKAGSCELKDAASKKNKRRRRKNEPYFDLRSEVHRITGVDLTQIPGIDAMTAFTVISECEIHAFPTAKQFASWLGLCPNNAITGGVVHRRSTKTVYNRIANALRVAAQSLHRSTSYLGAYYRRKRQRLGAPKAITATAHKLARLIYNMLTQGQDYVERSQEQEQREYQERRVHYFIKQLTGVGFEILNPETGEIITGPQHPENKESATPENKELTPCVS

SEQ ID NO: 395127 - protein, 428 aa, unidentified
MKSTDTDTLEYAALLGLDWGHQSHALALQLPGAPTETLTLEHSAENLHDWLDRLEQRCGGRPVAVAIEASKGAAVYALLERPWITVYPIHPTTSTRQRTAFRPSGAKDDVPDALVLLSLLQRHRHQLRPLQPDDPPTRTLARLVEARRKAVDRRTLLSNQLQSTLRDYFPQALELIGDNLAAPLALDFLEKWPRLTDAQAAKKTTLQNFYQRHNVRRPELIAARLQRLRAARLLTRDAAVVEVAVRIVRLLLDELRVLQEHIASFENAIAQAFAAHPEKNLFRELPGAGAALAPRLLAAFGTRRDRFDSAQAMQRYFGVAPVTEKSGARKWVHWRWGAPVFLRQTLVEWTGQTVVYCPWAKAYYQQQRAKGVGHWALLRALAFKWLRLLWRCWQRSEPYDQEKYLRQLEQRRSPIAALARQYAYQMAS

SEQ ID NO: 395128 - protein, 298 aa, unidentified
MKLIRVGVDLAKDVFQVHGVERNEKPVWRRRLTRDKWLRVLLDTVEPGCEIGMEACGGAHYWARKLQERGFTVKLIAPQFVKPYVQSNKNDANDAEAICEAMSRPKMRFVAVKTVEQQDVQAVHRIRSGLIEQRTAKGNQIRGLVSEYGLVAPRELVQLRRALPVWLEDAGNGLSERFRRLLSALWCDLQLLDERVSELDREIALIAHSDPSARRLQQLRGVGPIIATALVAAVGDGAQFANGRQMAAALGLTPKQHSSGGKDRQLGISKRGDTYLRTVLIHGARSLQCARPKARAIG

SEQ ID NO: 395129 - protein, 336 aa, unidentified
MNYCGIDLASKASAICLMDGTGAIVREEEIPTDADGFRICLGGEEAMKCVVEASPLAEWVVQVLERLGHEAVIIDARRAKAVVCTKKKTDRVNARDLANMARTGWYTAVHRKSGAARELRTWLAARAGLVETANALNARIRGLLRVHGIKLGKVAEREFEMKVQAVVEAREPALAGALTPLLNLWRQSIDAAEVLRKEIKVRIRQDSVCRRLMSVPGVGPLTAAAYLATIDDPERFQRSDQVGAYLGLVPSVYQSGDIDYRGRITKEGDGLLRWLLVEAAHSLLSHTRRDCALKRWGERLQAQKGIGKARVAVARKLAVILHRLWITGETFDWQRV

SEQ ID NO: 395130 - protein, 325 aa, unidentified
MLIIGCDYHPSMQQIAWVDTKTGECGGRRLMHQAEAEEFYRALKGKQVRIGMEATGHSRWFERLLAELSFEVWIGDPAQIRAKQVRKQKNDRRDADHILKLMLKDDFPRIWAPTPENRDLRQLILHRHRLVGMRTRVMNQLQAVAMNEGIRCKKGLWTAKGRKQLESLSLLPWTSRRRQELLELLDQFDPNVEKLSQAIEQEAEQIPEVKLLMTHPGGGAITALAFVLVIGTPERFGCGKQVASYLGLIPCEDSSSERWRLGHITKQGNALLRFLLGQAAQSVARCEEPWQQQYAHLKMRRNKSIAKVAMARKLAVRLFWMWRKE

SEQ ID NO: 395131 - protein, 343 aa, unidentified
MTKISTIGLDLAKNVFQVHGIDASGTVVVRRQLKRAAVERFFAGLPPCLVGMEACGSAHHWARAIRRYGHEVRLMPPAYVKPYVKRNKNDGRDAEGLSEAVNRPTMRFVPVKSVEQQATLAVHGTRALLVRQRTMAANALRAALSELGIVAAQGYEGLRELMTRLEEPSEEIPENMRCALLLLAKQWQALDVDERVLERQIGKAARGDRDARRLMEVPSVGPIIASTVLAKVPDAKVFRSGRDFAAWIGLTGKDHGTGGKHRPGRISKQGDRMLRALLISGASAHLRQQKRRGVTDPWLRDLLARRPYKVVMVAFAAKTARILWAMLSKGEAYRDRASAPAAA

SEQ ID NO: 395132 - protein, 451 aa, unidentified
MPQPILAVGVDPAKRLHRAVAVLFPDEVVLDVELPNAFDAVANLDDRLCELANQHGAGLVYGLEDHRRYGRLFCQVLTERGRDVRVVNPLWTNRQRAFYGQDKDDAIDGRSIAAVVLRRHHQLPLASDFGEVAQAIREAERSLQDLSEARTQLGNRLHLQLSDTYTGAYEKYFGKITSPLTLRFFRRFPLPQDLVGHEVEMLASLLLDLAGGKVGPHKGGNRLIAMRGKAQVILETSAAMRASPRTLALELKAELIRQLCDELLANHDRVTRLERMLREQLLPATKQTITTITGISTILAATIIGETGSITRFRSPAAFAVYNGTAPARNSTGGRDRHKARRDCNHRLKRAFYLAARAAVLHDPIAKAYHQSCKSRGLSYVEALKRVARRMSDVVYALLKSGKAYDRSTIEHAIERRREQAAHAARSHAKQSLVHSRPRKSNSPLSQQQVM

SEQ ID NO: 395133 - protein, 375 aa, unidentified
MSTIRFVGLDVHADTITVAVAEVNGEVRSIGTVPNRLESVRKLVVKLGPAKQLRACYEAGPTGYVLYWQLTALGVDCQVIAPALVPTKAGDRVKTDRRDAEKLARCHRAGDLTAVWVPDEAHEALRDLVRAREAAKKDQLRARHRLAKFLLRHGRRPATKMTAWTAKHMQWIASQVHFDQPALEATLLDYVHEVEHAAARIERLEKSMDQAIVAAPDEMRTVIEALQALRGVAKLTAVTIVSEVGVLSRFANPRQLMGYSGLVPSEFSSGKSIQRGRITKTGNAHLRRVLIESAWCYQYRPWMSAYLRKRQQHLPDDIQEIAWKAQHRLHARYKTLAAAGKNKGQIITAIGRELLGFIWAIGVKTEVRRQPQVAA

SEQ ID NO: 395134 - protein, 380 aa, unidentified
MPATTRSVECTATAALYLAHELGSTKWLLAFTTAPAQRPRLRQIGARDLAALAHEIAVAKVRFGLPADAPVVSCYEAGRDGFWLHRWLEAHGIRSVVVDSSSIEVTRKARRAKTDRLDAQKLVYLLLRWAAGETKVWSVVHAPTPTEEAARQLTREIAAVQCDRTRLRNRMFGLLATQGVALPLDAHLDEALAIGRTADGQPFPAGLRARLRRDFAQLQYVEGRLATLTEARDAEIAEAQTRVAMVARRLMELKGIAATSSAVFSAELLGTRTFHNGRQLGALTGLVPVPYRSDQRVQDQGISKSGRGELRAMAIQIAWGWVRWQPASTLTQWFTRRFATAGVRARRIGIVAVARKLLIALWHFVEHGVVPPGAVLKAAG

SEQ ID NO: 395135 - protein, 430 aa, unidentified
MKSNTQNAKIEAITEKTLVLGIDVGSETHYARAFDYRGIEYSKKPFRFSNTETGFVTFKEWILDLKERHGKDKVVPGMEPTGHYWFNLGKFLQDNEMKPVLVNPHHVKKSKELDDNNPTKNDRKDPKVIAGLVREGRYMIPYLPDGVYADLRTASNIRFQLQAELTRIQNRISRWFNIYFPEYKTVYGKPDAKSGMLILKEAPLPEDILTLGVDGVNQIWRDAKMRAVGKVRAKTLVEAAEHSVGSKEGAVSARMEIRMLLEDYESRNIRLREVMALIEELVNQIPMAEKLLEIKGVGIRTVSGFLAEVGDVSRFNNPKELQKLAGLALVENSSGKHKGETTISRRGRKRLRYLLFEVAMSLVAKNPEFRELHNYYTTRKLNPLKKMQSLMAIAAKLIRVFYAMLTKGVDYDPKKMVSDIKRPAVYLQAA

SEQ ID NO: 395136 - protein, 387 aa, unidentified
MQTAHNQDSTLVGSTLAVSLELAGKTWKLGLQSDSRERPAMHNVSEEHPSARFGHLCDHIEATKHKWRLAEPVRVAVMYEAGQDGFWIYRALTEAGYEAYVVDPASIPVERQARRAKTDRLDVLRLLSCLRGWLRGECDRMHPVRVPTPEAEALRHQARERGQLQKEIGQHRDRIRKLLRTVGCWTDVDSAFAKRLGQGELRGHNNIPLSDELRQRLQRECDRMELAQRQFKELEASLPAQLPEQVRDGMKRLQQLRGVGDVGACRLMLELFWRRFDNRRQVGSCVGLVPQSYDSGQSRIDQGISKQGNRRVRALLIEMSWMWLRHQPNSDLTRWYAQHAGSSKRSRRIAIVAVARRLVIALWRYLADGVLPKGGELKPALLRKRLA

SEQ ID NO: 395137 - protein, 371 aa, unidentified
MGKNYSTKYVGLDVHKKSITIAVAESGRKGEVRLYGTIENTTNSLDKVIQKLISSGAELKFVYEAGPCGFGLYRYLTGNGFKCIIAAPSMIPRRGGVRIKNDSRDAITLSRLLRADELSAIYVPTPGDEAIRDLTRAREDIRVSERKAKQRLNSFLLRNDFVYSGKKRWTKAHFGWLAGLKMRHPAQQITFQEYIEAILECSERIARLTEQIGKIAEEWRWAPTVKALQALRGVSLIAAVTTIAEIGDFSRFSHPKELMAFLGLVPSEHSSGDSIRRGRITKTGNAHARRICVESAWTYRYPARITRHLLKRQEGLPSKIRRIAWKAQVRLCSRYNRLRARRKPLQVVVVAIARELVAFMWAIAQQVEAKA

SEQ ID NO: 395138 - protein, 357 aa, unidentified
MKGAYEIIAGVDCHKATHAIAFLDSVGKVVHDLEIPANPAGYADAIAAARMLGEVVWGLEGTGVYGRCFAKALLAADMTVFEVPGIVTKRHRKHATQHGKSDRKDARAIAEAVLRDSERLPRFRECEEQEALRLRYDQRDRLVRERTMLINRIRSNALRLSIDAPKDLQTLISLRAIRTALDAIVNPSFVEDALVDEMRFSLATIERPNEQILRLERLMSPFVKRLAPELLELRGVSVIVAAGLIGHCGDMRNLRNADAFAMRSATAPISWSSGKSQAVRLNVGGNRQLNRLLHVIATVQLRAAAHPGRIYYDRKRSEGKTGRTALRALKRTLATIVYYRLRLCQTRIENTNVAIAA

SEQ ID NO: 395139 - protein, 341 aa, unidentified
MSNANSYIGVDLHKKMCFVTVMDKEGKIKKQTEISTDADKVAKFFSKHTDASVAVESTMNWIPFYENLEGLGCKVVLSNPLATKAIAAARIKNDKVDSKILADLLRTNLLPLSYVQPREIRDLKELVRQRMSYVEIRTRIKNKIHSVLFKNNLKHDFTCLYGKAGMIWLKQLELRDIYRQEMDRYLTTLDLLDKQIEELSATIMETAKTDYDCQLLMTIPGISYFTALVIKSEIGNIERFPSAKKLCSYAGLIPSTYASADKVRHGRITKRGSKWLRKALVDAITSGSRHPSKLSCLYRKLKKNKGTGKAKVATARKLCAIVFAILTDKQPFREFVSVKQR

SEQ ID NO: 395140 - protein, 339 aa, unidentified
MKVTTFGLDLAKRFFQLHWVDMETGEICRRQLKRNDVVEFFANRAPSVIAMEACGSAHYWARKLTALGHQVKLIAAQFVRPFVKSNKTDAADAQAIWEAAQRPGMKFVAVKSEGQQSVLTLHRMRELLVKMRTMQTNQLRGLLYEFGADLPAGRQRGMARIPDELAKLEQTLPAMVIESMRSLLKRVEGLDKDIAEIEKKLSLWKKEDAASKKLMEIPGVGLLTATAAVATIGNAQAFKSGREFAAFLGLVPRQSGTGGRVKLLGISKRGDVYLRTLLIHGARAVITHQKEREPWLEKLLARRPFNAATVALANKMARMIWALLAHDRMYEKGYVAKAA

SEQ ID NO: 395141 - protein, 387 aa, unidentified
MNEVFDPRKPATAFDHTTTLVTVLELSGKSWELGASVPGVSRRPLRRISVGDVAAILKAIEQWKAEADKAGCQVSRVVVGYEAGRDGFWIARSLREHGIEVYVMHAASIAVERRGRRAKTDRIDTDMLLGTLLGWLRGEPRRCTMAPIPTAADEDMREPGREREALTAARLKIENQIGSLLTRYGIIGFKPRLKKAAQHLEQLRTPDGKALLAKTMDRLRRLMTQHRLLTEQLKDIETARQQVVAVVDPDRIERMIQLLVHIVGLGVETATTLVHEVFSRKFRDRRAIAAFVGLTGTPFNSGGSTREQGISKNGNPHVRRIVTQLMWRWIKFQPESDLTKWFLERTSGAKGRIKKIMAVALARKLLVALWRYVETGVIPDGARLAAA

SEQ ID NO: 395142 - protein, 341 aa, unidentified
MNTATLVGIDLGKHSFHLHGQDKSGREVFRKKTTRLQMMRFLGNLPSCMVVMEACAGSHFIARQLKSFGHEVKLISPQFVRPFVKGNKNDFIDAEAICEAASRPTMRFVTPKTEAQQTLSVLHRMRDSLVRDRTKTANQTHGFLLEFGISLPKGLSLVRRLPVTLDEHPLPPRLVSLLSRLHQHFCYLDEQIKELDREMTEQLAEDDLGSRLLTIPCVGPITASLLSAEMGDGKQFGCSRDFAAAVGLVPRQYSTGGRANLLGISKRGDKNLRRLLVQCARVYLQHLEFQKGALADWVRSLRERRHSNVVVCALANKLARIAWAMTANHSEFEAGPSAYAA

SEQ ID NO: 395143 - protein, 365 aa, unidentified
MKTNKIVHTSEVRAEQVTNQLLEAIYLGVDLHKCTISVTRILDHGTPQAAQKFSWEAFWRFVEKQLPLAKKVYVVYEAGAFGFWPARRLQKLGVIVYVVHPEKLDPHHKRVQTDRLDSRHLADKLQRYVRGNRKAMVVVYIPTETEERARLEARHRKSLAQERKRLICRGQGLLLSQGIFTTKGWWRQEPWAALQAQLYPALAQVLGDDRDLILELNQRLRQVNQVLVQTAPAKLPVGFGKLTWVLLLRELCTYRRFKHRRGVGGFTGLCGGVSASGNYHADLSINKAGSPYLRTLLIELAWRVVYWQPDYKPLQRWKNTFGPEGKARQRKTAIVALAHQLMVDLWRWQTGRTTPEALGLKLAEA

SEQ ID NO: 395144 - protein, 329 aa, unidentified
MSQNTINYMKSNTATVYVGVDVAKATLQVHVQGRQTELKNAPAARTKLCQKLQTLTGAHVVCEATGGYERDLVEALHKANIPVSVVNPAQVRAAAQAQGQRAKTDRIDALMLTNYGQRYEPQPTPPTSRVQRQLVDLTQWLKQLIEAQATAKTQAEHHHDLFVRKQHQALMDCYQAQIQAVEDKLQALLKKDQALQQRVETLDAIEGVGSRTALLMLAHMPELGQMNRQQAAALAGLAPWTRESGTMKGVRCIGGGRPEVRLALYMSALSAARFNPVLRAFYQRLIAKGKLPKVALTAVMRKLLIYMNHKLKSLAAQPLSPVSAAQAQC

SEQ ID NO: 395145 - protein, 328 aa, unidentified
MSKSVVYAGVDVGKQELWVVLQGRKPRSFVHSKAGVKSMVRWCRKVVGEATLHVCMESTGVYSHAAAVQLIDCTDTVVSIVNPAQIAAFAKAQLRRSKTDGVDAAVILQFAQTQAPPLWEPEPKAVQQLYGLVNQADAIRRSLRQWSNRRHAQSYLADLPTAVKQSQRAIERALERQLDKLEAAIEELVTKDAMLKQQVELLCTIPGIARLSAVRMLAYGKGHLTQRSRKALTAHAGLAPQHRQSGSSIRGKSRIAKAGDRRLRTALYMPALVAIVHNLVLKQFYQHLLEMGKPKMVALVACMRKLLLIVRAMLINKKPFDPEIYHLT

SEQ ID NO: 395146 - protein, 385 aa, unidentified
MNQISCSATSSHTLHCALELSKKSWLLAIQFPDREQPSVYSIKGGDTEKLMAKLTAARDYWAKVSGSLPVITVCYEVGYDAFCLARFLKARGIECLVIDPGSLQVNRRGRRVKTDRVDVKMLLRTLIAWCRGERHVWSLVRIPSVDEEDLRRSHRERSRLVRERTAHINRIKGLLFAQGIRDVKVKSQYKTLAVDKLLTADGHRLPPRLASEIARELQRLAMVQEQIAEIERERDTAPTPCEATEGKRQLLLQLKSIGPAISALLSREVYYRQFANRRQVGSFLGLTPSPYSSGEEERCQGISRAGSGQVRAIMIETAWLWIRHQPKSALTRWFVERTAGQSTRMRKIMIVAVARKLSIALWRYVEQGLVPQGAILNPPTTGRAR

SEQ ID NO: 395147 - protein, 391 aa, unidentified
MIYIGIDVAKDKHDCFITNSEGEVLFNAFTIPNNADGFHDLFQKISSLTNDFSNVKVGLEATGHYNYNLLGFLIDKGLPTFVINPLHTNLFRKSLSLRQTKTDKVDAHTIALMMMSGVNLQSYSDTSYHNEELKSLTRYRFDKVQERAKLKTSISRLVNILFPELEKLVPSLHMVSIYALLAEFPSSAQIASCHLTRLTNLLANASKGHYNKEKAIEIRNAAKHSIGSNMPAKSLELKHTIRLIQELTSEIDEIECFIKSIMDEIRSPILSIPGINYRMGAMIIAEIGDFNRFSSPDKILAYAGLSPSTYQSGQLDGCYSHMEKRGSRYLRYALFNATKFVCIWDNQFSAYLAKKRSEGKHYNVAISHAAKKLVRIIYQLEKSGQLYHRAA

SEQ ID NO: 395148 - protein, 305 aa, unidentified
MGHHTEAFVGIDTSKLRNAVAIADSGRGGEVRYLGEFPATEAAIQKLVAKLAAKYGHLTFCYEAGPTGYGLYRLLKSLGHESLVVAPSLVPKKAGDRVKTNRRDAVSLAKLLRAGELTAVWVPDERHEAMRDLSRARQAVKKDLQSKRQQISSLMLRLGRIYPGKTTWGPAHMKWLMAQKIEHREQRIALEELLEGIRQESERVERLENAIREVVPEWSLAEVVAALQAVRGIDLIAAVGVLAEIGDLSRFQNPRELMGYLGLVPSESSTGDKVKRGGITKAGNGRARRILVEAAWSYRYPPRVS

SEQ ID NO: 395149 - protein, 346 aa, unidentified
MMIIGCDYHPSWQQICWLDTATWETGEKKLEHASGEAERFYRQLPAPALIGMESTGNCQWFIEMAAKLEHNLWIGDAAKIRACEVRAQKHDRRDAALILKLLREGRFPRIWIPSGEEKDLRQLLIHRYKLVRIRAQVKTELQHLAMNQGVTKKRKLWSKAGEQVLRELPLKPWASRRREDLFRVREMLNGQIDLLDQAVVEVAEKNEKARLLMTQPGVGPITSMAFVVTMGDVNRFQRGKQVASYLGLIPREYSSGGHQRFGSISKQGNWFLRMLLVEAAQGAVRYDPGFRNEYLHRCHTKAKGVAKVAAARKLAVRLYWMLRTNTGYPEIVRAESSSRVPLVSAS

SEQ ID NO: 395150 - protein, 321 aa, unidentified
MDKYNEIYGVDISKDVFDVQNSQGDYFQLTNDEKGFKNFVKKLSNESLIVMEATGYYHYCLAQYLYEQGYSVSVVNPLSVKRFIQMKLSKIKTDKSDAKAICDYAIFNEVHLYTAKDKSQAECLQLIRLIDIYIKQSTALKNKLHGEKTLGIPSKVVYRSLNRSLKAVEKEIKLLEERLIELVKEHQQSQLTLLKSIPGMGVKTALMLIVMTDGFNRFENANQLCSYTGITPTIRQSGSSVRGRSRISKMGNKKLRNLLFLCSFSACKYNKACREIYERIVAKGKSKKLALIAVCNKLLKQAFAIVKSGLPYDEKYVSKLA

SEQ ID NO: 395151 - protein, 424 aa, unidentified
MNCNQNFKISQVTEGTLVLGIDVGSNTHYARAFDWRGLELSKVFKFKNSFEGFQSFVLWVNDLCCKYNKSKVIAGLEPTGHYWFSLGELLKENNITIAIVNPYHVKQSKELDDNLQTKNDSKDLKVIAKLVIDGRYSFPYIPEGIYGELRVADKLKNDITQQIISIKNKIHRWLSIYFSEYEKIYSSIDSKSGFLLLKETPLPKDIVELGSEGIVERWKQTKLRAVGLDKAKKLEEAAKKSIGCKNITSSARFEIKLLIEDYEYKQNQLNSIAEELNKLCEKIPMIKEIAEIKGIGIATAISFVAEVGDIRRFKSAKQVQKYAGLALKENSSGKHKGLTRISKRGRKKLRTILFRATIPLIGFNKEFSSIYNYYIERKDNPLKKKQALTAICCKMIRIFFTILSKGIKYDETKMLHDIKRPVAA

SEQ ID NO: 395152 - protein, 342 aa, unidentified
MELHTIGIDLGKTVFHLVGLNLRGEVVVRKKLSRKQLLHFTANLRAERIGMEAYGGSHFLGRALREQGHELRLIPAQYVKPYVKTNKSDYIDAESIAEAVGRPTMRFVPIKSDDQLDMQSLHRVRERWIMHRTAVVNQIRGLLLERGITVRKGRCHLDAALPGLLEDASMKLSGAVRLLLAQLKQELDQLTIRPEEADALVQKTAQESEVCRRLDAIPGIGPLTATALIAAIGNGAAFRKGREFAAWVGLVPREHSTGGKQKLLGISKRGNSYLRRLFLQGARAVLQFREKQSSSLSAWLAQLTSRTHYNVAGVALANKLARMAWAVLTTGEAYQPPVLAFR

SEQ ID NO: 395153 - protein, 482 aa, unidentified
MQEKRHIGLDLGVKSRSKVYITDEAGERVRSEFYIWNTPEGLDYMMMKTLEVASKEASLDLTVEPTNSAWFGVTIYLQRKYPKVKIYRVKAEKVQDLRKFYRKHTKTDSLDARTLAKMLVVDSDSLQEVYIRPRNILALNTRCKQRTRLVKDATRKKNSISDQIELGFPHLVDCFSSKFTTPFILFCERYANPFKVRRLGKERLARVLIKLGFRTNISTLTENIYQRALDACTLLGDEDAAVDYKDLQDRISSELRVFKTLEKEIDKVDDKIKELYQTCFPKKRLNSVPGIADIIGPSIASFIGDAERFSSGRSLVGYFGFYPKQEASGLSSKKGLKMTKAGPNIAKGDLYLAANTARLIDPDLGKIYYEQMVVHGNHHTKAVCRVARALIPRILRVMKEDRDYVICDLEGNPISREEGRKMVKEQFLVAQEVRQRLSNRKRVSPNKRGRTKPQYARGSKAPQLRADSSRRVARSLSYAHLS

SEQ ID NO: 395154 - protein, 420 aa, unidentified
MYKQNELRSTSEIYIAIDWAEEKHAVAINVDGVIRNFEVNNDCKAIKIFFLTLKENVQCERVTVVIENNSNMIMTILDGLDYVELYVVHPTTAAAYREAFIPSGAKADPSDAASLLDLLLKHPEHVKKYQSPEKTDLLGIYTEKRRDAVARRTALGNKLIAVLKKSSPVSLKIFNQSSVHAPIVLGFLEKWPTMSDLKTSTENRIKRYLNSKSSKPSKTPTRIDLIRQSEVFLDKELEELYKLETVTLVQEIRTLNDVIKQYEAKIKIIYIQNEDYEIFSTLPGSGDAMGPRLLAFFGNDRNKFKTVEEALLISEIAPVTVQSGKQRSIRRRYLCNKFIQQTFVEYADGSLKKSRWAKAYYDQQTSKGKTHFTALRSLAYKWIRVIYACWKKCKRYDESKYIQQLIRKRSPLVNNLGIAS

SEQ ID NO: 395155 - protein, 382 aa, unidentified
MNRILKIGMDVHSTNYTLCAMEPVLDGEDRIFANIQVTPDYKNVIQFIDKLEEKLGSSDTYSIECGYEAGCLGYSLYHQLTKVGVKCTILAPTTMLTQQGKRVKTDKRDALMIAQCLSYGGYRAVHVPADKDVSVKEYIRMRDDHKVALKKIKQQINAFCLRHGYFYAGNKWTIKHLNWLKKLVLSDLYRETLNEYLTSYKEQTEKIERFDKRIEELAEDSDYQENVKKLGCLLGIKTHTALSLIVETGDFKRFRKGNTYAAFLGLAPGESSSGEKISRTGITKAGNSHLRMLLIEAARGMCRGQIGYKSKVLRSRQDGNPTEVIAYADRANTRMRSKYYRMIRHGKKDNVAVAAVARELACFIWGLMTNNITPKEEGTKAA

SEQ ID NO: 395156 - protein, 349 aa, unidentified
MNATIVAVDLAKSIFEIAAADADWRIAQRSRLPRSKFFGFFMRLQPCQVVMEACGSAHYWARRISELGHTVRLLPAHYVKAYVRRNKTDRADAAALLEAARCAEIREVPVKTVDAQQIQSLHRLRSQWMSTRQRYVNTLRGILREFGFAIPLGVNVAKDRIGTALADPESEVPPALRATLAEMLQEIRLLEQKILGIEHQLNALTRHDVRVQQLRQIPGIGALTSTALRAIVGDIQRFPSGRHFASWLGLTPNERSSAEKRRLGKISKQGDVYLRTLIVHGARSALLGAHRAERSGHPLDHLRRWALDCERQRGHNKATVALANRLARIVWATWTHERPFDGNWSTQAA

SEQ ID NO: 395157 - protein, 329 aa, unidentified
MERITHHVGLDYHQASVQVCALEESGRVVANRKTANETRAIAGVLPAGRVRAAIEACAGAAELAEELGRAGWEVMLAHPGYVRRMRQNPDKTDFSDARLLAELVRVGYLPRVWLAPRAVRELRLLVRHRQQLARERRAVKLRIRALLREQRVVPPAGVGRWSRAWAGWLREAPLSEQGRWVAQEHLAQLAWLKERLRAVEGRLAGLTKDDPVVARLRGLRGVGPITAWWLRAEVGDFKRFRTGKQLARFCGLSPRNASSGERVADAGLVRAGNPELRACLIQAAHSLIQHAPRWRRLAARMCARGKPRSLVTAAVANRWVRWLHHRMAA

SEQ ID NO: 395158 - protein, 418 aa, unidentified
MIRIKAKKLRIVNGKKFIVSIDIGKNIHYGYIRDLDNNEVKPFPFHNTLKSFQEFWGKISYFQKEHGLEEAVIGYESSGPYAEPLCEFLRKKPVKLVQVNPMHTKRVKELEGNSPNKTDRKDPRVIADIIQLGHALTVIVPEGPAAELRRLTHTREREIKVRTADKNRLQKLIYVIFPEFLRILKISLKSAMFLMKHYPAPEDIVEIGCESLCKILKKVSRGKIGYQQAEELFEAARTSVGITHGKKSILIEIRHIVAKIENEEVFIKRLETMMEEYLSQIPSSKSIRSIPGIGVITTAGMIGEVGDFRKFKTISEIMKLAGFNLFEVSSGLHTGQRHISKRGRPVMRKLLYYAAVNAVKSYGIMHDNYHLMLDKGKPKTKALIAIARKLLKLIFALARDNSMYVEQYNSSRKRIVAA

SEQ ID NO: 395159 - protein, 337 aa, unidentified
MDTSKHFFQLHGVNAAEKVVLRKKLRRKEMVAFFEKLAPTVIGIEACGASHHWARLLRSFGHEVKLIAAQLVKPYVKRGKNDTADAEALCEAMSRPTMRFVPMKTAEQQAALMLVGLRDRLIRNRTQLSNAIRGYAAEFGFAAAKGMAHLDPLFDRIQADESLPDLAREMFAAQAEEYAQLQAQIASIDAKLMAWHKADECGRRLAKVPGIGPIGATLLMMKTPAPETFRSGRQFAAWIGLTPKDHSTAGKVRLGVITRAGDDALRSVLVVGATAVIQHVRRGGRGSPWIVDLLKRKPPKLAAVALANKMARVAWKLMVTGESYTAKFAPAAVASAA

SEQ ID NO: 395160 - protein, 316 aa, unidentified
MIAQGVFVGIDVSKERLDVALFSEGQSWSVGNDDRGIAQLVSQLREVRPELVVMEATGGLEIAVAAELGVAGMPVAIVNPRHVRDFAKALGILAKTDRLDAHVLAKFAQAVRPEPRALADVQTRQLEALVTRRRQVVEMITAERNRLHKALPAVQPRIKQHIAWLEQELKALDGDLHDSIRNSPLWRAKEELLRSVPGVGPVLTCTLLAELPELGRLNRKQIAALVGVAPLNRDSGKLHGRRTTWGGRASVRVALYMATLAATQHNPVIKAFYERLIAAGKLRKVALVACMHKLLIILNSMLQHQTSWHPACSLAQ

SEQ ID NO: 395161 - protein, 326 aa, unidentified
MTESMVGIDVAKATFDVAAPLEPKGKYRTKAKLPNTPAGFTLLSDWLDRHVPGAAVCMEATGVYHEALATFLVERGVTVYVANPAQVAAYAKSELSRTKTDHADAKLIARFAMAQLQVGTTLRPWVPPTPAQRKLRALIHRLNDLEGMRQMERNRLDVSDQAVRGSIADVMETLDAQIAELKKEIDNHIDSDPDLRRDAGLLTSIPGIGELTAAFMLGCAGDLRRFDDPRKLDAFAGMNPAIRESGKWVGQSRLSKLGHALLRAKLYMPAMTAIRHNVAVRALFDRLVARGKPRKLALGAAMRKLLHLAWGVIRSGKNFDPSIALA

SEQ ID NO: 395162 - protein, 322 aa, unidentified
MNTIGIDVSKEKLDCAWLKEQDKVKTKVFANKHSGWQELLDWSNTGLAMAEHHFVMEATGIYHEQLATFLYDAGAKVSVVNPAQVKFYAQGLGVRSKNDKKDSGVLARYGSKENPTLWQPEAPEIRTLKALLARFDGIEKDLQREKNRQEKAVISLAPAEVLNSLTDMIGLLETEQQRLDKLIEEHINKHDKLRENKTLLESIPAVGKVIATRMLMVIGSRQFDDAHQCAAYLGLVPVQHESGSSVKGHARLSKAGNPIIRAKLYMAAVVAIRYNPDIKAQYQRLTSKGKSKMSALGAAMRKLVHICFGILKHQQPYQPQSA

SEQ ID NO: 395163 - protein, 360 aa, unidentified
MHATTVAVDLAKSVFQIVVADDQWRIIDTQRLTRSQFERWFVNRSVGLVVMEACGSAHHWARWLGDLGIEVSLLPAQYVRAYVRRNKTDATDAAALLEAARASDIRPVRVKSVEQQALQGLHRIRSLWMGTRTSRINALRGFCREFGITIAQGARTGVETISRVLADPRSAVPELIRHTASMLLEEIRLLETRIAQVERELASGARDSPACTLLLSVPGIGLLTATALVAAPSGDVTHFQDARHFSSWFGLTPREYSSGSSRYLGRISKKGDRYLRMLLTHGARSVLRAAKVAQGAGKELQGVRRWALDVQARSNHNKATCALANKLARICYATLRDHKPFDEAARLNRKERRQSFAMPY

SEQ ID NO: 395164 - protein, 452 aa, unidentified
MPAGKDKTMHYKKVLAMIADIPYLSVGLDVGADFSWMSIMLPNGTLTGKPFKILHSDPSSRELAVTKIKEAQEMYSLESRCFLESTGIYHIPLLCFLRDKGFDCSVINPIITKNSTNLNIRKLHNDKFDSKKAAKIGLDASLKISIVPDDDIIDLRNLVRDYYYFKDLQSAIVLKLNAELKVSFPASLQVFSKITTQTSLKLLEAYPLASDMLNAPKDEVIETIRTTARFGTKYAFTKYESLCAAAKDAAVFGRALPSNAIRIRLYINSYQEYQKYLDSILEELHKAVDKLQGKPAYDRICILQSLRGVGFLSAVVLIAEMGSFDLFSSPKKLYAYFGLDPAVKQSGKFNGDNVHMSKRGSSLARRILHMVALNNLKVDKGTKLPVNPVIYDYYVRKCSSKKKKVAVGAVMHKICNIIFAMLRDNKPFEIITPEEHCDRYAVEHPEIINKAA

SEQ ID NO: 395165 - protein, 343 aa, unidentified
MEQYAGIDVSLESASICVVDAGGRIVREAKVASEPEALIGWFGRLEVTLARIGLEAGPLSQWLHAGMREAGLPVEPLETRHVRDAFKAMPVKTDRTDARGIAQLMRLGWFRPVHCKSLPAQEVRAILTARKLVQSKRHDLEMSLRGILRGFGLKVGQTTPRSFELRVRELINGHATLLVVADALLSARGVLADQQGKLQKRLVSLAQQDTRARLLMSTPGVGVLVALTYAAAIDDPARFRSSKAAGAHFGLTPKKHQSGETDVTGRISKIGDAGVRTALYEAANVILTRPVKGSSLKSWAMRVAKRAGMRKAKVALARKLAVVLHRMLVDGTEFVAGKAAAKA

SEQ ID NO: 395166 - protein, 342 aa, unidentified
MEEVVTIGLDIAKSVFQVHGVNRAGDAVLRRKLKRARMLPFFAKLPRCLIGIEACNNSHYWARELTALGHDVKLMPAQYVKPYVKRGKNDAADAEAICEAVTRPTMRFVAVKSPEQQSLMMLHRVRLMLNRQRTQISNAIRAHMSEFGVVAPVGRLGVERLLKIVEDEDDDRIPEDARLCLKMLMAQLVIVKQQILENDRRVLASARRTELGHRLMEIPGVGPLLASAFIASVADPTVFKTGRDLAAWIGLVPKQNSSGGKERLGSITRAGNRYLRQMLVVGAMAVIRYAQRHGTTRPWLVELLARRPAKVAAVALANKNARIVWALMTSGERYREPQLIAA

SEQ ID NO: 395167 - protein, 377 aa, unidentified
MKRIKFVGLDVHAETIAVAVAEQDGDVRSLGVIPNREESIRKLVKKLGPVEQLRFCYEAGPTGYVVYWQLTALGAKCEVVAPTLMPVKSGERVKTDRRDALKLARNYRAGELTPVWVPDAAHEALRDLVRAREAAKKDQLRAKHRLGKFLLRHGRRPPTGVKPWTLNYLSWVKHEVHFEQMAQEATLLDYLNEVEHAELRIARLNLAIEEAVKLTPPKMRAVIQALQALRGIAQVAAVSIVAEVGEVSRFTRARQLMGYGGITASEHSSGEGSWRGGITKTGNAHLRRVVVEAAWAYRHRPSLGVALRKRQEVVSEEISEIAWKAQHRLHTRYRKLTARGKDKGKVVTAIGRELLGFIWAIGVKVEATQKLTDRQAA

SEQ ID NO: 395168 - protein, 357 aa, unidentified
MAEGSWVGLDVHARTTLAGVLDAASGELSLQRVQPRSEETIAWLLSLAQPVRVAYEAGPTGYGLARACARAGIACTVAAPSKIPRAPGDRVKTDRRDAERLARLLRLGELVAVRVPDPVGEAARDLVRAREDARGDLMRARHRLSKLLLRHGLVYEGSAWTRAHDTWLRRQRFAGRVLALACDESYGAVAQAKGRRDALDQAIVELAGEPPFCEVVGRLCCLRGVSTLTALALSVELGEWERFRPESLGPFLGLVPSEDSSGERRRQGAITKTGNTHARRLLVEAAWHQRRPLRTSAALERRRQGQPAPVRARADESARRLHQRWHALEGRGKRRTIVAVAVARELAGHCWALATMK

SEQ ID NO: 395169 - protein, 470 aa, unidentified
MKNKPSPDRAHKRLTKHLEQINLYAAGIDIGSESHYVAVPEGLDDDPVRSFLCFTGDLERLADWLVQIGIQTVAMESTGIYWIPLFEILEERGLEVLLVNARHVKNVSGRKTDVLDCQWLQQLHTYGLLEGAFRPPEQVTALRAYMRQRGTLVRYAGSHIQHMQKALRQMNLLLDNVVSDITGKTGMTIIRAILKGERDPGKLAAYRDGRCKKSKQEIAHSLQGHYRDEHLFALRQSVELYDTYSAQITNCDEAIEQQLKRFDAQGDPEQLRVSKKQKAANAPTFDVRGELYRMSGVDLTAIDGISDITALKVLSETGTDMSRWKSEKHFSSWLGLSPGNRVSGGKILSSKTKPTTNRAAAALRMAAFTLSNSKSALGAYYRRMRSRHGAPKAITSTAHKLARLIYSMLKHGTEYVDQGQDYYEQQYQDRVMKNLKRRAAQLGFALAPITSDNLWAQKSVGFRSRKPSLA

SEQ ID NO: 395170 - protein, 531 aa, unidentified
MTAESCDKTGVARNSAAGGREFADAVLGVAVGDVGESLRSDQTPVLDHARGSSRWQGSPLIAAGAVELHGRPRALAVGWGHERLVGCRALSPAIRQTRTPRRLRTSNNVSSPSRRDRIVSVSCGIDWAEDHHDVGLVDADGRIVGKHRISDDVAGFALLLQLLTEAGDSAEDPIPVAIETSRGLLVACLRATGRPVYSINPKAVDRYRDRHSVARKKSDAGDALVLAHILRTDRAAHRPLPADSELAQAIAVLARAQQDAVWERTCAHNKLRSLLREYYPAILAAFADKRGGILRPEARAVLAAASTPAAAAKLTTAQLRKLLTAAGRQRGIAPEAQRLQTVLRGEYLRHPPLVEDALGAQALALLRQLNTACTNADELAAEAVAHFDKHPDAEIITSLPGLGSLTGARVLAEIGDDRSRFADARSLKAYAGAAPVTRASGKSRTVMHRRVKNQRLAGVGYVWAFAALTASPGARAHYDRRRTTGDRHTAAQRNLFNRLLGCLHHCLNAHQIYDENTAFPPTTITTREVAA

SEQ ID NO: 395171 - protein, 348 aa, unidentified
MEVTTLGIDLAKNVFCLHGCDARGKPVLRKQLGRRQLLSFMANLPRCLVAMEACASAHYWAREIEKLGHQVRLIGPRFVKPYVKANKNDASDAEAICEAASRPTMRFVAVKSAAQQDVLAVHRVRQQLVKNRTALVNQVRGLLAEYGIVVAQGVSRLRRALPAILEDRENGLSGVMRELLGEIGERLRFIDDRLRQYELTIQRLFHQDERCQRAATVEGVGPLTATALVAAVGNATDFKSGRELAAYLGLVPRHRASGGRTVLLGISKRGDRYLRTLLIHGARAALRTAERRPGARSRWAAGLKLRRGTNVAAVALANKNARVLWALLSRAQSYRPALGSARAPQTGG

SEQ ID NO: 395172 - protein, 379 aa, unidentified
MKNSRYLGLDIDSEKIAVAVAEPGGEVRSLGTIPNREDSVRRLVKKLGPASRLRACYEAGPHGYSLYWQLSKLGVRCDVVAPTLVPVKSGDRVKTNRRDAEKLARCYRSGDLTAVWVPDAAHEALRDLVRARETAKKDQLRARHRLGKFLLRRGLRAAAGVKSWTTKHLLWVKTLRFEHVAQEVTFLDYLHEVEHAAERVTRLDQAIDQAIESAPTEMRALIAGLQALRGIKKVSAATIVAEAGPLSRFARPKQLMGYSGMVSSENSTGSSVRRGAITKTGNAHLRRIVGEAAWAYQYRPAMSPVLKKRQEGLSEEVKEIAWKAQHRLCSRYRRLMAKGKLRQKVVTAVGRELLGFIWAIGIQVENEQRDRTKEHRRVA

SEQ ID NO: 395173 - protein, 346 aa, unidentified
MAYYVGLDVSVKETSICIMDDKGVVAARTDVSTDPDLIAQFISKHASEVERVVHESGILAIWLTRELEKRGVPIICIDARLAYKALSGRINKSDHGDAEGLAQLARTGWFTQVHIRSEASERMRVLIGARERLIRMRKDLEGHVRGVLKVFGICMTSVATGKLRKGFRDQLAAAADTDPAIEMMSETFIPLHKILCIARDALDNEVRSIARESDLARRLMTVPGVGPIVALAYIATLDDEKRIRRSIDVGAFLGLTPKRHQSGEMDWSGKISKCGDGDMRRLLYSAASTLISCTRKPSRLKEWATKLAERKGHKKAAVAASRKIAVILHCLWRNETMFEPGMEGAR

SEQ ID NO: 395174 - protein, 355 aa, unidentified
MIIIGVDYHPEFQQIAFLDDETGDFQEKRLAHPAEAEQFYRALAATGQKVRVGMEASGHARWFERLLAELQFELWIGDAADIQSKRGRKQKTDRQDAQHILKLMLKEDFPQIWVPSWENRDLRQLLWHRHRMVQARTRIMNQLQAVAINEGLRCKKRLWRAGGRQQLESFRLAPWASRRRRDLLELLDRLNPTIAELSQAIVQEAEKCPAARRLMTHPGVGALTALTFVLIIGNAERFQCGKQVAAYLGLVPLEKSSGNRRRLGHITKQGSSLLRFLLVEAAQVTVRSLPEWRSQYFHLLMRRGRKTAKVAMARRLAIRLYWMWRQQLDYQQSTSSVRTQDSSNQAMVCSRTPRN

SEQ ID NO: 395175 - protein, 390 aa, unidentified
MRFVGIDIGAERHSVAIVDEAGRIVSKSVSFEEGAAGYRRLSELLGSPADCLIPMEATGHYWKNLFAALAAEGFPIVLLNPLRTRRFAEEELQRTKTDKVDAVSIARFAAQKRPAATALRGPEIEELKQLVRLREQSVQHLGDRVRHLHQAIDLTFPEFNRHVRGLDTELATAILVRYPTAQALRTISVRKLAGLCYDGRRRIGDVLARALIEAAKISVGHFSSEPYQFQVRYACEDIVSLRARVRELETDIELRLNTDEVGKLLTTIPGVSTLTAARIVAETGDPAQFRSAAAFASYIGAVPRLHQSGKKRYSGKPAIPLGNARLRRAFWMPVLVGIRLNPWLRTYYLRLRSAGKRPKVAIIAAMHKLLLAIYRVAKHRTPFVPQLPAT

SEQ ID NO: 395176 - protein, 337 aa, unidentified
MEYFAGLDVSMAQTHVCVMNRDGAVVYEVKVPSMPADIAAALTQAPTCERIVFETGRMAPMLYHGLSQLGLPVVCIESRQAYQALKSLATHKTDRNDARGLAHLARTGFFKPVHVKSLPAHALRSLIVARKKLVGQRVTLENQIRGLAVVFGVRLPRALTAAFVRQALRASEGITGLSAAVRGLVAARTAVLAAVAAIDADIRQLVRASAACRRLMTIPGVGQLTALAFTAAIDDPGRFRRSRDIGAYLGLVPRRYQSGEVDYTGSISKCGDRRVRTLLYEAANVMLTRYRGTLKLKDWAFAIAKRSTMRKARIALARRLAIIMHAMLRDGTEFNPA

SEQ ID NO: 395177 - protein, 339 aa, unidentified
MEIKRIAVDTSKHFFTIVGVDDRGQVVMRRELKRHQVEPFFKKQPPVEVVLEACGGSHHWGRTFLALGHRVQLLPPQYVKPFVKRGKNDRHDAMAIAEASARPGIHPVPVKSAQQQAETMLLSVRELLVKQRTQLANAMRGHAGEFGVIVGKGLSNADALVERAGNDPAVPEPAKAMLAVLAAQFNALLLQIADLDRKLLAEHKANPVSRRLAEVPGVGPLGALTLALTIDPKQFHSGRHFAAWIGLTPKEASTGGKPRLGGISRQGNERLRQLLVLGATAVIRTAAKPGSRLASPWLVQLLARKPRKLAAVALANKMARTVWAMMRSGEAYRHRPVVG

SEQ ID NO: 395178 - protein, 366 aa, unidentified
MKKTSTVRVNGNMIFKGHKLTIGLDLGDRWSNYCILDEAGEVLLEQKLATTPEAVKQTFERIPRSLIALETGTHSPWLSRLLKELGHAVLVAHAQKVELISKSNRKDDRHDARTLARLARIDPELLGPVRHRSAKAQIHLTVIRARAELVSARTALVNAARGLAKSHGERLPKCGTEQVSRERAAELSAELREVLEPLLKEIESLNERIKEYNARMEKIAKESYPQVALLKQVKGVGTQIALTYVLTLDDPHRFAKSREVGCFLGLKPGRRDSGQSQPQMHISKEGDRYLRTMLVQGAHYILGPFGEDSDLRRWGLRLAERGGKNAKKRAVVAVARKLAVLLHRLWVSGEVYEPLRNSQKAMRAAA

SEQ ID NO: 395179 - protein, 343 aa, unidentified
MNVDVLGIDLGKNSCSVVGLDPTGRVVLRRRMRRESIVALAAKLSGCVVAMEACCGAHHLGRLLAAQGHEVRLMSPEYVRPYVKAQKNDDRDAEAIAEAATRPTMRFVALKTEAQLDVQVLHRVRDRLVGQRTALTNQVRSILLERGIVVPQGRRRLLEALQVLSDQPDGSGVGPRVRLLLDDMLDQWRGLDRRIAALDDEFAEMARNDPAARRLATIPGVGVLNATALVAAIGDGRTFSRGRDLSAWLGLVPRQATTGGRPKLLGITKRGSKYLRKLIIQGARAALPGLSRTTTPLGSWLRGLLGRAHGNTVVVALASKLVRIAWALLRKETAFAAGGLAAA

SEQ ID NO: 395180 - protein, 325 aa, unidentified
MNYLGIDVSKEKIDCCLFINGISGKGKSKIFSNSESGFIKLTDWLSHLNINTNDLLVTLEATGIYHENLCYFLHDLKINIAISNPMRTRRFAQGMSILTKTDKVDSEVLAKYGALAPIKYWKPDSKNFRELRDLMIRRDALSTDLVRESNRLEKSTFTKTSLHVISMIKESIDSLQTRINHIDVIINELIKNDSELTNEMNLLISIPAIGQRTALQMLTLFHGKDFDNAGAAAAYVGLVPIQKQSGTSVRGATRISKSGSSRIRAALYMAAIVAIRFNPHSKVLYNRLLKNGKSKMSALCAVMRKLVYLCYGVLKNKTPYQPDYA

SEQ ID NO: 395181 - protein, 427 aa, unidentified
MARMKSSRRCFGLDVHRDFAQVAIWQDGRVSQAGRFVTTPEEVRAFADSLGPTDEVALEATGNTWAIATLLASRAGRVVVSNPAKTRAIAEAKVKTDKVDAAILAGLLAADYLPPVWLADAETAALRRQVLRRAHIVRQRTRLKNQVHSILHANLVPRCPAADLFGIKGRKWLAEQDLPQDERAAAAALLRQLDFHAEELRLIDRDLGQVALKREDVRRLMSIPGVDATVALSIVAAVGDFTRFRTPEKLVCYFGLNPRVRQSGGQPASHGRITKAGPAHARGMLVEAAWSASKAPGPLRAFYRRVRARRGMQIAVVATARKLAVLCWHLMIKGEDYAFAMPSLVAHKQRKLELRAGYPTQHGNRKGKAASYSLKDVRAAERDGAARAEEIYRRMVGSWQPTRPHGKTSTPKKAMAVGADASNGTRL

SEQ ID NO: 395182 - protein, 449 aa, unidentified
MLNIGIDLGVTSKHKAQIRDEKGTKVRHDFSFSTSAEELDTLFGHALKDSPEGTKLRLILEPTEMSWFPVTVYGKSQGHQVVRVKSQKAHQLREYYKKYGKSNKLDAKALAMVPVVDGEDSLEEVFLPDAKAFALDRRCRQRERITREIARVKNRISSLFHWLCPGLMDCFADKYGEVAIAFYRRYANPFKAKKLGLEGITRFFNRLGNRDSELAQRVYQAVLGACALYEGAGEWVDFDQLQDELTEELRLLAQRQKAQARVNAQIKRLYKQVHPSGNIETIPGIGEVLGSTLMGIIADPGRFHSEVKARGYIGFCPRQDDSGEGSKKGLPATKEGPPRFRWATYMAGDTARQWDPQMAKIYYEQMVYKGNSHTQAVCAVGTHLVGRILAVLKEDRPYQLRDPEGRPISKKEAKELIRERFTVPQEVRDRTRTRRSRRKKRRRRRRTYR

SEQ ID NO: 395183 - protein, 322 aa, unidentified
MSEPVLGIDIAKQKFDAALLIGGKLKHKSCKNSTEGFELLSQWLRKQGVARLHACLEATGSYGDELALYLHEAGHTVSIVNPARIKGFAQSEMIRTKTDKIDSGIIARFCLAMKPGFWIPPSPEVRALRALVRRAESLIDMLTQEKNRLGTAHESVIPLIKEHIDYLKKEIEEVRRQIADMIDRDPNLKRKKDLLASIPAIGKVTIASILAEVDDLERFTHVRELVAFIGLAPKETLSGSSIKGKPRLCKTGHPRLRRALYMPALVSLQCNPLMIAFYRRLKEKGKNGKVIVCAIMRKLVHVIFGVLKSNKMYDPNYKPAFA

SEQ ID NO: 395184 - protein, 320 aa, unidentified
MDAVLGIDIAKAKFAVALLRADGKVRHKTFLNTLSGFAALAAWLQRHQVASVHACLEATGTYGDALANWLHDAGHVVSVVNPAVIHAYAGAQLARSKTDRIDAELIARFTATQRPAAWTPPAPEIRQLQALVRRLDALQGMRTQEANRLAAGVVVADVRASIETILESLDAQIAHVRQLIHDHFDQHPGLRAQRDLLTTIPGIGEATAAVLIAELFDKRYTSARQAAAFAGLVPRLVQSGTTRGRSRLSKIGPGRLRKALYFPAVSALRWNPTIRVMRARLAAAGKQPMVIIGAAMRKLIHIAYGVLKTGRAYEPTCPHP

SEQ ID NO: 395185 - protein, 299 aa, unidentified
MEMIGLDIHKKNTWATVLDDDGNIVERRRFDSRTEAIKEFIQGHQNSKVALEATGIFEHFYKTLRSCGVQVLVANPLKTRLIAEAKVKTDKIDSRTLAQLMYADMLPESYVADDETRDARKDVRERLLMKKISTSLKNHIYSELLRRGLEYKDGVLGTKTGRRWAKQILSEPRLDQAFDILENTEASIAEYNKERLEPAYERNEQAQLIASIPGVGEYSALTIAAELGDISRFSNTDKVVSYCGLNPGVSQSGPHVKYGHITKTGPRSLRWILIETANMHLLHCRNKKPPIGRNDSRSA

SEQ ID NO: 395186 - protein, 321 aa, unidentified
MEGTPVSARLEVFVGIDVSKHSWDVCLLPATIRRSFPATDEGLAALLELLRQHPATLIVLEATGGYERRLAAGLHDAGCEVAIVNPKQVRDFAKALGRLAKTDRLDAQVLALFAQKIQPRPSEKCPENRAELDALVARRRQLLQLRTMERNRLHMAEHQLPRKSIQKVIDVLDKQIDQLDAAIAKRIESDDDWRQKAQLLESVPGVGAVTSATLVAELPELGKLNRQAIAALAGLAPFNCDSGQHAGQRRVRGGRAGVRTALYMAALTARRFNPVLKRFADRLQSAGKSAKVILTACLRKLLTILNTMVKNNTHWNPKLAS

SEQ ID NO: 395187 - protein, 339 aa, unidentified
MKRFFIGSDVGKKEIHFTIYFEGKIILYKAIDNKKNDLKKYIKSAIALIQSLCGNDNEYDVIVAMEHTGIYINKLIEVLVKMEVKASVINAVKIKKTAGLDRGKNDKIDSKMIAEYAWRYFDALEIYSPMDPILMEIKTLSSERAKLVKSQGKLTQGRADQKEFSDKVTSQFMAHNIKPTLKMLERAIKNIEERIVELIKTDAELKENYDLAISVPGIGPVTAGALLSYTNNFTKFDNAKQLGCYCGVVPFERSSGILKGKGQVSKKGNMVLKTLLTMGAWSICGSKNHFGQYYTRKLKENKKKSLAINNLRNKMLKTVFACVKNKTMYRYDYVHSLAA

SEQ ID NO: 395188 - protein, 341 aa, unidentified
MHPTIIGLDLAKHVFQIHGVDGTGHVVIRKKLRRSELVDFFTKLPPCLVGMEACGTAHYWGRELSALGHEVRLMPAAYVKPYVKRGKNDEVDAEAICEAVTRPTMRFVSIKSAEQQSILMLHRTRDLFVRQRTMLVNSLRSQLSEFGLIVPQGIWRLNELHELAQRASRSVLPETAWECSELIVAQIEDLQMRIKAIEKSILACHRASEISLRLQTIPGIGVITATAIAATIADPGVFKSGRHFAAWIGLVPRQFGSGGKVHLGRISKKGEPYLRKLLVLGATAVVRYAKNKPALAAWINALLARRPARVVTVAVANKLARIAWAVMSRGETFRQASSAIA

SEQ ID NO: 395189 - protein, 346 aa, unidentified
MTIVDSRAITGGVDTHADSHVAAALDSIGGLLGVESFATTPDGYRQLLSWLGAFGEVGLVGIEGTGSYGAGLSRHLQAAGIRVVEVDRADRQDRRRQGKSDPLDAVSAARAAQSGRATGMSKGRDGAVEAIRALMVAKRSAKSERIQTINQARALVLTGPDDLRTQLAGLGAPELVAKAAGLRPRQGDLVGYATRMAVRELGRRVEFLDNQLERLDELIVPLVRIQAPVLLTIFGVGPDTAALLLIAAGDQPDRLRSEAAWAHLCGVAPIPASSGKVNRHRLNRGGDRHANHALWRIVITRMSSDLPTRHYVERRLKEGKSKMEIIRCLKRYVAREIYPYLRPGAD

SEQ ID NO: 395190 - protein, 346 aa, unidentified
MLIIGCDFHSRFQQIAMVDTETGEYRERRLEHGDGEARSFYATLPEPALVGIESTGYSLWFMEMLEELGHELVVGHAATIRARAVRKQKTDARDAACLLELLCQGRFPRVWIPGAGERDLRALLHHRHFLVEMRTRAKNGLQALAMSRGLCRGRSLWTARGQEALEGLKLGAAPTRRRQDLLRLLEQLNVWIRQLDQQLREQALGSAEVRRLMSHPGIGPLTALAAVAVLGPIERFANGKKVASYLGLIPSEYSSGGRQHFGHLTKQGSRLLRFLLVEAAQTACRYDPELKQDYRRLAFRHGWAKARAAVARKLAIRLYILRRDQIDYAEFVRRGSPAGMPGTPLV

SEQ ID NO: 395191 - protein, 397 aa, unidentified
MSKKNTRNALDTSLSYAVIGLDLAKADCAVAAVPCSDDELGLIDRMDYESLFEQAEKLEPTLFAMEPCCGYSQISLRLQNMGHEVKVISGHAVKNWIATHKSNQKTDLNDATALAKLALYEPIRVKNVEECRIASVQAIRIQLRTQATKSLVCFKSLCQCWGIVIRRGSSNTKKMAEAVAAVEKLLGAEVASSLMILRDAYKFTMKQINALDKLLDALVEANEQARTMKTVLGIGTQTAARLAVTTGDIKRFPMPRSYVAYFGLAPRNIITGHSGTPSPSKRGALKPVSSRGQGKVSRRGDRVARSFIIQGAATIYMLYCKDMLPECQLRRWLHEQIKRGKPYGKIIVSLAAKLLRIVWALLTYGEKFDSHKAGVPRSVLAAMEKPLKHDAAAESAA

SEQ ID NO: 395192 - protein, 350 aa, unidentified
MSEHITIGMDLGDRHHIIVVFDNKGNEVAIKRITNSKLALRRYFQRYTGATVAIEAGTHSPWISAELEQLGLIVYVGNPRKLRLIWDSHDKSDERDARILAMVCRVEPRLLWPVKHRNAQAYNDLEIIKARDMLVQSRTKLINHVRCVVKSHGERLPSCSAASFAKRAVGLLPAQLSDALSYLIETIADMSQRIVQLERKIEQLSKLRYPETQGLRQVAGVGPVTAMAYVLTIEDPSRFNKSRMVGAYLGLTPRRDQSGASDKQLRISKAGNRYLRKLLVNCAHYILGRFGPDCHLRRFGLAIAERGGKNAKKRAAVAVARKLAVLLHRLWASQHCYEPFYAAGSNRKAA

SEQ ID NO: 395193 - protein, 392 aa, unidentified
MVCVGIDVAKDKHNCFIFNSEGEVLADVFTVANNREGFETLLQRLRSCTGPADKIKVGLEATGHYSYNILGFLLDNGLSTFVINPLLTNLFRKSTSLRRTKTDRIDARTIAAMLMSDVDLKSYTDTAYHNEELKSLTRYRFDKVQQRAKLKQSVSRLVNILFPELETHVPTLHLASVYAILTEFPGAKQIAATHLTHLKAILSDASKGRYNREKAVEIREAARRSIGSVMPAKSLELQHTIRLIQELDKEIEEIEDAIKAIMDEMASPILTIPGISYRMGAMILAEVGDISRFDSPDKLLAYAGLSPSTYQSGKLNATGAYAHMEKRGSRYLRYALFNATKYVCIWEPSFAAYLAKKRAEGKHYNIAISHAAKKLVRLIFALQTSGRAFQAA

SEQ ID NO: 395194 - protein, 454 aa, unidentified
MQKQDSYDYYVGIDCAQNKHDFAMKNNQDKFLIKKGHFSNTLQGYEKFLNTVLSKCLNKDKILFGMEVTGIYGTNLYERLKSDGYHVVMISPDSVKNYRDYKRLNKTDKIDSACIAELLLNGDAQIVHVEKNGYTDLKAYIRRRNALKVTCTQETNRFLAKVCLYFPDLLKVFPSGRATLKAIFSIYPTPYSIIEADFDELVSVLQKASKNKFGVDKANELIHAARNSIVVRKSISDGELYNIHSLIDSIDSLESEIRNLEKIIDSKAEEFPAYHVLLTLTGCGKITAATIVAEIGDISRFHKASQIVSLAGLYGDNSKSGSSVNKRGKISKKGSRYLRHAIYMVAEFARRNNPIFKAYFTRKKNGDRTKHTLAVNAVANKLCKVIYFLMKNQSTYIIQYRDLAKLSESTQNEFFQNAETDFSAKTRRKKYLYEDEYGELHEFVFKSLKTALIE

SEQ ID NO: 395195 - protein, 320 aa, unidentified
MAQNDRVVVGIDVAKDKVDACIRSLSQRQTFPSRAEGRRKLIAWLRKHKVDKAVMEASGGYERDWAKALRGACFEVWIVDPKRVRNFARSAGRLAKNDVIDAEMIAWFAETFKEAPTQTHDVAREELAALVKARKAVIDLKTRLQSQNEHAVPGAVQKAHARVLKGLDAEIAKLEDAIVITVKATPAFAARAEIIESVPGLAETASAVLLAGLPELGTVRQEIAAALLGAAPYDDDSGKRRGERHIKGGRRWVRNALYMPCLGAATQSNPVLKAFYQRLIARGKEPKVALIACMRKLIVILNTMIAHGQKWDPSRRFAVN

SEQ ID NO: 395196 - protein, 343 aa, unidentified
MKLRVLGIDLGKTVFHLVGLDSTGRVVIRKKCSRTQLLAFTANLQVQLIGMESCSGSHFLGRALREQGHEVRLMPAQYVKPYVQTNKSDFLDAEAIAEAVQRPRMRFVPIKTEEQLDLQALHRVRERWVMRRTAVVNQIRSLLLERGLTLPKGRGYVDRQLPRILEDGELRLSGSFRVLLAQLKIELEQLTARIEEMDRVIQKTAKENEACQRLTEIPGVGPVTATSLIAAVGNGSTFQKGRNLAAWMGIVPGEYSTGGKQKLLGISKRGNKYLRTLFIQGARSVLQQRDKQVPGLSSWLTQLLARAHQNVVIVALANKMVRMAWAVLCKNERYRAPVLAMSA

SEQ ID NO: 395197 - protein, 346 aa, unidentified
MGEVITVGLDLAKTVFQAHGVDTAGDVVVRRQLRRGEVLRFFAGLGRCVVAIEACGSAHYWARQIGALGHEVRLLPPAHVKPYVKRGRKNDAADAAALAEAVSRPQMRAVPVKSAESQAVVVLHRTRDLLVRQRTMLICALRSHLAEFGIIAAQGKSGFAKLRASLEEAADDAVPGPALAALKLIAAPIDDGDGKIAALEKTIVARHRGCAASRRLATIPGIGPITASALAACVPDAAVFRSGRQLAAWLGLVPGQNSTGGKQRLGRITKTGDRYLRRLLVIGATGLIRYQRNHVPGGVAWLKALLARKPTRLVSVALANKMARIAWAVMRRGEVYREAPAPAAAA

SEQ ID NO: 395198 - protein, 343 aa, unidentified
MKHIGMDIDSTTTHISVFSERGREILHTQIATREADLVAFMRSVAGPKRVTMEESQMADFVTRAIEPHVTKVIRCLPQHNRLISESENKYDRADARALAELLFLNKLKEVHHAPWEYRQLREGVRAYWTASRDLSRNKSQLKAFYLFNGVHCTGEKVYASRYRQAFTKQAENRSANLQILAQLYLQLDFCRTRKAAHIKILKELVQPFQQDERHLKTYPGVALIGACSLVAYLENGWRLKNKRKLWQYCGVGVRRHESGGKGHRKASRQGNRYLKNAVMTAAATIANRRMADNALTKMWRAGIAAGVPGDRMKRNMARKVAVLVQRSLRFKEEYHDDRVTTTT

SEQ ID NO: 395199 - protein, 350 aa, unidentified
MNSLSEIVEVVIGVDTHVETHTAAVLDARTGAVLDELTVPTTSRGYQDLVDLADTHGALRVWAIEGTGGHGAGLARHLARGEEFVLELDRPERAKRRHGAKSDPLDAVRAAREAMSRPKLGTPRSGGDRQALSVLLAARRSAVDACAVAQRQLFSLVIAAPEHLRAKLRGRKLPEMLTVAARLRVQPGWDTESATTAATLRLLARRAQALTAEAAEIEKQILVIVRAWRPDLLNEFGVGPIVAATVLCAWSHPGRVRSEAAFAMLAGVAPIAANSGQVTTRYRLNRYGDRQLNRALHVVVLSRQRFHEPTKAYTDRRTTNGKNPRDIRRCLKRYIARDLYRLLEHGPSPT

SEQ ID NO: 395200 - protein, 410 aa, unidentified
MPRYVGLDVHKHFIEAYLIDEQGKQLHHCRVAVTRESIQTFAAKCLQPSDQVVMEATTNTWEVTELILPRVAKVAIANPLKVKAIAEAKTKTDKVDAEVLAQLFRCDFLPEVWIPDKKTRLLREMCAHRAALVADQTRIKNRIQSLLAQRLIPIPVRVLFNGHGRNWLSHLELSTEDRAVIDGYLRILDQIESEEISLQKASTQLSYDNEQIRLLMTLPGVGPAGAQALYAALGDWKRFKDGAHAASYLGLTPSTRQSADHCYHGSITKAGNSLARWLLTQAARQVTPHPGPLGVFFRRIQKRKNYNVAAVATARKLVTIAFLMLKNVIRSSPKISRTAKVASAFGIRAPGKINCRHQEAGFCDDAQEAGTLSVGIMLCRASSRSRASASRCFCISALDVRPQRGSHFPD

SEQ ID NO: 395201 - protein, 319 aa, unidentified
MSQSTMAYAGIDTGKHKLDVAVHGAKARLQVTNDEAGHAKLVTWLRRQRVRRAGIEASGGYEKAVVARLRQDGFEVVVFQPAQVRAYARYRLQRAKNDRIDATLIAACTADCEAEDIHAPPDPRLADRAEQLTLIEQLTEDVARLETRRASCRDDAILRHWDLEIRRLKQELKRQLAGLVAELRQHPDLAQRLDLIESVPGIGLRTAVAILIRMPEIGSLSREKAAALAGLAPYDDDSGDHHGERHIVGGRQRLRNSLYNAALPAAFRWNPQLIALYRRLSAKGKAHKLALIACARKLLIFANAVVARGSPWTQKSTAS

SEQ ID NO: 395202 - protein, 353 aa, unidentified
MNQIPINTEEETTMNITVIGLDIAKLIFHLIGLDKNGKQLIRKKLRRAQLLPYFANLPPCTLAMEGCSSAYHWEREFKKLGHQVKLLPAQHVKAHVRGNKNDYNDALAIAEACRVPQIRAVTPKTIEQQSLQALHRLRESSVSDRTALSNQVRGLLSEFGIIFNQGVSNLRRLLPSVLEDAENGLNPYFRDALALKYQQLCELDEQIESLSTLINKSSKEHREIALLQSIPGFGVIVASSYYSVIGDGKAFAKGRGVSASVGVVPRQHSTGGKNVLLGISKRGDKYLRKMLVNGARSVVNHAHKKDDALNVWVTRLVAKHGRNKATVALANKLARIAWAVTVSGKPYKANHAI

SEQ ID NO: 395203 - protein, 412 aa, unidentified
MDIVHERAAGMDISKRDAKVCVRVPGNRPGAHTSKVTTWGATTQSILELREFLEREHVTVVVMEATSDYWKPFFYLLEESLPVMLVNAKAARNIPGRKTDVSDAAWLAQLAAHGLLRASFVPPEPIRELRDLTRARALATRDRAREILRLEKFLESSGIKLSSVVTDLTGVSSRDMLEALINGERNPNVLAGMARGSMRSKIPALVDALTGRFRPHHAFMARLHLDQIDAHTRTIQALTARIEEAMEPFRDAREALATIPGVSQRVAEVIIAETGADMAVFETPGRLASWTGVCPSANESAGRIKSAHIMPGNKYLKGALGIAAMSAAQSKNTYLAARYHRLTARSGRNKALVAVEHSILTAAWHMLANGECYNDPGADHYTRTNPSRAKNNAIRQLNSLGYDVTITPVTAA

SEQ ID NO: 395204 - protein, 480 aa, unidentified
MPQPTKKSTPQARRGGSRAIRSRRKTRRAKDPTQGLQVTHPHAAAIDIGCAEHWVAVPPGRAEKPVRPFGCCTAELEALADWLAQCGVDTVVMEATGHYWVVLYDLLEERQLRPVVVNPRYAKNMSGKKGDIPDCQWMQKLHSYGLFANSFRPSEPLRALRTYLRPRESLVTSVGQCLQHLQKALTEMNVQLANAISDVSGETGLRIIDAILAGERDPQRLASLKDWRIRATTSQLAQALTGHWKDEQLFALEQARLSYAHYQEQILQCEERIQQQLRAVQSRLPEQPALSDPAAQQVPGPTGRKTPPAPPVGQTFNLQAELRRIVGVDLTAIDGIGSLTAQVILSEVGPDMQPWPTEKHFASWLGLCPDHRISGGKVLARSTRPVVNRARNALRMSAYTLEHSQSALGAKYRRLKRRLGAPKAIVAMAHHLARLIYRMIKYGQDYIDKGLAAYEAKYREQRLQWLEKQAKELNLKVVAA

SEQ ID NO: 395205 - protein, 354 aa, unidentified
MIIIGVDFHPEFQQIALVDKDTGEFQEKRLAHRDEAEKFYRAVTAAGQQVRVGMEASGHARWFERLLAELQIELWIGDAAEIRTKRVRKQKTDRQDARLILQLLLEDRFPQIWVPSWENRDLRQLLWHRHRMVQARTRIMNQLQAVALNEGLRCKKRLWREHGREQLESFQLAPWASRRRRDLLELLDRLNPTIAELSQAIEQEVEKCPEARRLMTYPGVGPLTALAFVLIIGDAERFQCGKQVASYLGLVPLEDSSGNRRRLGHITKQGSSMMRFLLVEAAQVTARSLPQWRSKYVHLMMRRGRKTAKVALARRLAVHLYWMMRQGWDYQQWVKFGSHAGQPGHRDGVQSNTE

SEQ ID NO: 395206 - protein, 371 aa, unidentified
MKEPITSYVGLDIHKNSVAIAIASAGRSAPRFIGTINPSPAELCKALRRQRCSPQNTLLTYEAGPCGYGWVRYLRKQHWRCEVIAPSRLTRNPAEQRIKTDRRDALLLARELRAGNLTSIVVPDERDEAMRDLSRAREDACAARLRVRLQMKAMLLRHGRDYVRRNSWSQAHERHLSTVRFEHPAQEIAFNEYRAACKEACERVERITTQLRELCENWRMNPLVKALMCLKGLDFVSAVTFVAEIGDLTRFEHPRALMSYLGLVPSEYSSGASRRQGAITKCGNKHARRILVESAWTNRFKAQITRTLEVRQEGQPKVIRDISWKAQLRLSKRWRSLGMGRKLHHNKICIAIARELAGFIWDVGQHVKLKA

SEQ ID NO: 395207 - protein, 388 aa, unidentified
MQIAAVRPQAPTAIRTDLGAIFVSLELSRSTWLITSLAPGGGEKMSKHSVRGGDVAGLLERFVQLHEKARARTRQCFRIIVIHEAGLDGFWIHRVLQAEGIESHVVDPASIATSRRRRRAKTDKIDGEALVRALLAYKRGEPRVCAMVKVLTPEEEDRRRLCRERKVLTAERVRHVNRVKGLLFAQGITGYEPRRRDRRERLEELQTGDGRRLPEHLKAQVRRELDRLELLLEQIKAVEVERDVLLAAEYAVTPAPAAMLLDIKGIGPEFAAILWSEGLFRHFDNRRQVAAYAGLAPTPWQSGSVNREQGVSKAGNPRLRTTLIQVAWLWLRHQPDSALTHWFHERVRLNGGRLRKTTIVALARKLLVALWKYVTAGVVIEGAVMKTA

SEQ ID NO: 395208 - protein, 441 aa, unidentified
MEEKREEKLPHVSEFPEYCTPVGVTVGRIRKVMHPSGTKRFIGVDLSKQSCYVCIINRDGQIELHRNFSLRSDKRSELYEKLQEGDLVLMEASTGTFNIARAMNKLPGVLACVVNPHSTRINETKKKTDKEDSLFLAKLILRTPVEELQLVSIPSDQEMENREVISHYRQVDNRHTQVVNQLHALFFDKGFPEVGKTHDLHTKVGRYDAIEKCFGTDRAYSFTKRIAKDLSKELSLLEEQQAVGERQMARIVKQNDRVAAILGSIPGVGLKTIAAFIAFVGDVDRFSQGKQLSAYCGLVPRVYQSGQKDGIRKITKEGQAALREYLVEAVFAMMRTKFNFPLKEKYLELRQRMKSRKAAIAVARKLVVMIFSMLKNGTLFMVEKEENREQVAAYHKRKYIQSVGKYYKFRESCKDISAMIEITNTFYSNELGVLKFKQQGA

SEQ ID NO: 395209 - protein, 333 aa, unidentified
MSSNLRTVGIDISKDWLDAFAAPEGRASRFPNDRAGFRKLIAWIGSGIDRIAYEPTGAFHRDFEDTLLKAGLPLYAINPFQARSFARSIGRRAKTDAVDARMLAIMAAAVEDLRPTEARSEEQRDLTELHQVRDALVRDRTATTNRGKNLRTPVGKRVTKQRLRQIDRQLKLIDTEIRQRIGEEKALERRAEILTSIPGISDITAAGLIVHFPELGMLTRSRAASLAGLAPVTRESGHWKGRSFIQGGRHRVRRLLYMPAVVAVQHNPDLKRKYEALVAKGKPRKVALTAVMRKLLILANALVQQDRIWTAHPPREYTTPGFPTPCHEGSAHG

SEQ ID NO: 395210 - protein, 429 aa, unidentified
MTPPSSTTSPVVRVAIDVAKLTHQVLLELPTGKRRSLRVQNTRIEIERLVTLLRSLDCPCDVAFEPTGDYHRPLAYILGQAGCRLSLVSSLAVARTRDALYNSWDKNDPKDAQVILHLMKTGTTQRYLDPLVTGHQDLQELANTYQQVSLRKVRLQHSIVTHHLPLYFPEAERYLHSSRAEWFTDLLLFTPCPAAVRRYTKAAFVAAAREQIAGRKVDKARWLADFYDTAATSLGLPVSESSEAMRMFRIVLEEYRALCVLRKRLEADVVTRLAHQPDFIRLQTLPGIGPILAMIILAEARDLRRFGCARQFLKYCGFDLCTEQSGQFRGTTHLSKRGNARLRYAFWMAGTVAIRMQQNGFRRKFEDYIRPDPQNADRRRKAYTAVAAKMARVAYAVITTGIDFRRFPEAAKPGGRIPSPAAVEAHATS

SEQ ID NO: 395211 - protein, 334 aa, unidentified
MTMEMLAIDLAKQSFHLHGIDADGVVVSRKVSRAKLEDAVAELGPAVVAMEACASAHHWGRQLAAAGRQVRLVNPRFVKAFVRGSKNDAIDAEAIYDAASRPTMRFVPVKTTEQQDLQSLHRVRERLVVQRTSLINHARGLLAEYGVVLPKGPWRFRQQAPAAVAEADLSQLARELFTELIDQLTDVEARLAKLDAKLISICREHAACRRLAALPGVGPVIATALVAAVDDGRHFRSGRELAAWIGLVPRQYTTGGKPKLGGIGRRANHYLRRQLIHGARAVISRMAAKDDQRSVWLKGIVARAGFNKALVALANKTARIAWVLLARKEEYLPA

SEQ ID NO: 395212 - protein, 478 aa, unidentified
MAKRKLSTFERLRNGEKLARRERRQLQRQIEKGDPSLQVVHPDAAGIDVGNESHFVSVPAGRDARPIREFGSWTGDCHRMAEWLKGCGIRTVALQSTGVYWIGLVEILEGEGLEVYLVNAQGTKNLPGRKSDVQESEWLMKLHTYGLLRNSFRPPEEIRELRTLWRQRNRLVEDAGQMVQRMQKALTTMNVQLANVISDISGVTGMQIIRAILKGERDPRVLAKLRDQRIQASEEEIASGLEGNWKPAVVFELRQVVEAYDFYQKQIAACDLEVRVRMEALPSQGAGEEKAAEEAERVTKKGFQKARKNQPQFDLREELRRIYGVDLTRIDGIDVLTAQVILTELGPDLRAFPDEDQFSSWLELAPRNGITGGKVIWQKARRSKNRVANALRMAAQALSHSDSYLGAQYRQFRARQDGKQAVKTMAHKLACLVYRILTRGEEYVDRGAAYCEKKRADRELAALQRKAAARGLQLVPVQ

SEQ ID NO: 395213 - protein, 351 aa, unidentified
MISTTIAIDLAKTVFELAVADADGNVIERRRLSRTQLHRYFDNREVGRVVMEACGTAHYWGRWFAERGIAVTLLPPLYVRAYVRRNKTDRSDATALLEAARASDIVPVRVKSIEQQALQGLHRVRSGWRATVTARLNCLRGLCREFGINAPLGTKRGLAELSRQLEDGDSAVPTLLRSTMRQAVGEIRAIEESILQVEAELAQIARCSEVCERLQKIPGIGLLGATAIVGSVGDIRSFRSPRRFASWLGLTPKEYSSGTVRRLGSISKRGDKYLRMILVHGARAVVYSARAAERAGRPLDALRDWALKTRARTGNNKAAVAVANKLARIVWASWYRERDFEFRAPALVAAA

SEQ ID NO: 395214 - protein, 331 aa, unidentified
MNYSHFVGLDVGKKTFDASLMSADEKELSHKSFDNTPTGIQSLLDWIAGYHLSLSKLLFCAENMGSYVTELSVSSVSMGFSLALVCPLTIKKSIGLQRGKNDRIDAKRIANYAVLHYRKLELYKLPDKDLVRLRGWIIIRDNLVKQKVSSIKLLETFSWMAKLADVTESISFLEEQLKSIKERILEVKEDMEQLIAASTSLYTNYLLLRSIKGIGIINAIVLLCVTDNFQRFDNPRKFACYCGVAPFEHTSGISIRGKTQTSSLANKEVKVYLTRAAITAISWDPQMKAYYKRKIAEGKHKASVINAVRAKIIARSFAVIRRQTSFVTLAV

SEQ ID NO: 395215 - protein, 338 aa, unidentified
MGQYVGIDLHRRSTTIHRMAEDGETLAIERIVSEPFELAQAMAEAGPEPEVVLESTYGWYWAVDLLEELGAHVHLAHALGNNWGNRRVKNDERDAQDLAAMLRLGRLSEGWIAPPEIRELRELVRYRHSLGRHRTSAKAQIHGVMAKNGILPVVGELWGPIDQAQLDGLELPEAYALRMQSLRELLAHVEREMTKVDAQLHHRLKSDPGYRALVRLPGVGKALGAVFVAEIGDIARFSSAKKLCSWAGLTPKHRESDTVVHRGSITKQGSRLVRWAAIEAVGNYRAKGNETLPANYRRIAERRGKYKARVAVARKMVTLVFYALPDGEVRCLDNHSEA

SEQ ID NO: 395216 - protein, 348 aa, unidentified
MEKIIRIGVDTSKSVFQLHGVDEAEKPVLRKRLTRDQLLTFFRKLGPTVVGMEACGGSHHWARRLQELGHEVRLMPPHLVKPYVPPGRKNDAADAEAICEAMSRPRMRFVKVKTVDQQADLMLQNGRSLLIRQQTQLSNAIRANAAELGVVAAKGLSKVEGLLRRIAQDRTLPENARLSCEVLGEQLAEVDKRIEAIAARLRAWHQKNECSRRLATIPGIGQRTATALAMKVTDPHVFKSGRHFGSWVGLTPKDHSTAGKTRLGGITRAGDEELRSLLVVGATAVIQQVRKSRGRQWPWLVELVKRKPPKLVAVALANKMARIAWKMMVSGESYRADYQSRPPVAEAA

SEQ ID NO: 395217 - protein, 461 aa, unidentified
MKGKSQRRSAQRAQREQRILEKIHLNAAGIDIGSESHWVAVPGDRDDRPVREFKSFTHELLALADWLEACGIETVAMESTGVYWIPLYEILEARGIEVLLVNARHVKGVPGRKTDILDCQWLQQLHTFGLLRGSFRPDAPIAALRSLVRHRDQLVAAAASYVQRMQKAMVLMNLQLHNVISDVTGGTGIAILRDIVAGQTDPSVLAHHRHPRCKATEAEIAASLTGHYRDEHLFVLRQALEIYDFYQEKLRACDMEIETRIHALEASCDPVEGRLPASRVKTRRANEPGFDIRSPLFTLCGGVDLTQLPGIGAYGALKLISEIGLDMSRWPSEKHFASWLTVAPRNQISGGKLLSSRTQPSANRAAKTLRMAAMSLWRSDHALGAFYRRLGARVGKAKAITATARKLALLVYRMLRNKIHYQEPSAADYDRQQRARILRGLRKRAASLGFELVDTCTGLAT

SEQ ID NO: 395218 - protein, 325 aa, unidentified
MDVIGIDISKLKFDVVLIIGERSKHAVFSNTEAGFQQLLAWLGKQRPDPACPLHACMEATGNWGLDLADFLHGQGMQVSIVNPLRIKAFGQSELARNKNDKLDAGVIARFCRSQNPPLWMPPAPHLRELRELVRRCNALKDARVQETNRQKSGFASPAVAHSIETHLAWLDQQIDEVSGAALRLIQGDPTLRKNLSLLRSITGFGDVSAAILLAELPNIADFTPKALAAFVGLSPKEHSSGSSVRRPGRMSKVGAERLRGTLFMCAFSAKRFNPRLADFVKRMTDAGKAPKVILVAVAGKLLVYAHAVIRTQKPFQPFPDAPSSI

SEQ ID NO: 395219 - protein, 420 aa, unidentified
MKNWKDLTHYAGFDWAKDHHVVVIVDAQGQLVADFEFAHSLEGWKGFVEKTAAWPNLGVAIETSQGAAVDQLLQRDYTVYPVHPVAAQRYRERKAPSGTKTDHLDGWGLGDALRVDGHGWKPLQPLDPLTQQLRLLCRDEVSLIEQRTALVNQLQQALSEYYPAATEAFDDWTDSFTWEFVLAFPTPDRLVGAGKGRWEKFLHTHRLWRPETAEKRLKLFAQADQFKASKPIVLAKSQLAVSLCKLLCTLGQQLKLYRQQIEKLFAEHPDHDLFGSLPGAKKMLAPRLLGAVGSDPERYGSQEVLQCIAGTAPVSYQSGKISKVRVRWSCDKFLRHTIHLWADCFRKASAWGQAYYQKKRKDGMSHACVMRCLGQRLLKILFRMLKERTPYDAELHARNQLKHGSWVLQLIDKQATEPGQ

SEQ ID NO: 395220 - protein, 355 aa, unidentified
MTMLAEVVEAVIGIDTHRDSHEVEIADVTGKPVTTMRIGNDSAGFAQLLAAIAEVAPGPRVAVSIEGSRSYGIGLARALTAAGLLVIECEQPSRKQRRGKGKSDPIDAHLAVLAALRLDAGQLPVPRADGDREALRILLVARQEISEARTAQIGRLRALLLAGDDTDRQAARKALTHQALAALAGRELSAGARREQVVRHTEIRRLALALGQARQQLKDNRAQLLTIVDDIAPGLTSRYGIGPVSTAQAIVSFSHPGRCRSEAAFAALAGTSPVPASSGRTIRHRLNRGGDRALNRAIHAIAVTRMRSCPRTRAYIARRTAEGKTAREIRRCLKRYIARELYRQLTRSMNPPVSP

SEQ ID NO: 395221 - protein, 348 aa, unidentified
MDFIGFDLGKVASQVCIITQDGELIERRIKTDREHISELLAKRAPARVVIESSTESEWVARYLEEIGLEVVVADPNFSPMYATRSRKVKTDKRDARTLAEACRLGAYRPAHRTSDRQRHVRAQLAVREAMVRTRSRYISLVSALLRRDGLRIRNSGYAPSFLKRLAHLELPAALREEVAPLLVLLQSLNEQIKQADEKLARLAEGDEVVTRLRTVPGVGVVTATSFVSTLDDASRFAGAKEARAYLGLVPSERSSGERQQRGHISKAGPGRARHMLVEAAWTILRRRSTANAALHEWGARIAARRGARVAVVALARKLAGILYAMWRDGTKFEARSPRAEAGFTAAAA

SEQ ID NO: 395222 - protein, 338 aa, unidentified
MGTYAGIDLHSSNNYIGIMDQDHKRLFGRRLPNSLEKILMVLEPFKSDLKGVVVESTYNWYWLVDGLQEHGHRVHLANPSAIKRYEGIKHTDDKWDSFWLAHMKHLNILPEGYIYPKEQRAVRDLLRRRLFFVRHRTANILSLQSTITRNLGIKISSNEIKKLDMDDACDLLDSSNLVFMAQNNISTIKHLAKIIKGIEKEVKSQVELRKEFVMLTTIAGIGLILGLTIMLEVGDIERFSKVGNYASYCRCVGSKRLSNGKKKGENNKKNGNKYLAWAYVEAAHFAKRHIPKAQRFYQQKMAKANGAVATKALANKLARASYFIMRDQVPFDEDMLFR

SEQ ID NO: 395223 - protein, 349 aa, unidentified
MHSTTVAVDLAKNVFELAVADSEGKIGERLRLNRARFSSFFVHRAPCRVLMEACGSAHYWARRIGTHGHTVQLLPAQYVRQYVRRNKTDRADAAALIEAARCADIQTVPAKSLEQQQVLVLHRLRSQWMCTRQRYLNTLRGLLREFGIAVPLGARLARTRIAHYLAQPPQELPAAIRPLLAQMLSGVKQLEQQIEQVERELTDLSRTDPVVQQLRQIPGIGLLTSTAIRATVGDVQRFPCGRRFASWLGLTPREYSSGERRRLGGISKRGDSYLRTLLVHGARSALLAAHRQQRTGRPLDHLRQWALQCERQRGHNVATIALANRLARIVWGTWKHGRAFDGNWGCVTQ

SEQ ID NO: 395224 - protein, 352 aa, unidentified
MIVLGADTHKSSHTIAAVDAATGQVLGEKTIAVGARGFGALVLWARGLGGERAWALEDCRHVSGALERFLVARGERVVRVSTRLMATSRRSARERGKSDSIDALAVARAALAEGVETLPTAALAGPELDLRLLVDHRERLVRQRVGLNNTLQWNLHDLWPELALPGGALFSRKWSSRIGRRLARAEQTMRVRIARDELRRLRELTQAINALEAEISELVARAAPQLLSEPGFGPLTAAKLVGEIAGADRFNSDAKLARAAGLAPIPVSSGRSNRHRLDRGGNRQVNAAIHRIAVTRARCHPETRDYVARKTAEGKTHREAIRCLKRHLARRVWQLLRAPHPVRGTPPSPSHS

SEQ ID NO: 395225 - protein, 377 aa, unidentified
MLRIKFVGLDVHADTIAVAVAEQEGEARSLGIIPNREESVRKLLRKLGPMEQLRFCYEAGPTGYALYWQLTQMGAQCAVVAPTLVPVKAGDRVKTDRRDALKLARNYRAQELTPVWVPDAAHEALRDLVRAREAAKKDQLRARHRLSKFLLRHGRRPPVGIHSWTVKYLEWVQREVHFAERAQEVTLLDYLHEVQHAVARIERLDQAIDEAAQSVPPPMRAVIEALQALRGIAKISAVTVVAELGNVTRFTGARQLMAYGGIVASEDSSGERVRRGNITKTGNAHLRRVAVEAAWAYRHRPSIGATLRKRQEAVSEKVKEISWKAQQRLHARYMKLLLQGKNKGVVITAVARELLGFLWAIGIQAEAEHQESLSRVA

SEQ ID NO: 395226 - protein, 411 aa, unidentified
MDILHARCAGLDVHKDFVTACVLLPGEGSEPSKHLEQFGTTTQELRRLSQWLEQEQVTQAAMESTGVYWKPVFNMLESSCEVVLVNSRQVRNVPGRKTDPADAWWLARLLRHGLVEASFVPERQTRELRDLCRMRTTLVRESVQTGNRLRKVLEDAHIKLDSVASDSLGVSGRSMLEALVRGETDPIVLAELARGRLRAKRPELALAWEGRVTPHHQFLLGEWMRLLHFLEEQIARLEAEIEGHMPPFEAAATLLMSMPGVDRTSACALLGEIGRDMTRFASARHLASWAGVCPGNHQSGGRRMSGKSHRGNRWVKGVLTEMAWAATRTKNTYASALYRRLMIHKGKKRALVAVAHHLLEAVWHMLTLGAPYRELGSDYFDRLDRDRLKRNLVRRLQKLGYTVDVQPVSAA

SEQ ID NO: 395227 - protein, 403 aa, unidentified
MNNVAGIDVSKGKSMVSVLRPFGEVVAKPFSVGHTGSELKELADYLKSLDGETRVVMEHTGRYYEPVARFLHEEGVFVSAVNPKLIKDYGNNTLRKVKTDKADSRKIARYGIDNWAELRQHTPMDTIRMHLKTLNRQQSLYTKTKTMMKNNLIALLDQTYPGVNALFDSPVREDGSQKWVDFATAFWHVDCVRNMSLAAFAERYRKWCKRHGYNFSQSKAVEVHAGAQDLIVMLPKDALTKTMVRQAIDALNAVSASLERLKAEMRTLAAQLPEYPVVMAMHGAGDSLGPQLMAELGDVTRFTHRNAITAFAGVDPGADQSGTHEAKSTRVSKSGPPELRRALFLVMDCLLKTQPQDDPVYRFMDKKRAEGKPYLVYMTAGANKFLRIYYGRVKEYLASLEGN

SEQ ID NO: 395228 - protein, 405 aa, unidentified
MRVYVGIDWSSKKHDIVYLNEAGGIIAYQTIPHSPLGFEAFDDQRRKLGVEVDDCLVGIETEHNLFLDYLSSHQYRQIYVIPPTTIKDSRGRFGASRANTDRSDAHLIADMLRTDLARLHLWHADSLLTQQITALVSLEQFLTHTIIQTNNRLRNVLWRYYPNAANVFTGLDLQISLEFICAFPTPQAAARLTFDQFKTFARSHHHSAPSKWPACFARLQKPQPEAAQDTVLTFQSEAVRLARLSLQAVKDRAATIREIQTLFIEHPDYPIFSSLPGVGKILAPALLAKFGDDRQRYPTPQVLQAVAGTCPVTRASGKHKYVLFRHACDHEFRTIVQQWAKCSIDDSVWAYTYYQSVRPHCDSLSHAYRRLANRWLEIAWRLWQDRVPYDEKRHLHQHALRVKPI

SEQ ID NO: 395229 - protein, 343 aa, unidentified
MDEYDGRQFVGIDLHRQRSVIVRQSESGELLSAVRIVNDPVALGLQLEQAGSDPEVVLEPTYGWYWAVDVLHACGARVHLAHPLGVKGFRYRRVKNDVRDAADLADLLRMGRLPEAWIAPPETRELRELVRYRAKLVAIRSGLKAQVHAVLAKAGVLIAVSDLFGVAGRQRLAKVPLGAAYAERISSLLELIDILDGHEARFAAMIAERLRAHCGYQVIQQVPGVGPVLAAVFVAEIGDVHRFAGPAHLCSWAGLTPTHRESDTVVRRGHITKQGSKLVRWAAVEAIQRQPDTTKITLDRQRIEARRGRNIAKIAAARKLLTLVYYGLRDGHIRALAHRQVAV

SEQ ID NO: 395230 - protein, 343 aa, unidentified
MQTITTIGLDIAKSVFQVHGVDAEGKVIVRRQLKRRYVLTFFQKLPPCRVGIEACASSHYWSRELQALGHTVRLMPPAYVKPYVKRQKNDSADAEAICEAVTRANMRFVATKTTGQQSCLMLHRTRHLFIRQQTAVINAIRAHLAEFGIVAPVGRTGVEQLLKVASDGNDKRLPDVARACIAALGAQLQMLKTRILEFDRLIMAWHRSNQVSQRLDELPGVGPALATALVASVADPKAFRSGRDFSAWIGLVPKQHSSGGRERLGSISKQGDRYLRSLFVVGALAVIRYAKIHGTEHRPWLTALLARKPTKVAAIALANKLARMAWAMMAKGERYKQPVALAA

SEQ ID NO: 395231 - protein, 430 aa, unidentified
MEEITEDAKIVARVAALDVGKAELVACVRVPREDKPGRRLQEVRTFATTTPALLELRDWLVCEGVTLCVMEATSTYWKPPFYLLEDAVECWVASARDVKNVPGRPKTDKLDAIWLAKLAERGMLRPSFVPPPWQRQLRDLCRYRRTLIQERTREKQRTEKLLEDTQIKLSAVISDIFGKSGRDMLEALIGGQRNPAVLAELARGSMRGKKSVLREALTGQFRDHHGWLLRMMLDRVDALTAQIETLTGRIDEVLAPFARQVAQLDEIPGVGKTGAAELIAEMGTDMTRFPTSGHLVSWAKFAPRARQSAGKDKPGTTGKGSPWIAGALGEAVLGAARTKTFLGARYHRLARKRGKQRAIVATGRSILVIAYQLLSAPMPASPTSARTGTTASPRYAANASSSPSLNACPARRSPFRRPQPDTCSPSPRLR

SEQ ID NO: 395232 - protein, 366 aa, unidentified
MKQQHQDSEVTIGLDLGERRHRFCALDGRGEVVEEGSLLNDRASLGRVTARYPGALAVMEAGTHSPWVSRYLEGLGWEVIVSNPRKVRAIYQHERKSDQRDALMLARIGRMDRALLYPVRHGSEQAQQDLLRIKLRDSLVRARVALINSVRFSLKSLGYAVCNPSSERFHKVAMERLPEKVQQMVAPSVQALAELSTRIAVLEREINVVARTKYPQTLWLQQVPGVGALTALYFVLKIEDPQRFENVRDVGAYAGLCPRRDQSGGSDPQLRISKRGDPYLRRLLVSAAQYILGPFGPKSALRAYGLMLAVDGSARARKQDVVAVARKLAVLLLSLWKNRSHYEAFPHWQTIEDKRSGTIAMHRVEA

SEQ ID NO: 395233 - protein, 333 aa, unidentified
MKHTHVVHIGIDVSKQKLDIDAAELGATSIPNTPKEVRKALAAIARKAKPDKPLHVCFESTGPYTSALAAQCQALKLPYSILNPNKVKHFAIAIAHAKTDPLDANLIRRYAQVKNPAPATPPSKAVAQLDKLVLARDALVKNTVALRGVLETLKGSPAAKPVERALAQLQKQTAACDVLIKQTVDADAELAGLVTALTAVKGVGTLTAAKVLANMPELGTLGRRNAAALAGLAPRTRESGTFKGKARIGGGRKQVRDALFMPATVAIRHNPELKRLHVRLMEKGKPYKVALTAVMRRLLCHLESLAKDHRAKHEETPEIAPTYSKKKQKNQDS

SEQ ID NO: 395234 - protein, 448 aa, unidentified
MIKAKNKLEIVNPDTTGIDIGSAVHYVCVPEGRDEQRVKKFGCFTVDLHNLAGWLKKCKVRTVAMESTGVYWIPLFQILESYGFEVKLVNARYIKNVPGRKSDVQDCQWLQQLHSYGLLHGSFRPDDQMCVLRNYVRQRSNLIESASTHILRMQKALIQMNVQLHKVISDITGVTGMQIIKAIIEGERNPEKLSELRDVRIRNDRSTMAKALKGDYRKELLFVLKQEFELYNIYQEKIAECDKSIEQYYKTFETKSDENKRCSKIKNRFSKNRPDFPLHEELYRVTGIDFTKVPGLDVLTIQTIISEVGLNHDKWPSEKHFTSWLGLSPANKVTGEKVFGTRTRKVIARAANAFRMAAQCVSRSNGGIGAYCRRLKKRLGAPKAITATARKLACIFYSMLKYGQEYVEKGIDYYEKLYKEKIVKTLSKKASEFGYVLIKKELLAERVS

SEQ ID NO: 395235 - protein, 347 aa, unidentified
MITIGIDPHKATNTAVAASELGRQLAEITVAANEAGQQELLAWAHGLGAEIRFALEDCRHVNGRLERFLVGGGEPVLRVGPRLMAGARKGARTRGKSDAIDALAIARAALREGAALHLASHDEAAREMKLLVDHRDALVSERTGLASRLRWHLHDLEAGLEPAARSLDQASVRRSLSQRLARREQTVQVRIARDLLARIGDLTRRERQLASEIGKRAKRYCPALFEVPGVASLTAGKLIGEIAGANRFASDAQLAHFAGCAPIPASSGRTERHRFDRHGNRQLNAAFYRIALTQARVHPGARAYLAKKREEGKSTAEALRCLKRLLVRVVWRTLRSAGEPCLSPSPS

SEQ ID NO: 395236 - protein, 403 aa, unidentified
MNSVGIDISKGRSTIAVMRPFGEVVISPFEVRHTDSELSELARQLKSLNGETRVVMEATGNYHAPVAKLLHDAGLYVSVINAKLVHGYGNNDLRRVKTDRKDAVKLANYGLDRWLTLPRYVPEEDTRLLLKNCSRQYRQYSKVQTVLKNNLISLLDMVFPNVNRLFSSPIRGDGSEKWVDFVAEFWHCRCVSEKSQKAFTNKYQRWCRKHGYNFSEAKAHTIHAEACGHIDVIPKSETTKLLVEQAVAQLRATSAALAALKHEMQALASMLPEYPVVMDMFGVGPTLGPQLMAEIGDVRRFYSKKALVAYAGLDAPPNDSGDVTGRHKSMSKIGASSLRRTLFLVMSVYLQTAPLDEPVYQFMDRKRAEGKPYRVYMMASANKFLRIYYATVKAYLESLEHTA

SEQ ID NO: 395237 - protein, 311 aa, unidentified
MSEYDVYIGVDVSKETLELSPFDAKSAEVANTAKGVGALVRRIKALRRPAMVCCEATGGYEKRLVSACLEAGVPVAVANAKWVRRYAQSKGVLAKTDKIDARMISEYAERNGPRLRAGRAAWQEDAKALLARRNDLVSMATQEQNRLGPSPSGCVRKYIQEHIRTLKAQVRKIDAELSSLRKGNEPFAAGVKRICGIKGVGKLSAMSLLAFVPELGGVSGNEAAALVGVAPYNDDSGTMRGKRHTVCGRSRVRRTLYMAALSASRCNPVLKAVYKRLTAKGKTHKVALVAIIRKIVNLANRLMADPEFRLA

SEQ ID NO: 395238 - protein, 328 aa, unidentified
MKTPSLFVGIDVAKATLEVFCAELALDPQVPNAPAGIRSLCQALRRHRVKVLVICEATGGLEAALVDALHQARIAVSVLNPRRARDFAKACGKLAKTDRIDARLLAEFGRRLQPQPTPAPDPCVRELTALVARREELVQMRVAEQNRLHSNAHPEVRASLQRSVERLSREVARLEKLLEGCCRRQPELDRKRTTLCAVAGVGPVSATTLLATVPELGTLSDGQCAHLLGVAPLNCDSGTWRGKRHIYGGRRCARRVLYMAGLAASRANPVLAPFYQRLIAAGKPIKVALVAVMRKLLLYLNRLLRPRAEPNAAGSPAGFCEAKAMVTD

SEQ ID NO: 395239 - protein, 317 aa, unidentified
MYCIGIDVSKQELVTYDGERRRTFPNTADLEELAAFLKKKDGEVTVVFEPTSTYSRPLELLCRTRKVRCWCLNPRVIPHLREVSQGRSKTDRTDAELLWQYGQDHGPGQLLEEDNLGRALKASLSCYAQAQKARIACQELLEALSHDPTTPTGLIEDLREETKRLKAREKRELAHAQALIEKGERARKGFASLFEIPGIGGLTATVLVALFRRYPGTNRKEIAALVGMDPAEHRSGSSVHGRARIEKPGDGFVRKTLYEATLAAVRYNPAVRALYERLKVKGKPEKAARIAAARKLLFAHAVYHSGQPYQTLEPSGG

SEQ ID NO: 395240 - protein, 447 aa, unidentified
MNRNTNAPDSEPSPSAVAPPAPRAEPSFAAFVAMDWGDEQHAVALRVAGQSQTEHTILEQQPEALSQWVAGLRQRFAGGRIAVILEQKRGALLYALQPHEHLVLYPINPQMSAHFRQAFYPSGAKSDPLDAGLQLDILLHHRDRLTAWHPDEAITRQLSLLVEARRRFVADQVRLTNRLREALKSYFPQALDLVGKDLASPMACAFLQRWPSLAAVQRVKPAVLRKFYYAHHSRSEELIAQRLQLQAQAQPLTTDTAIIAAQSLLVQSLAQTLAPLQGVLAHYEQQIAQLFAAHADCALWDSFPGAGAALGPRLAVAWGTQRERFAQAQAMASYSGIAPVKEASGKQVWIHHRWACPKFLRQTFHEAAKGSLKLCTWALCYYQMQTQQGKGHHATLRALAFKWQRIMWRCWQDHTAYDDAKYVESLRRNAPELYARVQAAQRLQTCA

SEQ ID NO: 395241 - protein, 338 aa, unidentified
MTTGLAAGTYELFVGIDIAATTAEVSILRPGAKAGRSCKIDQTPEGFHRLVHTLQATENEPSHVLVVMEATGSYWMSLATRLVHEGFRVSVINPSQAHHFAKALLKRAKTDAIDAQTLAQLAMVLQPEPWMPPPQIYYALQQRLAQRDDLLNLRQQVRNQLHALDQHPEVIASVRTRMERLLVLFQSQIDEVEGEIAAALNQESAWAAAAERLQSIKGVGWVTAAWTLVTTLNFTTCDTVDALTAYAGLAPMPRQSGSSVWHRPSIGHSGHGRLRTAFDMATLTAARFNPAIKAFYNRLLEAGKPEKVARCAAARKLLHMAWAVVKKDQPFDPNYAQG

SEQ ID NO: 395242 - protein, 606 aa, unidentified
MHLAESSSTLFCLWTGLSLPVALHPASRRRSYLQLRTGQCSRPEGTFTLLSVRTFRRTCPRHFVPGYDRPYSWSEVIHRAGDESTFPAFERERPRIVNNFAASASSGYELSSFSEKMNSTRLSNLAVVLEPGNEYSDEDESSLRGAITSGYKEFASVSGRANHQVPPPHLSWKGSNMNESVSEQPLSPKVVAFVGIDWADQKHDVVLRSADDPAKPEHQVIKSEINALNDWIAQMQERFGAKGKVLVCLEHSRGALIYQLMAYELFELYPINPSQLANYRKTFFSSGAKDDRPDADLLSELLLCHRDRLRAWKPDDQLTRELASLNEGRRNAVDRRSELANEIKSQLKLYFPVALQILQNDITTALAADLLVQWPTLAELQKVSPGKLRKFFYGHNSRQEKKILERLALIKEAKPLTADLAIIRPMALRVKLLAQQLKSLLPFIAEYERRIAELFGSHPDRFLFDNLPGAGPALAPRLLTAYGTDRDRFEVAGDLSNLSGIAPVRIASGKKTGKNASVHCRRACPKFLRQSFHEFGECSIRYCPWAQACYQAQRNRGKGHHAAVRAVAFKWIRILFACWKQRIPYDPDRYLKALQNRGSQYAQTAA

SEQ ID NO: 395243 - protein, 361 aa, unidentified
MNTLPESEALVTGGVDTHRDLHVAAVIDEVGRILGTEAFAVNADGYEALLTWMRSFGTIGSVGMEGTGSYGAGLFRHLTEHGVTVLEVIRPNRQARRRRGKSDPADAEAAARAALCGEASGTPKARSGAVEAIRALRVARCGAVKASTQASNQLKDLIVSAPEALRARLMSLSTPKRVGLAIRFRPGTLEDPTEATKAAMRSVARRWVALQGEITELDRQLADVVTSAAPEGLLAKQGVGFDVAGALLVAAGDNAERLGSEAGFAALCGASPIDASSGKQVRHRLNRGGDRQANAALWRIVMTRMACDPRTATYVARRTAQGKTKREVIRCLKRYVAREIYRELVIEAQPVTAGFAPPLAA

SEQ ID NO: 395244 - protein, 461 aa, unidentified
MRNNRKSGDRPGSTRPIEGLPIVRAKVAGVDLGSERHWVCAPGLEGSGREVADFGATTPELVRMAEWLKERKVESVAMESTGVYWIAPHEVLEKDFDVLLVDTRQLARVPGRNKKTDPRDCEWIQRLHSCGLLNGSFRPQEQVCMLRTLVRDKANLVCESADWLRRMQKSLDQMNVRVHRAVSDLNGVTGMAIVRAIAAGERDARKLAQLRDRRCRQSKEEIAEQLSGHWREDHLFSLRQSLQMYDAIEERITAYEQEILTKLATMEVEEHPGGAVPPVKNLEKGKAIKKRGQEPKRQALYRMSGVDVTQIDAIGVETVEVVLSEYGPDLSRFPTEKQFVSHATLAPRVPKSGGKPVKHKKRNSASTRVAAALRMAALSLRHSATALGAYYRRLARRIGGDVAVFATARKLATLIYRLLRWGQPYVDEGVEAFEKRYRQQHIKGLAARAKELGYQLMPTKT

SEQ ID NO: 395245 - protein, 421 aa, unidentified
MSKHSDAGMQVLYARVCGLDVHKKVVVGCVRILDAQGVVHSTVRRFGTMTADLMELGEWLAQAEVTHVAMESTGVYWQPVFNLLERYFEVWLINAQHIKKVPGRKTDVKDAEWIAQLLQCGLLRPSLVPDRKQRELRDLARQRTKLVQQRNAVNNRIQKVLESANIKLDSVASDVLGASGRSMIEALIDGETDATVLAELAQRKLRDKIPQLQRALAGEVTEHHRFLLRELLDQYDFLEHKITRMSERLREVTPSPFRAAVEQLDPIPGVAERGAEALLAETGTDMSRFPTHKHFASWAGRCPGNQESAGKRQSGKTPAANRHLDAVLTEIAHAAVRKKGSYFQAQYHRVAARRGKKRAIGAVKHSLLIAVYYMLRDNQPYRDLGADHFSRVNPQQHIRYHVRKLQELGQKVELSPMADAA

SEQ ID NO: 395246 - protein, 370 aa, unidentified
MTYITSIGLDVHARSVSACAFDPFTGEVAQRRFGTDAGEIAEWIPGFESPKAIYESGPTGFALCRELRAPGVDCVVGAVSKMQRPSAEKRRKNDRRDAAFLARLLATRNIAEVWAPPVEAEAARDLSRALDDAREDLQRARRRLSKFPLRRGPVFDETDALGRRRGAWTRAFWRWAESCRPSDPAAAAAFDNYVACVRCAESDKRALEKRVLAEARADRWRGAVEALSCIKGIDAVTAFCLATEAGCFSRFPTAGAYASWLGLAPSEHSSGEKEAKGGIAKTGNSASRRALVEAAWHFKSCSPKPKAPPAGSAVPAAVKRRCDDATARLRRRHESLGAAGKRPCVANVAVARELACRVREVGRRAEGTLA

SEQ ID NO: 395247 - protein, 372 aa, unidentified
MQESSKIHVGLDVHKDSISIAAAEPGRMPGRLIGKVTHDVNKLFKVLTKVGNADQLHIVYEAGPTGFGLQRALQSKGYLCEIIAPSQIPRRPGDRIKTDGRDCVQLAECSRAGQLSAVWIPALEDEAIRDLSRAREDAVNTRVQARHQLKGFLLRHDVRYTGKTSWCGAYYRWLGTLNFGAGATQTAFTEYWQAVTAADDRVDRLTKALQASITGWRFEPVVAALQALRGIAAITAIGLVAEIGDLGRFAHPRKLMGYLGLVPSEHSSGQRTSRGSITKTGNAHARRLLTEAAWNYRFKARIGKQAQIRQQDLSEPIRRMAWTAQLRLTQRFAALSARGLQANKACIAVARELAGFIWAIGMQAQREQGQTI

SEQ ID NO: 395248 - protein, 420 aa, unidentified
MVYLERGYNLKELPWSKIVSNSFLFKEACMILVGVDVAKDKHDCYIMTSEGEVLFKSFTIANNMEGFNQLYEKILSVIDNFDNVKIGLEATGHYSYNILGYLLDKGLTPYVINPLHSNLYRKSLSLRKTKTDKVDSHIIASMLMSDVSLKPYSNTLYHNEELKSLTRYRFTKVQERAKLKISISRLVTILFPELEKLVPTLQMNSIYALLYEFPSAHAISKAHLTRLTNLLNTTSKGHYTKDKAVLIREAAKNSIGSNMPAKSLELKHTIKLIKELTSEINKIEEEIKIIMNKINSPILTIPGIGLSTGAQILAEIGDFKNFSSPDKLLAFAGLSPSTYQSGNMYSSNTKMEKRGSKYLRFALFNAAIYVSYWEPTFSQYLKKKRVEGKHYYVAISHVVKKLVRLIFHLEKTNERYSTVV

SEQ ID NO: 395249 - protein, 356 aa, unidentified
MKIVGCDLHARQQTIAMVDSETGEFTEKTLGHEGNAVRAFYAALEGPVLVGIEATGAMQWFLELLEELGIECRVGHPAKIRAQETRKQKHDRRDARLLLKLLSEGRFPEIWMPSSEQRDLRTLLRDRDQWVRMRTRLQHTLQAIALNHAMRQGRALWSARGRCTLEALPLPPYTSQRRSELLGLYAQLQKRIQELDQEVEAQTRQRPQARRLLTHPGVGPVTALATEVFLGDPSRFATANQVASYIGMIPCEHTSGKRQRLGKMTKQGNSLLRYLWTEATMHAVAKDPELKRFYRRKLIQKGMGKARIAAARKLGIRLWIMLRDQIDYEEFCRRGKRQGGEAHARMPDNNSGPALQ

SEQ ID NO: 395250 - protein, 333 aa, unidentified
MNEQAVGIDVSKKKLDICVATGNKFKSKVFANSPSGHEALNAWLQQRDIPVDTPVVVEATGPYSEAVAIFLADLGWSISVVNPARISGYAQSELSRNKTDKADARLIACFAQRARLERWAPPGLAVRELRALVDRLQALIDMRQQELNRLEALSQTSTSSVEKMVKEHVDWLNDQIKKIQSDIDDHIDGSPDLKNDAELMQSIPGIGRRASSQMLAYIGDVRRFKNAKALAAFIGVTPRLRQSGSSINKRSAMSRTGHVAARKSLYMPGLVAKHHNPVVVAMAIRLHARGLSPKAIVGASMRKLVHLIYGVIKSGMPFNAEIAMNGLDLQEGI

SEQ ID NO: 395251 - protein, 387 aa, unidentified
MPQPNDLSRSLVALDQNSTIIAVVELSHSSWLVGGVVPGIERQPRKKLEPHPERLLALLHRWRDEAVKAGRTITRIALAFEAGRDGFWLARWLETRGVEAHVIHASSLAVSREHRRAKTDRLDTELLKRGFLGWLRGERGHCSMARVPTIAEEDAKRPNRERDCLVGERTRIVNRIKSTLARLGIRNFKPTLRKAAERLATVHTPEGTPLPPNTLAELQRDMARLGVVVSQIRQIEEARQKRLEQQHETGPHAMVRLLARIVGVGVETADMLVHEVLSRPMRDRRAVARYAGLTGSPDESGAQRREQGLARAGNARVRRGMIQLAWRFLMFQKESALALWYRARTTDSRRGTRKTMIVALARKLIIALWRFVTTGEPLEGVILRPAS

SEQ ID NO: 395252 - protein, 357 aa, unidentified
MDGSKGQPKVTAGLDIGDKYSYLCLIDQENGEVMEEGRLRTTPEAFRRRFASEQPMRIAIEAGTHSPWASRVLKECGHEVLVANARKLKLIYANKRKTDEIDAENLARLARVDPKLLYPLKHRSEDSQALMAIIRSREALVSCRTQLVNHVRGAVKSFGGRLPKCPAASFHNKAPEHIPEALRPALGPVLEQIGSLTERLREYDHQLETISKETYPETELLRQVEGVGTLTALTFVLTLEDPYRFEKSRSVGAYLGLVPAKDQSGDRDPQKRISKEGDEMLRRLLVSGAHYILGPFGHDSDLRRHGEKLTSRGGKNSKKRAVVAVARKLSVLLHSLWVSGELYEPLRNTHRSRGQAA

SEQ ID NO: 395253 - protein, 327 aa, unidentified
MIAQSTSVSPVCYVGADIAKDTIELSCLHFTVPPSIKNNPEGLGTLLKCLAKSKQNVHVICEATGHYGKALVEALHQAQIPVSVVNPRQVRDFAKCQNKLAKTDKIDAALLADYGRLMPQAPTPKPEQHLVVLDELAKRRAQLVEVKAKEQTRLKTVTSPKIKKTINDLIKYLDELIDSLNSDIKDHIQAHPDLKKKAEVLGQVEGVGPATTITLLASLPELGKSDKNGITALVGLAPFNRDSGQFRGHRSICGGRYEVRNALYMAALTTVRYNPILKAFYQSLLLKGKAKKVAQVAAMRKLLVYLNSLLKNHYKEEALRSAVLAVQ

SEQ ID NO: 395254 - protein, 349 aa, unidentified
MIWIGVDAHKQVHEALALGSEGVVGQQRIPNTPQAWAALLAWARQWPERIWAVEGAGYLGRGLAQYLARQGERVHEVNGRWTARRRRGMRTPGKSDRLDARSVATLLREEAATLPRVYAEDDELAAAQLWSRTQAELTKDLTRLVNRLHELLLQCDPEYKTTLPDLTTKAAIGALRQYAAPGAGTLAREREALIRATAAQLALLDEQDRELRRKLERVSKTRFSPLRQIEGIAAIIACAIVAEVGRPRAGFGEEQLAALGGLCPLEASSAGALRHRLNRLGNRRLNMLFHQIVLTQARIYPPARTYLLRRQSEGRTPREARRALKRLIVRRVYRSWRECFDIISARVAA

SEQ ID NO: 395255 - protein, 402 aa, unidentified
MDTSLLVAVDVGSRFHQVAVDDTFGRLLDEFRIDHDPAGFHTFFERVERHRAGPEQPVRVAMEGYNGWARPLDRQAQERGWQLYNVNNLKLARYKEIFPAPAKTDAIDARRMLELFAFDGRQGVARDVLQRVAAVPVEHRRLQYLTRRRRGLVEERAGRLTRLRCDLQAYAPGLPAITGSVGNRWFLNLLTCRERLTALVRLRAKTLAGLRGVGRCYLARIRQWQRTACFSPDIAFAEVDVVDDARAILALDARIGVLDAEIAQVSAACEPARILRSIPGFGATGAAELIGEIGTLDRFRSEAGLALYLGMAPLDHSSGLHVRGRRPRCVNARCQAALMTCVVRHMACVADSRTYYDRKRAQGKRHNQAVRALGRQLVRVIWHMLRDGREYQLTTTHEPTAT

SEQ ID NO: 395256 - protein, 343 aa, unidentified
MLYIGMDVHSKWMTIKGFNPDTADTFVVNRKAIDEQSLHEYFSSLNEELHGVMESGTNSWAVYRILEPYFERLIVVDPATVWGKDVRRGAKTDGRDALGLAMKMQRGELSPLYVPDVKTQDLRALTRAKINASRHVTKLVNELGSQMRSWGIIIDGSLLSVKGQMIIEQSKATLPEYSLIVLEMWLKMLKMAQDVEAELEKKVEIESAKDEVCQLLMSIPGVGPLTSLVVKAEVGDINRFSRPEQLINYCGLCPSVRQSSEHIHYGKLSRLCNKFLKYVLILRAQGMSRSKTYTPMRQTYWRVIVKGKNHAKIAVSRQLARTIYSMLKNRTPWNPDKTTHRVS

SEQ ID NO: 395257 - protein, 405 aa, unidentified
MEIFVGIDWAEAHHDLCVLDGAGTVLGKRRIAEGLEGVSQLHALLADHAAEPNQVVIGIETDRGLLVTALLAAGYQAYAINPLAASRYRERHVTSGAKSDPGDAKMLADLVRTDRHNHRPVAGDSELAASLQVLARAHQNLIWSRQRLTNQLRNNLREYYPAALAAFGTELAHPVALGVLDAAPTPALGRTLSQSKLTAILRRSGRERGVEEKAAAIQAQLRAPQLAGPALVGEAYGKSVAATVRILRGINGELASLEAELAPSFEKHPDAEIYRSLPGLGIVLGARVLSEFGDDRTRFAHPKARKNYAGSSPITKTSGKSRVVLARLARNRRLADACHQWAFCALTSSAGARDYYHRLRQRGKTHHQALRALANRLVGILHGCLDHRQTYREDIAWPRSLTVAA

SEQ ID NO: 395258 - protein, 319 aa, unidentified
MEQITTVGIDLAKNVFSLHGVDAAGKTLLRRTVRRDRLAETVAALPPCLIGMEACSGAHDWGRRFQGHGHTVKLMAPKFVAPYRKSGKNDGNDAEAICEAVTRPSMRFVPLKSVEQQALLALHRVRQGFVVERTALINRLRGLMSEFGQVLALGSVTVRRQAAQAAEPLPELARGAIGDLLEQLRVLDERIAKYDKQIEAQARLSEPARRLMQIRGIGPTTALAIVATIGDAREFKNGRQFAAWIGLVPAQHSTGGKSRLGHISKRGDAYLRNLFVQGARSVLQVAGAHQDRISRWALETSSTPGRRTPRRWSGSTGTA

SEQ ID NO: 395259 - protein, 404 aa, unidentified
MDEPSAGIDWASEEHALCVVDAAGGKLAGELFSHDEAGIRRLVARMRSLHVGRVAIERPDGLLVDRLLEAGFTVLPVHPNALKATRPRYEAAGGKSDGFDAFCLAELARTDSHRLRSLAPDSDETKALKALTRTREDLVKARVRLGNELRAQLQAFWPGAAEIFFDVDSSIALAFLERYPSPADARGLGEKRLEGFLARHRYSGRRPAAELLGRLRSAPEGRAGALESEARRGAVLGLVAALKPIVAQIAELTSQIAGAVRAHPDGQVFLPLFKDPKSTITAARLVAEIGDDRARYPSAEALAADAGMSPVARESGKRKVAAFRWACDKRLREAVACLADSTRHHHPWAREVYARARSRGLDHPHAIRVLGRAWLRVLWRCWQDEVPYDPTKHGNFRRLEPAGG

SEQ ID NO: 395260 - protein, 464 aa, unidentified
MKVLGIDPDAGGFECALVESGIERPRCRRYSVSARGLEEFVRWAQTEGPQIVAVEGIHGQSEPIEKALRKAGVVCYSLVARRVEKYRKAVLGENKNNQRDAEAVAAYALSLKEQGRLERWRGVWEPDEELRLLTRRHDSAGKQINGETNRLWKLLRAASGDLYLALGGGGQEAEGAPGMLENKGILRLLATEPQIGRWKELSEDALMAAMGGGEYRGRRQLLQGLRPAMGTVKRLSESMQAVIRGIAGHLVGLRQEQGQIESLLGRLGEDRPAVLALDRRPGIGGLTACKIAAEIIDIRRFPSESNLASYSGLGRVEFKTGNQERERAACGYNRRLKDALMTAARNVVRFDPDSHLAGYDRWLLRRGMEPQEATKRVARALVRVIYRELKALVDPRPSPAKGPRQASAPANRCTRKQPRRAPRRSSRRGDPAHQTSQAKRTPRVTAHSSTEVRKRRRVRVKESA

SEQ ID NO: 395261 - protein, 370 aa, unidentified
MKNIVYIGMDVHKETFNLCALNGATGEILGEARCASDVKLVKRFIDKIAEKYEEEVQFKAGDEAGCLGYFLHNLLEQHGINCDILAPTTMYSSSKNKVVKNDCLDAKMIALNLANNTYKAVYVPDDEDVSVKEYIRMMDDFKTSLKKIKQQIKAFLLRHGLKYEGKSSWTIAHINWLKNLELTGLLKETLEEYLLQYDVLTDKIERFSQRIEELSHQERYEEPVGQLRCLKGIDTTAAMTIHVEISDFTRFPNAKAFTAYLGLTPSEKSSGEKANRSGITKQGNSTVRSTLVECTNALVKGTIGIKAKRVKARQKGQESKVIAYADQAIERLQRKYHRMIYQGKPRNVAITVIARELSCFIWGMETQKMI

SEQ ID NO: 395262 - protein, 355 aa, unidentified
MGTYYVGMDVHSATIVMVVLNGVGKRVMESVIETSAESVRSFLKQPRLRGEVYATFEEGNQAAWLYDVVRPLVSNVVVCDPRHNKLLQAGNKSDRVDARKLAQLLRNGSLHAVYHGNKGVRTLKELVRNYDSLVSDATRVMNRMKAIYRGRAILCRGPEIYRGDRREKWLNKLSEPGARQRASSLYAQLAELNRLRQEAKKEMLKEARRHPAYQLLLSMPWLGPISVAQIIAVVGTPFRFRSKRQFWTYVGLAVVTKTSAEYVMVDGLVRRSLRPVTTRGLNRNHNHLLKRVFKQAATSACADGPFKSAFEARLAQGMDPSLARLAIARKLAATTLAIWKRGEQFSPERMKQQVA

SEQ ID NO: 395263 - protein, 353 aa, unidentified
MAIVVALDVHRKQITYKTLDRETGEVERGRIAPAARAEVRAWLARFAGCEAEFALEGTTGWRFVVEEIERAGHRPHLADPAETAAKRGRKRRAKTDSADCDLQLRLLCAGELPESWIPPAHILELRTRVRMRKTLIDQRTAWQQRLQAQLFHQGVPAGLRPRTRAGREALARAELSPVGRELVSLALRMIETIDRELAPLDRDLHAFARRQPGCRALIARLYGVGPVSATAILAELGDARRFARSDDAVRHSGLDVTVYQSDVKRAPGHLSHEGPELLRWALFEAALSAARAGSPDHAYYLQVAERIDHNRACLSVARKLCRRAHHILRELGDEALAPVEGDPHAEEAIAAAA

SEQ ID NO: 395264 - protein, 424 aa, unidentified
MHLTALTPSTAPATVACDIGASTINLVCRELSAPGARAEWETRNRTEPITATLLAIREQALRRGITELRVVVEPTGRYHKLILRIARSLGFQTALVDAGHVNKMRAVVFGDEGKTDERDPYVIDAVAAQGRLIADRCHGEVYQLLRQWGKLYHDAEAALIEAKSRVHCALTVLFPDFDFSTDFLYGTSGQAIVRCFGLDPHVIARANASRIFDRLREYSTIRRSSVVRLLDQARQTVVAISKSRATDLMAHELALAWEDFELALRRRQNARIELESLYDEARLADRLLPDPTGSPVSKIALARLLGEAGPLSAYASWRQLYRMAGVNLRERKSGRYVGQTKISRAGRPLFRAIVNQMALPLVKRDRLYGSYYHHKTGVQKMPGAKAMTAVGRKIVKMIWGWYRSGAAFDARRALTGEGEYRRAA

SEQ ID NO: 395265 - protein, 321 aa, unidentified
MSVESFVGIDVAKDHLDLAVRPTREQWQAPTSAAGLADVVSRLQAIGPTLIVLEATGGLERPLVRALTAAALPVVVSNPRQVRDFAKAAGRLAKTDALDAHVLAHFAEAMRPPVRPLPDAHAQELSATLARRSQLREMLTAEQHRQGTAVPSVQAQIQRHCEWLREEITALDAEIAARVQADPTWTETEKRLRSVPGVGRILATTMLADLPELGHLDRRQIASLVGVAPLNRDSGRSRGKRTIWGGRARLRAVLYMGTLVATRFNPVIRAFYQRLCTAGKAKKLALTACMRKLLTILNAMVRHQTSWHPPGEALGGAPPSA

SEQ ID NO: 395266 - protein, 405 aa, unidentified
MGKVFVGHDWAETHHDVYVEDGAGQRLGKARLDEGVSGVARFHELVSSFVVDPGEVTVATETDRGLFVGALVAAGYRVLAVNPMSAARYRERHSTSGAKSDPGDAFVLAELARTDGHHHRPVAADSELAEAVKVLARAHQSMIWTRQRQVNQLRSTLREFYPAALSAFDDLASSDALAVLALASTPSLGRGLSRSKIASALRRGGRQRRIDERAAEIQTILRADTLQAPGPVAEAMGASVRALVAVISEQVAQTARLEAELADHFELHPDAKIIRSLPGLGMILGARALGEFGDDPNRYTDAKSRKNYAGTSPITRASGKHHVVLARHARNRRLADVCYQWAFAALTASAGARAFYDQHRAAGDTHHQALRALANRLVGILHGCLRHRTPYDEHTAWGHRTAAAA

SEQ ID NO: 395267 - protein, 347 aa, unidentified
MKVLIGVDPHKTSVAVAAVDEAAGELVERASFPQDRAGLRSLERWARRFPERRWAMENARGFGRHLAGRLAATGESVVDVPPKLSARVRVLSSGNARKNDGLDALATALAASRNKRLAAVDPEADSEVLRLLSERREDLVAERTRALNRLHGLLRELVPGGVAGKLSADRAARILRGIRARGGASDRLRRRLASEVLRDVRTLDRKIADLNARVEAEVEASGSTLTEIFGVGPILAATILGTVGHVGRFPTKAHFASYAGTAPVEASSGKVVRHRLSLGGNRKLNYALHMAATSQARSNAPGGSYYRKKMAEGKSRKEALRCLKRRVSDAVFRSLVADSQAPSRNAA

SEQ ID NO: 395268 - protein, 426 aa, unidentified
MNYKQNDKINQVNEFTLVVGADIAKHNHYARSVDFRGIELGKPLKFTNLDEGFQGLLQWIQQLMKDHQKLNVMVGVEPTGHYWLSLAEFLRSEGIPLVLVNPMHVKKSKELDDNNPTKHDLKDALVIAKLVKDGRYSVPHLPEGIYAELRNGMNLRERLSQEITRVQGRIQNWLDRFFPEFTQVFKDWQGKAAHLTLKHFPLPQDVVGMGVEKIVEAWKKEVKRAVGLKRAEHLHQAAKKSVGLTTGTRMARQELQSLLRQYDLLMEEMELCMKEIEVILAEIPGVPKMLTIPGVGLITVAGFLAEVGDLSHYKHPRQIQKLAGLNLKENSSGKHKGQTRITKRGRPRLRALLFRCILPLVAKNEDFKALHREYTTRSVNPLKKKQSLVALCCKLIRILFALGRKNESYDSSKWRQPQTQTQQNAA

SEQ ID NO: 395269 - protein, 344 aa, unidentified
MKITTVGIDLAKNVFQVHGVNEFGKTVVKKQLRRDQVAEYFVNLPACLIGMEACGSAHYWARKLQGFGHTVKLMAPQFVKPYVKTNKNDAADAEAICEAVARPNMRFVPIKNVEQQAVLALHRVRQGFVKARTAQANQIRGLLGEFGLIVPQGIGYIATRVPELIEDASNELPGSFRVLVQRLLDHLKELDRQVGELEVQIQTWHRSSEVSSKLAKIPGIGPITASALVASIGDAKSFDSGRQVAAWLGLVPKQHSSGGKQNLLGISKRGDTYLRTLLIHGARSVIYRADQKPESCSWINGVVNRRNKNVAAVALANKNARIAWALLAHEREFRSDYTTANAAM

SEQ ID NO: 395270 - protein, 334 aa, unidentified
MQATTIGLDLAKNVFQVHGVTEAGEIAFNRSLRRAQVLTFFEGLPPCLVGIEACGTSHYWAREIARLGHEVRLIPPAYVKPYVKRGKSDAIDAAAICEAVTRPTMRFVAIKTPQQQELLALHRVRDLIVRQRTQIVNMLRGVLAEFGIVVRQGAGHAIAFAKHCLEGVEQGLPDLAQDIVTNLCHQLVALHRRVLWYGRQMNRAAAKDERVSRLRTIPGVGPITASAIVASIGDGHQFSSGRSFAAWLGLTPLNRSSGGKERLGRISKMGDRYIRRLLVLGMTSRIKQIQQRPEQFDTWLSDILERKPPKLAAVAMAKKTARSIWAVLTREQPS

SEQ ID NO: 395271 - protein, 397 aa, unidentified
MIAVGIDISKAKSTVAVIDSDGTVLASPFTMAHTQPEMEAFVTYLKGLGEPTTILMEYTGHYHYPVLKKLQDEGFPVCIVNPYQMKKYGDVEIHKAKTDKKDALRIAAYALEKSYKLVPYSSMEQKYEDLKFLSRQYSQRITYVAKLKVQLIALLDQTMPGITRILPLNSRNPEKCALLLFIKRFKSFDEIHRIGKARFLASYDVLAKKASERSASSKGLSIYELAVDSITTRGEDPYIWLSQNQCVDLLSATQNAADEIISQMRNIAETIPEYKVLRAMRGVGDRLGPIILAEIVDIRRFHSGKALNSYAGNDAPPYQSGQFESRNRHISKRGSSALRKACYEVMQALKLTKPQDDPVYLFMLKKEQEGKPFNVAKMAGVNKFLRIYYARAMELYK

SEQ ID NO: 395272 - protein, 362 aa, unidentified
MFRPHTLYIRIRIVRKVHEPVFAMRDQDVSDVIKTKNRTAMQYIGIDVSKATFVVAYSSDKGGEIRTFNNTTAGIRQFIGTLPKDGSIHCVMEATGNYSALLLYMLNVAGITVSMENPLKVKNFARAMLSTVKTDKIDARLIALYGEKMNPQPFKVQGEAILRLRQKRTVIRQLTKQITAMSNLRGSLACLPVPDKGATHTVDETIKFLEKRRDRLQSELTDLVEVEFSRQLALLTTIKGIGITLATALILTTGGFTYFQNAKQVSRYLGICPTYEQSGTSVNIRGHINRNGDAYTRGLLYIAAWPASRFNAQCKETYTRLRQNGKPGKLAMIAVANKLVRQAFAVVAHDKEYIDGFVSNRP

SEQ ID NO: 395273 - protein, 337 aa, unidentified
MDMYVGLDVSQRTTSICIIDASGQRTWQGTAPTEPAAIVDMLRAHGAGEARVGMETGPLAVWLYHAMRQQGVNIDCIHARHVHAALTVQLNKTDRNDAFGIAQLVRSGWYRATHVRSLECHQVRLMLTVREKLISLRTATNNQIRGLLKTFGVVLGAGKNRVFETSVQDADPLRDGIKPVIGILLDTWRHLTTKIRELDRSIQRQVNQDSVCRLLMTVPGVGVITAASFRTAVDDPSRFKHVSDIWPFLGLTPRKYQSGEVDRNGTIAKQGNRQTRSMHYEAALARLKRYGKETNLAQWGAKLERRMGLRKAVVALARKLATVLLSMWRSGEQFRCA

SEQ ID NO: 395274 - protein, 328 aa, unidentified
MDYYIGIDVSLELSSICIVDATGAVLREAKIQSEPAVIVEFIRSLQLPIARVGLEAGPLSQWLYDGIAQGGYDSILLETRHVKAALSAMVIKTDRRDARGIAQLLRMGWYRPVHRKSTSSQEMRALLAARRQMQAKAIDLEQTLRGLLRGFGMKLGDVSRGKFAARIRELTAGHEMLTKITEPMLSARDAIWREFAKLHREVLAFVKAHETCRLLMTAPGVGAVVSLTFRATVDDPSRFAKSKAVGAFFSLTPKRYQSGETDVVGGITRVGDASVRSALHDAANVILFRVTRFSTLKSWARQVAKRRGMRRAKVAGFLECWMRPAWRT

SEQ ID NO: 395275 - protein, 449 aa, unidentified
MDGSLSPINPNAAGIDIGADRHWVSVPVGRDNENVRSFACFTADLYAMADWLKQCKIETVAMESTGVYWLPVFQILESRGFEVKLVNAHYVKTVPGRKTDVLDCQWLQQLHTYGLLSGSFRPEDQICVLRSYIRQRDNLIKSACVHVQRMQKALTEMNLQLHRVISDITGTTGLSIIRAIVAGERDPKVLAAKKDGRIKASCEQIAAALTGDYRPELVFVLHQELQLYEFYQVQILAVDAQIEQSLASFADKVDVTTKPLAKPKRRGKKQPGNAPQFDLRTHLYRISGVDFTQVDGFGALTVLVLLSELGLDPSRFPTVKHFTSWLGLCPGSRVTGGKVKSSKTRNVVNRAANAFRMAAQTLCRSHSALGAFYRRMQSRLGAPKAITAAAHKLARIFYRLWTSGNAYSDPGIDAYEQQYRDRILKNLQKKAQAFGLELIPISNATECVS

SEQ ID NO: 395276 - protein, 428 aa, unidentified
MKYNTQNAKIASINEKTLIVGIDIGSETHFARAFDWRNYEYTRKPFEFSNNEVGFQTFKAWIEELQEKNGKTVVIPGMEPTGHYWFALGKFLQDNGMKPVHVNPHHVKKSKELDDNNPNKNDRKDPKTIAGLVNEGRFSYPYIPTGIYAEIRSLSNLRFQAQEELTRAKNRIARWFTIYFPEYKDVYRDLKAVSGRLVLQAAPLPEDIRKLGVEGVNRIWRDAKLRGAGMKRAKILVSAAEHSVGSKEAPEAARMELRNLLNDMDVYASRVEELLGMIGEKLKEIPYIDQLMAIKGVGVITVSGFIAEVGDIKRFDDPKQLQKLAGYAIVANQSGKHKGESRISYRGRKRLRYVLYEAALSLIGRNPEFKAIHEYYRTRRENPLKKMQSVVAVACKIIRIFYVILTKGVDYDPAKMLGDIRRPQIQAA

SEQ ID NO: 395277 - protein, 347 aa, unidentified
MRFYTNQHKYYCGIDLHTRKMYVCILDEKGEIREHRNMKTDRDAFLKAIAPYREDIVVAVECIFTWYWVADLCHKEGIPFVLGHALYMKAIHGGKAKNDKIDSQKIAVLLRGGMMPMAYVYPAKMRATRDLMRRRNHLMRKRSQLYAHIQNTNSQYNLPDPFGPISTHRNRDGIAEQFEQPSVQKSIAVDIEMIRTYDGILLQLEKSIIKLANNHDPVSYALLQTIHGVGKIIALIILYEIENIRRFASVQDFASYSRLVKCAKESNGKKCGSGGSKIGNAHLKWAFSEAAVLFLNGNEPAKKYLDKLANKHGKSKALSILAHKLGRAVYFMLKNKEAFDQNKLLNL

SEQ ID NO: 395278 - protein, 388 aa, unidentified
MTATADTAIRTDDSVILASFELSQSSWIATIRLPGSQKMSRHSFKAGDTAGLLERLVREQAKAERLSGQPVRIVTVYEAGLDGFWLHRWLCDQGIESHVVDAASIAAPRRKRNAKSDGIDGETLLRTLAAWRRGEPRVCSMVVPPTPEQEDERRVSRERARLLQERTALTNRIKGLLTNQGIRGFNPLKRDARARLAELRTGDGRELPQRLADEISRMLCRIEMLVAQIREVEAERDELLAQAAAQNRVSPMALLLTLVGIGPEIAAGLGLECFCRSFANRRQLGSFVGLAPTPWRSGSIQREQGISKAGRPGLRKLMLEAAWLWLRYQPDSALSRWFRAKTANATGRAKRVAVVALARKLLVALWRMVTDGAVPEGAKLKPAAAAAA

SEQ ID NO: 395279 - protein, 383 aa, unidentified
MRRAGGRATERSEVALPPVTDGRSMATRTTESAAKQDRRRSFGSSPNSRLSRRGPHVPASSHLRERVLSMELSSFVGIDIAKRHFDVQISPQKKFLSLPNDSAGIAQLITELPPPGTCLIVMEATGIYQRPLVMALVDHGHHVAVVNPRRVRDFAKGLGILAKTDRIDAQVLARFAEQNRPRTLEPSSEKQAEIQELVVRRRQLTELRALEKQHQETVTLKGVYRNIQKVVDGLNKRIAEIEQQLEELLESDETWQQRAQILGSVPGVGKVTIFSLLSQLPELGQLNRNKIASLVGVAPFNWDSGKNKGKRRIRGGRAELRSVLYMAVLSARRVNPVIKAFAERLKTAGKPYKVIAIACMHKLLNILNVLVKTNALWNPKYAS

SEQ ID NO: 395280 - protein, 336 aa, unidentified
MSKLLKNFVGVDISKTWFDAAIIKADYTSQSMHNQFSQTCEGFKKMVTWLQQQGVLLNTETLFCMEYTGIYNTGLVNFLVEQKAQLWVEMPLRIKRSSGFERGSDDKTSAIKIAGYAFRYQDKMQLWRPVDSCIQKIKNLVAQRDRVINAITQLRVPVKELSQCGCNKEAKELEKLQRSPLKALQKTKEAIEQLIVKTAQQDVEITKKIQRVQSIKGIGQVTAVTLLSYTKGFTNAKELACYCGVVPFAKRSGISIRFKPTVSPHANKKLKKLLHLCALSAIRYDKEIHAYFERKVAEGKNKMSVINAVRNKLVHRIFAVIRDDRSYEENYVRKCA

SEQ ID NO: 395281 - protein, 420 aa, unidentified
MELVVERCAGLDVHKDLVVACVRHPGPDGVRKTEIASFSAFTADLLALRDWLCSYNVTRVAMEATGVYWKPIFYVLEDAMECWLLNARHMRNVPGRKTDIADAEWICQLTEHGLVRPSFVAPKEIRDLREFTRYRRTLAEERTREAQRLDKVLQDAGVKLSSVASDVLGASSRAMLAALVEGTRDPAVLADLAKGKLRSKLPALRTALEGRFGPRHAVLVSEILSHLDYLDEAIGRMTSAIEEAIAPFAEARDRLCSIPGIDRRIAEAVIGEIGVDMGRFPTAAHLASWAGMCPGQHESAGKQKRGTARHGDSWLQRHLAVAAMAAVCSKDTYLRAQYRRLSPRRGKQRARKAVGHSILVACWHVLASDDATYLDLGPDWFDRRNAPAVRARRKLSELRALGCQLYVNDDGTTTVVLPAA

SEQ ID NO: 395282 - protein, 325 aa, unidentified
MQTETNYTGIDISKSFFDVAIPFEEKYRHYKYSNDEAGFKALLKVLPQQVHIVMEASGPYYLRLAYFLTAQQIAVSVINPLVIRRFSQMRMSRTKTDKKDAVMIAEYGKTEKPAIWKAPEQHVIWLQQREAVLSNLMKERTALLNQLESFTCSGMLDKALKKTLTKALGYKEELIAQLNKEMEELAGRHYSEMLKDLESIPGMGKKTAMALIVLSGGFDRFDDYRKLSSYIGICPRLFESGTSVKGKSRICKMGMSRIRAMLYICSWSAKRYNKACKELYERLVAKGKAKKLALIAVANKLLKQAFAIATQKTKYNENYSNIICF

SEQ ID NO: 395283 - protein, 353 aa, unidentified
MIIIGVDFHPEFQQIASVDTDTGEFQEKRLVHREEAENFYRALAGKKVRVGMEASGHARWFERLLSELQLELWIGDAAEIRTKRVRKQKTDRQDARLILQLLLEDRFPQIWVPSWENRDLRQLLWHRHRMVQARTRIMNQLQAVALNEGLRCKKRLWRERGRQQLESFRLAPWASRRRRDLLELLDRLNPTIAELTQAIEQEAEKCPPAQRLRTHPGVGALTSLGFVLIIGEAERFSCGKQVASYLGLVPLEDSSGNRRRLGHITKQGSSILRFLLVEAAQVTVRSLPEWRRKYFHLAMRRGRKIAKVAMARKLAVSLYWMWRKGWNYEQLTKFGSQGRKSGSHAGAPTDSTR

SEQ ID NO: 395284 - protein, 373 aa, unidentified
MNLIQYVAMDVHNDSNAISVAPSDSTEVRRWGIIGGTHEHVQRLIKQLQAAHPEATLKFCYEAGPRGFPLVRFLRGLGHECIVVCPSRVPRRPGDRVKTDRRDADQLARLFRAGELNGIHVPEPEDEAMRDLLRSRDQVRRAQHRARQQLKMFLLRHNMRYAGTTSWTPAHLRYLARIKMPFPAQQFALQELMNAISEAGARLERYDAQLEREVAGWRWEPVVRALMSLRGMGLLNAATLVAELGDLRRFTRPAQLMSYLGLVPSEHSSGNERQQAGLTKMGNGYARRALVEAAHHYRVPARLTPHLQKRQEGLPKGVTQAAWEAQRRLHYRYKQLSGPGRKKAPVVMAAIARELSGFVWAIARQVQPHEART

SEQ ID NO: 395285 - protein, 428 aa, unidentified
MRKQKLIRHKQYCQIVKEITRSDQYMVVGIDIGKDQHHAFMGTATGKSLFRKLIFENNLEGFSKLLKTSDLIKNRNNLSKVVYGLEPTGNYHKPLARHLIRCNSNVVLVSGEAVNKNRSLLDGRWDKHDTKCAANIADLVSRGRCLYYDSPSPGIIELRSLLSLRKRLKKEEHSLRMRIRNNLLAQYFPELDRFYSACESESLAIVKWCLEPDQIAGMDFEPFFQMVARTRRGTAQLLRLRKIYQQASESIGCPMGSAAAFEAQLLVDKLEQVRQQLKDTEAAIKDVALEFDEYRYLLTIPGFGLYISSSVIAAIANPFRFKNRKQLLRMAGYDLCAKRSGKTSDNAVPVISKKGNSNLRYALFQAAKIASGRTEVFRNYFAEMLRGRERERGIITKMRVKLAAKMLIIAWTLMKNKEPFDPAYLTIE

SEQ ID NO: 395286 - protein, 313 aa, unidentified
MIHDIAVVGIDVSKQYFDIHIHPTGKSFRCGSSPDEIAQLARRLRELGPVAVGLEASGGYESRLADGLHAAGLEVYVAAPARVRGFARAIGQLAKTDRIDAAMIARYLMAVRSNLTPHAPDPSCRRLSAIGAHRRRLLAEKSGLVSQLDTIDEPLVRDLIEERLRTIAQDIATLDAAIGDVLAQTPRLRKSHARLRQVTGVGPVLATALLADMPELGKVSSKVAAALLGVAPYARQSGASDRNGRCAGGRKHLRDIAYMAVLSAIKVRDPVLGGFYQRLRTRGKPFKLAMIATVRKLITILNAIARSDPAFQQ

SEQ ID NO: 395287 - protein, 367 aa, unidentified
MKKHTTMNKPVSATDVSVCTTVAVDLAKKVFQVAGEDAQGQLAYEQRIKSREAFQVFLQKLPEGVTVLMETGPGAQAWARLLQAQGNPVRILPAQRVAEHRSGAKNDRNDAHAILRAGRDSSIASVPVKSVAALAMQAWHRVRRGYVRRRTAMGNQIRGLLLEQGVVLAQGDVGLKQGVTRVLEDARQPLPALLRELIDEMLKEWQRLGERIAALTGRLEACAAADPTAKRLMTVRGIGPITATALLAKQVEPERFANARQFAAYFGIVPDQHSSGQKVRLGKMTKRGDAYVRSLMVVGSHAVLKQLRPDSEHPDDRRLQRWLQRLGRKGAAVRLANRNLRIAWVLLCSEQTYQRKPNACREMEMSH

SEQ ID NO: 395288 - protein, 365 aa, unidentified
MDNYIVSCDAHKRYSLFGTLDLNSQARAHSRVEHARGAIRTFLAKFPEGTPVALETVGNWYWIVDEIEAAGCLPLMANAGRAKLMMGHVDKTDKLDADGLLTLLQVGTLPTVWLPPGPVRDTRELYRTRMALCKERTGLKNRVQATLAKYALSVEDETDIFAGKGRKQLELTIQSLPAETGRCVQQELQVLDYLQKQIQAMEKGIRECVKLTPVMQLLKTLPGVGDILAIVIALEMGPADRFGRAEQFCSYCGTVPTVKSSGDVTRYGHTRQQCNHYLKWAFFEAANVAARHRKSRTWCDRHVVRLYERVRKHKGHGVAIGAVARHLSEAAYAVTLRSEPYREPNPRRACPSRGKREAKLAPREP

SEQ ID NO: 395289 - protein, 323 aa, unidentified
MSSKATKKRRSFIGIDVSKQLLEVGVYQSDYHFQCPNDPKKYSTLITELISLRPARIVLEATGGLERPLLQALQTIGLPVVVINPRQVRNFAKALGLLAKTDRLDARVLAHFAAAVQPPVSPIKTQQETELDALMGRRNQLTEMLTAEKNRRGSAATKTTRHDIEEHIEWLEERLKELDEKLKQQLECSAVWQRKDQILQSVKGIGFVTSMSLLADCPELGQLNRHQMAKLAGVAPLNRDSGKQRGTRHIYGGRAQVRCKLYMATLAAIRSNPVIKSFYKRLVDKGKLKKVAIIACMRKLLTIINVMVRDNKLWNVKAQPVAA

SEQ ID NO: 395290 - protein, 436 aa, unidentified
MERINLHAAGIDIGSASHFVAVPEDRDDKPVREFAAYTADLYQLADWLTACGVKTVAMESTGVYWIPLFQILEERGFEVRLVDARRVKNVSGRKTDVSDCQWLQQLHTYGLLTSAFRPDDETCVLRSYMRQRDGLVIQAGQHIQHMQKALELMNLKLTEVLADVTGTTGLAIIQDIIAGKRDPKELAKHRHPRCKHDEETIAKALTGHYRAEHVFALRQAVAQYQQCQTLIGECDGELERFLVEHGPDDAGQVPPPERPSSRSKNALGFDAHAHLFRLTGVDLTAIPGLSTASVLTLLAETGVDMCRWRSAKAFASWLGLCPNNQVSGGKVLASRTRACVNRAARVFRMAAYGLHHAKSALGAYYRRIRTKLGAPKAITATAHKLARLFYSMLKTKKSFADIGQEAYDQVYQARRLKGLRRVARELGFQLVPCEAS

SEQ ID NO: 395291 - protein, 355 aa, unidentified
MTSTKYIGLDVHKESISIAVLNFAGKVVMECVIETKASTLLQFIHGLRGDLHVTFEEGTWAGWLYDLLKPRVTELVVCNPRKNALLKEGSKSDRIDARKLAELLYMSKLSSVYHGEHGLRMLKELSRSYLTITKDLGRVMNRLKALYRGWAIPCAGTQVYAPHYRSEWLAKIHEAGVRRRAELYYQQLDALRLVRQQARKELLAEARKHRATKLLRQIPGIGPLRAAHLVAVMQTPHRFRTKRQLWTYSGLGLETHDSAQYRVVEQQLQRSKRPVTLRGLNDNHNHDLKDIFKGAAMRASTAAGPLRDFYEALLAKGRKPTMARLTLARKIAAITLIVWKKEVRFDANYLKQQAA

SEQ ID NO: 395292 - protein, 362 aa, unidentified
MGTITMGVDLAKQMFSVSELDGGGRVRQRRDLKRDAFAAWLVQLPPGTVVAMEACSGAHHWARRCLEHGLVPRLMAAQFVKPFRQSQGNKNDRNDAEAIATAARQGNMRFVAVKAMDQQARLAWHRVREGYKAEGLAISNRLRGLLAEFGLLVARSDHALRRALGDEAVRQQLPAMLHRLLDDLQQHWQEVRERIAACDAGIAAHAKADVRSQRAQQILGVGPLTADALVATVGDGRDFKHGRQMSAWLGLTPTQHSSGGKQRLGHYSRGDGYLRTLLIQGARSSLQRAKAIAPEKASAEQVWIRDLAQRLPFGKVLVAIANKHARQLWAMLARGEDYDPEAWLRHPMVQRPANKNRLAVAA

SEQ ID NO: 395293 - protein, 423 aa, unidentified
MDILYERVAGLDVHRDTVVACVRIMVDGKAERECRTFAATTEQLVELRRWLEESRCTHVAMEATGVYWIPAFRILGEGAFELIVANAAHIKNVPGRKTDMNDPMWIADLLACGLIKGSFIPEEKVQELRALTRTRKQLVREQTRHVQRIDKTLAEANIKLGSVISDIMGASGRRIIQALIDGVRQPNKLAELAGKQIKASPKELYDALHGRLTDHHRFLLALHLKQRDGLDETIRKLDVEIAQRIEGMEAEAGGGKTPFRHLIGLLTTIPGISAVAAPAILSEIGADMSRFETAGHLVAWTGLCPGQNESAGKRKSSRLRKGAPWLKTMLVQCAWAAKRSKNSYYRAQFFRLQARRGPQKAICAVAASILTAIYYILKNGTEHHDLGAAYFDRRPTQVKASRLVSRLKKLGFTVQLQPIAEAA

SEQ ID NO: 395294 - protein, 437 aa, unidentified
MRRQFLTMRADLEHLRDWLKQQRVTHVVMERTGSYWKPVFNILEGTVQIYLANPQEVKARRGHKTDDQDGWWLAHLLRHAMIHPSFIPPRAIRELRDLTRRRKRVLSAATSERNRVQKVLEEANVKLGNVLSDVFGVSGQRMLEALLQGQAQPKEIAALAQCRAKQKIPQIVAALEGHQMSAHHRRMIRYSLEHLRFLELQLQELDRDIAAQIEAAGLVQSWDNLRSIPGIQQTSAATILAETGADMGQFPSEKHLSSWAGVCPGNHQSGGKPNRGGPTTGGNPWLRSALTECAWAAASKKDCFLKEKFWRLTAKHGGKKAPALVAVAHTLLILIYETLRTGQLYQERNVPVMSEPQRRRLIRHHLRRLGTLGIATRSCGEAKRKPGRPRTHRGQLPISSASPSPCSKCHRWGIPCIHVRPRQRATSSPAIEPESTA

SEQ ID NO: 395295 - protein, 343 aa, unidentified
MEAYAGRQYVGIDLHRRRTVIVRTTEAGEVLEAVRIVNDVQRLASVMARAGDCPEVVLEATYGWYWAVDALQAGGASVHLAHPLGVKAFEYRRVKNDFRDAQDLADLLRMGRLPEAWIAPPPTRELRELVRHRAKLVGLRSHCKAEVHAVLAKCGVQVLMSDLFGLAGTELLDGLELPAPYAARIASLRRVMDDLDFEINVFAGIIRGRMAHEPGYTAVQKIPGIGPTLGAVLVAEIGDITRFASASKLTCWAGLTPKHHESDTHVRRGRITKQGSRLVRWAAIESVKTVSKASEVGVLRERVADRRGRNIGSVAAARRQLELVFYALRDGHVRALEHLPRVA

SEQ ID NO: 395296 - protein, 317 aa, unidentified
MIYVGIDVSKVRLNVAVHESEKQWSFANDDGGIAQLVSHLQDVRPALVVLEATGGMEIPAAAAVAAAGFLVAVVNPRQVRDFAKATGKLAKTDVIDARIIAHFAAAIKPTPRPLPDKQSQEFSAILARRHQVVEMIGAERSRLSCARNAMVRKSIAKHLAWLERELEDTNNDLRHSVMESPVWREKDNLLQSVPGVGPIVSTTLLAELPELGALNRRQIAALVGLAPLNRDSGDQRGKRMVWGGRAQVRAALYMATLAAIRHNPIIKAFYQHLRTAGKAKKVAITACMRKLLTILNAMIKHRACWSYNPHELTCHIT

SEQ ID NO: 395297 - protein, 373 aa, unidentified
MPKYSTAFGMDVHLRSTTVCALDADTGEAVTRRFPGNPWGEIAGWMDGFPGPSLAAYESGYLGFAPQRELAGLGVECVVAAVSKIPRSAADSASKNDRNDAARMAKAILAHDISPVWVPSPEVEGIRDLAGAYDGATARLATAKQRLLAFLARRGFVYGGTTPAGNPRKYWTYDFLRWLDKVRPEDDGGVRALAALRNEVEAAAEARADLLSEYRAAVDASPIAAEVAALQSIKGCAFALAAAFSAEVGDFTRFRSGRQVTAYFGLAPSQRSSGDSVRLGGISGAGSALVRKLAVEGSWCYAAARHQPKLMPRDTGVPLEIRVHGRKGSERLLRRREEMLARGMPAAKANAATAAELVRWLWALGMMCREGAE

SEQ ID NO: 395298 - protein, 367 aa, unidentified
MQNTIVHDEGATSLEVAVSKVKAGRSIIKIGLDVHARVYVAVAQYDHLLPKPARRFRPEQFVPFVEELRRRGHIVYVVYEACGFGFGLYRQLQRVGAYCWVIAPRKLDERSSGVKTDPRDALTLCQRLSRYVEGNTGELAVIRVPSEKEERGRHVSRQRAQLVHHRQKLQAQGRALLIGHSLAAPAHWWKNQTWSRLSKLLPEWIIPHLEIYRPALLTLEQQIAVLTSQLESTAPAAIPMGMGKLTTVILTREICDWRRFNNRRAISSYTGLCPGERSSGSKRVPGSVTKRGNPRVRAALVECAWRMVRFQPQYPPVKKRLLLLAKGARVTGAQRKKAIVAVARHLAVDLWRLHTGRCTAEQVGLIH

SEQ ID NO: 395299 - protein, 409 aa, unidentified
MQVVHEVCCGLDVHKKGVTACVLWASGRRRQTRAFGTFTRELLELGDWLRACGVTHVAMESTGVYWKPVWNLLEGLFEVLLVNAQHIKAVPGRKTDQKDSEWIADLLQQGLLRASFVPPTPIRELRDLTRYRASLAQEINRIANRIQKVLEDANIKLASVATDTLGASGRAMLEAMVKGEQDSQRLAEMAQGKLRNKIPELQEALQGRVSRHHRFLLRELLDHLYFVESKMQRIEQEVAERLGPFQSEVARLCTIPGVDRVTAWGLLAEIGLSMKQFPDAQHLASWAGLCPGSHESAGKRKSGKIRKGSLWLRRCLCQGAWAVSTKKNNYLSALYRRLAARRGSKRATIAVAHKLLVIAYHILRDGTCYSDLGADYFDRLNPEGLRRRLTKRLEGLGFKVTLEPSAQVA

SEQ ID NO: 395300 - protein, 429 aa, unidentified
MTPIPSTISPAVRVAIDVAKLTHQVLLELPTGKRRSLHVANTKAEIDHFVSLLRSLEYPCEVAFEPTGDYHRPLAYVLGQAGFRLSLVSSLAVARTRDAMYNSWDKNDPKDAQVILHLMKTGTTQRYLDPLVTGHQDLQELANTYQQVSLRKVRLQHSIVTHHLPLYFPEAERYLHSTRAEWFTELLLFTPCPAAVRRHTKAAFVAAASVQIAGRKVDKARWLADFYDTASTSLGLPVSEESEAMRMFRVVLEEYRALCLLRKRLEADAITRLADQPDFRRLQTLPGIGPILAMIILAEARDLRRFGHARQFLKYCGFDLCTEQSGQFRGTTHLSKRGNARLRYAFWMAGTVAIRMQQNSFRRKFEDYIRPDPKNADRRRKAYTAVAAKMARVAHAVIITGIDYRRFPEAARPGGRIPSPGAVEARATS

SEQ ID NO: 395301 - protein, 373 aa, unidentified
MTILYVGVDVAYASFEGVAWSKRTPRQVERYDNTPSGFRQFAKRVEALRRAEGASAIHLILEPTAGYQAALVLFAHRRGWRITQVNPLQVRRWAQGAGRRAKTDVQDALLLAEYGERMQPAPQEQTPPEIQELDLLLRRRQDVEDLLQRERNRLFTLKKHPHPPASVRQSLERTIQQLEQELAQLEEALEAFLKAHPALQEQQRRLRSVPGVGARSVLRLLVLLYRFYALTAAQGTAKQLVAFLGLDPVPHRSISSVYRPPSISKKGDKSMRTLLYMAAFGGVSGHNPLGHFYRSLIARHKPKKVALVAAARKILVWAWGRFFAPLNLSRPLSNLFLESCSPDFHERIYGESQLRGLQRFFSPSPGTGRGGRG

SEQ ID NO: 395302 - protein, 422 aa, unidentified
MMDKERSWFVGIDWAAQEHVVSLYDGAGNKIGQRKFSHGGTGLTDMIAWLLKASGGEPGEIHVGIETPHGPIVEALLERRFNVYSINPKQLDRFRDRFTVAGAKDDSRDADVLSDSLRTDMRAFRKLSIADPLIVELREWSRIDEELKVEHGRLTNRLKHQLWRYYPQMLELADDVGANWFLDLFEAVPTPEKAANVREKTIARILKNHRIRRFDAAHVLAELRKPALAVAPATIEAATAHIRSLIGRIRIINGQLADAGQQLDRLCKKLSEPVADEDGEAAPGQKPEQRDAAILDSLPGVARTVLATLLAEAPDTLQRRDYHALRALCGSAPVTRRSGKSRMVVRRYACNHRLRNATYHWAQNAIQHDHTSRAKYDALRARGHGHARALRSIIDRLLSVACAMLDSGTLFDPEFASKRATG

SEQ ID NO: 395303 - protein, 397 aa, unidentified
MYIVGIDIAKRKHEAAVIDGEGTVIIKPFSFTNNCSGYNRLLAMLTKAKLPLDEVSFAMEATGHYWLALFTRLQKEGFRVQVINPVQTNSIRSFYIRQAKTDPRDALLIAEVIRFGHFSESTLHPENIYELRELCRGRHAIVSMQADVKRKVVALLDQVFPEYETAFTNMFGDTSMAILQTCPTPKELSEMPLEELCHLIEVSSHKRFRMAKAQELQELARNSFGFAMAGDVFSTMIRLYAKHLDFLKQQVREMDRKIAEIMETLDTPITTITGIGPTLGAYILSEIGDISRFSSAAKLAAYAGIDPTMRQSGEYNGVRNRMSKRGSPYLRHAIWLAASSAVLHDPALKLYFQKKRDEGKPYMASVGHACRKMVSIIYAVMRDNKAYTPYIPNEISA

SEQ ID NO: 395304 - protein, 344 aa, unidentified
MIVIGIDPHKSSLTAVAVDDTGHELAARRFVVNAGTFTQLISWAQRWPQHRLAVEGAKGLGRGIAQQLAAAGAGVVDVPATLAARARLLTTGGGRKTDATDAASVARVALHRHRLNSVRPEDQNTILRLLTEHRDDLTHERTRILNRLHGLLRDLVPGGAPTGLSADKAATALRTVRPATATDACRRDIARQLLAALRRIDAQLKANETELDQAVTAAGSSLTELPGIAVIMAAKILGHVGNVTRFPNADHFASYSGAAPIDASSGPRKRHRLNTGGNRQLNSALHIIAVVQAHHSDLGRAYYQRKLGEGKTPAEARRALKRRLANVIYRRILKDQKQAHPTAA

SEQ ID NO: 395305 - protein, 355 aa, unidentified
MNDAKYIGMDVHQATISVAVRDSRGNLVMEAILETKAETILQFIHGLRGSLYVTFEEGTWAAWLHDLLPPHVTRVLVCDPRKNALLKVGNKNDRIDARKLSELLYLNKLSPVYHGEPGIRTLKELARSYIAMTRDLTRVMSRLKAIYRSWAIACAGQQVYAPRYRAEWLAKIAEAGVRRRAELYYQQFDALAALRQQARRELLAEARKHPAMRLLRQIPSIGPIRAALLIALLQTPNRFRTKRQLWAYCGLALRTYTSGEYRFVSGQLKRSKKVLAVRGLNINHNHDLKNIFKGAATRAASIVGPFQDFYQACVVRGVKPHLARLTLARKIAAIALLVWKKGVRFDAEHLKQQAA

SEQ ID NO: 395306 - protein, 425 aa, unidentified
MSASTGADATSPPLTNKVSRNKSPLFVGIDLGRWLHVASVVDGNGEFEGERGFAHSVEGISDTIDWLIDLAEHDPQRISVAIEKPHGAVVETLLLRGIAVFAINPKQVDRFRDRHSMSGAKDDRRDAFVLADALRTDGHRFQQLISPPPDIVALRERLRSRSQLVKQHVAFSSQLRELMVGCWPHMLVLAPKNRTLDAFFCELLLLFFDHDNANIDSVHTLIRKHHIRRVSVDDVLRTFQAPPLYVAPGTLDATAAHVDLLVQQLLLVIRLHRDADQFLERWFKQTSRDSLPTTDTAILASLPGVGAFVLASLLAHAYDAVRLRNLDALRSVGGVAPVTKQSGRRRQVLLRRARSQPLNFALHHWAQAAVLRDSKSEEHYRRLRNKGHRHARALRGVSDRLLSVAVAMLRNRTLYDSDKRKKLPS

SEQ ID NO: 395307 - protein, 367 aa, unidentified
MKKNTTLKQPLSSTDVSACTTVAVDLAKQVFQVAGEDALGQVLYEERLKSREAFHAFLRKLPPNIVVLMETGPGAQAWARQLQAQGNLARILPAQLVAKHRTGAKNDRNDVLAILRANRDQKIIAVPIKSASALAMQALHRARQGYVRRRTATSNQMRGLLMEHGVALAQGDVAISQTLPRVLEDATQPLPDMLRELLDELLGEWRQLGERINVLTGRLEAAAKEDETARRLMTVRGVGPIIATAILAKQTEPQRFADARRFAAYFGLVPDQNSSGSKVRLGRMCKRGDGYVRSLMVQGAHAVLRQLRPDSEQPDDRRLQRWQSRLGRKEAAVRLANRNLRIIWVLLQNDQTYRRQPADGRPAATSS

SEQ ID NO: 395308 - protein, 316 aa, unidentified
MTTYAGVDIAKHGFDLAFEPKEKIQHFDNDAKGIQRCCELLKQRQAELIVMEPTGGYERALVKQLQAAGLSVSVVNARRIREFARASGQLAKTDTLDAQMIARFAAVLQPPAQEPLDRQTRRMKALVARRHQLVQMHTAESNRMEHADDKAVKQSIQAILKALKKQMDKAEQQIAELISSTPKLQKKAACLESVPAIGEITAALLVTELPELGRLNRRQIAALVGVAPINRDSGTYRGKRMTGGGRRDLRARLFMPILCATCHNPVIRDFYQRLLKKGKVKMTAVIAAMRKLLTILNTMIARNESWNPKTPCPTHG

SEQ ID NO: 395309 - protein, 298 aa, unidentified
MKIKLLGIDLAKNVFQLCALNQANKVLFNRTVRRAQLRSTIVKLERTTIAMEACSSAHYWGRAFEAMGHKVLLVPAQHVTPFVRGGKSDARDALAICEAAQRPGLHPVPIKTVEQQDIQLLHRLRQRQVQHSTALANQIRSLGREYGVIFPAGIKSLIRQLPEALEDGGNELSAVARYALADQLRCLIEVRRAMKTFLLQIEELACQHPAYGNLLPLPGIGPMVASAYIAAIGNGNQFKCGRQVSAWLGLVPRQYGTGGQIQLMGISKSGDRYLRTQVYSVLITFEPILLLKFTDQLN

SEQ ID NO: 395310 - protein, 343 aa, unidentified
MRIAVIGIDLGKTVCSLAALDESGALVKRRRLRRESIVAFSKDLPPCIIAMEACCGAHHLGRLLAAQGHRVRLMAPEYVRPYVKAHKNDERDAEAIAEAASRPTMRFVELKSEAQLDMQTLHRARDRLVGARTALINQLRGILLERGITLPQGRRKLHRQLALLLEEDGGLLISSRMMALVEDMRAQWAELDRRIGALDDEMVEHARNDETVRRLISIPGIGALNATALIAAVGDAGTFARARDLAAWLGLVPRQVTTGGRPRLVGITKRGNSYLRRLLIHGARAALPGLVAGETPLGAWLQGLLSRTHKNAVVVALANKLARIVWAVLRRGGRFHGGALAAA

SEQ ID NO: 395311 - protein, 375 aa, unidentified
METVRFVGLDVHKDSIAIAVADSGGGEPGQLAIVPNDTASLIKRLSKLAPRGQLRCCYEAGPTGFGLCRDLRGAKISCTVVAPSLVPRAPGERVKTDRRDAVKLARFLRSGDLPEVVVPDASTEAMRDLERAREDAKNAERVVRHQLQKFLLRHGRRYPGKTNWTQAHLRWIESQHFEHEAQERVLTDALRAVQLATARIEQLDKDIAELVESWSMKPLVDGLQALRGIQLLTAVTIAAEVGTLRRFESAPRFMAYVGAVPGEHSSGERRHRTGITKTGNAHLRRVLVEAAWCNRFKPSTSRRLTRRQKGVSADVRDIAWRAQNRLHSRYRRMLGRGACTQKTVVAMARELAALLARAVTSTHTALPSARRRRSR

SEQ ID NO: 395312 - protein, 338 aa, unidentified
MEHQQQYVGIDLHRRRSVIVRMTEEGEVRECVRIANDPVALSLELAKAGPDPEVALEATYGWYWAADLLESDGARVHLVHPLGLHWDARRVKNDERDATELAHRLRRDDLPEAWIAPAEVRELRELIRYRAKLAALRTSAKAQIHAVMAKLGILPTLSDMFSAAGQVLLDGMPFAGPYALRVDSLRGLLERYEHELVLVERELHGRLVDHKGYTAIQALNGVGRITAAIFVAEIGDVTRFPDARHLCSWAGLTPSHRESDTKVHRGHITKQGSTLVRWAAIEAVARYHGGAPIAPAFMRIQKRRGTMIARVAAARKLLTLVFYGLRDGEIRCLVREAS

SEQ ID NO: 395313 - protein, 369 aa, unidentified
MADRITYVGLDVHKESIVVAVASGGLRGEVREYGRIANTATALDRLLRKLGEAGMALRFCYEAGPCGYGIQRHVSARGHECVVVAPSLIPKRAGDRVKTDRRDAASLAKLHRAGELTAVWVPDPQHEAMRDLVRARLDAVHSLRRARQQLSGFLLRQGCHYGRPAWTKLHRRWLAGLIFEQAIHHIVLEDYIAAVEAAEARRDRLTAQIETMLPDWTLAPVVAALQTMRGIAMVNAATLIAELGDLSRFADPRQLMAYLGLTPSEYSSGSSVRRGGITKAGNGAARRLLIEAAWSYRFPARLSRELLLRQESQPKPIRDIAWKGQVRLCARYRRLARTGKPANVVTTAIARELTGFVWAIARQVTVTPG

SEQ ID NO: 395314 - protein, 410 aa, unidentified
MDVVHRRCSGLDVHRDSVAACVALSGDGGVRKEVRVFQTTTQGLLAMSDWLAGQGVTHVAMESTGVFWKPIFNILESRFEVLLVNAFHVKQVPGRKTDVKDCEWIADLLRHGLLKASFVPDRPQRELRDLTRHRAQLIGEQTRVANRVHKILEDANIKLGSVASDVLGTSGREMIQALLAGDRSPAEMADLARGRLRNKREALTAALEGRVTEHHRFMLCMLWDHLLYIEKTIEMLDGRIEEMVRPFETEIRRLDGIPGVDRVAAQAMIAEIGTDMSRFATAAHLASWAGLCPGNYESAGKRKSGRILKGNRWLKRSLCQAAWGASRTKETYVSALYRRIAKRRGKKRAVVALGHTILVSAYYILSRAVEYKELGGDYFDRLNPVRLRTYHVHRLKDLGYQVQLTQESPA

SEQ ID NO: 395315 - protein, 338 aa, unidentified
MDHYVGIDLHSTNSYVAIIDNDNRRVFKRKTKNDLEYVLQALEPYREQVKGVVVESTYNWYWLVDGLMEEGYRVHLANPSAIKQYEGLKHADDVTDAFHLANLLRLGILPEGYIYPKEERPIRDLLRKRLQLVEQRTAQILSFQNLVARNLGKSMNVNAVKKLNEDDVVQLFQQEHLVLSGKASIAAILFLSERIQQLEKIIHKVAKLKDEYKLLMTVPGIWRILALTIMYETGPIERFAKVGNYASYCRCVGSKRISNEKLKGKGNRRNGNKHLSRAYVEAAHNALWHYEYVKRYYQRKMARTNVVVARKAIAHKLARACYYIIRDQKEFDPTRVFV

SEQ ID NO: 395316 - protein, 418 aa, unidentified
MQTELSNYTALIGIDWADKKHDVCIHVTATGKQELLQVPHQSEKIDEWARSLYRQYGGPMAVALELWKGPIVAALQKYDFFVLYPINPSSLASYRRVFTPSGAKDDPTDAEYMLNLLLRHPDRFQPLKPQSVEIRALMTLTEQRRRLMNDRVRLTNRLRNALKQYYPQALEWFDHIDTPLFCDFIRRWPSAPQARRARKTILEKFFRAHNMNRKPLLEKRIAAIKSAVPLTADDGVVIPYRLLALTLVEQLETMLACLDRFDEEIAALAPQHPDFELFDALPGAGPSLAPRLLVAFGEQRERFDNAAEVQKYAGIAPVTERSGQQFWIHWRWQCPTFLRQTFVEWAAQTINKSYWAGLYYYQQRAKGCSYQAAVRALAFKWIRILYRCWKTRTPYDEARYLKALQERGSPLLTNAETA

SEQ ID NO: 395317 - protein, 408 aa, unidentified
MLTTDRELPAAIRVDLGAIFVSLELSRKTWLATSLSPGAGEKMSRHSLAAGDVSALLALLGRLRRQTLDRTGREARIVCIQEAGFDGFWLHRVLESEGVESWVVDPASVAVNRRRRRAKTDNIDGAALLRTLLGFKRGEPRVCSMAYPPPPETEDRRRPCRERAALLRERIAHTNRIKGLLFSQGIVDYDPMPKKRRRERLEALKTGDGRPLPARMKAQILRELDRLELVLGQLAAVEAERDALLAPSPRNQPGSEPVAGADPAAASGAAEPAAPGAALTRLKGIAEERAAVLGGECLWRKFDNRRQVGAYSGLVGSPFKSGQIDHEQGLSKAGNARLRHTMIELAWSWLQHQPTSQLSQWFHRRLGPHPDKRRRKVLIAALARKLLIALWRFETQGVVPEGAVLKTG

SEQ ID NO: 395318 - protein, 408 aa, unidentified
MSLSAACCYVGIDWAAESHAVCVLDDAGRVQAEFTIAHSATGFADLLRRLAKLADPADAPVGIERPDGRLVDALLEAGHPVVPVKPNAIKAWRDGEVLSGAKSDAGDAMVIAEYLRLRQHRLRPATPYTPATKALRTVVRTRGDLVDLRVAATNQLAALLDAHWPGAKAVFADVESPIALEFLTRYPTPVAAERLGEKRMAAFCTKHGYSGRRSAAELLARLRAAPAGVTDEALTEALRDAVLAMVGVLRALNHGLKDLGRSVAAHLGEHPDGKIFTSLPRSGRINAAQVLAEWGDARAAYDSPDAVAALAGLTPVTKESGKHRAVHFRWACNTRFRVALTTFADNSRHASPWAAEVYARARASGKDHPHAVRVLARAWTRVIYRCWVNGVPYDPARHGNAARLAAAA

SEQ ID NO: 395319 - protein, 410 aa, unidentified
MSRIIAGIDVHKKLLVVVIADLAAPDVTLHSRRFGTGSGELKHLSAWLMQHGVTEAVMESTAQYWKPVWMELEPHMQLHLAQAQSNKAPKGRKSDLADTKRLVRRFAAGELMLSFIPEPEQRTWRMITRGRLQLIRERVQLQNQIESLLEEGRIKLSSVITDLLGASGRRILRAMAKGETNAETLAALGDPKLKCGKPILVDALTGSMGAIHCRLLTQQLERIDLIDRQIEELNNQVATQLRTYQSAIARLIEVPGIGPEAAQEILAEIGPEAAAFPSAEQLASWIGVCPGSSESAGQNHSGRSAKGNRFMRRLLCQAAQAAVRTNGSQLQAIFKRLIVRLGYVKAVWAIAHRLCKIVWKILHKGAKFIEFSEARNPKAIQRAINRHLKALRRLGFPIPISTPTPEPQRG

SEQ ID NO: 395320 - protein, 383 aa, unidentified
MAHAIRGWVLKPALNSPLNSRTCNYLGGSGCVGKMGSFLNGDSSPMELYGGIDLHSNNSYIGIINEENSVMYKDRRRNELPSILSALAPYKGELKALAVESTFNWYWLVDGLMDAGYPVHLANPAAMKEYKGLKHKDDKKSALWLANLLRLKILPEGYIYPKEERPVRDLLRKRLHLVRHRTSHILSIKNIISRNLGMTIKGDDIKTLTSRDIERLITDECHRLAIMASLSTIHHLTSQIEQIEKTILGRVRLRDEFKGLTGMPGIGTTLGLTIMLEVGDIRRFTEVGNYASYCRCVMSIRTSNDKKTGEGNRKNGNKYLSWAYIEAAHMAKRYCPSLRKYYEKKAAKTNKIVATKAVSHKLARASYYVMRDQAVFDEKRLFG

SEQ ID NO: 395321 - protein, 372 aa, unidentified
MQQNIRVFVGLDTSKNKISVALAEDGRRGEVRFFGDIDNSPDAIRRLVLKLSDKYQQLLFCYEAGPTGYGLHRQITALGHDCSVIAPSLIPKRPGEHVKTNHRDAITLARLHRAGELTTIWVPDLGHEAIRDLVRAREAAMEDLREKRQHLQSFLLRHGQRYPGLRPWTLVHARWLSNLAFEHPAQYLVLREYRQAIEDAEARLERLTQQVTEVVSTWSMASVVDAYQAMRGVAFLTAVTFVAEIGDVRRFETPRQLMAYLGLVPSERSTGEQVRRGRITKAGNPRARRVLIEGAWTYRYPARLSRPLQLRQENLPKVVRAIAWKAQVRLCARYRRLLAAGKRQTLITTAIAREMAAFLWAIGHEVQPLSAA

SEQ ID NO: 395322 - protein, 483 aa, unidentified
MKNKQPEKTKEAPCRPTQGHWHEMNRKQRREMMRKIQSDDLRLEVVHPDAAGIDIGNESHYVAVPPTRDNESVRRFGCTTAELKEMADWLKQCGIRTVAMQSTGVYWIAVYDMLEEAGLEVYLVNARETKNLPGRKSDVQESQWLMKLHTYGLLRNSFRPSQEIRRLRTYWRQRNDLVRAAGRHIQRIQKAMTQMNIQLANVLSDVSGMTGQAIIKAILAGERDPHVLAAFRDHRVKASEEEIARSLEGNWQEDLLFVLQQEQDGYEFCQKQMAECDRRLQQYLKQREDRSAGANLPEEKRKERLRKKKKGHTPQFDLRVELFRMTGADLTQIDGIDVMTATTILSEVGWDMSKWKTEHHFVSWLRLCPDNRISGDKIIGKGRLPTNNRATSALRMAASTLRVSNTYLGAQFRRLRTRLGAPIAIKAMAAKLARLVYRVLRYGMQFVDKGAEFYEAQHRKLQINYLKWKAAKMGLQIIEAPAA

SEQ ID NO: 395323 - protein, 372 aa, unidentified
MQERSKIHVGLDVHKDSISVAVAEPGRTPGRLIGKVPHDVHKLLKVLAKVGTAEQLHIVYEAGPTGFGLQRALQAKGYSCEIIAPSQIPRRPGDRIKTDSRDSVQLAECSRAGQLSAVWIPDPDDEAIRDLSRAREDAVNSRTQARHQLKGFLLRHDVRYTGKTSWCGAYYRWLGTLNFGAGAAQTAFTEYWQAVTAADDRVDRLTKALQASITSWRFEPVVGALQALRGVAAITAIGLVAEIGDLERFAHPRKLMGYLGLVPSEHSSGERTSRGSITKTGNAHARRLLTEAAWNYRFKARICKQAQIRQQDLSEPIRRMAWTAQLRLTQRFAALNARGLQTNKACIAVARELAGFVWAIGMQAQREKAEAT

SEQ ID NO: 395324 - protein, 374 aa, unidentified
MLRRFSQENKLKKGGVIMSYIGVDLHSDKFTAAFRDKMNNDTLKSYYLDKYEIDNFKRNLKKDDYIFIEASTPTFAFTDLLKDTVKKTIVIDPFKFRAIADSRKKTDKIDARQLARMGKYHIEGDKKFLPEVYVVEKRIRKLRSLFTTYRLLNKEITMIKNRIHSLFKQNLKPYSKSHIFNDIMTGLKPIDLDEEYKIQVEVLFDVLSKLEEKKSEIKEKILLTGEPFLADIDILVSISGISVFVALGLISDYATIERFKNAKQFSKYLRSTPKSEESNKKVKTGKTQKNGRKLSIELMLQSINHFRRESLFIDKFYRRLKKGKGGCKARIAVVRKMFVAIYFMLREREYYRYMNKKLHDKKMREYKRFLVKNK

SEQ ID NO: 395325 - protein, 464 aa, unidentified
MTDGKRWRNRKERKEWGRRLQSEDPGLEVVHPQAAGIDVGNGSHYVAVRPDRDPQPVRRFECFTADLHRLAKWLQRCGVKTVAMQSTGVYWIPIYEILEERGIQVYLVNARHTKNLPGRKSDVQESQWLLKLHTYGLLNNSFQPPSEIRVLRTYWRQRGDHVRGAATCVQRMQKALTQMNVQLANVISDVSGLTGQAIIRAMVAGERDPRKLAELSDPRIHASREEVAKSLEGNWRPELLFVLQQEVEMYDTYQQRIAECDRQLQTHLATFVSVVPTQLTEEASQRKKTKPAKNAPRFELNHELQRIIGVDLTRIDGIDVMVAQTLISEVGLDMSQWKTEAHFSSWLGLCPDNRTSGDKVLARGTRRVVNRAATALRMAAVTLLRSRTYLGAQYRRLRTKLGAPKAITAMAHRLARLVYRMLKYGQQYVDKGAEYYEHRYRRQQIEFLRKKAAKLGLQITVART

SEQ ID NO: 395326 - protein, 467 aa, unidentified
MKLLYRCCAGLDIHRDTVSACVRRRVGGQAEAAIEEQVFGTFTQDLERLRTWLKKSKVRQVAMESTGVYWIPIWNVLERGFTLTLVNPATVRALQGQKTDRIDARRIAEYLQHGLLRGSFIPPKPIRELRELTRMRVHIQQDRNRVINRIARLLETVNIKLACVASHIVGASGMAMLRLLARGVCDAERLADCAQGHMRVKIPALVLALEGRPDAHFRWMLAQLLAKLDRLDEERACVDVRIDELAVPYADALRRLSTIPGVDRTTALVLLAEFGEDMTQFRTAAHLASWAGLCPGNAESAGKRFSGRTRKGDRYVRRILVQSAWAASRCHDCFLAALFFRTAQRRGLKKAAVAVAHRIAILAWHILAEAGAEYRERGGDFFDRRNPERTARKLSRRLQAIGYQVTLVAPPKPFGTPPHRSTRQRSEPAVDASLCPRCARWGMPRCICLVKRKRSCPSVTDSTRSIT

SEQ ID NO: 395327 - protein, 343 aa, unidentified
MEHYVGLDVSLKQTSICVVNQEGSVLREGVVESDPDAIGAFVRSNAPGVVRVGLETGPTATWLWTELKRLGLPVICIDARHAQAVLKMQINKSDRNDAAGIARIMQTGWFKEVRVKDIDSYSVRALLASPALLVKIKRDLENQIRGLLKNIGLVVGRAKFIVFAARAEELIESRPELVGAVRPLLEARKAIEEQVGDLDRKVLKLARHDVQVRKFMTAPGVGPITALCFKATIDNPARFKRSRSVGAYVGLTTRRYASGEVDWSGRISKCGDAMLRTYLFEAANVLLTRVPKWSALKAWGMRLAKRNGLRKAKVAVARKLAVILHRMWVDGTEFNWPTKKAAA

SEQ ID NO: 395328 - protein, 341 aa, unidentified
MSLIKAVGIDLAKLVFSIHGVDVNDKCKLRKTVKRNKLLAEVAKLPPCIIAMEACSGAHYWAREFTKLGHDVRIMASKFVIPYRQNEKNDANDAEAICEAATRPKTRLVSIKSEEQQAVLCLHRIRQGAIKDRTARINRLRGLLSEFGIIIPKGRYPLQNAMSGVLEDAENGLPFLARELLNELWQSIKGLNEEILKYDRKLYALANQIKEAKRLMSIPGIGEITATAVVATVNDAKHFETSRSFAAWIGLVPRQYSTGGVVRLGRISKRGEKHIRTSLIHGARAVIANCKNKTDRTSLWVKDLVERRGFKRATVALAAKNARLIWALLHSEKEYQVDYVK

SEQ ID NO: 395329 - protein, 395 aa, unidentified
MFIVGIDIAKRSHEAIIIAEDGQVVRKAFSFRNNCTGYNLLLEQVRRLTLVKSQIVFAMESTAHYWLALYARLLKDGYAVMVLNPIQSHSLRELYIRKAKTDARDSLIIADLVRFGRCKASNVPQDKILALRELCRSRAYLVDMAADLKRKLIALLDRIFPEYESLFESVFSKASIAVLRKYSTPQKVKNAHLGKLTDILMESSNGHFGEWKAHQLKETACSSFGIDDSGGVYSTLLGMFLEQILSLTAQADSLEKQISVFFQEFNNPLTSIPGVGTVLAATILSEIGDITRFSSADKLLAYAGLDPSVKQSGEFKSNQNRMSKRGSPYLRRAIWLASTVAVHRDPMFQTYYEKKISEGLHYMNVIGHVSRKMTAVIFAVLRDGQPYQPVLQTAD

SEQ ID NO: 395330 - protein, 355 aa, unidentified
MESTKYVGMDVHEQTISIAVMNSAGKLIMESIIETKAITILQFIQGLCGDLHVTFEEGTWAAWLYDLLKPHVTKVVVCNPRKNALLKEGNKSDRIDARKLAELLRNGSLSAVYHGENGVRTLKELSRSYLTISKDLGRVMNRVKALYRSWAIPCAGTQVYAPRHRPEWLSKITEAGVRRRAEHYYQQLDALQALRHEVRKDLLVESQKHHATKLLRQVPCIGPIRAAQLVALMQTPHRFRTKRQLWTYSGLGLETHGSAQYRYVEGQLQRSKKPQQLRGLNTNHNHDLKNIFKGAATMASISSGPFHGFYEALLAKGMQPTMARLTLARKIAAITLIVWKKGARFDPQHLKQQAA

SEQ ID NO: 395331 - protein, 474 aa, unidentified
MEKKLSNKREEVIKLLARQKIRDVRELESYKLSACHPCSAGIDLGSREMYVALHPQVAAELGISIVHRFETFTNDLLACKDLLVHCGVKTVAMESTSVYWTTIYFILEEAGIEVCLVNPKKFRMVPGRKTDITDCQWLQTLHLYGLLRGSFHPPHGIAMLRSFMRERDSIIKERSTFVQRMQKALVKMNLLLHNVIDDITGKTGMLIITSILAGETDPKRLASFRDPHCKKSEEQIMEALTGYYREDQLYLLKINYQSYCFFDRQLSDLDRQITKLLKRFPSKKDKKEKRPANGKRKSKGKNDIRTTENMEDVLYHMLGTDLTALPGIGVNAILQIISETGTDMSKFPTAHHFASYPGFVPHNKITGGYVISSKTDRIKSTAAQAFRKLIPSISQTKSALGAFYRRLAPRIGKAQAIIATCRKLAILLYNTLAFGKAYTEMGELKYKQKQEEWERRKLLNLAKKYNYAITPNTI

SEQ ID NO: 395332 - protein, 392 aa, unidentified
MYIVGIDIGKNHHEASIVSPEGKQIGRSLRFATTHKGADSLMSFIFKNIGNSPCVFGMEATGHYWYPIYSFLKAKGYTIYVINPIQSDSLRKMYIRQTKNDSIDSFLIAEVIRFGQFGTTSMADENILAMRQLCRYRDSVISSRTEIKLRIGTIMEQIFPEYEKQFSSLWLSTSMGILEKYLTPENIENAPIDELFEIIKDKSHNKLTMKKAISIREAAADTFGIKIAQDAFSFQLKQLIDRMNFLDKQIEALDCQILEYYEKFDCYLHTIPGIGMIAAATILAEIGDINRFKSSSALVAFAGIDPTVRQSGEFSSTHNHMSKRGSPYLRHAIFLAATTCSFHNSPLNAYYKKKRDQGKHHLTATGAVARKLTTVIYAVLRDSKPYEPKKFC

SEQ ID NO: 395333 - protein, 351 aa, unidentified
MPRTSTVHAVTAIGIDMGKNTLHMIGLDTRGAIVLREKVSRGRIALRLANLPPCLIGIEAGMATHYVARELAALGHDVKQVPPTYAKPFRQGQKNDFRDAHAVAEAVQRPTTRFVPAKTDEQLDLQALHRVRSRLVSERTAVINQIRGFLLERGIIVRQGLRFLRQVLPDILAKRTDVLSPRMVRILADLASDWRQLDGRIEPVTDEIETLAKSDDSCRRVMTVPGIGPIISSAMVAAIGSGAAFAKGRDFSAWIGLVPKQLSTGDRTILGRITKRGNGYLRMLFIQAARVILLRPANWPKHGFGIWLARAAVRLHPNVLAAALANKLARIAWTVLAQERSYEARVTKVAA

SEQ ID NO: 395334 - protein, 359 aa, unidentified
MITLGVDAHKTVHAAVALDDAGREIATWRGPNSPDGWAELAAWAAAHAASSGTERRWGIEGAGNYGRGLAQHLTAAGETVYDINPRWTAQGRRQARRPGKSDRLDARAVALVVWREAASLPPLQPEEQDETAVLDLLVSEREGALGEATRLRNQLHALLLQLDPQYKVHLPALTTPAGVAAAEAYTGPGRTPLQRAPAASVRRLAQRLRLATEQAADLARQIAARAQAGFFPLTRLKGINLLTAGALAGLLGPGCRFTGEAQLATYAGVAPLEAASAGRVRHRLNRGGNRRLNAILYRIALTQARCWPPAQAYLARRLREGKTKREAIRALKRYLIRAIWRLWQECVSSHPVTSYGQAA

SEQ ID NO: 395335 - protein, 343 aa, unidentified
MQTITTIGLDIAKSVFQVHGVDAPGQVVIRRQLKRRHVLSFFEKLPPCLVGIEACASSHYWSRELQALGHTVRLMPPAYVKPYVKRQKNDMADAEAICEAVTRANMRFVPTKTPEQQSCLMLHRTRHLFIRQQTAVINSIRAHLAEFGIVAPVGRKGVTELLHVVADPNDGRVPEVARACLAALGTQLLRLKEQILEFDRMIIAWHRSNQTSKRLHCIPGVGPMLATALVASVADPKTFRSGRNFSAWIGLVPKQHSSGGKDRLGSISKQGDRYLRSLFVAGALAVIRYAKIHGTGHRPWLTALLGRRPTKVAAIALANKIARMAWAMMAKGERYKQPVALAR

SEQ ID NO: 395336 - protein, 343 aa, unidentified
MDHYAGIDVSLELSSICILDASGQILREAKVTSEPEALAAFLTGLNLPLTRVGLEAGPLSQWLYAGLHRAGFDVVLLETRHVKAALSAMIVKTDRRDARGIAQLLRMGWFCPVHCKSPPAQEVRALLTARKQLQAKMRDIELSLRGLLRGFGLKVGEISKGQFATRVRTLIAGHQMLETIAEAMLRAREALQAEFARLHRTMLAIARDDAVCRRLMSVPGVGALIAVTFTSAVDNPERFSRSRAVGSHFGLTPKKYQSGETDITGAVSRVGDPMVRTALYEAAHILLTRAVRFSALKRWALEVAKRRGMRRAKVALARKLAVILHRMWIDGTTFRWGRECAAA

SEQ ID NO: 395337 - protein, 343 aa, unidentified
MKLSRVGVDLAKNVYQLHGVDRHGKTVWKRRLRRGQWLQALLDKTEPDCEIGMEACTGAHHWARELQSRGYTVRLIAPQFVKPYVKSNKNDANDAEAICEAMSRPHMRFVTVKRVEQQDIQATHRVRTELKDHRNAKANQIRGLVAEYGLVTPPTLLALRRAIPEWLEDAENGLTDNFRCLLHGLWDDLLSLEDRFKELDKEIEKLARSNEVTKRLQQLRGVGPIVATALVATVGNGEQYSNGRQMAASLGLTPRQNSSGNKRRLLGISKRGDVYMRTQLIHGARSVVSQAKHRDDPLSRWVTDIARRRHSNVATVALANKTARMAWAMLRNETDYDPALAVG

SEQ ID NO: 395338 - protein, 417 aa, unidentified
MAKLKIVHPICCGMDVHRDFVEVCVASTNNKGVTSYNRKRFSTFSDDLRTLREWLAEQNCKDVCMESTGKYWFPVHNVLENTCNVVVSHPKFVKAIKGKKTDKKDAMWISDLFKHDLVRGSFIPPKDIRQLRDLCRYWCKLASYTTGEKNRAQNCLTVSNFKLDSVFSNVFGKSATAIIEHMLEHPGENFDVTPFVDGRCKTPILEIQRAVDGSFNEFQAGKLNVIREHMVDLEKLKAELEHLIFTLAQPYTRQIELLCTVPGISEIMTAIRILSEIGTDMTVFESSKHLCSWAGLTPQNNESAGKKKTTRIGKAGQYIKPLLIQCALAACNPRSTKHPEILCKYNQLKKRRGSKKARVAIARRLLTAIYHILLKDEAYSPYIAPAVENIPKERVLTQEQALAFMRAKGFIIQDEPN

SEQ ID NO: 395339 - protein, 338 aa, unidentified
MKVYAGIDLHSSNNYIGIIDEQDQRLYQKRLPNRLEHILEALEPFKESLEGVVVESTYNWYWMVDGLQDRGYKVHLANPSAIKQYEGLKHTDDKWDSCWLAHMKRLNILKEGYIYPKEERPVRDALRRRLLFVRHRTSHILSFQSAITRNLSYKMSSREIKRLDQSDADRLYDEPFLILAARNHISTIRFLGERIKEIEKAVKSHIKLKPEFKYLLTMPGIGDILGLTIMLEVGDISRFPKASNYSSYCRCVKSERLSNKKKKGEGNRKNGNKYLAWAYVEAANFAIRFYPEFQSFYNRKKAKTNGIVAIKALSNKLARSSYYVMRDQVPYDVKKLFK

SEQ ID NO: 395340 - protein, 345 aa, unidentified
MNKTIIGVDLAKNVIQVCTYSNKKVRSNVEMTPKELTFWLNTIQPATVVFEACSTSNYWKQLSDSLGHDSRIISPKLVSSVRQNQKTDRNDALAIVQASMLPDVSFSAGKSTEQQQLQSIMRLRELSVKQKTASKNQMIALLAEFNIKASPKNGGLSGCVESTLEDGESGLSHEFRTALSTAWKQYLSHVEAVNCYDTCLEQSMQSQPDCKKLLKIEGVGVINAVNLYIALGCADSGTFSCGKNAAAYIGLTPIQHSSGGKVKLGSIGRRVRNSILRSQLITGSMAVVRSLSNRVPKTKKELWLKELMDRRGKKCAAVALANKNVRTAFSMLNHGTEYKAELISH

SEQ ID NO: 395341 - protein, 354 aa, unidentified
MQSQTITVPKLFIGMDIHKKSWSVHLRTDLFDHKGFSMPPDPSKLVDYVTNHFGDHEVSLTYEAGCCGFTAARYFLNMGWTVKVVNPNDVPRSDKQLYQKTDKLDCRNLCRQLQQDQLHGIYIPTEPEEQLKSLLRQRNQVVKQLRKAKSQIKGLLLFHGIRVPEEFDNPNWSKDFTQWLQDIKWTYATGTACMNSKLRILNMLKSEYLQTSNELRAWCRKQHKTDYYLLKSIPGIGGLLSAAILAELGDIRRFNNEREFSNCIGVVPGIHQSSESDSKMGLTPRCKALLRSYLIESAWVAIRIDPEIQAYYRKHAGRNPKNVIVKVAHKMCRRILSVIKSGTPYQVNYNKLKN

SEQ ID NO: 395342 - protein, 385 aa, unidentified
MTNQIQAPRFIPRDYDVFAGLDVDKKSMAVTFADHAGSQRALRMAHQVTPLVNYVRKHFAGQRVAFAYEAGPTGFGLHDELVRRAYTCVVVAPSKVPRAPGERVKTNRLDSRKLAESLRGGQLHSIHVPSAMYRDLRHLVQMRDTHVRQLTSSKLRIKSLLLYEGIAFPDPHEKWTVRAMRELQTLPCSDTVRFKLDDLLETLHFHFQAAARATKQIRQHCLQEAELQQSIEVLLSLPGIGWIVASHLVARLGNPQEIKNGRQIAGFLGIVSSEHSTGDKENRGEITRSGDSRLRNKLIQSAWVAIGKDPELRAFYRRIYQRHPKKVAARKAIVAVARKLTNRIYVVLKEQRPYVIRPDSSIAPLTVEETVGPRERLDGAQNDQS

SEQ ID NO: 395343 - protein, 345 aa, unidentified
MEQITRIGMDTSKHIFQLHGVTAAEEPALRKKLRRNQMVRFFEQLAPTVIAIEACGASHHWARLLQSFGHTVKLIAPQLVKPYVKRGKNDAADAEALCEAASRPTIRFVPVKTAEQQAALMLVGVRDRLIRNRTQLANAIRGYAAEFGLTAAKGKAHLDPLLERIRADESVPALARELFAAQAKEYAQLRAQIDAVDAKLMAWHRADECSRRLAKIPGVGPIGAVLLKMKTPAPELFRSGRQFAAWIGLTPKNHSTAGKLRLGTITRAGDEGLRSVLVVGATAVIQHVRRGGRSSPWLTELLKRKPPKLAAVALANKMARIAWKLMVTGDNYAAKSAPAALAGMA

SEQ ID NO: 395344 - protein, 352 aa, unidentified
MNETKYIGMDVHMAMTVIAVLNRAGKTVAEAIIETRATTILDFIKSQRGTLHVTFEEGTQAAWLYDLIRPYAAEVVVCNPRKIAKQGTKGDKPDAKRLADLLRTNGLNPVYHGERSSKAVKDLAQSYSSMVGDCTRVKNRLKALFRGRAIRCGGSAVYSKEEREQWLGRLDSAAARARATRLWEELDCLEVLRAAAEKDLVAEARKHTATKTLQSIPGIGPIRAAVILGFAITPYRFRTKRQFWAYCGLAVRTETSSEYELVQGRVSRSRKRPLVRGLNHDYNRALKEVFKGAAATAATGPWESHFAAMVASGTRASLALLTLARKIAAITLALWKKGERYDDQKLKMTHAA

SEQ ID NO: 395345 - protein, 357 aa, unidentified
MTTIAQFDTTLVTVGVDTHLDVHVAVALDQLGRRLGDLEIPTTQDGYDDLADWAESFGEVEAFGIEGTGCYGAGLARVLRARGLLVVEVLRPKRQTRRHKGKSDLIDAEAAARAVLSGEAAGAPKTGDDIAEIIRVLRIQRQTAVKARTQAINSMRALLVTAPIELRDQLRGLPKNKLIAAAARLRPGNDRDVLVGVKRSLRALARRCQHLDAEVAELDADLDELVRSAAPALVALFGFGTDTAGQLIVTAGDNPDRLRSDAAFSMLCGSSPQPAGSGKTNGRHRLNRGGDRQANAALYRVALVRMRWHQPTRDYVERRTKEGKSKPEIIRCLKRYIARQAYTALTSTQPAEAQAAA

SEQ ID NO: 395346 - protein, 309 aa, unidentified
MKEELVYLGVDIAKSYLDAAVGNEKRRFSNDAIGHRELIKWVKQLKAPVQVICESSGGYERAFVQGLARARVKISLVQANRVRQFARAAGILAKTDRIDAELLCEFGKVMRPQPVTAAKLEQEHLRELESQRRHLTHLLVMELNRGARVSDASVQRLNRRLIHQIKKQIEQLDLLIKGHIEGSHELSAKAAKLTSISGVGARTAALLLAQLPELGELNRREIAALVGVAPFNRDSGRMRGKRAIYGGRKPVRHGLYMAALVAAHHNPILRNFYLRLRAAGKPAKLALTATMRKLLIVLNSALKTDPSYA

SEQ ID NO: 395347 - protein, 315 aa, unidentified
MTKQLLPVNAGVDVSKDNLDLYLLERDLALSVPNDEQSIASLLKRLARYRLERIVVEATGRLEHAFVSAAIAKGLPVVVVPPLKVRRFAEAAGQLAKTDAIDARLIARFAAALKPTTRPVTDANSKLIKDLVVRRRQLTSLRTTEKNRRGVMPEALKPSIDRIIASLDREIASLEQLIQDAVEQHAAWRHKRDLLTSMPGIGPSVASTLIGDLPELGSLSRRQIAALTGVAPFNRDSGTFRGKRRIRGGRAHSRTALFLSAMVAIRYNPDIKRFYERLLQTGKHKKVALTACIRKIVTALNAMLRDDKPWHSSFA

SEQ ID NO: 395348 - protein, 344 aa, unidentified
MPIVGGLDIHRKQITFDYLDTATGEVRRGQIAPADRAHLAAWLAGRFTGQDAHFAVEGCTGWRYVVEELAAAGITPHVAEPADTAALRGRKRHAKTDKTDSRHLRQLLADGRLPECWIPPSHILECRALLETYHDLRVEHTAWTQRIHAALFRQGAPQLGQRLRTGEGLAALQAIAAAQLSPAGQLQIAVALDKLAALDRHLDVLRRRLLEAARQLAGAKELHARLYGVGPVTALALVCWLGGAGRFSSARKAVRFAGLDITVWSSDRKGPPGRLSRQGPEVLRWCVYEAGKTHARGSAPDHRYYAAVKDRIDGKRAAISEARKIIRQAVHILAELGDGALAAA

SEQ ID NO: 395349 - protein, 433 aa, unidentified
MSQFLHDFVVGIDVSSEFSIVAMLAPSGELIRKPFRIDHNPAGFHKLLDILKKEEERLERKPIYFVESTGIFHLPLFFFLRSNDLQGFVLNPLSVHSIKNFDLRKVKNDQKDAEAIARLAKYQDVKFSLVPEPQILALRMMTREYYALSDTLTEMKNRLCTDLYLLFPGFLDVFSNIFGKTALTVLKKFPSPRAIQAADTESLTSLISKISRKGTDWAEKKVNLLKDCAQLASSMPHEFSLLDAKIKVHIDGIESMQASLDGIVKQIHAMIDSELFPADAKRNIELLDGIPGIGFLTAATLIAEIGDFSLFKSAKAFTAFFGIDPSVNQSGKFQGDRNKISKRGTRIGRRILFTIAMASIRTTRKGDEINPVLREFYAAKCVNKKKKVALVAVMHKLLHYIFAVLRDQKPFEIRQPKDHQSWRNTKLGQAPAA

SEQ ID NO: 395350 - protein, 349 aa, unidentified
MTQFSRIGLDTSKSVFTLHCVDAAGQPMLRVSLRRSQLLGFFKRHAPTVVAMEACGGSHHWARKLMALGHEVRLIPPQYVKPYLKRGKNDRNDAEAICEAAGRPGMRFVLAKTEDRQADTMVLKVRATLVEQRTQLINALRGHAGEFGVVSGRGTGKVTAMLAEIAADTAIPPVAQEMLALLGEQIEHLDCRIKALEAKLEAMHKADAISQLLATVPGIGPIIGLSFALEVDPAAFTSGRHLAAWLGLTPQEHSTGGKQRMGGISRAGNERLRALLVSGAMAVIRASERAGSKLATEWLRKLLARRPRKVAAVALANKMARTIWAMMTTGEAYRRPAAPAAARLAAIIS

SEQ ID NO: 395351 - protein, 322 aa, unidentified
MQHDCAPRPVVGIDVAKDKLDVFIDLPARSLSVVANDDAGRAALVDELRRINVLLVCIEATGRYHRRLAADLLDAGIPVAVVNPQRVREYARATGRLEKTDPIDARVLAEFARAVGPRREEKLPEKQVELRDLVSRRRALVQVRVAEKNRLADDAPKLARAQAQKLLRVVERQIDDLDRAIAKLAERDDDWNHKAGLIASVKGVGAATANQLVAELPELGRLDRQQIAKLVGVAPLNCDSGRRRGQRHIRGGRHDVRVTLYMGAFNAIQHNPRFRDFAERLVAAGKPFKVIVTAAMRKLLVILNQMVKTNTPWNPALAFQFR

SEQ ID NO: 395352 - protein, 327 aa, unidentified
MRQAKSLTEKAKTTVAFDVCKAALDVHIRVDGKAFQVPNTYEGFDQVALVLADYDVSLVLMESTGGYEDAVACYFQSVGYDVAVINPRHGRNFAMAMGKFAKTDRIDAAILADFAAVIDTRPDRARFIKPPTDEERKFLSQMVARRRQVVDLLSTEKQRLSHADDYAKQSINKVVAFIESQLVEINKDVSFYLKKNYSGLSKMLSEIPGIGELSVGLLVGDVPELGQIGNRQLSAVIGVAPFNHDSGKMRGKRCISGGRQNVRNVLFMGVMSATRYNPVIKAFYDRLINKGKPKRVAYIACVHKLLRIINAMVRDGTSFNPDLHAAI

SEQ ID NO: 395353 - protein, 402 aa, unidentified
MNAVGIDVSKGKSMVAIMRPFGEIVSAPFEIKHTASGINSLVELINSVEGESRIVMEHTGRYYEVLAHQLSEANLFVSAINPKLIKDFDNDSLRKVKSDKADAVKIARYTLDKWQNLKQYNVMDELRNQLKTMNRQFGFYIKHKTAMKNNLIGILDQTYPGVNTYFDSPARSDGSQKWVDFASTYWHVDCVRKMSLNAFIDHYQNWCKRKKYNFSQSKAEEIYGKAKELVPVLSKDAITKLIIKQAVDQLNSASTTVESLRTLMNETASKLPEYPVVMAMKGVGTSLGPQLIAEIGDVSRFTHKSAITAFAGVDPGVNESGSYEQKSVPTSKRGSSDLRKTLFQVMDVLIKTHPQDDPVYQFLDKKRAQGKPYYVYMTAGANKFLRIYYGRVKEYLSSLPES

SEQ ID NO: 395354 - protein, 340 aa, unidentified
MHKPSTEVFLGCGIDVSAAQLVVALEDQGRRGLQRSFPNRASGHQALIVWLQKSGPCIRVCLEATGLYSLDLALALHAAAGIEVAVLNPKRVNRFAATLCRSKTDPADAQVLAEYARRMPFQPWHPPQAAALELRAITRHIAALTQQHTQQSNRQHAASATTTESRCVQQDRQRSLRDLERRIAKMRRAALAVIERDPELRLRFALLLSMPGIGEVSALNLLGELAVLAPGLSVRQWVAHSGLDPTHHDSGSSVHKPARISRAGNRYLRRALYMPALVAVRHDPHLRAFHQALLARRKAKLQALMAVARKILHAIFGMFRWRADYDGSRLFPQLELAQAA

SEQ ID NO: 395355 - protein, 350 aa, unidentified
MIVIGCDFHTRFQQIAMLEVTTGELVERRLEHENGDAERFYATLPGPARVGMEATINAQWFERMLQRHQHELWIGDAAEIRAARVRKQKTDSRDALHILDLLLTHRFPRIWIPSPVERDVRQLVRHRHKLVRVRTSVMNQLHALAIGQGLCRKQKLWSSAGRKELDALLLDPWAHRRRQDLLQMLDQLNPRIAELDRAVIQEAQSRPPAVRLMNEPGVGPVTALAFVLTIGPVGRFPRSKQVVSYLGLNPTEASSGGRQRLGSISKQGNAMLRHLLVEAAQTASELNPELRRDYQRLKFRRGSAVAKVAMARKLAVRLYWKLREAAQPSTAARMQGSPVNPVVDESLSPK

SEQ ID NO: 395356 - protein, 348 aa, unidentified
MAMVAEVVDAVVGGDTHKDTHTLQMLTPVGVAIASMTVPNDAGGYAAVIAWITEHAPGPRVVVGLEGTRSYGIGLARALTAAGLSVVEVEHPKREQRHGRGKSDPIDAHLGAVQVLRMDTDRLPIPRADGDREALRILLGARTELVTTQTRHINQLRALLLGGDDRDRALSHGRVAAAWLEQIIRRRAGTDETREQAVRRAEARRLAIAIRDADRELKTNRAQLTAIVDDLAPGLLTRYGIGAVTAAQAIISWSHPGRCRNEAAFAALAGANPIPASSGRTVRHRLNRGGDRHLNQALHTIALTRWRSCPRTYIDRRRAEGKTDREIRRILKRYIARELFRTLNAATA

SEQ ID NO: 395357 - protein, 452 aa, unidentified
MEKEEIKMKVINPHAAGIDVGSRSHWVAIGQGEKDFKEFGVYNEDLHSIASWLLENKINTVAMESTGTYWQSLYSVLMSHNIQVILCNGKFTKNIKGKKTDILDCQWIQKLHSIGLLSGSFLPDEATEQLRTFCRHRSNLLDSAASTSKKMQKYLRLLNLRLDVVVSDVCGLTGLTIIKAVCNGEKNPEKLASLRHFNCRKSEEEIAKALQSNGRKDYLFALQQELEMYEVYQQKIQQCDVEIEKLMRETIDNDDNKKQHVIDAKPHKRVNKNAPKNIDLNLMAYQYFEGVDLMSIEGMSHATILSIISEVGLEGIKKFPTAKHFVSWLRLSPNNKISGGKVLSSRIPKGSNRLKIALRNAANAIGNLKNSTPLADFFKRINFRKGRVSAISATARKLAVIIWNMIDKNVPYHNPKEYLFLDQKRKLGIVKRIQKQITKFGVTNEDLVFATI

SEQ ID NO: 395358 - protein, 341 aa, unidentified
MDYCGIDLHAEYSQVCILDEDGEVMETSRVRTSRKALERFFCRDRMRVALEAGGSSPWVSRLLGSLGHEVVVCSPRRVRLIAESSLKNDKVDAEVLARLVRLDPEFLKPIKHRSEQAQRLRGNLKVRSAMVEARTKWINTIRGLLRSFGYNVSGKVAHTFVERVDLMKLPDDLRAVIAPLLEQLDLLTGEIERCNEHLEEMVKELPEVEHLREIPGVGTVVATYFVLTIDDPGRFKNSRDVASFFGLRPSMRESASVSQFGRITKEGDPEMRRLLVQAAHALLRTRADSQLKQWALALAERKGKSKAVVALARKLAVLMHRLWVTGEVYQAFPQQEASQAA

SEQ ID NO: 395359 - protein, 348 aa, unidentified
MAIVEAARTTAVTGGVDTHLDLNVAAALDSIGGLLGVEEFPTTAAGHEKLLCWLAGFGEIARVGVEGTGSYGAGLARYLRGADIQVVEVDRPNRQARRRTGKTDAVDAIEAARAAQGGRALGAPKTRDGNVEAIRALVVARRSARDTRIKTMNQIRHLGFTAPDQLRQRLAGVSRSCLAKKAASLRPRADQGTVVFATTTALRALGRRVVALDEEAKQIDKLLDELVRATAPELLAVYGVGTDTAAALLVAAGDNPDRLRSEPAWAHMCGVAPIEASSGKSKRYRLNRGGNRHANAALWRIVITRMSSDPRTQAYVARRTEEGLTKGEIIRVLKRYVAREVYRYLRPA

SEQ ID NO: 395360 - protein, 350 aa, unidentified
MSNSRFAAADVHAATTTFAVLDDRGKFVMETVVETKAESLLWVVKSITGAVHLTFEEGTHAAWLYDLLRPHVAELVVCNPRKNRNDSGNKSDRIDARQLARWLRSGDLSPVYHGQDSTRVLKELVRGYENLVADSARTKNRLKAIYRSQGESTSGGDVYKLEQREEWLSKLRSSGLRSRAEWLYSQMESLGDLREEAEKAVLCEAKKHRPCSLLKSVPGIGPIRSATIVAHVATPFRFRTKRQFWSYCGLAVVTRGSSDWKIDGEELKRSRRPVATRGLNRNHNRHLKDVFKGAVRDAGVFRRHLNALVESGMRESMARLTVARKIAATTLAIWKKGEKFNLSKAVIRSE

SEQ ID NO: 395361 - protein, 326 aa, unidentified
MHTHFLGIDIAKSKFDCALLRPDGKVRNKVLSNNAQGFAQLLAWLDAHGVSSSELSQLHICMEATGIYWEALAEFLSDQGIVVSVINPAQIKSYGASRLMRSKTDKIDANLIAHFAKERCPAPWTAPAAHERVLRSLVLRLEALQNMLTQESNRLQVANPAIQPQIQNHIEWLNAEIKALAKMIKDHIDKHPDLREKRDLLNSIPGIGERTQAIMLAYFGSAQQFNNARKAVAFVGLDPRQHESGSSVKGKPRMSKVGHAFVRKALYMPAMAALNKTDWGKRFKERLASAGKPPKLIIGAMMRKLVHVAIGVLKSNKPFNSALHCA

SEQ ID NO: 395362 - protein, 418 aa, unidentified
MKKDISKTTKTQKQGNGKRKQLRETKRNVAGLEIAKKRMAKRKAKQNEVEQEVKAEAEAAAKFKAGEGEGYTIGIDIGDKRSRYCILDKEGKILRESSVATLPAGLKTVFSKLAGCRMAMEVGTHSPWMSRLLTALGHEVIVANAREVPLIYKSRRKNDKLDAEKLARLARMDPKLLKGIRHRGAEGQGDLLLIRSRAQLVETRTGLMNMVRGLVKSRGERLPGCTSEGFVVELLEGVDEAAVRALKPVMVLIEQMTEAIKGYDQQVEEMGKKHAEIARLAQVKGVGPLIAATYVLTIEDPERFGRSRDVGGYLGLVPGQSDSGESQPQKRITKAGDGYLRYLLVQGAHYILGPNGPDTDLRRWGQKLGSSGGDRGKKRAVVAVARKLAILLLVLWKTGAKYEPLRNSDKQEKQKAAA

SEQ ID NO: 395363 - protein, 348 aa, unidentified
MRFYTEAHQHYCGIDLHARSMYLCIMDGNGAILLHRNLNCSPEAFLTAIAPYREGLVVGVECMFAWYWLADLCAREDIAFVLGHALYMRAIHGGKAKNDRIDAYKIAALIKGGMFPTAYVYPAAMRATRDLMRRRNHLMRKRAELLAHVQNTNSQYNLPEFGGRISRSRKQREGISERFADAQVAKAIEVDCALIDHYDTLLADLEKHILACAKDHDPQSLMLLDSVPGVGSVLALILLYEIHDIGRFPRVQDFLSYCRLVKCKSESAGKTYGSQGAKIGNAHLKWAFSEAAATFLRNNPPAQKLHQRLVKQHGKGKALSIIAARLARAIYFMLKRSKVFDKEKFFNH

SEQ ID NO: 395364 - protein, 356 aa, unidentified
MQSKAISFKGQKVFIGIDVHKKTWSVTTLLEVGMPKTHSQKASAKELFDFLNRHYPEAEYHAVYEAGFSGFSTYYALKEYGIECTVVNAADVPSTQYESVMKSDPIDSDKMARALRAGMIRGIYIREKDNLDDRGLVRLRKSIQQDLTRYKNRVKHLLHANGVEIPELFDRSPNWSKAFINWLREEVVLLSSTRASLDMLIEQVETLRQNLLTVTRKVRALRLKKEYAEKYDALTSIPGIGPICAITLLTEIYDAKRFRNERQFASYLGLVPTCHSSGEKASFGEMTFRGNKHLGPLLIEASWVAIHWDDALSVAFTNYRRKGLMPQESIIRVARKLSNIIFAMLKTGNHYAPANA

SEQ ID NO: 395365 - protein, 372 aa, unidentified
MSQSSTLYVGMDVHKETIAVAYVAKDHDAEVVSLGTFGTRQCDIDNLIRKLQSKAKHLVFVYEAGPCGYWLYRYLTKKDYVCWVVAPSLIPKRAGDRVKTDRRDALQLARLMRSGDLTPVYVPAVDDEAIRDLSRAREDTLRDLKAAKLRLKAFVLRHDIRYTGRANWSPAHLRWLSEVICPTPAQQIVFQEYVQTVTEQTERLGRLELELHEQVQTWRFHPVVEALQALRGVQFTVAVTTVAELGDLTRFDNPRQLMNYLGLTPSEYSSGARRQQGSITKTGNTHARRALVEGAWAYRYPAKVSRHLQLRLEKLPAAIQAISWKAQVRLCKRYRHLMAKGKNANQVVVAIARELSAFMWAMAKQVAGSPKA

SEQ ID NO: 395366 - protein, 413 aa, unidentified
MALKIVYPICCGIDVHKTFVVACIASTNKGVTTYKRHRFSTYSKGLKELSQWLCENNCKDVCMESTGKYWITVFNILEDSCNITLAHPKYVKAIRGKKTDKKDAKWIADLFKHDLIAGSFMPPLAIRQLRDLMRYRFKLTNFMSSEKNRLQNSLTVSNIQLGNVVSDTFGKSSMNIIEKLLDDPTDISFDIEPLIHGSMKDKLPELELAIDGFITHEQAEKIKVIKQHYEDLKSRKDDLERIILILSAPYSEEINLILTVPSFKNIFSAITVVSEIGVNMDVFPTAKHLCSWAGLTPTNNESAGKKKSVRISRAGCYIKPLLVQCATAVVKSEKHPEIRNRYLRIKTRRGHKKAIIAIARMLLTAIYNILKKKEPYNAELYRKSDVLPVNREITVEQAILLAKTQGYRIKTVV

SEQ ID NO: 395367 - protein, 355 aa, unidentified
MTGTKYIGMDVHKESISIAVMNGFGKIVMECVIETKASMILQFIHGLRGELYVTFEEGTWAAWLYDLLKPHVSELVVCDPRRNALLQDGDKNDRIDAQKLAELLYLDKLKPVYHGEHGLRTLKELVRSYLTITKDLGRVMTRVKAIYRSWSIPCTGKQVYAPRHRGEWLPKITEGGVRRRAEFYYQQLDALRVLRQQVRGDLLADSQKHRAWKRLCQIPSIGPIRAAVLLGIVQTPHRFRTKRPLWKYSGLGIETHSSADHRSVHGQLQRAKKQVSVRGLNRSCNHDLKNLFKGAAVVASSKPGPFQEFYAALLAKGMRPEMARLTLARKIATIVLIVWKKGVSFDAQYLKPQTA

SEQ ID NO: 395368 - protein, 344 aa, unidentified
MPNYVGLDVSQKMTAICVVDEKGRRLWRGTCVTDPEAISARVLRHAGVVDVKVGVETGSMTPWLVHGLRSAGLDVECLDARRVKAALQMRLNKTDENDAEGLAQVMRTGWYRPVHVKSFDAHRARALLGARAQLVGMTTRLSNMIRGVLKTFGLLPGAGRGLRFDRRVEALLEGAPEIGSIVRPLLATWRQLREQIAVFDKAVQQRVRADPICRLLMTVPGIGALSSLVYVSTVDDPGRFSRSRAVGAHLGLTPRRYQSGETDRSGHISRCGDGLARTLMYEAAVVILHRVKRPLHLKDWAAAIEQRSGPGKARVALARKLSVILHSVWRSGEPFRWTPQIVAA

SEQ ID NO: 395369 - protein, 368 aa, unidentified
MVPPDRDDEPVREFKSFTANLNGLADWLEACEIDTVAMESTGVYWIALHELLESRGLTVYLVNARHVKNASDRKSDVLDCQWLQQLMSFGLLSGAFRPKDEVCALRAISRQRDMLIRYQARHVQHMQKALSQMNVQLANVISDIVGETGQKIVRAIIAGERDEHILANLMSNRIRASKDEIEKSLAGNWREEHLFALKQAILLYDAYSERLNECDRQLEAMPAALQVHKVEINQKKRRSNVKNSPRFDLRIHLIGMCGVDLTRIDGIEVTTAMKVLSEVAADMSRLKSAKRFASWLGLCPGTRILGEKVLSGASKHTANRATQALRMAAVSLKSSQSALWVPITGDYVADSTRQRQRQSQQQRTNWHA

SEQ ID NO: 395370 - protein, 412 aa, unidentified
MIVGIDVGSETHYARAFSWRNYEYSKKPFAFSNDEDGFASFKAWMDDIAEKHEMEKVIPGMEPTGHYWLNLGAYLQGQGMRPVHVNPHHVKKSKELDDNNPNKNDRKDPKTIAGLVNEGRFSYPYIPTGIYAEIRNLSNLRIQTQEEITRIKNRIARWFSIYFPEIKDVYRNPDAVSGLMVIKQAPLPCDIKGLGVDGVNKIWRDARLKGAGIKRAKTLVTAAEHSIGNTEAPRSARKEIRNLLNDYEIYKSRMDELMEEIEELLSEIPYIDKLMGICGIGIKTVSCFIAEVGDIERFDNPKQVQKLAGYAIVADSSGKHNGESRISHRGRKRLRYALYEAAISVIGKNKEFKEIHHYYRTREKNPLKKMQSVIAVSCKLIRIFYTILTKGIDYDGQKMLRDIVRPGMQSAA

SEQ ID NO: 395371 - protein, 387 aa, unidentified
MAKQRARTNDPLPMEVSGENEVGIDPHKKTLTATVLDGRGGTVATASFKVSGDGHRALLEWATSFGPVRRWGIESASGLGRHTAIFLIERGHDVRDVCPTRTAEQSRKRRQGKTDKLDSLRIAREVQADPDLPVAFKRAAGDVGPDETHELLGLWHNQRRSLVKSRRQLLNEADALLHKLPEKIRAALPDDTAVRPRLKALGDRDRTVMWDPVTALRLRLLDDHAAAIAELDAREREASRELGDLVRRVGSTLAELCGIAERSDAELLVETGDPRRFAGEGGFARFNGTAPLPVSSAEGDDEPKRHRLNRGGNRHINAVLHRMAVTQLRCEPRARQIYDDARGNGHTKKEAMRILKRHLSNVVYRRMIYDLNTTRISPPIDASQAAA

SEQ ID NO: 395372 - protein, 382 aa, unidentified
MDPETTRTNDDTPYPQYLYMAIELSHEKWKLGFTIGFGQAPRLRDIPARDLTVLVQEIALAKARFGLPEKATTHCCYEAGRDGFWLHRFLLTQGVTNLVVDSSSIEVNRRKRRAKTDRLDAGKLLIMLMRFNQGEPKVWSVVHPPSPEEEDQRQLHRELMALKAEQTHFINQIKGLLVGQGVVLPISKDFLSQLAQVRLWDGSLLPAALHARLQRDYERYLLVKQQIHQLDDERAKTIRTSTAPAVEQVRQLLRLKGIGVESAWLYVMEFFAWRGFVNRREIGALAGLTPTPYASGESRREQGISKAGNHRVRTMAVEIAWDWLRFQPESQLSQWYQERFAKGNSRVRRIGIVALARRLLVALWKYLETGSLPQGACLKATG

SEQ ID NO: 395373 - protein, 373 aa, unidentified
MPRYSTAFGMDVHLRSTTVCALDAETGEAVTRRFRGNPWGEVAEWMSGFPGPSLAAYESGYLGFAPQRELSGLGVDCVVAAVSKVPRSAADLSSKNDRNDAARMAKAILSHDISPVWVPSPEIEGLRDLAAAHDAATARLAAAKQRLLAFLARRGYAYGGTTPAGNPRKYWTYGFLRWLDGIHPADDGGIRALAALRSEVEAAAETRDDLLAEYRAAVAAGPLSAEVEALQSIKGCGFALAAAFASEVGDFSRFRSGRQVTSYFGLAPKQRSSADSVRLGGISGAGNALVRRLAVEGSWSYVQASHQPKLMPKGSGVPLEVRMHGRKGSERLLRRREEMLARGMPQAKANAATAAELVRWLWALGAMCREATE

SEQ ID NO: 395374 - protein, 321 aa, unidentified
MTHTLFVGIDMAKAKFDAALLNSEDKYRSKVFPNTAPGCHQFLDWLAKYDALGAHLCMETTGAYGRDLAHFLVQKQLLVSVVNPAQIHAFGKTELNRAKTDKADARLIARYCRMHRPAPWAPPAEEIATLQALVQRLEDLLGLQTMENSRLEAATGPARESVEAVLQFIEQQIEMVRLQIHIHIDQHPRLKEQRELLSSIPGIADNTAATLLAFLSPVERFRSAKQVVAYVGLNPRIRQSGQWAGKSPIAKTGNTLLRKALYLPAVVAKHHNPIIAAFCDRLLARGKRPMQVVVAAMRRLLHLVFGVLKSGKPFDPKFGLA

SEQ ID NO: 395375 - protein, 347 aa, unidentified
MSYYVGIDLHSDNNYIGMIDKKDSRILSKKLPNDLGMVLDTLKPFKRKIKGVVVESTYTPPEQRSRAGWYWLVDGLMDKKYKIHLANPSQMQQYSGMKYTDDKWDSFWLAYMLRLGILPEGYIYPKDIRPIRDLLRKRMMLVQLRTAYALSLQCMIIRNTGQELKVRETKKLNEEELNILFPDKNLVMSAQSNCEVMEFLNGQIDTIEKTVIKEVKLRYPFEKLLTVPGIGNILGTIIMLESGDMNRYQEVSNYSSYCRCVSSKKVSNGKKKGENNKKNGNKYLAWAYVEAANFMRRYCPQARSWYQRKVSKTNQIVATKALSNKIARACYFIIKDQTKFDPKILFK

SEQ ID NO: 395376 - protein, 426 aa, unidentified
MRVLYDRVAAIDVHKDMVKVAIRVPGAKRGTRKTDVLEFRTFYGVLQAMARELRGRGVTHVVMEASGVYTDPVYYALRELDFTEVMVINPAHAKALKGHKTDAKDAIRLLDLYECGLLSGSYIPDPDLREVRDLARYRMKTVQARTSEIQRLQKTLETAGIKLSSVVSDVTGGSATAMIEALISGERRGAVMADLAQTRLRAAGKMADLSMALTGRFTDHHALMCRLHRDRITIFDDAVKDLDAKIAPLVARYAREAELLKTLPGFGDVIVAGWLGAIGPAPHQHFATASRLASWATICPGNYMSARKSKGGRTGDGGAYIKPLLIQAAWAAVRVPGRLQARFRRLVRKFGGPRNMGAQKRAITAIAHTLLKIAYGVLKTGKPYADLGADFYTRRESPDARQDYLMRQLRKLNPGCVITITPAEAA

SEQ ID NO: 395377 - protein, 371 aa, unidentified
MADYREGFVGIDVAKLKNAIAVAESGRDGEVRYFGEVEATDVNMRRTIQRIAAKFDRVHFCYEAGPTGYGLHRLILSLDYECMVVAPSLIPRKPGDRVKTNRRDALALARLLRAGELTAVWVPDEGHEAMRDLVRARAAAVETLRVHRQQVSAFMLKHGRIYPRKKGWTMRYLRWLQEQQFDHPAHQIALQEMVDAVRVSKERVERLEKVIEEFIPNWSLGPVVRALQTLRGVELIVAATFATEVGDVTRFESPRQLMGYLGLVPGERSTGETVRRGSITKAGNGRVRHMPVESAWTYRHPPKVGAKKLYRLEAAPPKVREIAWKAQSRLTARYRMLAARGKRTTVVCTAIARELAGFMWAVAREAQTIKS

SEQ ID NO: 395378 - protein, 379 aa, unidentified
MALYLEGKTPLDANDLSPKEATQMSRDTKYIGMDVHKEAVVIAVRNSTGQLVMESIVETKASSLLQFVHGLKGELHVTWEEGTWAAWLYDLLKPHVHEVLVCNPRRNALLKEGSKNDKVDARKLSDLLRTGMLRPVYHGEHGLRTLRELARSYQTISQDLNRVMNRIKALYRGWGIACGGTQVYAPRYREEWLQKIEHAGVRRRAELLYQQLDGLQALRRTLRPELLAESRKHKASKLLRQIPCIGPIRAARLLGLMQTPHRFRSKRQLWTYSGLGIETRDSAQYRFVRGQLQRAKKPQQIRGLNQNHNHEMKEIFKGAATRASCGVSPLRDFYVALLAKGMKPEMARLTLARKIAAIALTLWKKEERFDAEQLKPQAA

SEQ ID NO: 395379 - protein, 425 aa, unidentified
MRNKQYTSQMEKRSRIGNHSLVIGMDIGNTFNAVCFMNEEGKVLGRCPKIYNSRKGFDYFYTTVEQAKKKHRFTHVLIGLEPTGHYWRKIAFFAKEKGYEVRFIRTTALKHQRELDESSPAKSDVKDAFTLANIVREGKYIDTVIEDGIFRELRTLAHARERTLRQNIGSKHVLQSVLDDYFPELRQLFWSMNAKSLWALLEAYPFPEDVRKAGSTAVTALLTQMIPMKRRAREKAQKICQAATESVGLKSIGVADRLRLKVTLEEVRRSDVKIKELEHAIKELLKQIPIARYLLSLPGTGHLTCGIFLGELGNPEHFGNPRQVIKYAGYDPKEDDSGSRVGRKVISKKGRWLLRKCLFYMALGAVQASSYFKGYYEYKQKGYNRPLKKKEALCAVVLKLIRVIFALIRDGRMFREELPRCEQAA

SEQ ID NO: 395380 - protein, 456 aa, unidentified
MKIPQSTIRLLTGRLVTILLNREVSTMKSNTQNAKIEAITEKTLVLGIDVGSETHYARAFDYSGIEYSKKPFKFSNTETGFVTLKEWILDLKERHEKDKVVPGMEPIGHYWFNLGKFLQDNEMKLVLVNPHHVKKSKELDDNNPTKNDRKDPKVIAGLVREGRYMIPYLPDGVYADLRTASNIRFQLQAELTRIQNRISRWFNMYFPEYKTVYGNPDAKSGMLILKAAPLPEDILTLGIDGVNQIWRDAKLRAVGKARAKTLIEAAEHSVGSKEGAVSARMEIRMLLEDYESRNIRLQEVMTLIEGLAKQIPMAEKLLEIKGVGIKTVSGFLAEVGDISRFNTPKELQKLAGLALVESSSGKHKGETTISRRGRKRLRYLLFEVAMSLVAKNPEFRELHNYYTTRRLNPLKKMQSLMAIAAKLIRVFYAMLTKGVDYDPKKMVSDIKRPAVYLQAA

SEQ ID NO: 395381 - protein, 407 aa, unidentified
MEVLYPRCAGLDVHAGSVTACARIATDAQVTYDHHTVPTTTRGLIALAEWLTTHGCTHVAMEATGVYWKPVWHVLDAQFTLVLANAMHIRNVPGRKSDMNDATWIADLLAHGLIRSSFVPPAPIQELRDLTRTRRQLVHEVARHVLRIQKTLEDANLKLTQVMSDIVGVSGRAILNALIAGEMDPNRLADLTRGRLKATRADLVDALHGRVTDHHRFMIKLHLTHIDALETAVTTIEARIGDALGPCRAAVSLLTTMPGLSETTARVLIAEIGTDMSRFPSAGHLISWAGLCPRLDESAGKRRSTRTRQTTPWLKPTLINAAWGATRKKDCYLRAQFLRIKSRRGAKKAILAVASSMLTAAYFMLRDGVEYRDLGAQHFVERDKEQLAKRLIQRLRDLGVAVEVKAA

SEQ ID NO: 395382 - protein, 319 aa, unidentified
MAEEVYVGIDVSKAELVVAARPGGERMTLTNDRAGIKRLVGRLSELKPRLVVVEATGGLQRQVVAALWTAGIAVAAVNPSWVRNFAKGRGLRAKTDRKDAELLALYAERERPQVRPPADAETQALQELVMRREQLVAMLVAEEHRLTHALGPVRKELRHHISYLEGRLKQIAEDIDKTVRRSAGWRRKSEIVRSVPGFGKVFCSMVLAKVPELGALNRKQIGALVGVAPVPDDRGTRHGRRAIAGGRFEVRNKLYMCGLVASRANPVLKKFYQRLVARGKPKKLALVAVMRKLIVTLNAMLKTNSMWRPPCLAVSVREN

SEQ ID NO: 395383 - protein, 337 aa, unidentified
MYHVGLDIHTKRIALCALDEKGQVVHRSQVRSIEEMLRTLKELRDRFEVSYEASCGYGHYHDLLQPLATRVLVAHPGRLRLIFRSKDKNDRRDAERLAKLLYLGETPTVHVPSVVVRTWRELINCRSQVIAKRTRAKNTVRALLRSAGVIPPKQPSLWTKSGLAWLRKRELPTASQQLRRDLLLEEIETLNRQVRRIEQQLNQQARQTAAVAQLRSMPGVGIRTAEAVAAFLDDPQRFADAKAVGRYFGLVPSQDQSGEKNRLGHITREGAPVVRQLVAEAAWQAQRRSPTVRAYFERVQRGDPQRKKIALVATAHYLVRVMWALLKHGTTWKEKAA

SEQ ID NO: 395384 - protein, 337 aa, unidentified
MESQLFMGCDISQDSFNFCLRNSTEIVLQGQIVNGAKPIRSWIKEMEKKQKFDLSKILFCLEHTGVYSAILLRELNERSLSICLESAMNIKLSLGLTRGKSDKVDAQRIAEYALRNADRLSLWKPKRRVIERLQLLIRMRDRLIKARTDLARFNQDSKRFLPAEDTRLLMAGTKQALDGIARDIKKADESIESIIRSDENLTRLNKLITSINGVGLITSSAIIVRTNEFKDFTEPKKFACTAGVAPFEHTSGKSVKGKTRVSHFAHKDLKRLLHMCAVGCISRKGELRSYYDRKIAQGKNKMSVLNAIRNKIVHRAFAVVRDNVMYQKDYQYHLRMV

SEQ ID NO: 395385 - protein, 369 aa, unidentified
MEDCRTAFVGIDVAKARNAIAIAEGGRGGEVRYFGEVEATLDNMRRIVRRIASKYDRVEFCYEAGPTGYGLHRMIMSLGYGCVVVAPSLIPRKPGDRVKTNRRDAMALAKLLRADELTAVWVPDESHEAMRDLIRARAAAVETLGIHKQQVSAFMLKHGRVYPRKKAWSMRYLRWLQEQKFDHPTHQIALQEGVEAVRIAKERVERLEKNIEEFLPAWSLAPVVRALQTLRGVDLIVAATFVAEVGDVRRVESPRQLMGYLGLVPGERSSGDTVRRGGITKAGNGRVRQMLVESAWTYRFPPRVGKVKLYRLEEAPPKVREIAWKAQTRLTARYRALTARGKKATVVCTAIARELAGFMWSAAREAQTA

SEQ ID NO: 395386 - protein, 352 aa, unidentified
MLIIGCDFHPSFQQVAIFDNRTGEMEEKRLQHREEAEQFYGSLAGQEVRVGMEACGHYPWFERLLEELGFELWFGDAGQVRASVVRKQKTDRRDAEHLMDLLRQNRFPKIWMPSLEVRDVRQLLVHRHKQVQARTRIKNQLQAMALSQGMQKKWKLWSKAGRAELEKLPLLPYAAQRRQRLLEALDGLEAEVVELDRRVQDEARQRPEAGRLMTHPGVGPVTALAMVLTLGPAERFASGKQVGSYFGLIPSEDSSGGKQRLGKISKQGSSFLRFLLVEAGQTVVRYDPQLQRFYRRLAVRKNRGIAKVAVARKLATRLYLMLREQWTYPQLCQAVMQVSPSHSVDRKRQPGA

SEQ ID NO: 395387 - protein, 460 aa, unidentified
MKIRLGIDIACRSPHHAACADETGALLWSGHRFRTSVDQLEELWARLPDGAEEVMVVMEPTRNAWVPLAGWFRRHGAVVIMVPTEQSSDLRDYLSKHTKTDRLDAEMLARLPVLHPEGLHPAEALGPGDALKRAVKIRSGLVHRRATAMQRLDSLLEILGPAWIDALGSRMTKTTFMFLARYAHPHQVKRLGQARLGRWFQHHTRRAWGPERAAAVIAAAEETIALWGDDGLDYEALAADIACEATIALEVTDQIDMLDRRIHDLYCEADPDQIALSVPGVGNVLAAQIIGRLGDPDRFTSLAAARSFSGLVPKRNASGLSDPAGGPTKRGDACLRAALFQAADRARQVDPQLAARYQRLMRDTGRHHNSATCTVAAVLLTRLVSCLRNQVPYELRDVDGRPVTTEEGRAIVRARYQIPEEIRAARRAVSRDNSAKRKRDERVKKGVAKRSKTPPVPTPA

SEQ ID NO: 395388 - protein, 400 aa, unidentified
MQININTYSYYAGIDISKDTFDVSVVDQDGTHLVHKQFVNNQKGFKDMVSLTKKQGWMPVLFAMEGTGGCEQKLLDYLYKHKQAVSRQEPCRIHYHRLSQGSRQKTDYVDSLIIADYALKNRLRLYIPKGESYRSLQEISRTRRMLVRYRCSLQQRFSHAQNAHAKAVLQRSIDHCTEDIELLNSAAAEIIASNDRLKEDYCLLKSIPGVADITSNFFLGLIGDISCFATSAKLVRFVGVNPCPHQSGTSINSESRISKMGDPHMRALLYTSAMVILQMVDHGVKTLHPNMHRFVAKMRAKFGPSSGKKVLCAVMRKLLILMWTVLTRRKAYDPCYGLEPQDAQANQTPPSDDTGLVQTRAGVATDSAGEGNEAGQDSGVTGSGCMDGKPLCDSSLAMSG

SEQ ID NO: 395389 - protein, 323 aa, unidentified
MNKDIKYFGIDISHLVFDVTDSDGNYHQFKNNSSGFKKFVRLLDFDSHCVMEATGYYHYQLAYYLLENGINVSVENPLAVKRFIQMKLSKIKTDKSDSKLICEYAQQVGLKLWKGNSKDEMECLQITRALSVYTKQSTMLKNKLHGEAVLGQPSKAVVSSLKRSLRQLEKEIKTLEDKLLVLVKQTHQDLLTRLETIPGIGRKTAIMLVVLTGGFDRFSSASELCSYAGLTPVIRQSGSSVKARPRISKIGNQKLRNLLFMCSFNACKYNKACQDLYERIVAKGKSKKLALIAVCNKLLKQAFAIAKSGLIYDNTYRSTLVKN

SEQ ID NO: 395390 - protein, 341 aa, unidentified
MSYIGVDLHTNSFTAAYRTRQGRQRVATFGITEMSEFRKSLRRSDDLAVEATGNTAWFVKSVRDRVKRVVAVDTHKFEVIRRSVKKTDKRDAKTLALFLSKDMLPEARMKTEQNAQLHSLAATRDKLVKQRTALINKIHNVLNRYGIKFKKESLCTERGLRSVFSFDWDVIVKIELEVLVDQIRSLSSNIKKLDDQISEHGGKLKGHKNLTSIKGIGPRSATVLLSVIGNVNDFADEDKLSAYFGIVPRVRDSNETLRHGRITKHGSKLGRTTLVQCTLAAKRYSPYLRDYYERIKRHRGSGKAIIATSRKLLGIIYSTLKNDWVFEDFPNFVLANSCVKK

SEQ ID NO: 395391 - protein, 391 aa, unidentified
MIYVGIDVAKDKHDCFITSSNGEVLFKAFTISNNQDGFNVLYQRIESVMEDVTKVKVGLEATGHYNYNLLGYLIDKGLTTYVINPLHSNLYRKSLSLRLTKTDKVDARTIAYMLMSDVNLKSYSDTSYHNEELKSLTRYRFDKVKERAKLKTSVSRLVCILFPELEKLVPTLHMASVYALLSEFPGAKHVAGAHLTRLKNLLSDASKGRYGKDTAITFREAARASIGSNVPAKSLELKHTIQLILELGSEIEEIENEIKIIMDEINSPILSIPGINYRMGAMIIAEIGDFSRFDSPDKILAYAGFSPSTYQSGQLDSAYSHIEKRGSKYLRYALYNAAKYVCHWDSTFAGYLAKKRAEGKHYNVAISHSVKKLVRVIYHLVKSNQQYIKVA

SEQ ID NO: 395392 - protein, 364 aa, unidentified
MKIIGCDFHPSFQQIAMVDSETGEVSERALLHADGEAQRFYEGLKGEVVVGLESSGNTLWFERLLEKLGHKLLIGDPTAIAAADPRRQKCDPRSARHILQMLLEKRFPVIWVPSMVERDVRQLLKHRHTLVQIRTRVKNQLQHIAMNQGLQKKKQLWTKAGMAQFKSLPLEPWTKRRREDLLKILEEMEAHITELDKAVTAEAQRWPQAVLLMTHPGVGPITALATVVTLGDVSRFERGKKVASYVGLVPSEDSSGERRRLGAITKQGNRFMRFLLVQAGMSAAKGDAGLGRAYKRLSQKKHHGVAKVAIARKLVVRLYWMLRTNTRYPEVVRMQGSSSHPVVEVKADPLNGRPASRCSTSSGQ

SEQ ID NO: 395393 - protein, 347 aa, unidentified
MGTRSYEGKQVYMGLDVHREFFVASCICGGVVVKRCRMPGTAEAVISLVSKEFGGASVRAAYEAGYSGFWLHRKLVAAGIDCIVVHAASIEVSSRDTVKTDKRDSLKIAQQLAAGRLRGVRVPTEEEEQRRLLTRTRDQLMNKKRRVMVQIRMRLHYFGRFPESIQRRVKLQDVEDILVGLEGELQRTIGMLRDEWVELAKRIKEIDRLLVEQAKHDPLDAVYRSVPGVGPLISRILSAELGDMSQFRNERALFSFTGLTPSEHSSGGHICRGHISRQGNTRLRHMLVEAAWKAVRKDPVIKEYYIKLSERIGKRKAIVAVARKLAGRIRAALRKHEHYTLDYRAAA

SEQ ID NO: 395394 - protein, 348 aa, unidentified
MDHFIGLDGHKTSCTLVVLNERGKLKRKAVLPTEEKALLEFVQTIPGRRHLCLEEGSQSQWFYEIFSAHVHDLAVVQGRKSPGNKDDARDALKLAERFRIGDLGPRIWKVAEPLATLKDLVRSYEMINKDLVRVKNRIQHLFRSRGLASCKEGCPFCTGRLGCQKPGFHQILERLRQQQEHLEPLKAEAQKAMVTEANRHSITRILKSAPGMGPVRSAQLLAIVITPYRFRTCRQFWCYCGLAVVQRSSSDWIQQPNGSFRFGSVRRSRGLNHNFNHMAKAIFKGAAMTVLTRMSDEPLRQDYQRLLDNGTKPNLARLTLARKIAALVLAMWKNQEVYDPAKYRLPRK

SEQ ID NO: 395395 - protein, 353 aa, unidentified
MTDTPSIAWLGLDAHSRNCVLAQLDDQGNEINHWRFPTDPRQLLKHLQAIPAAVKRLMLEESNLARWISQLLRPHVQQLIVCDARRNRLISQDAHKHDRRDAFALARLLRLNEYRSVWQPTDDQRVLFKRAAQAYENSVLRQTRLKLQLKSLFQHWGLFPTGATVFSKAGRSGWLQKLPYHALRSQALLLYELLDQALAGQSQARRLLCQAGRLFPEVQRLRSAPGVGLVGAHLFVAYVQDPHRFAKFSRLTRYCRLAIRDRTSDNKPLGFKQLDRQGNGVLKAISYRAFLQAAKRRSGPLWDFYQASLRQTGSNTHARLNTQRKILLVLWTLWLKGEEFDPNKFSHPQPINV

SEQ ID NO: 395396 - protein, 345 aa, unidentified
MKITTVGIDLAKSVFQIHGVDERGKTVLRKQLKRSEMVTFFANLPPCLIGMEACASAHHWARKLIAQGHEVRLMAPQFVKPYVKTNKNDRNDAEAICEAVARPNMRFVPVKTLEQQTVLALHRARAGFVKARTAQANQIRGLLSEFGIVLPQGIGQLCRRIPEILEDGDNALPAPMRALLNRLLAQLKGLDRQVAELKGEIVRWHLHNEDSQRLERIGGLGPLTASAFVASLGNAKSFKNGRQVAAWLGLVPRQDSSGGKTRLLGISKHGDVYLRTLLIHGARAVLRHLEHRAHRTDAWLRRLLARRNKNVAAVALANKNARVAWALLAHQRDFTPDYVSTAPNR

SEQ ID NO: 395397 - protein, 357 aa, unidentified
MATYYIGADVHCNNIEIAIMNRKKIIQRYSVPSSVPAVSQVLDSYNGKKYMAIEEGPMSGWLYRNLRQKVERFVVADPRRNKLISSDGDHDDKIDSAKLAMLLAGGYLREVYHSDDDQRAELKNWVSLYNDRVRDAVRNINKIRARCRMHGVTIPRKVLRQPEHRAAWLSGLKNTALSNQLLMLWIGYDATAKQARMSKQRLINLSKKYPIISIWKQLAGIGIIRAVTIFAYIDTPWRFRKKNKLWKYCGIGLQRTTSGTDKKGKPKPARLQLPWASNRILKNAILGAALTAINQKQNSFKTDYERMVRNGIVPSNARHTVARQLLTVMWGMWKRSSQEGLDEVSLPKLNEKSIYVY

SEQ ID NO: 395398 - protein, 388 aa, unidentified
MNRIIKIGMDVHSTNYTLCAMEPVLGAEDRIYGEIQVAPDYKAIVAFIASIKMKLGLSDKCSFECGYEAGCLGYTLYNQLTSAGVKCVILAPTTMLTQRGKRIKTDRRDARLIAQCLCYGGYNPVYIPTGEDDAVKEYLRMRDDHKLTLKKLKQQIGAFALRHGHQYTGTKWTDKHIAWLRKLELDPIYQETLNEYMASYDEQEAKIERFNKRIEEIAAQSRYKENVGKLCCFLGIRTHTALSLIVETGDFTRFAKGNTYGAYLGLAPGEHSSADDVNRLGISKAGNTHLRRLLIEAANSICKGRIGHKSKELCARQKGQSAEVIAYADKANIRLRSRYYKMIRHGKKKNVAIAAVARELACFIWGMMTGNISVVSRAGSSVPAASQG

SEQ ID NO: 395399 - protein, 345 aa, unidentified
MTTFKINKNDHESKLSLQAGIDVGSEELILVVRKNSKSFDPQKFTNTPADRARLVKKLAKLPGIIVCLEATGIYHFDLAVALHDAGVSLMVVNPKSSHNFAKVLMRNSKTDAVDANTLAEYAERMDFVAWTRPTNETIALRCFSRRINSLTGQKAAAKNQLHALTATQETPKAVLRDAKLAIIQLQKRIDLLMAEALALISKYPELERVLELLIGITGIANTSAIALMGELLLLPPDLSHREWVKFAGLDPKAFDSGKSVHKKTRVSKAGNRYIRAALYMPALSAKQHDPHVSAYFQHLVLTNGKEKMQALCAVMRKLLHAIHGMLKHDVPFDNTRFYTIPASAG

SEQ ID NO: 395400 - protein, 387 aa, unidentified
MSRNARVPVPATTLDQDSTLVVVLELSARSWLVGARVPGIGRMSRYALAPSAEALAAWLDTAKARAGTAGRMVVRVVLAYEAGRDGFWLARYLEARGVEVYVIQPSSVLVDRRARRAKTDALDVEMLMRTLLAWLRGEPGVCSMVPIPDVAEEDGRRPVRERQKLIGERLALLNEIDGLLATLGITGYRPLRQDRRARLAALRTPEGDPLATNAAARIGRILDRLELVMQQIAELEQARDAVIAKAAAASEAETMIRGLARLKGIGAELATVLVWEAYVRSFPNRKALGAYAGLTGTPFASGSTTREQGISKAGNRRLRSSLVELAWLWLRYQPDSKLAAWFRSRTGSVGSRMRKVMIVALARKLLVALWRFCRAGVLPEGAALKAA

SEQ ID NO: 395401 - protein, 335 aa, unidentified
MRQMVKVKASRKFENNQQGFAELYKWLQGHYKDQNIPLDIVMEATGVYYEQCAIYLYQKGLNVIVVLPNKSKKYLQSRGIKSKNDKIDAKGLAQMGAEQRLTPWQPMSDFYYKLRAFTRHYESLQNMRSNLKSQLHADNAGMYANKQVIKQLSKLIETVEKQIAEIEKSIEQHIASDNAIQKKVNAVIKIKGVGLLTIATLIAETNGFALFKNAPQLVSYAGYDVIENQSGNHVGKTRISKKGNRRIRRMLHLPAFNVVRYKVPVFTSIYNRTLERHQIKMKSYVAVQKKLLVIIYGLWKTNETFNEQYHKGNITGDVKSVHTSRLSFAEAVQVA

SEQ ID NO: 395402 - protein, 382 aa, unidentified
MREESLTMAEEIEWFVGIDWASQSHQVCLVDARGECLGERAVAHGGLGIEELCDWLIARTGATPEVIGVAIEMTQGPVVEALLERGFCVYGINPKQLDRFRDRFTVAGAKDDRRDAHVLGDSLRTDRHAFRRLSNDEPVIVKLREWSRMADDLQQERARLASRMREQLWRYYPQMLELADDLAADWFLDLWNQAPSPAKAARLRQTTIERFVKAHRLRRWQAPEVLRILKQKPLSVAPGVVEAASDHIRTLTVRIRLVNQQLKAAHRKLDELCAQLVPSEEDEPGQQCEQRDVVILRSMPGLGRTILAVLLAEVWQPLRRRDYHALRSLSGVAPVTRRSGKTSVVVRRYACNKRLANALYHWARLATPYPTPKSRRSCRGRA

SEQ ID NO: 395403 - protein, 389 aa, unidentified
MILVGIDVAKDKHDCFIQTANGKVLFKAFSFANNYEGFEELYAKILSCDDADVRIGLESTGHYSYNLLGFLLSKELPTFVFNPLQTNQFRKSLSLRKTKTDKVDAKTIALMLATESDENAYSLQAYQNEELKSLTRYRADKVSQRSKLKQSLSRLVTILFPELESAVSTVHSNSIYAMLLKYPSAKDVAKSQFHSLVNLLESTSRGKIDKDKAKEIRNLARKSVGVYVSAKVLELRHTIKLIQILDEEVAEIEERIQNHMQELHSPLESIPGISTRLAAVIEAEVGDFQRFSSPDKILAFAGLSPTTYQSGKYTSQNATMEKRGSRYLRCALFLAAHLVGRYSKTFAAYLKKKRDEGKHYFVALSHVAKKLVRVIFHLQRTGKSFSDFA

SEQ ID NO: 395404 - protein, 506 aa, unidentified
MTDKKRWRNRKGRKEWARRLQSEDPGLEVVHPHAAGIDVGNGVHYVAVRPDRDPQPVRRFECFTADLHRLADWLRSCGVKTVAMQSTGVYWIPIYEILEEHGIQVYLVNARHTKNLPGRKSDVQESQWLLKLHTYGLLNNSFQPPSEIRVLRTYWRQRGEHVRGAATCVQRMQKALTQMNVQLANVISDISGLTGQTIVPSIVAGEHDPWKLAELSDPRIQASREEVAKSLEGNWRPELLFVLQQEVAMYDTYQQRIAECDQQLQEHLASFANIIPPQPREEEPQRKKTKPAKNAPRFELPSELQRISGVDLTRIDGIDVMVAQTLISEVGLDMSRWKTEAHFSSWLGLCPDNRTSGDKVLARGTRRVVNRAATAFRMAAVTLMRSRTYLGAQYRRLRTKLGAPKAITAMAHRLARLVYRMLKYGQHYVDKGAEYYEHRYRRQQIEFLRRKQPNWASRSHQHKLEGVSGEHRPALRAGCMSLKLLQRAGGPWRCAATIRGTTWLGS

SEQ ID NO: 395405 - protein, 358 aa, unidentified
MQRNKISFKGQKIFVGIDVHAKNWEVAIAPEVGIVKRHSQKPSAKELFDFLKKNYPDGDYQSVYESGFSGYSTYYALKEVGIDCMVIHAADVPTTQYEEVMKTDRVDAVKLVKSLKAGLLKGNYIPEKQYIDDRSVVRIRKTIQKQLSGYKSRVKHLLHCHGIEFPERFSKKQTHWSRAFITWLMNDVRLMSDTRASLDLLIRQVEVLRGTLLEATRQLRMMSQTERYKHRHDLLRTIPGIGIIVTMSILTEVCDVKRFHNENEFAAYLGLIPTSHSSGEKTVHGEKTFRGNKQLGPMIIEAAWITISRDAGLGAQYFQYKQRMEPQEAIVRIARKLSNIIFSVLKNEKEYVPYQTGN

SEQ ID NO: 395406 - protein, 318 aa, unidentified
MAMKKTVSRKQRFFNKINFTTDDEVYVGIDVHKKNYHIAIRLNGALALTFVSPSDNIAIARMMCKLNPAVKKIVYEAGPTGFSLARALEKASLPVAVIAPSKTPRPSAQQAKSDHLDCRKLAEFAEKDLLVEVAIPDSRQESDRQVVRLHNHLRDKRKRIKHQIKSFLLQHNIPEPDGLKDWTKRSIVQLRNIELCRQLRFTLTVMLDELNYLLTQIKRVQLELKNIYSKEHHRRQIEILQSHPGVGPITARHFRAEVFNPERFDKATQVSRYLGLCPHVSQSGQKRTDGRLMKAGQVKLRADLVEASWTWIRFDPAA

SEQ ID NO: 395407 - protein, 374 aa, unidentified
MAMTIVEAPVGITGGVDTHFDTHVAAALDPLGRLVGTESFDADAAGYKALLAWLETFGQVDKIGVEGTGSYGVGLARFLRRRGVEVIEVNRPNRQARRNHGKSDPLDAVEAARAVVSGRALGTGKTKDGPVEAIRVLVVAKRSARQARVKAIVQMRHLVITAPDQLHSRLKGLSVTALVAESAKLRATRATDPVTAATEASLCSLAHRVQALEAELEELNEQIEALLFATAPELMARFGVGPDTAASLLVAAGDNPERLHSEAAWAHLCGVSPVPADSGMNAGHLRRHSGGDRQANSALWRIAMVRIAHDPETRMYFDRRVKEGRTKRDIIRILQRYIAREVYRYLPRGCMPSLSDWLMNVLSAVFTPEPLGGA

SEQ ID NO: 395408 - protein, 421 aa, unidentified
MKKSQRIVGFDCGEDGHSAVLLDTAGEFKERFGVVNERGQIQELLAKLILAVGPEAQLVVVVESKRSHGRIVADVALELGCDLRQVNTVALNHFRDLEGQPRKDDEWDAYLGARMVFLRMGGCREATETTEEERTLSRLTRTHSRLVEDRKRHVARLRAVLLELTPEVLHSSWEGPQPGSKAMLYLLERWPGFEGLERAQMRSIEKILRRCRYGSRATYVARLIRKMARGISIAAEERHAFTLELDLLARQIRFCDESRDRLRAEIVHRIERHPVGQKLLDMQGNGPVITGVLVSELLPVTRTSTEPKCATYAGVTPLSRKSGKSLDKDRLTQGVNKRVLHALYTASVVAIKHSAIDRAYYQKKLRDYAGHPKPHVAAFIALSRQRHKLVYKLMTTDARYDKEVLIAAHLARIEQERPAAA

SEQ ID NO: 395409 - protein, 406 aa, unidentified
MELNPIFRCAIGLDVHQKQVMACVIGEHEDGTLITEVKGFGGFKRDRRALAEWVMRWKPNIVVMESTGIYWRSPYTALERAGVIPLVVNARHVKQVPGRKTDVADCQWLAVLARCGLLRGSFMPPEELRNLRLIARQRQKLTGTLAAEKNRLHKVLTDGGVRLSTVVSDLHGQSARLMAECLIEGGTPEDALKFASKRLKASPEELHDALEGELTEVHRFVLREILAHIRELEARILRFDAELKRSLEPFRWAVELLQTMPGIDEVGASMLVVEIGVDMTAFGSADRLASWAGVCPGNNESAGKRRSGQIRKGNPYVRRLLCEMANAARHGQCMFKGKYAGLAIRRGHKRAIIALAHKILKIVFILLARKETYRDSTVDYEALAIKRNAPRWIAKLRQFGLLPTAA

SEQ ID NO: 395410 - protein, 387 aa, unidentified
MAQVNDLSRSLTAFDPISTLVVVVEMSKASWLVSGVVPGVERQPLKKLEPDATALLRLIERWRSEAIRAGRPINRIALAYEAGRDGFWLARWLIARGIEAHVIHSASVAVSRERKRAKTDRLDAAMLMRVFLGWLRGERGHCGMVVIPTMEEEAARRPSRERENLVNERSRITNRMKSALARLGIRGFKPHLRKAPERLAGLRTAEGTGLPANVIEEFRRDMARLALVRDQISSIEKTRAERLERAPDTGPHAMVRLLARVIGIGIETADMLVREILSRKLRDRRAVARYAGLTGSPDESGLKRREKGLAKAGNARVRRGLIQLAWRFLMFQKDSALAQWYRSRTEGPSGARKTTMIVALARKLLIALWRLVTTGEIPDGVELRPAA

SEQ ID NO: 395411 - protein, 320 aa, unidentified
MTILTSPTVVGIDVAKAEIVAYREDLNATQAIANDRDALGRWLNTLPANSSIALEATSTYHLDTAELAHEIGHRVYVVDAYRLSHYRESIGQRAKTDPCDARLLARYLSSEQKRLRLWSPPPQAYKLLKSLLHRRAELINLRVSLTLSWSGEPLLKDELAQQLKSFKQAEQVIQKLLHKVSKEAGITENIKRCKAIEGVGDLTATGLATAFMRGQFANGDAFIAFLGMDLRPKDSGKKAGPRHLSKKGDSELRRLAHNAAMAASRSATWKPYYESYLARGLAKTQALVILARKLCRVAFALMKNQSEYQPNLRLQGLPAT

SEQ ID NO: 395412 - protein, 366 aa, unidentified
MSSVTSAAGPIHLGMDTSKNTIVVGILMPGDEVPVIDRIWNEEGAVRHLVSRLGDPAGLRACYEAGPCGFELHRLLASMGVACDVVAPSLIPRRAGDRVKTDRRDASRLARLHRAGELTAIRVPSPAEEAVRDLVRVRAALLADRKRAQQRVTAMLLRHGRVWRSGSYWTQAHEQWIARQSFDEPAQAAALVYYRAGLDTRRAELDAIEADLRTWAGRDPLAPVVARLGCYRGIAELHGLALAAEVVDWRRFPSARAFMGFTGLVPGEYSSGDKTRRGSITKAGSEPVRTALVEAAWAYRFKPAIGVTLRRRQHDAAPGTLARSWKAQRHLHAKYKTMTSRGKPPGVAVTAVARELAGFVWAEMTS

SEQ ID NO: 395413 - protein, 409 aa, unidentified
MRYYVGVDWADQTHAVWVVDESGTKITVRTVPHTAAGFSEWGRELDEWRAQGIERWAAIERPDGRVVDFLLDHGVVVYPVNPKALDRARDRFRQSGAKSDPFDARVLADFLRTDHRHLQALQPSSDAAQELKLLTEDCQRHIRQQTRLVNQLTATLKAYYPRALEVAELTTALAREFLQTYPTPEALTTLTARQWQRWARGRRVSAARIGALWAVLHQPQLPVPAHVVRAKARLMQSLVEQLTPVVTAVAQYRTAIDDFFARMPAAQWARTLPIGKHGITAPTLWARLGDAPGRWESFRHLQAQAGAVPVTKRSGKQRVVHFRFACDKSLRHVVGQVAFLSLLSSDWARAYYDQQRARGHGHRQALRALGAKWLKIIFVMWHRQVPYDEQYHLATMTRQQLRQRQKQIA

SEQ ID NO: 395414 - protein, 364 aa, unidentified
MKEEKAKTRHVGIDLGKRTYHMAVAGKGGKVTMSNGTTYTAGRQGLYKKLRPGDKVALESCSLAFIMAKEMEAAVGCKVYVLNPGRLSIIYKSMKKTDKEDALKLAHILEDFAEERLPVVPVPSDKEMKRRKILANSRRAQSNRNRQINLLHALFVAQGITSKARKDLATESARKEAVKELAGIERDEAEYLVQCLDLCESRIEKLDQMTAEESAGDEEIERLQSIPGVGPKVAFAFVSHVGAERFENSGQLSNYLGLVPRVYMSGDTVRYGQITKRGNSYVRALLVQGAWALVRSKAGGKLKELYEYMTVEKSKNKKKAIVAVARQLAEMMYTMMRDKTWYARRKFKPGEDAASELAQLAMSA

SEQ ID NO: 395415 - protein, 397 aa, unidentified
MRLMGFAFAQPILVIARSVIVCRSVRNGLPRTCTPWQAAGDRIEPILSSLWLPCSVIVVSTFIGPGWLPEQLGSLHKAGSTKMTQTNITTAGIDTSKLKLDIAVNGRTERWQVANALPGWRALAGNLAKAGVTRVGIEATGGYERGVVEHLQAAGFTLLVLQPVQVKAFGRVHLRRAKNDALDAALIAACAAALDEPEIAPDPRLTDLARHLTFLEQIEEDIARFKTRLEHIDEPTLRRIVNSDIARLKVRRAAQIRYIAKHLRTHHDLAVRLDLVLSIPGIGERTALALIIRMPELGRISREEAAALAGLAPFDDDSGLHRGQRHIAGGRGRLRRSLFAAALPAAFRWNKALVALYARLTAAGKSHKAALIACARKLLIYANTVVQRGTPWIEKAA

SEQ ID NO: 395416 - protein, 388 aa, unidentified
MTSTRFVGIDISKATFDVAFSADLRAVYSNDPAGFTQFRQALADDDHVVMEATGTYFLKLATFLSAQDITVSVINPAVISYFARMRLVRTKTDRVDADIIREYGCFEALSAWTPTEDVFIELNQLDSHLNGLQGDRNRVIGRLEALQQCAKINAYTLEDLQQQLTDLEVRIKQTEKELVVLTQAHFPELLTLLTSIKGIGQKTAIMFIVLTRGFTRFSSPKHFASFLGLSSFIRQSGTSVRGSGGISKMGNPRMRQLLYMAALTARTRNSACKTFAERLAGNGKPPKVVRIAVANKLIRQAFAVCLKGESYSECVEGSTSTRSSFRPRHFVISTKVLRHFDQGTSSFRPRYFVISTVVEKSPARDNPNPRSLRSGFASSRDDGMVRLK

SEQ ID NO: 395417 - protein, 363 aa, unidentified
MPHVTSIGLDVHARSVAAAAFNPFTGEVVRRSFGTDASEIAEWALGFEESGPTGFHMARELRALGLDCAVAAVSKMQRPAADARRKNDRRDAEFIARMLATHNIVEVPLPDMAVEAARDLDRALDDATRELRRSRQRLNMFLIRLGHVWDERNADGARKKAWTRAHWRWVSEIRLEGPQRDALEYYVTAARCAESDRRQLERRVVALAGTDRWRATVEALSCIKGVDTLTAFRLAAEAGSFSRFRSAPAFASWCGLTPSEHSSGESERRGGITKAGNALARTALIESAWHYSTCSPRPKAPAPGTDVPPAIRSRADDCTARLHRRREALGAAGKSACKANAAVARELACWVWEIGCRSEGTVL

SEQ ID NO: 395418 - protein, 346 aa, unidentified
MVLIGCDFHPSWQQVSWLDMETGETGEQKLVHAGGEAKQFYEQLAAPVLIGMETTGNSQWFIELVEDLGHEIWIGDAAQIRASYVRKQKTDKRDAAHILKLMVEGRFPRLWTPDREQRDLRQLVLHRHKLVMIRSRVKNELQHLSLNKGMQRKRRLWSQAGQKLLRELPLKKWAACRREDLLGLLTMLDEQIGKLDGAVEHAAEENPQSKLLMTQPGVGPNTALAFVLTLGDVGRFPRGKQVASYLGLIPREESSGGRQKLGAITKQGNRMLRSLLVEAAQVAVVHDPGLRKQYRHRCHQKPKAVAKVAVARKLAVRLYWMLRTNVAYPEIVRIESSSGLPLVGAS

SEQ ID NO: 395419 - protein, 361 aa, unidentified
MGCLLTPGIEPQRRRIAVERYIGMDVHAESCSLCVLDARGKQVRGEVVETNGQALVQYLKQFSGRLHLCFEESEWAGWLWEILSPHVAEVVVIQGLRRRGSKSDAIDARALAERLRTGQVGKPIFKAPQQFAKLRELAQVYALLTQDVTRAKNRLKSRFRRRGVRCPGDEVYSVEGRKKRLGELPAAMRPAVELLGVELDCLEELKSETEGAMVEASHRAPISRVLETIPGLGPVRVAQILPIVVTPHRFRTKKQFWAYCGFSVVMHSSSDWVQIDGQWTKARVAKTRGLNFNFHRTLKYIFKGAATTVIAHARPNPFRATYDRLCAEGTKPNLAKLTVARKIAATTLAMWKSGEEYDPKR

SEQ ID NO: 395420 - protein, 396 aa, unidentified
MYFLGIDIGKNTHVASLLDMDGKIVFRAFSFSNTTEGGESLLAKLATLGIPPAELVIGLEATGHYWLSVYSYLHDRGHKLHVINPIQTDGWRKGVEIRRRKTDVIDSILIAELVRYGDFVEAQLPDEEVLSLKNLTRFRSYLVDSIADLKRKIICVLDQVFPEYQSIFSDVFGKTSKEILLQFTSPADLESVSADTLAALLSQLSRKRIGLEAAEKLTNAAANSFGVTFCRNSFTFQLRTLIEQMKFIESQVKDVEAEIETIMTSLRSPVMTIPGIGKVTAAVILGEIGSIDRFDSPAKLVAYAGIDATVRQSGEFDGTNARMSKRGSPYLRRALYQAALAASTGRNPDPVLRAFYLKKLSENKHHSVCVGAVSRKLCYIIHAVLKENRPFEVRIP

SEQ ID NO: 395421 - protein, 350 aa, unidentified
MVMIGTDSHKRTHTVVAVDDVGRRLAEKTVRTNSDGHLELVRWSAQFENVSFALEDCRHLTRRLEADLLAGGCRVVRVPTKLMAGARRAAREPGKSDPIDAEAVALAALRHPDLPIAELDGPAREVKLLSDHRHDLVVQRTRIASQIRWYLHELDPDLLVPSRGLRRHCVVARLQTHLEHHDGVVARLTRNLLTRCNELNHQINALEAELRDLVRRIAPSLLSVPGCGVLSAAVMIGETAGVHRFRDKDAFARFTGTAPVPVWSGAGAGKVRLNRRGNRTMNCALHMIAVTQARGVGPGQAYIAKQHARGKDKTAALRLLRRRLSDTVFTALRTDHISTASTPTVTAMAA

SEQ ID NO: 395422 - protein, 316 aa, unidentified
MTSIICGVDVASKSLEARIGQQGAAGSFANDAEGIAALGDFCRAHQADLVAMEATGGYEQQAFAQLSGQGLAVAILNPRAVRQFAQSMGSLEKTDRIDAGMIAWYAEVKGAQPVCLAPENQQHLRALVTRLRQLTDVRSAQLNQQRLVTDREVQASFKKLLALLTCQIGELENNIAVLLAKDPLWRQLDQAFRTIKGVADRTVARLMAEMPEIGTLSNKTISKLAGVAPLANDSGKHQGKRAVRGGRASVREILFIVASVVGRHEPDFIAFRQRLRDAGKPPKVVRIALAHKLLVRLNAKAREVRQQMATVAVESA

SEQ ID NO: 395423 - protein, 488 aa, unidentified
MAAGKKKDTDVTGSAAGGPAAVAAVAAGDGGDGAEVSEDQVRVIERAAAIDVAKGSGMVCTRVPGSRPDRRRQKVWPVTATYREVIALMDHLRCEGIQRLVLESTSDYWRLWYYLAEAAGLEVWLVNARDVKHLPGRGKSDRADCVWLCKLNERGMLRRSFVPPQAVRDLRALTRTRARLAQDQARHQARVEKILEDALLKISVVISDLFGASGRRFLDALVAGERSPAALAALGDPRLKATRRELEEALTGKFRDIHAFEIKTHLRILDVINEETARLDQAIGEQLALVPRTAPACTACGVADGGHAPGCAAAGTPLLSLAERIDEITGVGECNARVFIAELGTDPSQFPTPGHAAAWARLTARTLQSGQSARPGRTGKGNPYLRGALGQCAMAAAHTDTRLGAMYRRIARKRGKQKAIVAVARFICEITWILICDPGARFEELGPDYYTPRSPARRTRDKIREIERLNPGKKVILAPIDAGADTAA

SEQ ID NO: 395424 - protein, 479 aa, unidentified
MGPLIVATSTRVSFFRTPTAPPGGTCRYRKASARARWPPMKGSGQVEEVSNEPLYRDRVCGIDIGKAGMAATIRVPSEENPARRASETREFATTRRGVLALADWLRCWQVPAVVMEATSDYWKGPFYRLEAEGLECVLADPKQVKHLPGRPKRDTCDSAWLAACFERGAVRPCFVATPEFRVIRLHTRYRRDLTGERTREKNRAEKLLESAAIKISSVVTDLHGVTGRDIMDHLIAGERNPKVLAQFARTRARRKITELEHALEGAEFFTPEHAALLKAMLERIDGLDAQIARLSQVIERLLAPHEEQLAQAESMPGWGRRSAQDALAETGTDMSRFPTPAHLASWAGRTPLDAQSGKRAGRAQHKKGNKYLGAITGETAVSAGRTQTREGARYRKIARRRGKAKACVAVGNTQLRVYHKLLSNPGMRHEDLGPDYYERRAQTRRKIAYHVRELEELGLEVTLCRPSPAQDDPEPTQAA

SEQ ID NO: 395425 - protein, 408 aa, unidentified
METIFSVCCGLDVHQANVTACLRRVAAEGTIHLEKREFSTTVRGLTELSDWLAAAECPVAAMESTGVYWKPIYHILSTTVDVWVVNARDVKQRRGKKTDPKDAQWISELLAHGLIEPSFVPPPQIMALRDVVRMRTALVQTRTQIKNRVLATLEDTNVKLASVASDPFGVSGRKMMDALVKGDRDPKALSQLAKGVLRRKIPQLEAALEGTFTDHHAFLIRLNLELIDHTNAQIAQLDERIGELMEPMQKEAELLKSIPGVHHKAARTILSEIGLDMSRFVSASRLASWAGICPGNNESAGKRRSGKIRKGNRYLKRVLTECSWAAGKTDTFLGHTFRRLQARIGGKKAAVAVGHKILVIVFHLLNEETMYDDGRYNRPNPKQKERQLNRAISTLQQLGYEVNLTSIA

SEQ ID NO: 395426 - protein, 345 aa, unidentified
MTTFDYIGFDIHKKTISFCAKAQDGKILDEATIPARRETLVAWAKARPRPWIGAMEATLFTGWIYDLLKPLAQELKVAHPAMLKAIAASKKKNDKVDARTIADLLRCNLLPECYMAPCAIRDLRRVLRYHNLLVHQATRMKNRIAGLLMETGTPYNKERLHGKAYFSELLGSLQDVPPSVMQLLKLSRGQLEFFAAIQVRLLKGLRDHPELSDRVKRLQSIRGVGEILALSWALEVGEVERFGSIAQAISYCGLTSAQHNSAGKEQRGPISKQRNKNLQTILIEAAKLAPRYNPPLAVVHERELKRGNRNRATLAVARKLVAYLMAVDKSGKPFEMRVREQEAAA

SEQ ID NO: 395427 - protein, 474 aa, unidentified
MNRFLPKAAIEIEGRRWFGLDLAKRVSQLAVLDDKGAQIAQKRFATTRENLLALASELKEDDTLALEVTTNAISIARLLRANSPARLIMSNPMRTKLIAKAKVKTDKIDARVLAELARVDYLPEVWLPDEDTESLRQFFSDRRSLVDRRTELKNTVHSVLHRNLIHARQTDIFGTSGRRWLDQLVSAKLDVRISDLDRLRLGSLLVEIDRQDALVKDQDAVIASFIATRRTLRRQLDLLVTIPGVSLVVGAGVLSAIGDIRRFSSAKKLAAYFGVVPSTKQSGDKEARNGRITKQGRSEARWLLIEAAEHLRKAPGPLRALFQRINRQRGHNVAVVAVSRKLAELVFHLLTKEREYLYAVPKRTLDKRSAWRLMARRKIGVELKRAEYRAGSTGVLYGTGQHGPTLKREIVRRAAEQAERLYAAMVKERRSEDQSATVKSEDLVFDPLKPIQTDWEKVLAKVAEKLLAAKKAKA

SEQ ID NO: 395428 - protein, 342 aa, unidentified
MQESIYVGLDLGSSRCHQTVINADGALQMSRSIPTSEQHLRTAFSALGDNVRVHLESGELADWVSSVIKPLVAEVIVSHSRTLAWIGKDSQKDDAIDARKLAELLRLNRTHPVYCQTDDSRRLFKQLVTHHEDLSHEQARLKSKIKARLRTLGIIRFDARLFTKSGQSALLDELKEPFVKLMLAQIFAVLNQLLDMENQAKQAMLAASKQFPEVRLLQTAPGVGIITACRFVAYIQTPHRFSNKRKLWRFCRLGITRRESNGKRLAHPRLDRAGVGSLKDVSRKVFEAARRTTKDNSFKRFYEQSLANTKNAVHARLSAQRKILAALRAMWLKMQPYRDTGD

SEQ ID NO: 395429 - protein, 422 aa, unidentified
MEPEPEFVAFVGIDWADQKHVWCLQKANSRQREAGELQHRPEAVEAWVGELCQRFGHGPIAVAVEQVKGALVYMLRKYECLHLYPVPSTMSASMREALYPSGAKDDPRDADLLLELLVLHRDKLRRLTPDNEATRRVQNLVEERRKLVDEKTAQLNRLTGNLKVYFPQMLEWFAKLDSKLVCDVLERWPSLEELQKVPSAELKKFFRHRRGRQGELTEWRIEGISQAMPAIRDRAVIEAKRTVVQVIAQLVRTLLDGIATLDRKIAEAAEAHPDFFIFQSLPGAGAALAPRLLAALGSQRDRYGTATEVQKYSGIAPVTERSGKRKWVHFRWACSKFLRQSFHEWAGHSIAQSVWARAYYQRQRERGKEHHAAVRALAFKWIRIVFRCWQDRVAYDETRYLAALAERGSNLASAFAAATVSM

SEQ ID NO: 395430 - protein, 346 aa, unidentified
MDTGYAGQQVVGLDLHRRRTVMVRMTEAGERLEAVRFVSDPAVLAEQIAKAGPAPRVVVEATYAWYWVADVLDAAGAQLHLAHPLGVKGFAYRRVKNDFRDAADLADLLRMGRLPEAWIAPPPVRAQRELVRHRHKLRQLCSGIKTGAHAVLAKNALFIPRSDMFGLDGRRRLSALNLPEVFRLRLDSQLRLIDTIEQEIDELDKRIRAMFADDLGYRALLRLPGVGPVFAAILRAEIGEITRFPSPRQLNSWAGLTPRHRESDTTIHRGGITKQGSRLVRWAMVEAVQRARLGTPMRNRYAQIVARRGGTAKHLAKVAAARELCECVFYALRDGHVRRLGQSRTA

SEQ ID NO: 395431 - protein, 317 aa, unidentified
MTQTTTLTAGIDTSKDKLDIAIDDGTACWHDKNTAAGWRRVAARLAETGVRRVGIEPTGGYERGVVKHLRERGFTVLVLQPTQVKAYAKMHLRRAKNDEIDAGLIAGCAAGLKPPAIPPDARLEALAGQLTFVEQIEEDMARLKTRLEHVDDARLRGIIKADIAALKMRRAAEMLRIIKALRAHTDLARRYHLVLSVPGIGERTAIAIIIRLPELGRISREEAAALAGLAPYDADSGKHKGQRHIAGGRARLRRSLYAAALPAAFRWNKALIELYARLIARGKCHKAALVACARKLLIYANTVVQRGTPWVESPAAA

SEQ ID NO: 395432 - protein, 400 aa, unidentified
MMTPDDIDVWVALDVGKSAHHAHALDHDGNTLYDKPLKQDEKAIRTMLGKLSKHGRVLLVVDQPNTIGSLPLTVARNMGIAVAYLPGTAMRRTAQLLPGDAKTDRRDAHVIAWAALKLPETLRDAGPDDETLAALKLLAGHDEDLAHESTRHVNRLRSLLLQTHPAFERALKGERITRDATLALLERYGGPMGVKRAGIEDVKDWAKSNGLRAGRIIDDMFKAIGEQTVTVPGTLMAETIIPSIAHDIKTIRDRRREVDRQVEKLLEDHPLLTVLTSMPGIGVRTASNILLGIGGDIANFKSSAHLAAYAGISPVTGQSGTSIKGERPSRRGNKRLKNALWQTAFVASTKHPPSVAYYKRKREQGKHHNAAIICLARRRCDVIYSMLKNGTLYQEPALVA

SEQ ID NO: 395433 - protein, 367 aa, unidentified
MEVYIGMDVHCKKTVHVIQEVSGKVIAQGSVPTSVEGFSKMLDELAVPSGTKIGLETGSQSWWVSSVLSGLGMKPVVIDAREVRAKARRIKQKSDLRDAFEICDGLRRGIYTALVYVPDARTQRLRQVLSRRRHFVKICTSQVNAAKFLLRSVGLRTEAASLKSEGAWQRLIRRPAVRALSQYLAMHRDMWKLAQEKVVALEKELDKALEPFRETVGLLQSVPGIGPITSASYIAVLGKPDRFPDSSHLVSYIGLAVSTYNSGERERHGHITKRGSGELRMLLCEAAHHSANPRHPLNPYFRRISARHGYKKAVVAVAQRLARILFQMWRTGQGFDVSQLNVIRSRQSRTRRAYWQIKQAKEEVVSV

SEQ ID NO: 395434 - protein, 323 aa, unidentified
MNKYKETFGVDISKDVFDVHGSKTGHHQYKNDEPGFKKFLKRLPDDCLVAMEATGYYHYRLAQFLYKNDVAVSVINPLIIKRFIQMKLAKIKTDKSDTKMICEFALINQVPLYTALTDVQSECLQLFRVLDNFIKHRTATKNKMHGEEVLGIPSKFTYRSLRRNKKHYDSEIKSIEEKILSLVKEDQQQQLTLLISVPGIGQKTALFLIIVTDGFSKFETASQLCSYVGITPTTRESGSSVRGRPRISKVGNKKLRNLLFLCSFNACKHNKACRELYERIVNKGKSKKLALIAVCNKLLKQAFAIAKSGLIYDASYRSTLVRN

SEQ ID NO: 395435 - protein, 354 aa, unidentified
MSQTLNAAIAVVGIDIGKNSFHIVGHDERGAIVLRQKWSRGQVEARFANLPPCLVGMEACVGAHHLSRKLNSLGHDARLMPAKYVRPYSKGQKNDFRDAEAIAEAVQRPTMKFVATKTADQLDLQALHRVRERLVSQRTGIINQIRAFLLERSIAVRQGQRFLRAELPRILATPPDVLSPRMARVIEDLASDWRRLDERIEGLSTEIGVLARADSGCARLMSVPGIGPIISSAMVAAIGAGDAFNKGRDFAAWLGLVPRQMSTGDRTILGKISKRGNRYLRVLFVQAAWVVLIKPTVWERHGLKPWIEAAKKRLHHNVLAIALANKLARIAWSVLARGRAFEVRKLDEAATQPA

SEQ ID NO: 395436 - protein, 338 aa, unidentified
MTIEILGVDIAKNVFQLHGVNRNGRIVFKRRVMRDQLLAVLARLDRCTVVVEACTGAFYWQRKFEALGHRVKIISPQYVKPFVRRQKNDGNDAEAICTAARQPHIPLVPKKSVEQQDIQALHRARQRMVNHRTAVVSQIRGLLLDRGFAFAKSITRARRIVPEILSDLENELTPLAREAIAELYDPFRDLDRRIASFDRKINRVFRESEACQRLARIKGVGPKTATAVVAAVGDGSEFKNGRHLAAWIGLVPRQFSSGDKTVLMGISKRGSQHLRSLLVHGARAVVRSAPGKTDLSNQWVNQLRERRGFNRATVAVANKNARIIWAVLQKGEPYRAAF

SEQ ID NO: 395437 - protein, 338 aa, unidentified
MKLYGGIDLHSNNSMVVLQDENDAVLFRRRLPNDRNVILGELAPFADAIGGLVVESTYNWYWLVDGLMEAGYRVHLANTAAIVQYSGLKYADDDSDARWLAKLLRLGLLPEGYIYPKGERAVRDLLRKRSQLVHQHTANLQSIQNLLARDLGYSLSANHVRRLTYEEINRLLPDLDLALAVQSTLAVMHTQEEVIALLEKEVRTKIRLRSTFKPLLTVSGIGEILGLTIMLETGDIARFAKAGNYASYCRCVGSAHLSNGKRKGQGNTKNGNKYLAWAFIEAANFAVRYNPRIKRYYQRKRERTNGLIAIKTVARKLARACFYILRDQVTFDVSKAFA

SEQ ID NO: 395438 - protein, 395 aa, unidentified
MTDQTTPSTASTAFDHHTTLAIALELSGKSWELGAVVPGVTRRPRRRLDPRDMAGLLRQVERWKAEATTAGRTIERVVLAYEAGRDGFWIARYLLARGIETHIMHPASIPVDRKKRRAKTDRLDLDMLLRTLLAWLRGEPRACSMVAIASEAEEDQRRPGRERERLVSERIALENRIENLLCLHGVSRFKPRLKKAAERLETLRSFAGEPLPEQLMAELRRLMARHQLLSAQLKQIETARETVLTTETPDRAAQQIQALVVLYGLGLGTATGLAYEVFCRSFRDRQAIAGFVGLAGTPFNSGGSEREQGISKSGNPRVRRLLMQLAWRWLRLQPQSELSQWFMARTGGAKGRIRKVMAVALARKLLVALWRYVETGELPAGAVTVRPAAVVAAEA

SEQ ID NO: 395439 - protein, 316 aa, unidentified
MEEPHVFVGIDVAKECVDVAVRPSAEHWRAPLTDEGIAGLTARLRALAPTLVVMEATGGIEARLLAALAVAMPVAVVNPRQVRDFARATGRLAKTDRIDAMVLAHFADAVRPPKAQPPSEERDAIVAQLARRQQLVEMITAERNRHGAARVASVRADLESHIKWLQQRLKDVDKGLDQTLRQSTVWREREELYRGVPGVGRVLAVTLVAEMPELGTLDRKRIAALVGVAPFNRDSGTLRGRRMIWGGRGSVRAVLYMAALVATRHNPVIKAFYERLLAAGKAKKVALTACMRKLLTVLNAMARSGRGWDSALAEAR

SEQ ID NO: 395440 - protein, 401 aa, unidentified
MSKKNTRNALDTSLSYAVIGLDLAKADCAVAAVPRSDDELGLIDRMDYESLFEQAEKLEPTLFAMEPCCGYSQISLRLQNMGHEVKVISGHAVKNWIATHKSNQKTDLNDATALAKLALYDHDLQPIRVKNVEECRIASVQAIRIQLRTQATKSLVCFKSLCQCWGIVIRRGSLNTKKMAEAVAAVKKLLGVEVASSLMILRDAYKFTMKQINALDKLLDALVEANEQARTMKTVLGIGTQTAARLAVTTGDIKRFPMPRSYVAYFGLAPRNIITGHSGTPSPSKRGALKPVSSRGQGKVSRRGDRVARSFIIQGAATIYMLYCKDMLPECQLRRWLHEQIKRGKPYGKIIVSLAAKLLRIVWALLTYGEKFDSHKAGVPRSVLAAMEKPLKHDAAAESAA

SEQ ID NO: 395441 - protein, 421 aa, unidentified
MKQYICVGADVHDRSLVLKMALGLNPPKLMRFGNTPAGRGGMILELRRQSEAAGGAEVAVAYEASGQGFGLYDELSEAGIHCHVLAPTRIARSPRQKRDKTDERDAEQLFQLVRGHVLAGNDLPTVWIPDVRTRDDRESVRARLDATAKLTRIKTQIRCLLKRNQVRRPEGMGNGWTREYRAWLQSLSESREASAVPGPGGRVALGSLLRQMELLEAEISELDQTVERLSRTPRYAGALKELDSLAGVGVLTAMVFLTEMGDLSRFRNRRQVAGYLGLAPSKAESGETNDRKGHITRQGPARVRKVLCQASWARVSYDPWAAACYQRIVEKNPKHKKIALVAIMRRLAVLMWHRGLAAQSRSRPAAARRCRAAPTVSGPARSECPAGPHRSAAAATSDELSGPILDRRRSERRGPALSRPR

SEQ ID NO: 395442 - protein, 332 aa, unidentified
MNDAKSRVVIGMDPHKRSVTIEVMTADETILGGGRFGTDEAGFAAMRRYVSQFPERVWAIEGCSGIGHHVAMRLLAAGEEVIDVPPKLSARARVFSTGQGRKTDATDAHSVALVGTRMAGLRKVVNDEQLAVLRVLVDRRRSLGEDHTRMISQLHALLLELIPGGAKKDLSAAQTKALLAKVRPRDFAGKTSRRVAAELIGDLERIYARKKAANKELTELLAATGTTLTELPGIGPSGAARLLVEVGDITRFPDRDHFASWNGTAPIDASSGDQVRHRLSRAGNRQINRVLHIMATVQLRNATEGRAYYDRRKTAGVVGASACVTRQAGAAG

SEQ ID NO: 395443 - protein, 341 aa, unidentified
MWIIGCDFHPRFQQIAFVNTEGGQWGQRRLEHRGEAEQFYRSLAGQAVRVGMETGGASRWFERLLAELGHELWIGDAAKIRAAETRKQKTDARDAEHLRELLCNGMFEKMRIWIPPADNRDLRQLLWHRHRLVQMRTRVKNQLRSLALSEGMERKPGLWSRAGQQQFQALELAPWAQRRRQDNLELLAQLLQRTDPLDEAVAQEAAQQPETLRLMTHPGVGPVTALAFVLVIGDPARFPNSKKLTSYLGLIPSEDSSGGKQRLGHISKQGNAMLRGLLVEAAHVAVRRDPEWKRYYRRLAMKKHRSIAAVAVARKLAVRLWWMWRRGVDYAELSASGSHAG

SEQ ID NO: 395444 - protein, 323 aa, unidentified
MGTERTPVFVGIDVAKAELVVATRPADERWPVTNDERGLRTLVERLTRDAPALVVLEATGGYEWAAVAALAAAALPVVVVNPRQVREFARATGELAKTDRIDAGVLALFAERVRPAVRAVPDDAQRDLDALLTRRRELLEMLFAERNRLGQATGRGRAPDKQSLTAHIAFLERELTTTDTELAAMIRASPVWREKEDLLRSVPGVGRVLATTLLAELPDLGRLSRRQVAKLVGVAPLARDSGTLRGRRFVQGGRASVRGVLYMGALVATRRNPVIRAFYARLLAAGKPKKLALVACMRKLLTMLNAMAASGRRWAEPNVPVAA

SEQ ID NO: 395445 - protein, 366 aa, unidentified
MNILAIDLGKFNSMCCFFDTETQKYRFQTAATTRQYLTAVLKHHAIDLVVMEACGPSGWINDLCQEHGIRTLVCSTNDDAWKWKNVKRKTDKDDALKLARLAMMQQLTPVHVPKHQVREHRTLIKYRKKLVGRINQIRNSIRGLFVCRGIEIDRGQKAWRSGRELIDSFRKSLVECSMQELWKGQLDLELTQLDALGKQMAAVEKRLEAIAKADERIQRVQTIPGVGRRTAEAIVTTLDDVDRFDNARQVSSYIGLVPRQYQSGETDRNGRITKRGSRLLRTLLLECAWVSIRYNDWSRATYNRIHSGQKTRKKIAAIALARKILVVAWAMLKNKTDWDPERAGIVGQPIVEEGSSRSTDQAAVIA

SEQ ID NO: 395446 - protein, 355 aa, unidentified
MTSTKYIGMDVHKESISIAVRNDAGKVVMESVIETKASMILQFIDGLRGDVQVTFEEGTSAAWLYDLLKPRVTKLVVCDPRKNKSMREGNQNDKIDARRLAELLRLNHLTPVYHGEHGLRTLKELVRSYLTITKDLARVMTRVKAIYRSWAIPCSGKEVYARCHRAEWLGKISEPGVHRRAEFYYLQLDALRMLRQDARRDLLAESKKHKAWKRLCEIPAIGPIRAAVLLGILQTPHRFRTKRTLWNYGGLAIEMHSSADHRSVDGQLQRSRKNVLVRGLNRNCNHDLKNLFKGAAAVASSKPGPFEEFYAALVAKGMRPEMARLTLARKIATIVLIVWKRGVCFDAQYLKPQTA

SEQ ID NO: 395447 - protein, 399 aa, unidentified
MPTSSEIRVSIDVGCHTHSVAIGLPSGQVLDEFDLAHQPEGFDLFFERVELCKRKYGGMVSVAMEGYNGWARPLDTLVRSHGYRLFNINNLKLARFKEIFPAAAKSDRIDARKGLELFQLCDHLPLAKGVLQEVVATPLENEKLKRLTRRRRALVDEKSRILSRMQTDLQAVCPGLRAITKDADNVWFLNFIAHSEELTKLARLRKSTLLGIKGVGRKYASIITEWQKSARFSHDVDWVGPMIIEDARRLLDLRAKIKTLEARCIELMGKSQIAQLIDSIPGFGPVCSSELAGEVGTIDRFAKDGSLAVYLGMANLDNSSGKLRSSKNPKHVNTRAKAAMMVGVDRHRKQVPESQRYYEKKRAEGKSHNQAIRALGRHLSRVIFTMLKQGRAYEFSERK

SEQ ID NO: 395448 - protein, 337 aa, unidentified
MVYVGVDLHRKRSHVVALDPAGEVVLSRRIGNAPAEFLHIFGELEPQPIEVVFEATYGWSWFADLLADAGIPAHMTHPLATKAISAARVKNDAVDAKTLAHLLRTNLLAEAWIAPPDAREARRLVRTRAGLVRMRSRVQSQLHALLADLGVIPELTTLFGPAGRRWLAELGMPASARGRLDAGLRLIDAITVEVAHADADRRACFAGDHRVRRLLPIPGVGLVTAATVVAEVWDIGRFPSPERLCSWAGLTPGEHSSDAHTRRGHITKQGSRWLRWMLVEAATTAVRDPQLGRFTAQIAQRRGPKIARVALARRLLTLSYYALRDQDGCRAYPVPAR

SEQ ID NO: 395449 - protein, 410 aa, unidentified
MEIVHARCAGLDVHKRSVVACVRIAEGQAVRHEVRTFGTTTAALEELAGWLRAEGCTHAVLESTGVYWKPVWAVLASDALTLVLAQAAAVRNIPGRKSDVKDARWLADLLAHGLVRASFVPPPAQQALRELTRTRKQLVREISAHAQRIHKLLESANVKLASVLTEVLGASGRAIVEGLAAGETDAERLADRLHARSRHKRAAVIAALQGARLAPHQRLLLQQHLAVIASVEASVTAIEDEIAVALAPFRGAVARLLTIPGVGPTAAATLVAEVGTDMSRFPTAGHLRSWAGLCPRLDESAGRHGSRRVRKGAPWLKPQLVQSAWAAVRTKDHYPRALYGRLVRHNGKRQAIVAVAASLLTAVYYMLSRDEDYRDLGPQHLPDVDRRRQAQRLAKRLQALGYNVHLDAAA

SEQ ID NO: 395450 - protein, 390 aa, unidentified
MIYVGIDVAKDKHDCCILGQDTEELFQVFTIRNNSDGYGELFHKIESVSKDKSQIKIGLEATGHYSYNILGSLLDHGYHTFVINPLHTNLYRKGQSLRKTKTDKVDARSIAEMLVTDKTLKPYTGTSYHSEELKSLTRYRFELVKERAKMKTSVSRLVNILFPELESLVPTLHMNSVYRLLQELPGAYFIASSNLTHLKALLADASKGHYGREKAIEIRETAKSSIGSLMPAKSMELRQTIRRIDTLTSDIKEVEQSIQKIMDECGSPITTIPGIKYRMGAMILAEIGDFTRFSNADQVLAYAGLSPSTYQSGQLISSYARMEKRGSKYLRYALFNAAIYVSGWDERFRLYLSKKRAEGKHYYVAISHVIKKLVRTIFRMEITHTSYQPL

SEQ ID NO: 395451 - protein, 470 aa, unidentified
MSKGSGTTRGDRRRNERRARLRRVLPRDGAVIGIDLAEEKQAIAVIDHDLRVLARKTVRVKVFRLGEALDWAVAQARAKGFGPVSVACEPTGPRWLQVQQLCAERGLPLVCIQPLVSHIAREQQDFTSHKTDEADCVMIARLAVELHCYLPEQLDETWAHLRHLGRRRNQLITAATASVQRIRDFLSVAWPVAAETCVRPFESVTWLAAMQVVMSRCGADPAKLAPCGVEAFAVLVRRAVPCWGGVRPSGRVCQAVFAALTDTQGVVASHRRGLLRRCTDELDDLQRTRARLRAVEADMVTVLAELGLVRLADIPGLTAVGAAAILAETGDPRRYDSSSSLVKQAGLSPSENASGAFEGQAHMSRRGRPGLRLTAWRAVWPMLQFNPVMAAKYAALTQAAAAAAADAGSQPARAAAAAARARRAKARVACAASLLRWIYSMVVHGTRWDAAAASGAAACQHAPRCQPEAA

SEQ ID NO: 395452 - protein, 403 aa, unidentified
MSDMITNHADIDVFIGIDVGKHNHHAVALDRDGKQLLSKALPQNETKLKTLLTRLSKHGTLLLIVDQPATIGALPVAVAQAEGIRVAYLPGLAMRRIADLHPGEAKTDARDAAIIADAARTMPQTLRGIRVADENVAELSMLCGYDDDLAKQATATSNRIRGLLTQIHPGLETVIGPHLDHPAMLALLAKYPTPKALKHAGKHRVETLLRKQAPRAWKRWAAAIFTALEGQTVVVSGTDAAGLVLPQLATSLAQTRTSRDEVLVRIEELVEEHPLFGLLTSMPAVGVRTAARILTEVVGKDFESAGHLASYAGLAPVTWRSGTSIRGDHSSRRGNKVLKRALFLSAFAALKDPLSKAYYDKKRAEHKKHNQALIALARRRCNVLYAMLRDGAYFHVSEAVTAA

SEQ ID NO: 395453 - protein, 412 aa, unidentified
MAVFCGIDLAEEHHDVALVDGEGTLVAKRRISDDAAGFTALVQLLADAGDTEDQRIPVAIETNRGLLVACLRATGRQVFTINPMAVSRYRDRYSVSRKKSDAGDALVLANILRTDLAAHRPLPSDSPLAQAIAVLARAQQDAVWDRTTAHNKLRSVLREYYPAILDAFADKRGGLLRSEARTLLAAAPTPHAAAELSTAKLRALLTRAGLQRNIDPEAYRLREILQREYLHHPQLVEEAFGRQALALLHQLDAACASAEDLAAAAAEQFDRHPDAEIITSQPGLGSLTGARILAEIGDDRTRFTDARSLKAYAGSAPVTRASGKAITVLHRRVKNQRLAATGYIWAFAALTASPGARAHYDRRKATGDRHIAAQRNLFNRLIGILHHCLQTRQRYDETTAFAATAIPTAAVA

SEQ ID NO: 395454 - protein, 410 aa, unidentified
MRYYLGVDWADQTHAVWVVDEQGTKVAGRAVPHTAAGLSEWGRELDEWQAQGIELWAAIERPEGRVVDFLLDHGVVVYPVNPKALDRARDRFRSSAAKSDPFDARVLAEFLRTDHGHLQALQPSAETAQELKYLTADYRRHVRQQTRLVNQLTATLKAYYPRALEVSELTTALARQFLRAYPTPVAVAALTEKRWQRWARTHRLSEPRTQELWGVLQRPQLPVPAHVVRAKARLMLTLVEELTAVVAAVGQYREAIDAFFAGLPEAQWIRTLPIGDHGVTAPTLWALLGDAPTRWESWQHLQGHAGTVPVTIRSGQQRIVRFRSACDKAMRYVVDQVAFLSLGKSEWARAYYDQQRARGHDHHPALRALGAKWLKIIFVMWARQIPYDEQHHLATMTRQQLRQRNQKKVA

SEQ ID NO: 395455 - protein, 345 aa, unidentified
MMVIGIDAHKRSHTAVTVDEMGRQGFVKTVGTTTQDHLRLLKWAVGLAGERLWAIEDCRHLTRRLERDLIAAGESVVRVSPKLMAHVRDSARSYGKSDPIDALAVARAALREPNLPTARLDGVERELRLLVDHREDLVGERTRIISRLRWHLHELDPGWTAPTKLQRQSAFDKVQAHLSRRDDDIMVRRLALRLVEHLRLLTDEIDELTAEITIRVTRIAPSLLAIVGCGALSAAKIIGETAHAGRFRSKDAFARHNGTAPLPVWSSNRQRHRLSRTGNRQLNAALHRIALTQARCYPAARELLERRTNGGDGGMEALRILKRRLSDVVYRAMLADETDPPTVAA

SEQ ID NO: 395456 - protein, 362 aa, unidentified
MTKMTHVGLDVHKDSIAIAKLRPGSDTPLVWTIPNEPKAIKKAFGKMLGEAWGLRCCYEAGPCGFEVQRQLEAMGVECVVVAPSLIPRKPGERIKTDRRDAVKLVRLDRARELTPIHVPSSDQEAVRDLVRAREDVRKDLTSARNRLSNFLLRHGRMYREGTHWTVKHRCWLDSQTFERPSEQLAFAHYLAAVAHQDSCRAHLEKEIAAVAAQPPFAENVEKLSCLRGIATLSAMVLLTEIQDFRRFKHPRELMAYVGLVPSEHSSGATTRRGGITKTGNSYARRILVEAAWHYCRPPVASHRVHHSLKGQPAARVAMARNAQTRLHKRYLRLVGRGKPRQTAVVALARELCGFVWGMALTA

SEQ ID NO: 395457 - protein, 351 aa, unidentified
MDVIGVDCHKEMHAAVLVDAHGHEQGRWQGENSLSGWHALVDWGYSHTTSVVWGIEGTGQYGRGLAQLLVASGQTVYEVNPRLTAAQRRVSRTRGKSDATDALAIARVVQQEPSLPVVQSVDATAVLAVQVAARAALVGDCTALRNRLHQHLAHLRVYRATPWPKLTSRTGVTALTDLQLPDADALAQAHAQQVRLLTQQMLLVMAQIDELTRSIETLSTGWTAPLQAVVGVGRLSAGMLAAHLGGKTFETDAALAMYAGVAPLDASSGRQLRHRLNRSGNRALNAMLHRIALSQSRHSPEARAYLAKQRAAGKTAKEAMRCLKRMLARLILTAWRQCQPPPLAHISLPLT

SEQ ID NO: 395458 - protein, 314 aa, unidentified
MRNYIGIDVAKQYFDLHSLKTGQDRRMDNSTEGIRQCVALCHEIRPKLIVMEATGGYELTLAGTLQAEGFAVSVVNPRRIRDFAKAAGQFAKTDKLDARIMAQFAATLEPMPTEQINENTQKLKALVARRGQLVKLHTAESNRLEHAHVRDIQRSIAAVLKVIEAQLRTIDRQINEHIRNTPQLRQRSETIDSVPGIGPATAHMLVTELPELGRLNRRQIAALVGVAPIARDSGIFRGKRMTGGGRKEIRSRLFMPTLVAVRHNPVLKAYYTRLLGQGKCKMVALVAVMRKLVCILNTMIKNNQMWNPDLIKIA

SEQ ID NO: 395459 - protein, 351 aa, unidentified
MPRTTTVHAVTTLGIDMGKNTLHMIGLDSRGAIVLREKVSRGRVTSRLANLPSCLIGIEAGLATHYVARELAALGHDVKQVPPMYAKPFRQGHKNDFRDAHAVAEAVQRPTTRFVPAKTDEQLDLQALHRVRSRLVSERTAVINQIRGFLLERGIIVRQGLRFLRQMLPDILAKRTDVLSPRMVRIVADLASDWRQLDERIEHVTDEIETLAKSDDSCRRVMTVPGIGPIISSAMVAAIGSGAAFARGRDFSAWIGLVPKQMSTGDRTILGRISKRGNGYLRTLFIQAARVILLRPASWPKHGFGVWLARAAQRLHPNVLAAALANKLARIAWTVLAQERSYEARVTKAAA

SEQ ID NO: 395460 - protein, 410 aa, unidentified
MELLHPHCAGLDVHKETVVACIRHMVEGKVTAEVKGFQTTTEQLMELSDWLSSQGVTHIAMEATGVYWKPVWHILSDGEFALVLANAAHVKNVPGRKTDVNDATWLADLMAHGLIRASFVPDEPTQQMRDLLRTRKQFVRERSSHTQRIQKTLEDANIKLDSVISDIVGVSGRRMIKALIAGETAPKALAALADGRIAATTAELEAALRGRVTAHHRFLLQLHLDHLDAVNAAIGRIDKEVDGNIEPFRVAVEMLATIPGVRNLAAEVMVSEIGIDMSRFKTEGHLISWAGLCPKNDQSAGKRRSTRMKKGAPWLKTTLIQCAWAASRNIGTYLQAQYLRIRSRRGAKKAIGAVAASILTAAYHMLKDGTLYQDLGPNHFDKRDKGKQAKRLVNRLQSLGFAVQITPMPA

SEQ ID NO: 395461 - protein, 346 aa, unidentified
MSEIIRIGVDTSKYIFQLHGVDAAEQPVLRKRLGRKQMLEFFARLPPTQIGMEACGAAHYWARELGKLGHEVKLMAPQHVKPYVKRNKNDGRDAEALCEAMSRPTMRLVPVKSAEQQAALMLVGVREQMVARRTQLGNMIRGYAAEFGITAAKGLDKIEPLVAEIAQDEDVPAMARDLFALQGREFVQLQAQLKVIEARLRAWHRGNADSRRLAQIPGIGPVGAPELIMKTPDPGAFTSARHFAAWIGLTPKDHSTAGKTRLGKITRAGDERLRSVLVAGATAVIKQARRGRGHPSPWLVALLKRKPPKLAAVALANKNARIAWKLMVTGESYEGARMHAASAAAT

SEQ ID NO: 395462 - protein, 315 aa, unidentified
MTKQLPLVNVGVDVSKDTLDVHLLERDLSFSVPNEERPIASLIKRLARYRLERIVIEATGRLEHPFVSAAIARGLPVVVVAPLKVRRFAEAAGQLAKTDAIDARLIARFAAALKPVARPSIDTNSQIIKDLVVRRRQLTSLRTTEKNRRGVMPEALKPSIDRIIHTLDREIASLERLIQDAVEQHVAWRHKRDLLTSMPGIGPSVASTLIGDLPELGSLSRRQIASLTGVAPFNRDSGNFHGKRRIRGGRAHSRTALFLSAMVAIRYNPDIKRFYERLLQAGKHKKVALTACIRKIVTALNAMLRDNQPWQSSFA

SEQ ID NO: 395463 - protein, 319 aa, unidentified
MTVYLGIDIASKKFDVAELCDGNYRCKAFENTSAGFLALYKWLGQSTMPDIHACLEATGDYGTSLATFLYENKIKVSVVNPARIKGFGASELSRTKTDKADSKLIARFCKAAVPDGWKPTPAPVRKLQALVRRISALNGMLRMECNRRENAEANIQASLDRIISLLKTEIEVVRQEIKDHVRSDDELKKQDALIQSVPGIGEVSSNLILSFMSGKGFRKAKEVTAYLGHHQSGSSVRGKTRMSKMGDTRLRSALYMPALVALRYNPDIKAFGQRLLLAGKPRMLVVGAVMRKLIHIVFGVLKSGTAFSSRIAVHSVVTS

SEQ ID NO: 395464 - protein, 355 aa, unidentified
MSQTANTVIAVIGIDIGKNSFHVVGHDARGAIVLRQKWSRGQVEARLANIPPCLIGMEACVGAHHLSRKLASLGHDARLMPAKYVRPYSKGQKNDFNDAEAIAEAVQRPTMKFVATKTAEQLDLQALHRVRERLVSQRTGIINQIRAFMLERGIAVRQGIGFLRTELPTILGTRTDALSPRMLRVIEELAVDWRRLDQRIDGLSGEIEALARQDQACSRLMTVPGIGPIISSAMVAAIGTGDVFSKGRDFGAWLGLVPKQISTGDRTILGKISRRGNRYLRVLFVQAAWVVLVRIKNWERYGLKSWIEAAKRRLHHNVLAIALANKLARIAWAVLAKGRAFELTRTDDAGVVRHA

SEQ ID NO: 395465 - protein, 348 aa, unidentified
MKELMAGIDLHSNNITMGIVDGEGKRLAHQKLPCELKRILEFLAPFKKRLQRLAVESTYNWYWLVDGLQGAGYPVVLANPAKITQYSGLKHADDKNDAFFLAELLRLGILPTGYVYDAQRRPVRDLLRRRMSLVHQRTALMLSFKSLFTRTTGEQMSLSRLKTLAVAQAQALYEHPANQLIAGLQIHHIEQLDASIGRLEKAVLNVARELPYYPQLKTLPGVGIILGLTITMEIGDIQRFAGPGPFASYCRTVAAQCTSNGKPKGENNGKCGNKYLSWAFVEAANFAKRYDEPCRKWYDRKAAKTSPVVATKALACKLAKAAWHLVAEQTDYEPERMFPQLAGAAMSK

SEQ ID NO: 395466 - protein, 423 aa, unidentified
MSQKKRMAGMQALYGRVCGLDVHKKVVVACVRILDPKDGMVQSTLRSFGTMTRDILALREWLTELKVTHVAMESTGVYWQPIFNLLEGHFTVWVVNAQHIKKVPGRKTDVKDAEWIAQLLQCGLLRPSFVPERQQRELRDLTRQQTKLVQQRNAVENRIQKVLETANIKLGSVASDVLGVSGRKMIEALIAGEKDVEVLADLAKRQLRGKIPELQRALEGELTDHHRFLLHELLEQYDFLENKIQSISERLGVLAPTSFQAAVEKLDTIPGIAERGARALLAETGTDMSRFPTHKHFASWAGQCPGNHESAGKRKSGKTPDANRHLDSILTEIAHAAVRTKKSYFKGQYHHLAGRRGKKRAIGAVKHSILVTIYYMLRDNKPYQDLGVDYFNKLNPQQRIRYHVRRLQELGQAVELSPMANAA

SEQ ID NO: 395467 - protein, 341 aa, unidentified
MGEYIGLDVSLKETAVSIRRDGKRVWRGKCASDPQALAALIRKHAPEVERVVFETGPLSIWFYHALSAEGLPAICIDARHAKAALDMAPNKTDANDADGLAHLAEVGFYRVVRVKGFDSMLTRTLIAARGQLRKTIVQMSNQVRGLMKTFGLIVPKGAGSVFENHVRRLLAGEAALARIMLPLLEAWRSLRSRAVELDRQLIASARQNKASALLMSIPGVGAVTASSYVAAVEDPVNFRSSRSVGAWLGLTTRRYQSGEVDYGGHISRRGDVHLRALLYEAATTILTRVVANSALRTWGLKLREKVGFKRATVAVARKLAVIMHSMLKSGQSFDRLATSAA

SEQ ID NO: 395468 - protein, 409 aa, unidentified
MDGLFDRLAGIDVGKATLTVCVRTPGTGRKRNSETRTFRTMTRSLVVMADWLEECGVTLAAMESTATYWKPVFYCLEERMECWLLNAAHMKAVPGRKTDVKDAEWIAQLLEHGLLTPSFVPPPQIRQLRNLTRYRSQLMGDRTRDADRLEKLLEDASIKLTSVASNITGTSSREMLHALVDGERDPAVMSDMAYSTLRRKIPDLTEALTGRFDEHHAVLVGALLTRLEHTEAALRQIDAELAVRMMPFARQLELLQTIPGIGLVTAQVFIAETGGDMTRFGSPEQLPAWVGVAPAVHESAGKRTPAGSRRGNKWLCSMLVEAANSASRTKNTYLASQFKRIASRRGHGRAAVAVAHSMLVSAYWMLVRDEPYQDLGPDWLAKRNDEAHARRLVAQLERLGHTVVLDPVA

SEQ ID NO: 395469 - protein, 345 aa, unidentified
MPNLNHFRDFTYVVGIDIAKSVFQVHSCNTQTGEIQNVPIKRAKLLEHFVNRGKCLIGMEACGSSQYWAREFQKLGHTVRLMDPKRVKPNVRHNKSDRADAEGIYWALVNGVQAVAVRNNIEQDIHTLLTMRSRLMTLRTGNINHVRGLLAEYGQVMPKSPAQFLKHVSDSINNLEGEVDSLVIDMFRSLVEQIKAGEDKLRELDSEITKLAKQTKHAEHFLTVPGVGSLITANLCVLLANPSAFASGRQFAAFVGLVPMHTGSGGKTINTSIPYRCDKRLRALFVEGAQAVARSKHPADWVKNILARKPKKVALIAIANRMARQCWAVAHYEQPWRDTSIATAA

SEQ ID NO: 395470 - protein, 360 aa, unidentified
MGNGTWVGLDVHAKSTVAGVICDETGELRVMRAPHRTEQLVGWVGECDPPVRVAYEAGPTGFGLARALEAQGIGCVVAAPSLIARSPAGRNRKNDAADAEHLARLLRQGELVAVRVPDPADEAARDLVRAREDARADLMRARHRLSKLLLRHGVVYESGRAWTRAHDGWLRRIQLEHPGARAAFDDAYGAVLACGIRREVLDCQIAQLATDPRWADVVGRLGCLRGVGTLTAFALCVEIGDWHRLTGAAIGAYLGLVPRESQSGARHARGPITKAGNSHARRLLVEAAWHHRAQLRTSAAIEQRRCGQRPEVRARAEQASRRLHQRWYQLERRWGVRSTIVATAVARELAGWCWSLAVMD

SEQ ID NO: 395471 - protein, 434 aa, unidentified
MIENFQLDDTFEGHARLYELLRSFNQGHPEATIYAAVESTGGYENNWFQSLLKFQGSLPIKTAHLNPLGVNYNHKADLKRNVTDKISAQNVAEYMIAHPEKVSYQHQDSLASLRKQWGFITMLIKQSTQLLNQLESLVYNANPEILMYCKDGTPQWVLKLLTRYPTALRLSKAKAKSVARIPYVSKDRAQQLVATAKKSVASADDEVTEQLIIATVKQILNLNNTIKAQTKILTNKCAVPEVELLKTFIGISDYSAISLMLEIQSIQRFLLSKKLASFFGIHPAYKKSGDGTWKYRMSKKGRKEPRRILFMVAMSAIKSNPLIRSIYQQAVQRGMEKKAAVGLCMHKILRIIYGMLKHNQAFDPEIDRKNRQKTPLRQRRVRQDKNRRYQDFDSKAPISSRQKRKRKERKQSQNVNNVECGISEASVPVNNLAN

SEQ ID NO: 395472 - protein, 347 aa, unidentified
MAAVMIGIDPHKGSHTAVAIGAGEEPVGELRVRASAAQAQRLLAWAAAWPERTWAIEGAGGLGHLLAQQLLSAGERVLDIQPKLGARVRLLAAGAVNKNDPNDARSVAVAALRSASRREVAADDHAAVLKVWAKRHRDLGRTRTQVACRLHAVLCELIPGGVSKRISAAQATDLLGQLRPSGAVEAARCELAAEFLADLRRIDAQMRDTKKKLTIAVRACGTTLTEVFGVGPIVAATVIGEARGVSRFPDRDHFAAYNGTAPVEVSSGRRKIYRLSRRGNRRLNHAIHMAAVTQISHRHSPGRAYYERKRAEGQTPKEALRSLKRRLSDVIFARLQADARRAATGPQ

SEQ ID NO: 395473 - protein, 361 aa, unidentified
MSFKTTSPDFKGQIFHVGLDTHKTNWKVTIRTKDMHLKTLSINPSPEELNSYMNRHYPNGIYKSVYEAGFCGYWIHRKLTEYNFKNIIVNPSDVPSTNKERDRKSDPIDSGKLSRELANGSLKGIYVPDTHHEAMRCLHRLYKQNTRRMTQIKNRIKGFMHFIGIKLPDEFDRVCWSNNFIKFLENIRFSEPHNRIVMDTHVADLNHARKTRNSVLRHIRKTSKGIPIIQLLKTVPGVGPLTAFTLYSELVDINRFKNFDNLASFVGLVPSTHASDTTVITGGISHRHCKHIRSALIESSWVAIRNDEALLSAFNQLVKHMPKSDAIIRIAKKLLNRIRFVWKNKIPYVTGIVEIQMCQKT

SEQ ID NO: 395474 - protein, 400 aa, unidentified
MLSIGIDVSKGKSTVCGMKPGGEIVYAPFEVQHTREGMSELVLLLHNSGEEVRAVLESTGSYHCPVVAALLENGIFVSVINSLRMKRFCSQSIRKVKTDRIDAMQIALYGLAYWQELQPTKLPEDTYRELQLLARQYYQMTSLLIKAKVDFNAICDQVLPGMQELMNDHAGRHKLSDFVLRYRHTTHILEMGETRFRKDYCKWAEKKGYRNCERMAALIFATAQNGIPVLPNAPSTQIVITEAIRVLHTVEASRDAILTQMQALAKTLPEYSLVREMPCIGDTLAPRLIAEIGDVRRFHSKRALIAYAGIDAPPYQSGKFCANNRHISKRGNRYLRKTGYEVMQSYVMHKPANDPIFMFIEKKRGEGKSGKLAMVAGLNKFLRVYYGKVTELYRSLPAIE

SEQ ID NO: 395475 - protein, 416 aa, unidentified
MKKRTYKTKKVNQINWGQLKERIAGEAVALAIDVAKVKQYAKLCNENNDVSELFRWKHPEETPAVLEAIKSLSCPVVVIVESTSTYGDAIRYQFSQLGFDIHQASAKRVHDAKEVYDGVPSLHDAKAATIIARFYQDGLTTPWRELSESERRLNALRREFDMHQGQYQRNQGRLEAFLSRHWPEVTYLLDLNSVALEHLLIKYGSVRQIASHAKEAALEMKKSSRSLLNPQKINQVIESAKTTLGVPCIEAERLNFQALAREMSHSRVQGKKAKKALEAEIDSDSELFEMGRLIGRVTTAVLLSFHLDPRNFSCAQAFQKAMGLNLKEKSSGRYVGQLKLTKRGSAKARQYLYFAALRLLQKDPVVKEWYLKKMNPKAKNKTVIALMRKLSKALWHIARGQAFDPTKLLSVPKKAA

SEQ ID NO: 395476 - protein, 343 aa, unidentified
MQSITTIGLDIAKSVFQVHGVDAEGQVVIRRQLKRRYVLAFFQKLPPCLVGIEACASSHHWSRELQALGHTVRLMPPAYVKPYVKRHKNDATDAEAICEAVGRPNMRFVETKTPEQQGCLTLHRTRHLLIRQQTSVINAIRAHLAEFGIVAPVGRNGVDQLLGIVVDASDKRLPEVARACVAALGTQLRILKAQVLEFDRMIRAWHRSSELSRRLDEVPGVGPVLATALVASVADPKAFQSGRDFSAWIGLVPKQNSSGGKDRLGSISKRGDRYLRSLFTVGALAVIRYAKIHGTKHRPWLTALLARRPTKVAAIALANKIARMAWAMMARGERYKEPAALAA

SEQ ID NO: 395477 - protein, 407 aa, unidentified
MNDSGKRYIGLDVHKHYLIALGVDEELHVVLPARRVELSNLESWMKKILTRQDEVVLEMTTNTWQLYDELVEYAGSVTVVHAPHVALITRSQVMNDKIASSILARLLAKGLLVGIWVPPQEVRELRGLVAQRQKMTRLATQAKNRLHAVIQRHHLKVPEGNPFGKSNNGWWQALQLGKLEKMNLQSDLETLQFAEKQEGRLQEEMTGIAAENEEIGRLLHIPGFGVITAVTIYAAIGDIKRFAEAKKLVGYAGLGARVHDSGLTTRTGKITKAGRRDLRVALVEAAHIAANTHPHWKAELARLQPRLGYNKAIVAIARKLLVTVWYVLAHKVADRYAEPEKVSKKMLHFAYEVGKINRAGKSAAQFTRERMDILGLGSELTSIPWGTKKPIPLPPSKLKKESDVPNR

SEQ ID NO: 395478 - protein, 347 aa, unidentified
MRFYTKQHSYYCGIDLHARTMYVVIVDQSGQVLLERNVRADAKVFLEIIEPYRSDVVVAVECIFTWYWLADLCDKEGITFVLGHALYMKAIHGGKAKNDKIDAHKIAALLRGGLIPYAYVYPALMRSTRDLLRRRLHLVRKRAELLSHILNTNSQCNLPDFGGRINYKVNRQGIAERFLDPSVRKSIEVDLQLLTHYDGLISDLELYIVNTAKVHDPDTFHRLKSIPGVGKILAMTILYEIHDIGRFDRVQQFASYSRLVKCSRESAGKPHGFGGSKIGNVHLKWAFSEAAVSFLSKCAEGRKLIERLRRKHGRAKALSILAHKIGRAVYYMLTQEQAFDINKFVRV

SEQ ID NO: 395479 - protein, 389 aa, unidentified
MPSVVDRATAQTAIQTDLAAIFISLELSRSIWLITSLSPGFGEKMSKHSVRAGDVAALLARISELKQKASGRTGKAFPIVAIQEAGLDGFWLHRTLEQEGIESHVVDPASIATSRRRRRAKTDKIDGETLLRALLAHKRGEPRVCAMVKAPTPEEEDRRRLSRERKALIAERVEHVNRIKGLLFSQGVFDYEPLRRDRRQRLEELTTGDGRPLPTHLKTQVSRELDRLELLLDQIKLAEAERDALLAEHQSAAPAGRMLLDFKGIGPQFAAVLWSEAFFRHFDNRRQLGSYAGLAPTPWQSGSVDREQGVSKAGNPHLRAALVELAWLWLRHQPQSALALWFKDRVHRNGGRMKKTLVVALARKLLVALWKYVTAGVVVEGAIMKAGLA

SEQ ID NO: 395480 - protein, 368 aa, unidentified
MAPSILTSLPSAAVLMGVDTHKDQHVAVALDRHGAVLGHLQIPATSKGYQTLLEWAVGHGALQPADLLVALEGSGSYGAGLCRHLLAAGCSVREVSRPNRQLRRQHGKDDWIDAEMAARSLLAGTATAEPKASDGQVEMLRLLKSTKDSAVHSRTKAINQLKALLVTVPAALREQLQNLRNKELLQRCAQLRPGAITTPLAAARLALRSLARRIQQLSAEIEALVLQLDAITNELAPQLKAAKGIGTDNASALLIAAGDNPQRLRSEAAFASLCGVAPMPASSGKTHRHRLNRGGNRQANSALYRIALIRLRWDEATRAYAERRTAEGKSKLEIIRCLKRFIARQVYRLLVPTNGQASTCIDGQTQPC

SEQ ID NO: 395481 - protein, 343 aa, unidentified
MTEVITIGLDLAKNVFQVHGVDGLGEVAIRRQLRRSQMIPFFEKLPPCLIGVEACPTSHYWSRELQELGHEVRIMPAGYVKPYVKRNKNDAADAEAICEAVTRPTMRFVAVKTAEQQSLMMLHRTRSLLVRQRTMLVNAIRSHLAEFGIVAPVGLRGVQRLVSIVSDPTDERLPSLARICLTSLIATLTTVEWEASCNKRRILAWHRSSEASRRLETIPGIGPVIATALVASVSDPLIFKSGRELAAWIGLVPKQNSTGGKERMGRISKQGDKYLRWLLVAGAMSVIRHGRKTNFEKNPWLADLVHRKPTKVVAVALANKIARTAWAVLVTGETYRQPAPSEA

SEQ ID NO: 395482 - protein, 342 aa, unidentified
MNNYAGIDVSLECSSVCVVDANGKILREARVASEPEALISWFRSLGFGLERIGLEAGPLSQWLFAAMREAGLAVELLETRHVRKAFEAMPVKSDRNDARGIAQLMRLGWFRPVHCKSISAQETRTLLTARKLVQSKLHDVENSLRGILRGFGLKVGKTTERQFAGRIEELVVGHPHLQVITRALLSVRAVLRKEFAAFEKQTRKMAQSDSRTRLLMSTPAVGPIVALTYASAIDDPSRFKSSKQAGAHFGLTPKKHQSGETDYTGRISKIGDSSVRTALYEAAHIMLTKPLKGCSQLKSWAMRIAKRAGMSKAKVALARRLAVIMHRMLAAGTPFNPAAAAA

SEQ ID NO: 395483 - protein, 410 aa, unidentified
MIDVTFSHCAGLDVHKKTVVACVLTPDTPRHGRVKSFATTTAGLHALAAWLSDFGVTHVAMESTGVYWKPVYNILDPLFEIWVVNAHHLRQVPGRKTDVKDAEWIAQLMQIGLLERSFIPDVEQRDLRDLTRYRKRLIEEKSTAANRLQKILEDANIKLTSVLSDIQGVSARLMVEALIADTEDVTQIAKLAKGTLRKKIPQLVEALTGQVRGHHRFMLQEILTHLDELNARIGSLDDRIQQQTRAHESIIERLDAIPGVNRRTAECILAEVGTNVDNFPSAKHLASWACLCPGNHMSANKRRSGKRRKGQKWLVSALVEAAWGAANRNNTYLQAQFKRLAARRGPKRAAVAVAHSILVIVYHLLSDPDATFKELGGDYFRKQDADKIQRRAVRTLESLGLEVTLNPVTA

SEQ ID NO: 395484 - protein, 400 aa, unidentified
MRTVFGIDVSKASSEVAILVNGEKVHSYSMPNDAIGFSRLLGDLKTVSNPEIVFEATGVYSRRLQTFLEENHYTYTRLNPLEAKKQLDSLRVRKTDKIDAENLAKSQFVLNRKPTYVQSEVYQNLRDLSRFYQNLTEDIVRAKNRLHKVLQVTFPELEQLLATTTGEQYWNLVTSFPIKDLVLELSETELSEAIRQSTSKRISEKRVAALADKLIELAKQSYPAIKKTSPMFKEVQYYAQDLLRLTERRQEVLDNMVTLALPLPEYDILRSIPGIAETTATSIIGELGDIRRFQSANQINAFIGIDLRHYESGNYLAQEHITKRGNPYARKILFKCIHNIASASHTKPCHIADFYEKRKRQSQISSTKPHTIASMHRLIRTMYYLITHNKLYDYHLAKNQ

SEQ ID NO: 395485 - protein, 408 aa, unidentified
MKTLHRRCAGLDVHSDSVVACVRLTVRTKASHEVRRFSTATPDLLELADWLAAQGVTHVAMEATGIYWKPIWHILEGRFELVLANAAHIRNVPGRKSDVNDAMWISDLLAHGLIRASFVPPAQIQDVRDLTRTRTQLAREIAQHTQRIQKTLENANIKLTSVISNIIGTSGRRILKAMIAGETNPIKLAELGSTRLKCPRAELTAALDGRVTAHHRFLIAHHLSLIGELERHIAAFDTRIEKLLRPLRDAVAQLITIPGVSKVSAQVILAEIGADMTPFPTSGHLLSWAGLVPRLDESAGKRRSTRVRKGAPWLKPVLVQCAWGAARTKGTYYQAQFFRLKARRGPKKAAIAVAASLLTAAYHMLKNGTFHQDLGADFLLKRDRARIVTKLASRIKDLGYDVSFTPAA

SEQ ID NO: 395486 - protein, 408 aa, unidentified
MKDLLEISCGLDIHKEKIVACILTGPLGKPTHSEIREFTTLIPDMLALRDWIISENCHHIAMESTGIYWIPIYEILEDAFSGDITLLVVNARHMKNVPGKKTDIRDSEWISTFLRAGLLNASFIPEKRIREFRDLNRYRKSIIRDITSQKNRVEKFLQSSGFRLSSFISDIFGASGRNIILHLMEHGQIDKMSLDSYLKTKTRKRIDEILMSVNGTLSEHQKSFLKILMCHYDSMKEHLIEIETHLQEDMLPFALQIEQLNTIYGISTTASCAIIAEIGTDMKPFKTAEHICSWAGLCPGNNESAGKRKSTSITKGNPYIKSMLCEIAGKRNTYLSAWYWRIKQKKGARKAIVALARKLLVIIYTMLKQGTNFDENCFEVRRKNCEQKQLSRYIRELEKHGYTVEAQV

SEQ ID NO: 395487 - protein, 348 aa, unidentified
MTLYIGVDFHPHQQTIAWCDTQTGETDTCTLQHNLSEVLKFYQSVSPSIVGIEASSRAVWFEQLLEETNHQLLIGNPALIRARARSRHKSDNRDAQLILDLLIKDEFPAIWRRSQASNQVIDVLHLRRQLVHQRTQTYNRLQALAHSGGLPKGKMKTLSFQNLLKAVPMNESGQMQREHLFSLLEQLTKQIRELQSWLNRKASSDKQVQLLLTQRGVGYLTALAMVHTLGDVSRFEKVSKQVIAFAGLDSLEKSSAGKTRFGRISKAGSPLLRGLLGQSANIVIRYDTRLKAFYKGLAKRKPIAVAKTATARKLLVKLAIMLRDNITAEEFDRRGVTVGNARFLTGSK

SEQ ID NO: 395488 - protein, 474 aa, unidentified
MGKGSGSGTTRGDRRRNARRERLRELLPRDGVVIGIDLAEDKQALAVVDHDVRVLARKTVRVKAFRLGDALDWAVAQARVKGFARVAVACEPTGPRWMQVQRLCAERGLPLACIQPLISHIAREQQDYTPHKTDESDCVMIARLAVELHCYVPEELDETWADLRHLGRRRTQLITAATASVQRIREFLSVAWPTVTEACAGPFESVTWLAALQVVTARCGGDPARLAAMGPEEFTALVRGAVPAWGGKKGWGRICGRVFAALTDTEGVVAWSRRGLLRRVADELGDLQRTRAQLRATEAEMVAVLGELGLSRLGDIPGLTAVGAAAILAETGDPRRYDSSSSLVKHAGLSPSENASGVFSGQAHISRRGRPGLRLAVWRAVWPMLQLNPVMAAKYAALTQAADTAAAQADAGSRQATAAAAAARARRARARVACAASLLRWIYSIVVHDTSWDPAAAAGAAACQHAARPPAEAA

SEQ ID NO: 395489 - protein, 341 aa, unidentified
MMIIGCDFHPRFQQIAYVDLETGEFGERRLSHPEEAERFYRSLAGTRVRIGLEATGNFRWFRRLINQLGHELLLGDPSAIRAASPRRQKTDKRDARHMLRLLQEDRFPVVWQPPVENEELRQLLLHRCRLVRLRTRIMNQLDSMAKNEGLLGSKNWSAERRRRIEALPLSGWYMRRRVDLLDLLDELEKRIEPLEKAAVEAAENHQQACLLMTHPGVGPIVSLAYVLTMGDWKRFARSKELASYLGLIPAEESSADKRRLGHISKQGNTLLRWLLVQAAMGAQRSDPSWHRLYLRLSLNKHHGVAKVAIAHKLAVRLYWMLRSGQNYKQVMERGSHAGQPV

SEQ ID NO: 395490 - protein, 344 aa, unidentified
MSKVSTIGLDIAKSVFQVHGVNVAGAVVIRKRVSRAKVLEYFGELPPCLVGIEACPSAHHWGRELQALGHMVRLIPPSYVKAYLKRSKNDANDAAAICEAVTRPSMRFVPIKTKEQQTALMLHRTRQLLVRQRTMLSNALRGHLAELGIVSAKGRNGTAELLRIIADDGDSRIPAAVRDILDVLARQYGAIGIEIASIDKSIMALHRACEASRRLAEIPGIGPIGATALVAEIGDWKTFSSGRSLAAWIGLVPKQHTSGGKDKLGSITKQGNRYLRWLLVAGAMAVIRYARKHGTRKRPWLARLMERRPTKVAAVALANKIARMAWAIMVHGERYKEPKLLPAA

SEQ ID NO: 395491 - protein, 427 aa, unidentified
MNGIEFNSIDRFRQFKKEIRGSKEHLIVGLDIAKRKHHGFFGDANGRTLLKGLIVDNSAEGFRHLLTQARFYMDREGLSRVVFGLEPTSVYHKPLAEHLIEQGHLVVYATNEAIKKNRSLIDGRWDKNDTKDSANVADLVAQGKCHYYDLPDLRLRDLRSLLSFRKRLKKQVHSCRVRIRNNLVAQYFPELDRFWNNAAAENLAIVRWFLDPGSIRQLSCEQFIAKVTTHNGGLRQQRRLQHIWEAAGQSIGCRPGPAMALEAEVVVEMLQSVQAQLSRVERAIQKIAEGFEEYDYLKSIPGFGPYVSAVALAAIGNPHRFENRAQLIRLAGFDLSANRSGEKSKTAVPVISKKGKADLRYALYQAALVASSLTSNFRAYYSRLLDGRQREKGIRTKMLVKIAAKMLVIAWTLMKRKESFNPAHIQA

SEQ ID NO: 395492 - protein, 424 aa, unidentified
MNLTQNDRLKQVTSDTLIVGVDVGSKTHFCRAFDWRGFELSRRVFKFSNTGMGFFTFLRWTEELMNKTEMKKVIVGCEPTGCYWLTFQKFLQDHDIQLVTVNPFTVNRSMELDDNSPEKSDLKDPKTIALLVKDGRFSTSYLPSGVYAEIREASVCRDQIMKQHVRLSNQIQGWIQKFFPEYFECYADWDSTSGLMLLREAPLPQDILKIGAGGINQIWRNAKVRAAGIKRAQTLVEAAQNSVGLEAGEAARLEIWVLVNDYILKAEQLKRLDEYLEEKVKEVPNVEKLLAIKGVGMSTVIGFIAEVGDIGRFTDPKQIQKLAGLEIVKKSSGKKKGQPRISKRGRRKLRRTMYESVRALMTWSPAFQDVFLYYRNRTKNPLGGMQAKIAVACKAIRIFYVVLQTGCDFDEEKFRKDIIRPEAA

SEQ ID NO: 395493 - protein, 429 aa, unidentified
MNKTDMHQQVHEPYAALIGIDWASRKHDVWRYDTGSRKQSHQVVEHTPEALSAWTAQLRSDYPGQFVAVCLEQSRGALIQALSGCEFITFYPVNPATLAKYREAFAPSGAKDDPTDSKLLMELLLKHRDKLRVWKPQDEQTRSIGLLNEDRRKYVDLRTKLALRLQAVLRGYFPQALDLLAENLTSELACAFIQKWPELEMLKRAKPETVRAFYYRHNYRRADLVESYIEKIRTAAVLTGDRAVVCVSMITAQALARQIRLTSSTIEQYDEEIHTLFEKHPDAFIFKSLPGSGRVLGPRLLSALGSERDRYDDACELQTYSGIAPVVERSGKQEWIHCRSQCPTFLRQSFHEFANCSRHFSVWAEAYYELQRERGKKHHAAVRSLAFKWQRIIFRCWKSRAPYNEEQYIQALKANGSPLWPRIEALKAA

SEQ ID NO: 395494 - protein, 414 aa, unidentified
MDIVHYRCAGLDISKRDAKVCVRVQEPTRARASATVTTWGAMTNQILALRDHLIAQKVTLVVMEATSDYWRPFYYVLEDGPFELMLVNPRHVKNLPGRKTDVSDAAWLAQLGAHGLVRGSFVPPAPIRQLRDLTRARTAIVRERSREIQRLEKFLEDAGIKLSSVATEITGVSGRAMLDALVAGERSPDVLADLAKRRLRAKIPELSEALTGRFNAHHAFLVKVHLNLIDEHTRALDQITAQIEEEIIPFRAARDLMSTIPGISTKVADIIIAETGADMSRFPTAGHLASWAGTCPGSNESAGRVKSTHTRPGNPYLKGALGIAAMSAARSHNTYYSAKYRRLAARRGPIKAVVALEHAMLVAIWNMLQTGTTYSDPGDDFYTRRTPDKTKSRALNQLRNLGYTVTLEPTAEVA

SEQ ID NO: 395495 - protein, 411 aa, unidentified
MEVLVERQSALDVHKAQVTACVRVPDGDGGRLERIEQFQTTVPGLLAMADWLRAHEVTHVVMEATGDYWKPVWHLLEEDFELMLVNARHVKQVPGRKTDVSDAAWLCRLAEAGLLSASFVPPKPIRDLRLLTRYRRTQIAERKREAQRLHKALEDTGIKLDCVATDILGKSGRAMLDALVAGTTDPEVLADLALGKLRKKIPALRDALQGRFEALHALLISSILAHLDFLDEQITGLSDAIEEQIAPFAAARDLLQSIPGVGQRTAEVIIAEIGTDMTQFPTAGHLASWAGQCPGNDQSAGKRRSGRTRKGSKNLNIALKDAAMAATRTNGSYLQALYRRKRTALGHGRAVGAVKHSMICACWHMLATGEIYTDLGGDYYQRRDPERQTKRLVAQLQRLGHTVTLHDAKAA

SEQ ID NO: 395496 - protein, 376 aa, unidentified
MNATTIGVDLAKHVFAACEGDSRGHGARSSVMKRGEFLKWLCTLPAGTVVAMEACSEAHSWGRTMRALGLDPRLIAAEFVRPYRKNQRVKNDARDAEAVLTALHAPGMRFVTIKTEEQQQRLAWHRLREGWKAERTALFNRIRGLLTEFGIVVEVGASKIRRKLAELEGDEAYPQSIRLMTQSVREQVAVLDQRLAECEQQIARQSRNDPVVSRLRTRPGIGPLTADALVATVGDARQYKNGRQFAASLGITPRQHGSGGKTHLGAITRRGDSYLRSLLVQGARCVLIAALRLRKNKPDTLNRLQLWMIKLNDRVGYHKAAVAIANKHARQVWAMLTRGENYNPDAYKDWEVAHANVRPGDMREASDYDLSAAASV

SEQ ID NO: 395497 - protein, 411 aa, unidentified
MTQAEYLVRVGIDWASESHQICILDKDGNRTEHTVPHTSAGLMALATELTALNPEDPGRVAVAIEVPRGPVVDTLLERGLHVFALNPKQLDRFRDRHTVAGAKDDRRDAFVLADSLRTDRPAFRRVQLDDPLIVELRELSRLDDDLREELSRLSNRLRAQLHRFCPETLALCPAADEPWFWALLDRAFPPPRPKPLAIKAVTAVLKVHQIRRLTVDTVHAALQVPPLRVAPGTIEAACTHIALLLPRLRLVHDQRHRTVGARIEKLLAELAKEDGEGKRRDVTILRSLPGVGRLVAATVLAEASRPLAERDYQTLRAQAGSAPVTRQSGKKATVSMRLACNRRLRNAVYHWARVSVQVDPRCREHYDRLRQGGHEHARALRGVVDRSIGVLVAMLITRTLYDPERRYPKAA

SEQ ID NO: 395498 - protein, 358 aa, unidentified
MAVIEGLCRIVGGVDTHKDLHVAAIVDEQDRIIGTRSFATTRQGYRQMLAWMRSFGELQRIGIESTGSYGAGLLRFMQQAKVTVLEVTTPDKQDRRRRGKNDDLDAQNAAHAAFAGQRTVTPRSRDGMIESLRVLKACRKTAVSARRIALQMIHNTIVCAPDGLRDQLRSLTRMQLVRTLASWRPDLTAYRDLDSAYRIGLKSLARRYLELHDEIADLDAMIAAIVDELAPNLVARNSIGHTGAAQLLLTAGDNPERLRSEASFASLCGVSPVPASSGRTVRHRLNRGGDRAANSALHIIAIGRLRTDQRTKDYVARRLAEGHSKLDAIRALKRYLAREVFTLITQRRKEINATRIAA

SEQ ID NO: 395499 - protein, 344 aa, unidentified
MKITTVGIDLAKNVFQVHGVDERGKAVLKKQLRRDQMATFFVNLPPCLIGMEACSSAHHWARKLQGMGHTVRLMAPQFVKPYVKSNKNDAADAEAICEAVGRPNMRFVPVKNVEQQAVLALHRVRQGFVKARTAQANQIRGLLGEFGMIIPQGIGYIASRVPDLIEDASNELPGTFRLLVQRLLDHLKELDRQVDELEAQILAWHRSSELSCKLAQVPGIGPITASALVASIGDAKNFDNGRQVGAWLGLVPRQHSSGGKSNLLGMSKRGDTYLRTLLIHGARSVIYRAGQRTESCQWINGVVNRRNKNVAAVALANKNARIVWALLAHDRHYQAGYVRGVAAS

SEQ ID NO: 395500 - protein, 374 aa, unidentified
MNDSITYVAMDTHKKEHYVALHHSGQEEIVRFTVRNTAREITKLTRKIIKQAPGGVEFCYEAGVCGFVLKRRIEAHGCHCAVIAPSLIPRKPGERIKTDRRDALKLLTLFRAGLLTEVHAPDSQQEAARELTRCRQAVQENLKRVRHQLLKFLTRHGYLYSDGNHWTGKHLKWLRSLEFEEMLLQDVFDNYFTELQHCLQRLSSLDKQVEKLAKSEPYQTTVDLLRCFHGIDTLSAITIITEIFDFGRFSSPGELMSYLGLTCSEFSSGDKQKRGPITRAGNKRVRRILVEVSWHYRHPCNISKALRERRKGQPQWVINIADRAGQRLRKRYRHLMHCGKMPCKVSVAIARELAGFIWSVFQEYEARKNGKQAA

SEQ ID NO: 395501 - protein, 370 aa, unidentified
MHTAHAVAGIDPHKHTATAAIVDVLGVLVTSLSFPVTKSGIGALTALLTATGLTIDRIGIEGSGGLGRPVMIALAAAGHDVREVQANRTAERRKRRRRAKTDIDDAEAIAGETLAHPDLPPAGKNHAPPSAADELAVVRDWRESLVLQRVRLLTEAEAVLVSLPLQLREQLPPSSRVQASLDRLAQLDDIGPDLGAADRVKLDRLAQARADVDTIRGRIKELDAQVPALLKALGCTLTAIHGVGVVTAMTLMTEIGDPHRFTTEGRFARWCGVAPVALSSGEGDGPPRHHRLDLGGNRRVNSMLHIVHITQARCHPAAPEYMARREAESKTKRAARRAHKRQLANVIIRRMWGDADRLAQASLSAASAAS

SEQ ID NO: 395502 - protein, 419 aa, unidentified
MAQAHDKPIISVVHPICCGLDIHKASVSACCLTTVADGGEDMEIAEFDTFTDALLRLRDWLIERDCPVVAMESTGVYWRPVHNVLEGFVKVVLVNARHTKHVPGRKTDLADSQWLAGLLRHGLLRGSFIPPQQVRQWREMTRLRKAYQESLADFKRLIHKLFEGANIKLGVVVSDLFGATGRYVMNLLATRAGELSADDIAAGAHGQLKQKINELCRAVQGFFTDHHRYQLRLLLATVTELEHHIEQIGQNVKELMADHHPVLSRLQEIPGVSEVAAATILSEVGPTLEEFPRSAALTSWSGLCPGNNQSAGKRKSGRSPVRGHRLKTIMVEVAWSAVRKPGSYYKDKFQRLRARRGAKRAIVAIAHRLLKAVYYIIKEGRHFRDLGAEYLTHKHQTGKLGSLKKQAKLLGYELTPLAA

SEQ ID NO: 395503 - protein, 346 aa, unidentified
MTEYVGFDVSKEETAFCVKDAKGKILARGKAATDPGALFEALKEHCLCPGRIVLETGTLSGWLARELGKLGISVDVIDARQAHAVMRLQHNKTDAKDAELLAEIARTGFCRPVTVKSETAQEGRVLLKARQHLVRQRCDTENTIRGLLGSLGIRFPRGSGKLAERVREALAERPELMEMIEPLLSSAAVLRSETERLDRAVIARVKTDPEGRLMMSMPGIGAKASLAFVATIGDAARFEKSRAVGAYVGLTSRRWQSGEIDHSGHISKMGDAMLRSLLYEAANCLLTVVRRPHPLKDWARRIKKRSSHKKACVALARKMAVILHRMLITGEEFRWPEEKVKDQVTA

SEQ ID NO: 395504 - protein, 407 aa, unidentified
METIHSVCCGLDVHQASVSACLRRVATDGTVSIEKRQFSTTVRGLTELSDWLASSGCPIVAMESTGVYWKPVFHILSATVEVWVANARDVKQRRGKKTDRADAQWIAELLAYGLIEPSFVPPPQISALRDLIRMRTAMVQLRTQLKNRVLAVLEDTNVKLASVVSDPFGVSGREMMDALARGDRDPKALSRLARGVLRRKIPQLEAALEGTFTDHHALLIGLNLDLIDHTNTQIARLDQRIDELMEPLHDEAERLESIPGVHHTAARIILSEVGVDMSRFGSASRLASWAGVCPGNNETAGKRKSGKTRKANRYLRRVLAECAWATRKTNSFLGRTFRRLQARIGGKKAAVAIGHKILVIVYHLLNEGTVYNDGRYDRPNRKQEDRQAKRALSILRTLGYQVQLSVA

SEQ ID NO: 395505 - protein, 385 aa, unidentified
MNVGCRQEWVLAVEPQMWEAPVSRNRTSVGLDVHARSVVACGLDGGTGELFERRLTPDHGEIISWVRSLPAPVAVTYEAGPTGFGLARSLAAGGIDCTVAAPSKLQRPSGDRVKTDARDARHLARLLHLDEIAAVTVPSVEQEAARDLVRAREDVRGDLMSARHRLSKLLLRHGIVYYGGKAWTGAHDQWLRERRRGEVFTTPGLGLAFDIAYDTLLATVSRRERLDAAITEMAAGSEFTPVVTRLGCLRGVSTLTAFGLAVEIGDWHRLSGRSIGAYLGLVPTESSSGASRSQGAITKTGNQHARRLLIEAAWHHRRPLRPGIGLRRRQDQASPAARDRGQRANRRLHARWAGFDARSKRAVVANTAVARELAGWTWSLAVLDE

SEQ ID NO: 395506 - protein, 418 aa, unidentified
MIEDVQWFVGIDWATQSHRVGLLDIEGRHVSERDFAHGGAGMTELRDWLLEKTKVAPGQIAVAIETPHGPVVETLLDHAFQVFAINPKQLDRFRDRFTVAGAKDDSRDARVLGSALRTDRQAFRRLVVDDPLVIELREWSRMADELQQERTRLANRVRQQLWRYYPQAVELTDDVADDWFLALWQQVPTPVTAAEVPEEAITRILKDHRIRRLDATTVRQTLRKTPLFVAPGTTEAACAHIRAVAARLSLVNQQIKQTHRALDGLCAKLEAATESPSGQNREQHDVMILRSWPGIGRIVLATLLTEATEPLRRRDYHALRALAGTAPVTRRSGKQCFVIRRLACNKRLQNAVHHWSRVAIQHDTAARRRYDALRRRGHGHARALRTVGDRLLYALCTTLERQMPYNPNCQTAQVTVGL

SEQ ID NO: 395507 - protein, 338 aa, unidentified
MNNGLKLLGIDIGKNSFHLIGHDAGGHQVLRKCFNRNRLLQFAAQIEPCTIAMESCGGSHWLARKLASLGHRVKLIAPQHVKPYVTGNKNDFIDAEAICEAASRPRTHYVAAKTVEQQVLSVQHRLRESLVCHRTEAINRVHGFLLEFGIALPATKAAIAKVPELIDNSRSDLPLQLKRIMEHLLEDIRRLDAEIKACDVQIKQQLAQDDAGTRLMTIPGIGPITASALVADLGDASNFKTSRDLSAFLGLVPRQFSTGGRPVLLGISKRGDRRMRTLLVQGSRALMIRIDRREDALGQWVRNLLARKHPNKVACALANKLARIVWAVLRRGGTYNAS

SEQ ID NO: 395508 - protein, 372 aa, unidentified
MNYNTVYVGMDVHKESFTLCSCKYEDEKASHYQRTPASYKNVLRYLAFLRTIYGEDTRFVCGYEAGCLGYSLYHQLENFNVECVILAPTTMLEQRSKRRIKTDKRDAEIIARSLAQHNYSPVHIPTKMDNQTKEFIRMRDDHKAELKKIKQQILAFCLRQGYQYDGSGNWTAKHVKWLRSLKPAGLYKEILDEYLLTYTILTDKLNRLDQRIEELASEEEYKEPVSKLTCFLGIKTHTALSVIVEVGDFQRFASARKFAGYLGLVPGQHSSGDDRNGLGITKAGNTHVRRLLVESAQSYTRGKIGYKSRVLRSRQAGNSPQVINYADRANERLRRRYYKMVLKDGKKYNIAKTAIARELACFIWGMMTDNIY

SEQ ID NO: 395509 - protein, 412 aa, unidentified
MDIYGGIDWAEDHHDIALVNRDGQLLARRRISDDAAGLAQLLALLAEHGDTAGDPVPVAIETPRGLLVACLRATGRAVYPINPMAVARYRDRHSVAGRKSDHGDAVVLANVLRTDIAMHRPLPADTELAQAIAVLARAQQDAVWDRTQAHNRLRSHLREYFPGFLAAFASAKGGIMRPEARTILAAAPTPADAAKLTLTQLRGLLKRAGRSRSLDAEATRLRDAFRVPQMRQLPLVEQAMGRQAIALLGQLDAACTSAGDLEQAVTESFNQHPDAGIITSFPGLGPLTGARVLAETGDDRSRFQDAKGLKAYAGAAPITRASGKSRSVTHRRVKNNRLASAGYIWAFSALTASPGARARYDRRKDAGDRHAAAQRNLFGRMLGCLWHCLITGQEYDETIAFPVPAKKLPQAA

SEQ ID NO: 395510 - protein, 370 aa, unidentified
MSEPTTLFVGLDVHKDSIAVAHAEAHRDDPPHYVGSIGTRQADIDKLVRRLHAKTSKLVFAYEAGPCGYVLHRYLTGKGLDCWVVAPSLIPKRPGDKVKTDRRDAVEIARLLRSGDLTHVYVPSVEDEAVRDLCRARDAALRTLKAAKLRLKSFLLRLGLHYTGRADWNEAHRRYLAKVVCPTAPQQIVFQESVHAVDEQVERLRRVEKELLDVIPKWRLYPIVEAFQALRGVQWTVATIVASELGDITRFDNPRQLAAFVGLIPSEYSSGEKRRQGGITKTGNGRARRALIEAAWAYRHNPKISVHIQKRIESLPKPIQDIGWKAQLRLCKRFRLLTARGKHSNIAATAVARELIAFMWAIAREVPINN

SEQ ID NO: 395511 - protein, 368 aa, unidentified
MGQKSSKLYVGMDVHKESIDLAVAEEGGELRHHGQIGGDMSALWRAVRKLESLGRELVFVYEAGPCGYGIYRGLSARGHTCWVVAPSNTPRRVRDRIKTDRRDSLKLAGLARAGELTPIYVPDVRDEAMRDLVRSREDAVVMQRQARQRLAALLLRNDVRYAGKTAWTAAHRRWIADLKLPQSAQRLAFEEYVQAVEEASARVQRLSHCIEQELAHWRWRPVVGALQGCRGIQLIHAVRLVAELGDLSRFSHPRQLMGYLGLIPGEDSSGERRQQGAITKAGNRSARRALVEAAWAYRYGAKVSALIARRQADVPKAVLDIAWKAQVRLCARFRRLAARGVNRNKIVVAIARELAGFVWAIAQQVKPV

SEQ ID NO: 395512 - protein, 419 aa, unidentified
MKIVYPVCCGVDVHKNVIVATIAITDKSNVTQYVVESFSTINSDLIRFRTWLLSYQCFNVCMESTGKYWIPVFNILEEANIKVLLTHPKYVRAIKGKKTDKKDSKWIADLFKFDMVRSSFIPPKDIRALRELGRYRYKLVCMRSSEKNRYQNCMTVSNIGLASVLSDPFGKSASDIMQYVLTSTIFDEEHCKTLIQKTAKKKTELILESIRGCNIESDQRFKMKEASAHMAYLEQAILRTEAELYTRIQPYYHFVEHVSSQLPGISQLSAALILSEIGVDMSVFESAKHLNSWAGLAPANNESAGKKKSVRISKAGQFLKPLLVQCALAAVRSRKEPYFASKYQKLKKRRGHKRAIIAIARMMLTCVFHMIQTGEVFNPSDYDVFDKPVIRNVEMTDESAIAFLAAQGYDVSSITKISG

SEQ ID NO: 395513 - protein, 355 aa, unidentified
MKQEKYIGMDVHQATISVAVMDCHGKLIMECILETKAATILEFVDGLRGSVSVTFEEGTSAAWLHDLLKPHVTCVVVCDPRKSALLKDGSKSDRIDARKLAELLRGNQLHPVYHGEHGLRTLKELGRSYLTLTQDVSRVMTRIKALYRSWAIPCSGATVYAPRYRAEWLAKIPQPGVRLRAERLYQQLDLLEPVRQEARRDLLSESRKHPAVKLLRQIPAIGPIRAAMLVALLQTPHRFRTKRQLWAYSGFAIETHDSGEYRYVRGKLQRNRERVTVRGLNGNHNHDLKNLFKGAALSASTRPGPLYDFYMALLEKGMRPTMARLTLARKIAAISLTMWKKGVSFDAKQLHRQAA

SEQ ID NO: 395514 - protein, 371 aa, unidentified
MDERINFFVGLDVHKDSISIAVCDGSSREAARFAGNIGTDVQQLMKVLAKGGEPSQVSVVYEAGPTGYGLYRELCRRGYHCEIVAPSLIPRRPGEHIKNDRRDCLRLAELSRSGELKAIWVPDAAHEAVRDLCRAREDAVQMRLKARQQLKAFLLRHDRHFPGKTSWTKTHERWIAEQKFEQAGENIALTEYHLAAQAAEERVQRLTTALLEIVKGWRFESVIAALRSLRGIDSVSAIGLIAEVGDFSRFNSPRDLMGYLGLVPSEHSSGNSVRRGSITKAGNSHARRLLTEAAWNYRFPARLSGPLRERSRGLPEVVRNHAWKAQLRLTSRFAKLAARKVHINKVCVAVARELAGFVWAIARLAQPATAT

SEQ ID NO: 395515 - protein, 338 aa, unidentified
MNEITTVGLDLAKDVFHVVGCDVHGKVVRKKMLRRSQVLAYFAKLPPCLVGMEACASAHHWARELAALGHQVKLIPPQYVKPYVRGNKNDYNDAQAIAEAVTRPEMRFVSVKTTEQQDIQAVHRLREKRLQDRTALCNQLRGLLAEYGLIVPQGVNVLRRRLPELLEDGENGLSDLFRRLLAEGYQQLQELDCHIETYTAELKRQSQQDEACRRLQTIPGYGPIVASVFLSVVGNGEAFRRGRDVSASVGLVPRQHSSGGKETLLRISKRGDRYLRSLLVHGARSVVIQAVKKDDKLSRWINKVRAERGFNKAVVALANKLARIGWAVLVNKTVYQSA

SEQ ID NO: 395516 - protein, 442 aa, unidentified
MRLLNANANEHPLRIKLSAHIRTGIIMELQRNKVCGIDVHKRFLIATILSRDGKKDTQRFSITLEDLLKFRDWVIKNGCEQVAIESTGIYWHPVHSVLEGKIDLIVANSYKIKHTPGRKTDVNDSEWIAELCLNGMIEPSRIFPKDDRELRRFTRAREGYVKQMTQEKNKIHQSLDSACIKLASVISDIFGKSGMYLLNCVLEGRDIDEIIEGIPSGRLKKKADQIKESIKSRLEISQVILIRGSLSLMRSIQERIDELDGEISARIQYRKNDLAIAMSIPGTGFVSATAILAEIGNYIDFKKPEQLAAWCGLVPSLYQSAEKTILGGITKQGSKHIRRMLIQVAYAISRTKDSKLKKFFLRIQAKKGSKVAAVALARKVLCILHHLLMNQEMYLEDRDKKNMRQKPLIPPSHIEMSIQEMIDCIVRAGYVVTKSDSIGGVG

SEQ ID NO: 395517 - protein, 371 aa, unidentified
MSEFSKFVGLDVHKETIIVSVADGTGGEARFQGEIGNTPEDVVKLLKRLRKGGATLLFCYEAGPCGYGLYRQLRDLGQSCLVVAPSLIPRKPGDRVKTDRRDSLTLARLLRAGELTAVWVPDEAQEALRDLTRAREDMKRMQQMAKVRLLAFLLRHWRKYPGKTKWTQAHLRWLESLKFSQPTQQIVFQEYVDAIQEMTKRVAAMDAQIEISGSQSPFSKQIEGIMALRGVNRLTATIIIAEIGDLTRFPNAPQLMKYLGVVPSEHSSGPTRVRGGITKTGNGHVRRVLVEAAWTYRYPARKSTALQHRAKRTAEPVQEIAWAAQKRLCARYRTFEARGKTPAKVCTAIARELAGFIWAISKVLPPPKVEP

SEQ ID NO: 395518 - protein, 349 aa, unidentified
MNNVTIGIDLHKNTSTYCVKNKEGKLLETDTFKTQEKNFEKLSCKYKGATVVIEPVSESWHFGDILEDLGFEVRLAHSRHVSALGKVKAKTDTNDALLLCNLSLAGILPEAYRTSRSMRDIKELVRTRYRLIRIRGGYKNMVHSILRKYGLKAPYQNMFGVKGLSWIEDKESIFGRCTGLVLQTFLSEVFDLNEKIEEIEKEMKKIGDKCIDYELLNSIPGIGPTGSLTIITEIENIHRFQSEKHFVSFCGLAPNTIASGDKSHHGRLRRGNTYLRFTLIQAAQHQKRLRDNKGLRLFYERKKEHKDKNTATVATARKIGKIVYSMLANNVSFDQRKIDEQEAVISTRA

SEQ ID NO: 395519 - protein, 338 aa, unidentified
MTIVMGLDQHRGQITAEWIDTATGELSRARVAPAHREPVRRFLSRCWDRELEVALEATTGWRFVVEEMRAIGAGVHLAEPAETAARRGNKKRAKSDRADARHLRELLMIGRLPESWIPPDHVLDLRARVRLRHTLSDQRGEWQQRIQAVLYHHGVPPRRQLMTRDGRAWLAEVPLGETAREQVTVAVAMIDALDAQIAPLDRELRAYARRQVGCRALMAHYGIGELTAVTILAELGDCRRFSSSRHAVRYGGLDITVHQSDQRRAPGHLSCQGPPALRWALFEAAQVARRTGSPDRDYYTQAAERLGTNRACLAVARRLLKRSYHTLRELGEEALQPA

SEQ ID NO: 395520 - protein, 314 aa, unidentified
MKNCIGIDVAKQNFDLHSLRTGQDLRMKNSTDGISKCVALCNKIRPELIVMEATGGYELALAATLQAEGFAVAVVNPRRIRDFARAAGQIAKTDKLDARIIAQFAATMEPMPTEQINENTQKLKALVARRSQLVGLHTAESNLLEHADGKEIRRSIAAVLKVIEAQLKTIDRQIKEHIDNTPRLRQRSEIFDSVPGIGPTTANMLVTELPELGRLNRRQIAALIGVAPIARDSGTFRGKRMTGGGRKKIRSRLFMPTLVAVRHNPILKAYYNKLLSRGKCKMVALVAVMRKLICILNTMAKKNQEWNPNSIKIS

SEQ ID NO: 395521 - protein, 347 aa, unidentified
MRFYTKQHKFYCGIDLHAKKMYLCILDETGQIRLHRNINTNRDIFLNIIEPFREDVVVAVECMFTWYWIADLCTKEDIPFVLGHALYMKAIHGGKAKNDKIDSHKIAVLLRGGMIPQAYVYPQKMRATRDLLRRRNHLMRKRAELYAHIQNTRSQYNLCEPLGCIAKPQNREGIIERFEDISVQHMLASDMAVIEAYDPIIAKMERDIISMAKHHDPVAHALLNTVPGIGKILSLVILYEIEDIKRFPTVQDFASYSRLVKSAKESNGKKYGSNGKKIGNAHLKWAFSEAAVLFLKGNEPGKRHLDRLANKHGKGKALSILAHKLGRAVYFMLKNKKPFDQNKFLGL

SEQ ID NO: 395522 - protein, 457 aa, unidentified
MTRRKHSRPARDIAPVHPHAAAVDIGATLHVAAVRPGCDPEPVRTFGTFTTDLHRLADWFEQCGVETVAMESTGVYWIPLYEILDQRGFEVVIVNARDAKNVPGRKTDVSDAAWLQRLHEYGLLRASFRPKGEIATLRSYLRQRERLLDQAAAHIQHMQKALTEMNLQLHHVVADVTGVTGLRILRALVAGERDPDTLAAYSDPRCKAPAETLRAALVGNYREEHVFALAQALELYEIYQAKVAACDQQIEAVLERLKAANPPPAAALPPARPRRRQANEPGFAVREALHAILGADPTQIDGIGPSLALTLVGECGTDLSAWPSAKHFTSWLSLAPHNKISGGKVLSARTRRSGSRAAALLRLAAVAVGRTATALGAFYRRLAARVGKAKAVTATARKIGVLFYNMLRHGMDYADPGASAYEARYRQRVLSNLRRRAKSLGYVLQKADPASAAIAVS

SEQ ID NO: 395523 - protein, 383 aa, unidentified
MNYSAIDYHKKNSFISTCNEQGERIAEAKICGNDPSAFARYFARLGEGPGKVVVEACWNWSWLHDVLSELEPIEEVVLAHPYKTRVIAEAQIKSDKLDARILSQLLRTKLIARAHVPSKQTRQRRLLLRQRMFWVRLRTMVRNRVHALLARQHGLTLPQRADLFGSGGMKFLRSVQLEGSEAKLLGQDLEVLEQLELQIKQSEKEIRRQMGQEPEVERLQSIPGVGILLSAVIAAEFDGAERFQSNTKLWAYCGLAPSTRSSDSHTWHGPLLFRCNKWLRWAFIEAAWIAIQHSAYFAAIYQRQLTRGKIPNKAIVVVARRLCEIAWKVLREKRSFSAQPPPHQANPFSRSPSRHSGGAYCKQYRLAPSLSIGDRESNPLPCG

SEQ ID NO: 395524 - protein, 322 aa, unidentified
MDTPTVIGLDIGKTELVAALSTGAAVQTVANAPAGHARLVRWVQKQQGTLVVLEATGRYHHRIWDALTAAGIAVAVCNPRQVHHWIQSQGQRAKTDRLDATLLARYGTQCQPAPTPSPSQTQCTIAALIDRRQQLVKDQTRLAHQLELADPVVADDIAEQLAEVTTHLATIDARLTTHTAADAPTQQRVEQLATAPGIAELTATRLVVELPELGRLSGKQIAALVGVAPFDQQSGRWRGAARIGGGRASLRHALYLPTITAIRCDPTLHACYERLRARGKSVKQARIACLRRFLGILNAMVRDGLTWRQTKIGQGAFLPQTP

SEQ ID NO: 395525 - protein, 410 aa, unidentified
MKRVKHIYIGLDLHKFQHTAVIVDCWFEKLGEMTFQNKPSIFPSLLEYVNRYLTEDLTPVFGLEDVGGYGRDLALYLIEQGYIVKFVNSSLSNAERNSYAMTEKNDSWDAQCVADVLIRKLPYLPDATPSDIHWIIAQLVGRRKALVKAQTALKNQLHMQLNYHYPSYKDFFSEVDGKTALAFWESYPSPSHLEGETVEGLRAFLLEASSNACSTRKAEQILSFVQADGEVKREYQTSRDFIIQSIVRDIRFKKQEIKKVDKELKVTILTLGMQLETMPGIDTVTSSALIAEIGDIHRFANSDKLARYAGIAPIKMGSGGKETMKKTKQGNRKLYDIFYNLSVQQVQVSKGSKIPRNPVFYAYYNRKLSEGKSKSQALLCIMRRLVRIIYGMMKNKMAYIMPDQPKSIAS

SEQ ID NO: 395526 - protein, 354 aa, unidentified
MEEYRRNGQEGKTVFVGVDLHRFKWHVTVRTEDQELFSGTLPGHWEALRRLLDRYRGDSIQVVYEAGYFGFWLHDRVVAYGADCIVTPPSLLPQEYGNRVKTDRRDSRKLAYLLAKGMLKRVWVPTLEERYHRQVIRRRRQLIGDRVRTQNRIKAELRFYGVELVEPRGPWPRVYVERLWCIRFGNRWMQESFERLLEEYDFLTEQIAKQTQLLRELSETPHYRERVEILRSVPGIGLIAAMELLVELQDVGRFRRAEQLAAYVGLTPSQYSSAEKIRMGRITGAGKNGLRAILVEASWKLITKDGVMRDKYERIKARSGAKRAIVAIARTLLLRSRRILLDGCPYGLGVIGSV

SEQ ID NO: 395527 - protein, 441 aa, unidentified
MKNPNPLDLPILNAHAAGVDVGSEKFFVSVGGKEPRVFLTVTGQMEEVCQYFKAEGVRTVAMEATGVYWINLHGALEEAGFEVVVVNGAHCRNFPGRKTDLKDCQWLAVLHAHGLLTGGFVPPSQIRRLRDYMRLRADLVSMAAQHVQHMQKALDRLNVKIHVVISDITGCSGMRIIKAILAGQREAEKLVELCDPQILKTKKAPMIEALRGLWRKEHLFALRLALESYENYQQQIAQCDREIAQVIQELCVEKPTPELGEPKELRHNAIVLEGLQKQMAQIYGKDLTKLPCINQSTAAVLLAEIGYDMSRWKDWRHFGSWLALAPCNAQSGRKRRRVKRYLTRAARILCRAVQCMAVGKHTWLASFFRRIRAKRGSKVAIKATAYKLAKLIFLVLTKGWEYVEQGIAKYEERLRLMRFNALQKLAKEMGFVVVPNAIVKA

SEQ ID NO: 395528 - protein, 325 aa, unidentified
MTGQPSATEESITVGIDVAKHTIEVAMGADGPILSLANDAAGFEALLEHLAAHRVALVVVEATGGLESALACTLQLAAYALAVVNPRQARDFARAMGQLAKTDRIDARMLAQLAQVLARHPERDKFIKPLPTAEQQALAALVRRRRQIIAMLVAEHNRLAQAHARTKKSIHTIIQVLRKELERIDTDLAAHVRSHFADLSSLLDSVKGVGKNTISTLIAEVPELGKLRGREISALVGVAPINRDSGVMRGRRTIFGGRASVRHALYMAALVASRHNPVIKLFYERLVAAGKPKKLALVACMRKLLTILNAMVKAGKPWDASLHAA

SEQ ID NO: 395529 - protein, 350 aa, unidentified
MNPTQVSSKSQVAVVIGIDLAKDHCDVVGYGANNKICLTKCGCSYPKLMEMLSNMPSAVVLMEACKGSMFRARAIASLGHDARLVKGSDVKALRNVNQKNDIRDADYIARLYYVPGTTYVYIKNEHQQTLQFLQNEYKSLQDMRINVGNQIHAGLEEFGYPARKSSVFIKNRLVEYLDKHAEHIPEEAIAALKRQRELWLMLLEKEEDAQRRMEKIANTDADAKRIMTVPSVGPQTAVRLLAHIGGNIARFKNSRQFAASIGLVPKQNSTGGNTTLNGITKRGPKRLRANLVQCAGVALQNAEHLGGNLGEWIRKMKESGKKYGVITCAIAAKLARIIYRLMKDKVVYVP

SEQ ID NO: 395530 - protein, 360 aa, unidentified
MPHARKEPAVEHIGIDLGAKVCHVVIVGAGGADILCRAVATRHLKAFLSKREPSLVVMETCTQSRAASRIALEVGHRVRVVPTQLVRALGVGARGIKTDARDARVLAHASQRMVDGLPGVHLRGDESVRTKELLAARRLLVSARSKLALSCKSWLRGRLLGIRGRATSSHFSQAFRRLARAHDLEIPLGTETLLATFEQHCEQIARLDAELDALVAVDPVVQRLMTMPGVGPVVAATFRAHIDDPLRFSSADQVGSYLALVPGEATTGGKIKRTATIRAGCRHIKSLLIQAAWSMWRSQPTSPLVLWAHSVEQRRGKRVAIVALARKMACILWAMWKHERGYEPGRATTFRPSADLRLAG

SEQ ID NO: 395531 - protein, 395 aa, unidentified
MFIVGIDVAKRSHEVCMITSDGQTVQRPFSIRNNCTGYNLMLEKIRKHTNIKSQIVFAMESTAHYWLALFTRLRKDGYHVILLNPIQTSAMRDMFIRKIKTDAKDSFIIAELIRFGRYAENNVAQDRLLALKELCRNRFYLVDMAGDLKRKLIALIDRVFPEYEAQFDTIFCKSSVALLKKYPTPQKLSNAHLDKLTELLWNSSNGHFGEWKARELKELARNSFGVEDCDGAYSTLILLMLDQIQSLSGKADALEKEISRLFQSFDTTVTTIPGVGPIIGAVILSEVGDISRFSSADKLAAYIGVDPSVNQSGEFQAAHAHMSKRGSPYLRRCIWMASQVAVQRDPMFRAYYEKKAAEGRKYMTIIGHVTRKMTAVVFAILRDHKVYEPILPTAA

SEQ ID NO: 395532 - protein, 416 aa, unidentified
MLAVVVTDVEIESEYQFERRMFGSNPEQLRSLTAWLVEQEAEEVVMESTAQYWKPVWGALERYWKPLREKREGARRRSGTLHLAQAQSNRGRRGRKRDFVDAERLVKRLVARELILSFVPDAEQRLWRTVTRKKYQLRCDRVRLQNQLESLLEEAHIKLSSLVTDLLGVSARRMLKALAEGETNPAALAALADERLRATPEQLCDALGACTELNAVYRRLLKMALEELRLIDEQTGELDKEMAGLLSGHQDAVERLAEVPGLGVDSAQQIIAEVGPTAATFPSGKCLSSWVGACPGDDESAGVNYSHRSPKGNRHMRRLLNQAANAAARNKGSIFEIVYRRSVPRLGHNQAIGAIAHRQCRLIWLILHQGVRYEERGPAVTKQSKQKRTARMIRQLRSLGYRIEAPNPKPSQAQAQ

SEQ ID NO: 395533 - protein, 392 aa, unidentified
MIYVGIDIAKDKHDCFIINSDGEILFHTFTISNNHEGFNTLFQRIESVSDDFTKVKVGLEATGHYSYNLLGFLLDKGLPTYVINPLHTNLYRKSLTLRKTKTDKVDSRTIATMIMSDMNLKSYSDISYHNEELKSLTRYRFDKVKERAKLKTSISRLVNILFPELEKLVPSLHLSSVYALLSEFPGAAQIAASHLTKLSNLLSQASKGHYGKETAILFRETARSSIGSVMPAKSLELKHTIKLIQELTAEIGEIEAAIKQIMDEEIHSPILTIPGISYRMGAMILAEIGDFNRFDSADQILAYVGMSPSTYQSGQLNNCYSHMEKRGSRYLRYALYNATKYVCQWDESFSAYLAKKRSEGKHYNVALSHATKKLVRLIFAMEKSGRTYQPAA

SEQ ID NO: 395534 - protein, 370 aa, unidentified
MLDTTTFIGLDVHARSIKAVSLDVMTGEVRAATFGYDAGAVAEWVRSVDPGARCVYESGVTGFDLQKRLTGLGVDCVVGAVSKMIKPSADRRRKNDRNDAEFLARMLSVGNVVEVWVPDDECEAARDLTRALEDARDDLSRSKQRLSKFLLRHGLVFDERTPTGRRKGNWTRAHWSWIESIRFAEGADNDVLAYYVDAVRRAAEEKARLEGLVEAEARKPRWRKRVDSLRCLKGVDTASAADLVFEAGEFSRFRNARSFAAWVGLTPSEHSSGESDRRGAITKAGNKHLRKTLVEAAWHYLTCSGRPKDLAKGQAPDRGARRHAAKSVRRLVERREALLARGVHGNKANVATARELACWVWAVGLMAEEA

SEQ ID NO: 395535 - protein, 282 aa, unidentified
MDILGGFDVHRKQITFDYIEMESGEVHRGKIRPTIRQSLREWLDEFTERFSAKQIAIAVEATTGWRYVVEEIKRAGIEPHLAEPAETKSLQGRKKRAKTDRLDAGHLRDLMVIDRLPESWIPPDHIQQIRTLMRLRHSLIEERTTHKKRIHAQLFHNGYPQQSNLDSIEGRAHLEDTELPTAARKVVDLSLAMIEHINEELAPIEKELRAYARSQAGCKALMMAHYGVGELTSVALLSELGDTRRFWSSKKAVRYAGMDVTVHSSDDKRAAGKLRAGRVRRY

SEQ ID NO: 395536 - protein, 318 aa, unidentified
MKETTATVYVGIDIAKATLQVHRQGSQAEWANTPAAHRKLCKELKSFPAVHVVCEATGGYEQALVGALHNAKIPVSVVNPAQVRAAARARGLRAKSDRIDAAMLTDYGQRYQPKPTPQPSRIQQQLVALTQWLKQLVQTQMVVRSQAEHHQHPFVKKQHQALVDYYQAQIKNVEERLETLLEKDQMLRQRVEALDAIEGVGPRTAFVVLAHMPELGQLNRQQVAALAGLAPWTRDSGTMKGLRCIGGGRPEVRLALYMPALTAARRNPLLSALYQRLIAKGKPAKVALTAVMRKLLIYMNHKLKALDAQPLSAVPIPS

SEQ ID NO: 395537 - protein, 403 aa, unidentified
MNSVGIDISKGRSTIAVMRPFGEVVISPFEVRHTDSELSELARQLKSLDGETRVVMEATGNYHTPVAKLLHDAGLYVSVVNAKLVHGYGNNDLRRVKTDRKDAVKLANYGLDRWLTLPRYIPEEDTRLLLKNCYRQYRQYSKVQTVLKNNLISLLDTVFPNANRLFSSPIRGDGSEKWVDFVAEFWHCRCVSEKSERAFTSKYLRWCRKHGYNFSEAKAHTIHAEACGHIDVIPKSETTKLLVEQAVAQLRATSTALAALKHEMQALTSMLPEYPVVMDMFGVGPTLGPQLIAEIGDVRRFYSKKALVAYAGLDAPPNDSGDVTGRHKSMSKIGASSLRRTLFLVMSVYLQTAPLDEPVYQFMDRKRAEGKPYRVYMMASANKFLRIYYATVKAYLESLEHTA

SEQ ID NO: 395538 - protein, 360 aa, unidentified
MLLKYSVGVDVSCKSLKCCISTIDKEQKVKVKSSTTVSNNLSGFKSLQDWIKKHYDDPEVPLLVCMEATGVYYEQCAYYLHDKGFKVVVVLPNKSKKYFQALGLKSKNDKIDAKGLAQMCAEQHLKIWEPMDDFYYVLRHLTRHHQSLQEQKSALNNQLHAIQHSAYQSKTILRQMNQTIALFDKQIKQIEKAIKEHITSNAEAKAKFDNVCAIKGLGMISVATVVAETNGFILFENYKQVVSYAGYDVVENQSGNHIGKTSISKKGNPRIRRILYMPALVVKTCQEPAFINLYNRTFERHGIKMKSYVAIQKKLLVMIYYLWKKNEKYNPNYGMDIQEKELVLPSLLAFEKGKNEVASL

SEQ ID NO: 395539 - protein, 430 aa, unidentified
MKSNTQNAKIEAITEKTLILGIDVGSETHYARAFDYRGIEYSKKPFKFSNTEVGFATFKEWILDLKERHEKDKVVPGMEPTGHYWFNLGKFLQDNEMKPVLVNPHHVKKSKELDDNNPTKNDRKDPKVIAGLVREGRYMIPYLPDGVYADLRTASNIRFQLQAELTRIQNRISRWFNIYFPEYKTVYGKPDAKSGILILKAAPLPEDILTLGIDGVNQIWRNAKLRAVGKARAKTLIEAAEHSVGSKEGAVSARMEIRMLLEDYESRNTRLQEVMVLIEELVKGIPMAEKLLEIKGVGIRTVSGFLAEVGDISRFNNPKELQKLAGLALVENSSGKHKGGTTISRRGRKRLRYLLFEAAMSLVAKNPEFRELHNYYTTRRRNPLKKMQSLMAVATKLIRVFYAMLTKGVDYDPKKMVSDIRRPEAYLQAA

SEQ ID NO: 395540 - protein, 323 aa, unidentified
MNKDMKYFGIDISKDVFDVTDSKGNHHQFENHHKGFKKFVKLLDDSSHCVMEATGYYHYQLAYFLLENNIKVSVENPLSVKRFIQMKLSKIKTDKSDSKLICEYAQKVDLKLWEGHSKHQIECLQITRLLSVYTKQSTMLKNKLHGEDVLGNPSLFVVRSLKRSLRSTQKEMETLENKLLKLVRETHQDLLTRLETIPGIGRKTAIMLIVLTDGFKRFSSASELCSYSGLTPLIRQSGSSVRGRARISKIGNKKLRNLLFMCSFNACKYNKACKALYDRIVAKGKSKKLALVAVCNKLLKQAFAIAKSGLIYDETYRSTLVKN

SEQ ID NO: 395541 - protein, 320 aa, unidentified
METEKTYVGIDVSKETLDVAVHATDQRWRFANSDKGIAETVSCLEELSPTLVVLEATGGMECPLAAALAVAGVPLVVTNPRQVRDFARATGRLAKTDAIDARVLAHFAAAMHPESRRLPDSQEQELKAILARRRQLIEMLTAERNRLHSARSKAVKANIKAHIDWLEKEMTHIDHDLEQSIRQSPIWREKDDLLKSVPGVGPVLSTTILADLPELGLLNRRQIAALVGVAPFNRDSGHMRGQRTVWGGRAVVRSALYMATLVATRHNPIIQDFYQHLLSQGKPKKLALIACMRKFLTILNAMVKHQTPWHYPVSGTLQTP

SEQ ID NO: 395542 - protein, 345 aa, unidentified
MELHTIGIDLGKTVFHLVGLNQRGEVVVRKKFSRKQLLHFTANLQVELIGMEACGGSHFLGRALKEQGHEVRLMPAQYVKPYVKTNKSDYIDAEAIAEAVERPKMRFVPIKSDDQLDLQSLHRVRERWVMRRTAVINQIRGLLLERGITLRQGRRHVDEALPGILEDASAKLSGAVRLLLAQLKLELDHLQMRIDEADAVIQKIAGENEACRRLVVIPGIGPVTATAIIAAIGNGAAFKKGRGFSAWLGIVPGEYTTGGKQKLLGISKRGNSYLRRLLVQGARAVLQQRAKQSSGLSAWLAQLTARVHSNVAAVALANKLARMAWAVLAKNEPYRPPMLAAAATT

SEQ ID NO: 395543 - protein, 350 aa, unidentified
MGRSTTVSCAVTYAGIDFHKKFSMVCLGDDKGKVISIERLENHEDAVRKFFAQYPGLHCAIESCRGYEWFVDLLKGMGLDVHLCNAYKVKLIAHSRCKTDKVDSRILMELLAIGFLPTCYLPTLEERDLRERLRWRCHLVRNATRIKNRIHTLIAKDNLGATLGPDLFTKNGKKLLKQVKMSSATRQEVLENQLLLLEHLEEMILAEERWVEMTVKASPDARLLMTIPGIGEFSALVILSELGDIKRFKTSAQVANYSGLTPSISQSGESSRTGAITKQGPSQLRWILIQDAWQAIRYSYEFRCHYAAVSKRCGRHGAIVSVARKLLTVAYRVLRDKKPFDPNLIGAQGA

SEQ ID NO: 395544 - protein, 388 aa, unidentified
MFFLGIDIGKNTHVASLLDEKAKIIFKAYSFANTLDAAEALLVKLEPYKDSLEIGMEATGHYWLSLYSFLTEHNFIVHVINPIQTDGWRKGIEIRKRKTDVIDSVLIADLIRYGNFLETSLADEDILSLRNLSRFRVYLVNSVSDLKRKAIAVLDQIFPEYASVFSNVFGQTSKELLKSLSLPSDYENLSATKIEEVLSNITQKKKASKTISTLSDKASRSFGISFCKDSFAFQLKLIIEQICFIEEQIASVELEIEQLMSKLGTNIKTIPGVGNVIGAVILGEIGDIERFDNPSKLVAYAGLDASVSQSGEYEASSGKLSKRGSPYLRKALYMAAQRAEFCDPVFHAYYEKKRNEGKHHLVATNAVARKLCHTIYAILKKDIPYEIQ

SEQ ID NO: 395545 - protein, 367 aa, unidentified
MSKAETGRLCVGVDLHKTQFTICALNEDGEYLLEKQYPTKEEGYREFAREMHRFEEQGCSIELAVETTGNARFFKNRMESEYFAVKVVNTNRFKVITMSTKKTDANDAATLAYYLMKDLLPEAHLCSQTSEEIRRLLKTRSVLVQSMVKIKNQIHGMMLGYGIETKAAQLQSKRKRQELINDLEDHNFSAYTAPSLKVMLKILDDLSAEIKGIEKLLEEMVASNEDVALLMTVPGIGINTATVIAAYTAELERFDGNYKKFASYVGIIPSVHNSNETTHYGRITKHGPQELRTAFVQAALGMIRLTNVSSDWRIIKEYQRRKGDKGSGRAIIALARKITRIVFVMLSKREGFKPELMRCEQEIQQTA

SEQ ID NO: 395546 - protein, 335 aa, unidentified
MGIDLHRRRSVIVRMTTDGDPLECIRISNDAERLATVMARAGESPEVVLEATYGWYWAVDALREQGAQVHLAHPLGVKAFEYRRVKNDERDARDLADLLRMGRLPEAWIAPPATRELRELVRHRAKLVGMRSNCKAQIHAVLAKCGIQVSMTDLFGLAGTELLDRLELPKPYAARIASLRRIITALDFEIDAFAGQVRGRLARDPGFVAVQSIPGVGPILGAVFVAEVGDVHRFARAEELTCWAGLTPKHHESDKHVHRGRITKQGSRLVRWAAIESVQILPKTSVVGRIRDRVGDRRGRNIGVVAAARVQLEFVFYALRDHRVRALQGTRPVAA

SEQ ID NO: 395547 - protein, 402 aa, unidentified
MNAVGIDVSKGKSMVSIMRPFGEIVSAPFEIKHTASGINSLVELINSVEGESRIVMEHTGRYYEVLAHQLSEANLFVSAINPKLIKDFDNDSLRKVKSDKADAVKIARYALDKWQNLKQYNVMDELRNQLKTMNRQFGFYIKHKTAMKNNLIGILDQTYPGVNTYFDSPARSDGSQKWVDFASTYWHVDCVRKMSLNSFIDHYQNWCKRKKYNFSQSKAEEIYGKAKELVPVLSKDAITKLIIKQAVDQLNSASTTVESLRTLMNETASKLPEYPVVMAMKGVGTSLGPQLIAEIGDVSRFTHKSAITAFAGVDPGVNESGSYEQKSVPTSKRGSSDLRKTLFQVMDVLIKTHPQDDPVYQFLDKKRAQGKPYYVYMTAGANKFLRIYYGRVKEYLSSLPES

SEQ ID NO: 395548 - protein, 402 aa, unidentified
MNCVGIDVSKGKSMIAVMRPFGEVVVSPFEVRHTANELSELAGLLKSLDGETRVVMESTGNYHAPVAWLLHDAGLYVSVVNAMLVHDYGNNSLRRAKTDKKDAVKLANYGLDHWLTLPRYVPDEDTRLMLKTCYRQYQQYSKVQTMLKNNLISLLDTTFPDANRLFASPPRADGSEKWVDFVDAFWHCECVCGLSEKTFITRYQKWCRKHGYNFNENKALDIYASACGHFGVMPKTDTTKLLVEQAISQLRATSAALAALKQEMQSLAASLPEYPVVMGMFGVGPSLGPQLMAEIGDVRRFHSKKALVAFAGIDAPPYQSGQMDVRSRSISKRGSASLRRTLFLVMSVILQRAPMDEPVYQFMSKKHSEGKPYRVYMMASANKFLRIYYASVKAYLDSMEYD

SEQ ID NO: 395549 - protein, 462 aa, unidentified
MAAPATCPVALRARIRRCRFAHPLPTSESSVTEGEVAMSEQSRRRCIGLDVHRDFAQVAIWQGGVVSEAGRFATTPEGVRAFAADLGPADEVALEATGNSWAIAALLASRAGRVVVSNPVKTRAIAEANVKTDKVDAQILAQLLAADFLPPVWRPDAQTAALRRQVLRRAHLVRQRTRLKNQVHAILHRNLIPRCPASDLFGIKGRAWLAEQQLPPDERTTASALLRQLDFQDHELALIDSDLARVALGRDDVHRLMSIPGVDAIVALSIVAAIGEATRFRSPDKLVCYFGLNPRVRQSGGHTASHGRITKAGPGHARGMLVEAAWAASRTPGPLRAFYQRVRARHGMQIAVVATARKLAVLCWHLLIKGEDYAFTQPSLRAHKHRRLELRAGLPPANGRKGKSAAYSLKAVRAAERDLAAQGEAAYRTMVAAWQPRRDASTSTPPRNKQAAGADASNGTRL

SEQ ID NO: 395550 - protein, 428 aa, unidentified
MSSQEIIRRRQYCQIIKEINGSDQHLVVGIDVGKDKHHAFMGTATGISLYRKLIFENNLNGFSRLITTADQIKAQNSLTKVVFGLEPTGNYHKPLARHLIGCDRDVVLTAGQSVKNNRQVLNGRWDKNDTKDAANVADLVSRGRCLFYDVPSPEIVELRSLLSLRRRLKKEEHSLRMRIRNGLLAQYFPELDWFYNACENENLAIVRWCLNPDKIAAMEFDHFFKMVTRTRRGIAQKLRLEKIYQAAIDSVGCAMGPAAEFEAELLVEKISQVRGQLHDTEELIEEICLTFSEYSYLMTIPGFGPYVSAKVLAVIADPFRFDNRKQVIRLAGYDLCANRSGKTSDQAAPVISKNGNGELRYVLYIAANVAASRTEHFRAYFTKMLQGREREKGIKTKMRVKLAVKMLVIAWTLMKKKEVFDPDHLNID

SEQ ID NO: 395551 - protein, 335 aa, unidentified
MNNVPLLLGLDYSDGLVQLCAMDEQANVLVNRACRNDWRELVKAVQGKGIVRRVAIEACSGAADLAEELVSRAGWHVELAHPHYVAKLKGSPDKTDYSDSRLLADLTRVGYLPKTWLPPAFVRELRQLVGYRQQLVDQRRANKLRVGALLREHRVKAPKELSRWSRAWVMFARSTPQLGEQARWIVNQVLDQVVDLDRRIAVAELRLRETTAGDAMTRKLMDQEGVGEVTAWVIRAFIGRFDRFHSGKQLSRYCGLSPKNASSGGRQADGGLIKSSNKILRATLIQAAHRLIRTCPRWSALAESLRRRGKPACVIVAAVGNRWMRRMFHEMKQMS

SEQ ID NO: 395552 - protein, 412 aa, unidentified
MDRWIERGCGLDVHKATVAACLRVPGPAGKRTQEVRTFGTTTGELLVLHDWLAAHGVTHVAMESTGVFWKPVYYVLEASFTVLLVNAAHIKQVPGRKTDVSDCAWIAQLLEHGLLRGSFVPPPAIRELRDLTRYRRTQIQERTRVANRLHKVLQDANVKLTNVTRQVLGVSGRAMLDALVQGTTDPAVLADLARGRLRTKLPALQQALAGRFRDHHAFLLGQILAHVDHLDAAVTTLSGRIEALLRPFAAQVERLLTIPGVQRRTAETILAEIGTDMTRFPSAAHLASWAGMCPGNDESAGKRRSGKTRKGSKWLRTGLTEAGNAAARTKATALGARYRRIMPHRGHRKAVVAVGRHILEISYHLLGTATTYHELGADYFDRRHAERVQRRCLQQLERLGLRVTLTPAPAAA

SEQ ID NO: 395553 - protein, 369 aa, unidentified
MSIVYVGMDVHKENYTLCCYSYSEDKIQYRQQIKADYKLVLKYLEQVRKHYAEEVGFECGYEAGCLGFSLYHQLTEHGVKCVILAPTTMAVTNKTRIKTDKRDAGNIAKCLAFHTYSAVHIPTAEDEAIKEYVRMRDDQKKALKIIKQQILALVLRHDCHYGTGSYWTIKHVTWLKSIDLKGVMQESLDEYLITYEYLVNKIERFDKRLEELAETERYKERVQRLSCLIGVKTHTALSVVVEIGDFVRFSNARLLASYLGLVPGEDSSGEKQNRKGITKAGNSHVRRLLVEAAQSYTRGKIGYKSKELKRRQKGNTPQVIAYADKANERLRRKFYRMTTQNNTQRNVAATAIARELACFMWGLMTDNIA

SEQ ID NO: 395554 - protein, 369 aa, unidentified
MTDLTLFVGLDVHKKTISVAVVEAAAGAAVRFYGTIANTPETVRTLCRKLSRDGQQLYFCYEAGPCGYGVQRRLTRLGHRCDVVAPALIPRKVGDRVKTDRRDAMMLAQTLRAGQLTAVWVPDEAHEAMRDLVRLRAQAMRDLRKARQQLLSFLLRHGRNSPYGHWTKMHRRWLGELVFAHPAQHLALEEMLQRIERAEALCDRLKQAILELVPQWSLAPVVQAIQALRGVSLIVAAAIVAEVGCFGRFESPRALMAYLGLNPSEHSSGATIRRGAITKTGNTLARTCLVEAAWTYRFPPRVSQIIRDRLKELPEPIRAVAWKAQVRLSARYRKLIAAGKPAPKVVVAIARELVGFIWAIARMVEPKFA

SEQ ID NO: 395555 - protein, 321 aa, unidentified
MSDSVTVGIDVSKLTLDVHVSPAQLHQTVSNNESGFAELKTLLSMQQVSLVLLESTGGYEDAVVCFLQSLGYDVSVINPRQARDFARSMGRLAKTDRIDAELLAQLASVIHARPDRERFVKKITDDRRRKLACMVARRRQVVNMISTEQQRKSAASNYSTDSINKVLSFLRSELKSIDADISLHVRSHFADISGLLASFKGIGPATIGVLLGEVPELGRLNRRQISALIGLAPFNRDSGFMRGRRTVWGGRAMVRNALYMPTLSAVRFNPAIRVFYMRLISQGKPRKLAQVAAMRKLLCIINAMLSSGTMFNPALHTGPGA

SEQ ID NO: 395556 - protein, 442 aa, unidentified
MSDNMPSILSEPAAFVAIDWGDQKHLWALQPVEGGKIEKGELENTPEAVALWAADLGQRFGGRPIAVALEQKRGAVVYMLLKYAHLVLYPVPPGMSASYRQAFFPAGTKDDSGDTALLLDLLLRHRERLRPWQPDTQETRLLQFLVEDRRQLVNEKTRQVLRLIDCLKQYFPQLLHWFEDMDSPLVGSLLERWPDLQHLQHAHPGTLRKFFHEHNCRKEELIQERIDGIYAATPATNDAAVLEACARKAHSLVKLLTTLRDSIGEFDLRIQELTASHPDAVLFDSLPGAGPVTVPRLIAAFGTRRERYDSAYQVQCYSGIAPVKEASGKIQWTHFRWACPKFLRQTFHEFAGQSIPQCEWAKAYYQQQRAKNKSHHTAVRALAYKWIRIIFRCWKDGRPYDEQQYLQSLRRRRSLLGPAVASATAVGWHQVAGFQKLSENPS

SEQ ID NO: 395557 - protein, 625 aa, unidentified
MSKLSSTSQVIIGVGIDTARYGHHVTFTNQDRTTALRGFTFLESRPGYQKLHDALKHLAAKHHNQVLFQVRLDAAGQYAANLEAFVRQLPFNVSFSVGEPKRNRDYKNAHYPKAKSDPIDSAACARFAVVEQPPHAPAAPPEFLELRDLVATLSAQSRQTTRCINQLHKLLARVFPELALIANNIAEQWVLELLRRYPTPARIAAARLSSLSQLPHVSPERALHLQQTARSTTGSFTGPFAENLVVQAVQSVCDSQKRETECLAWIELSLDSLPPGGHRHLISIPGIGPRTAAVLIAKIFSIDRFQRPEQLVSYFGVFPEVNSSGVDKTGAPVSRGQQRMSTRGCDLVRKMLWMAALTAIRFNPPIQALYARKLAARKPPSVALGHCMHKLLHQVFAIWKTNRPFDKCYSARTPPNPHAATPQSPPAPAPSTPTPMPADSRSQKNAAAGRTGVGPRRTAVTATASHLRTRKLSPVTDLNNPKIASPATAATPISNPTGLVDFADLRRRVSINQVLDHLGHFDHLTGSGSQRRGACPIHDKPGTAPKARHFSVNLERNLFRCLHPQCQAKGNALDLWAAVRQLPIHAAAIDLAKTFQVPLTSPQGVLPPPTTPVAPKTRISTSRST

SEQ ID NO: 395558 - protein, 344 aa, unidentified
MEHYAAIDVSLEWSSVCVVDATGEIVREARVPSEPEALVAFFAAAGLCIARIGLEAGPMSQWLHAGLIEAGLPAILIETRHVKAALKAMTVKTDRNDARGMAQLMRMGWFRPVHVKTLQAQEIRALLTARKLLVAKLRDVQSSIRGILRGFGLKVGAISKGKFEARIRELVAGQAMLERVAEPLLRVRAALGAEYRALHRHLLAAVRQDQVCGRLMTVPGVGAVVAMTFRSAIDQPGRFAKSKAVGAHFGLTPKKYQSGEIDRTGRISKVGDAMVRTALFEAANVMLTRAVRFSTLKAWALRVAGRHGAKKAKVALARKLAVVMHRMWVDGTTFRWGEASVSAA

SEQ ID NO: 395559 - protein, 450 aa, unidentified
MSKGSGVSRGDRRRNARLAELRLLVCRENAIVGIDLAEDNQAVVVTDHDSKVLARRSPRCKAWQLGEVLDWAVGKAKARGFESVTVACEPTGSRWMHVQQACAERGLNFVCVQTLVTHNARVAEDYTRDKSDQKDAVLIARLTAELRCYRPEVIEEEWAVLRYLGQRRDALVTEALRCRQQITDRLALAWPAALGAAAAPLDSVTFLACLQVTADRCDGDPGKLRRYGLAEFTQLVRGVLPRWGGQRICHRIVACFHAALGDSRGAVPARRRGALKLAGHALADLRRARELQLRAEAEMIAQLDVLGITDVLASIEGLSLPVAACILAEIGDPARFGSSRALVKHAGVAPCENSSGNSAGQARISRRGRPVLRKTAWRGTWAMIHGANPVLAAKYDHLTSRDTGKLAKGQAHIACVATLLRWIYSVITTRTAWDRRVAGGTISHTAALAA

SEQ ID NO: 395560 - protein, 408 aa, unidentified
MKTLHKRCAGLDVHKAEVVACLRVITNRKVGREVRRFPTTTQGLLALAEWLENAGCTHVAMEATGVYWKPVWHILEGHFVLILANAAHVKNVPGRKSDVNDATWLGDLLAHGLIRSSFVPPPEIQELRDLTRTRRQLTREIVQHVQRIQAVLEEANIKLCSVITDIMGASGRRMLKAMIAGETDAEKLAALGHERLGCTRAELVEVLTGCVREHHRFLLGQHLRTIEQLEDSIAAFDARIEGALSPFHDIVERLKEVPGLGATATETVIAEIGTNMSPFPTAGHLLSWAGFVPRLDESAGKRRSTRIRKGAPWLKPVLVQAAWGAARKKNSYFQAQFLRLKARHGAKKAAIAVAASILTTVYHMLRDGTCYQDLGPEHFTRRNPAKAAARLANRIRNLGYHVEIRAAA

SEQ ID NO: 395561 - protein, 311 aa, unidentified
MNSEAYVGVDVSKVSLDVKVLPTNETLQISNDDLGINALIQRLTQIDPTLIVFESTGGLEMLAVGNLIENLLPVVVVNPRQVRDFAKATGRLAKTDAIDADTIARFARDIRPEVRPIKDEHTQLLSALIARRRQIVDMLVAEKNRLSRAPKPNKKSIQKHIQWLERSLTDINKDIDKTIKKSPTWRENDRILQSFKGVGPIVSATLLCDLPELGMLNRKKIANLVGVAPLNCDSGNFRGKRRIKGGRANVRRKLYMAAVASLRHNPLMKNFYDRLVEAGKPPKVALTACMRKILTILNAMMRERTYWNAIW

SEQ ID NO: 395562 - protein, 339 aa, unidentified
MKYTPVGVDIAKHLIQVHFINEHTGEVVDKQLRSKDFLTFFSNREPCLIGMEACGGSQHWAREPKKLGHEVRLLQARVVKAFVMGNKNDVMDARAIWMAVQQPSKEIAVKTEEQQSVLVLHRSRRQPVKFRTAQINALHGTLLEFGETLHKGRAAMDRELLAALERMKTKLPPYLITVLEDQYTRLSELDMLIDDPEKQLNSVARQSETCKRLMEIPGVGPLIATAAVATMGKASAFKSGREFAAYVGLVPKQTGSGGKVRMLGISKRGDTYLRTLFIHGARSAALLTKEPDPWITELKKRRPTGVAIVAMANKLARTVWAIVAHDRKYDKNHVSIRPY

SEQ ID NO: 395563 - protein, 358 aa, unidentified
MRSITPQDAAIIEVAGGVDTHSDTHTAAVIDQVGRVLGTEQFPADTAGYAALLDWMRSFGQLVGVGVEGTGAYGAGLARLLHRQEVLVIEVDRPDRKTRRFQGKSDPIDAVQAAKTALAGERTGVPKQRDGRIEALRNLRVARRSAVDQRADAQRRIKTLIVTAPDDLRERLRSLGVKDLITTCANLRPDRTGAASPATAVKIALRSLARRHQQLTAEIADLDELLEPLVAAINPGLVAANGVGTDVAGQLLVTTGDNHDRLTSEAAFAMLCGAAPIPASSGKTNRHRLNRGGDRQANKALYRVAICRLRWDPRTRAYMERRTKDGMSKKEIIRCLKRYIARELYQLITTPNHLELAA

SEQ ID NO: 395564 - protein, 342 aa, unidentified
MAKIARIGIDTSKSVFQLHGVDEAEQVVLQRKLRRRELLRFLGKVEPTSIGLEACGASHHWGRELRALGHRVVLIPPQYVKPYVRRGKNDAADAAAICEAMSRPPVQERLVPIKTTDQAAAQMLLGVRESLLRRRTQLGNIIRGHAAEFGVIAAKGLDKIEPLLTAITEDQSVPTLAKEMFVVLGQELTELRTHIAQIDQKLTALHRSNELCRRLMEVPTIGPIGACLFVTKITNPTGFRSGRMCAAWLGLTPKDHSTAGKQRSGRITRAGDESLRASLVCGATAYIRHVRSGRSTPSPWLADLLRRKPPKLAAVALANKTARIAWKLMISGRRYQPAAAAA

SEQ ID NO: 395565 - protein, 373 aa, unidentified
MPETFIKTKAVNKLFIGMDLHKNTSTFVVKDETGKLVNSAKVLTDKNEVKKFIDSVKEKSTDLSLVLEPVSQWYYFADLIENLDIGVHLAHPMKVKAIASARVKTDKIDAGVLCDLLRGNLLPEAYFSPKEVRGWKEQCRFRASLLNLRTQVKNKVHAILFKHGLRHNFSNLFGKGGRIWLAGLKLKEPFKSNLDKYLLLIDQLTDLIIQAEKIIQTTVTNHPQANLLVSIPGISYCSALTIMAEIGDVSRFPSAKKLQGYAGLVPSTYNSGDRQIHGKITKQGSKWLRWIMIEAAYHQERCKKIPGFGSYYSSMKRRKGTKTAAVATARKLLAVVWRLLKDNRPYEVIPPHCLPDRQAGWKSRPIASNLSSI

SEQ ID NO: 395566 - protein, 374 aa, unidentified
MGYATILGLDLGKFKSVCCVMDAATGEQRFETLQTTPATVTELLTSHAAANGGVLLVVETCDVAGWVYDVGSAIAGVTVVVVHTQGDERWRWRKVKRKSDRDDALKLARLARLGELPQPPVHVPSPERRQWRRLVLHRRSVVTRRTQSRNAIRSIYSQQGLSLARGNKQWTRAGVAQLRADARPIEDCDEALDLWRGRVHAELELMAGVDAQLKLIDARLDQLAEADPPVALLRTVQGVGPRLSEAVVLHIGDDPRRFKSGQHLAGYAGLVPKLLESGQTTRLGHITRRGPALLRSLLVEAAWMVYRLNDWARAFVEKVSRGGRGRRKLAIVALARKLLILLWGMLKSNKPFREPKAKKRITPKQEAPKAMAMA

SEQ ID NO: 395567 - protein, 465 aa, unidentified
MPIIRSNAIRIKRFRDLKESLRTRRDRLLVGIDIAKAQHVAQVRRAHTQILDKQLTIPNTQAGFETFWAHLEQRQAETGVPEIVCAVEPTGTYHVALAQFLEAHGADVVLVSNTVAHHNRRTLDGTWGKSDPKDAHNLGDLLERGHVLFYSLPDERVAALRRLVRLLRHARTELAACKARVQNTLLPLLGPAGEPLPPALVASLPAPLRRLCPAAPGQRRGRSRREAGSTLTATPATPLPPGLCVELPDLTARLTAVQARITAIEVALVQVAEALPAYALLRSIPGIGPTLAAILLAELGDIAWYTKFSQLRKLAGLDIIGVATGQWAGTARISRCGRPLLRWALYQAAMGACRTPGWRARREALIAKRRGDRYAFFKATVELAAKLLRLVWGVWRSGRAYDPAWVGRGPAARPATAPAMARAGRRGALPSGKGPAEIAQPRGRQAGRSSARRALSRGNGTSGRT

SEQ ID NO: 395568 - protein, 343 aa, unidentified
MDHYAGIDVSLEQSSICIVDATGRIVREAKVASEPEALIVFLRSLNLPLVRIGLEAGPLSQWLQAALVKAGFEAVLLETRHVKAALSAMIVKTDRKDACGIAQLLRMGWFRPVHCKSMPAQEVRALLVARKQLQAKMRDVELSLRGLLRGFGLKVGEISKGQFAARVRTLVAGHTMLERIAQAMLQAREALRVEFSKLHKAMLAIVRADAVCRRLMTVPGVGALVAITFTSGVDAPERFARSKGVGAHFGLTPRKHQSGETDITGAVSRVGDVMVRTALYEAAHILLTRAVRFSALKRWALEVAKRRGMKRAKVALARKLAIILHRIWVDGTTFRWGREAAVA

SEQ ID NO: 395569 - protein, 384 aa, unidentified
MAPRQNIGCALLRPCNSAWCDSRKLRVAVAGGSPTRPGSLKAVGEHGAPPVIPLNPNSRRGRKARSPIRQGRVAMDSITVGIDVSKDRLDVAVRPSGEVFAIERNPAGLEQLTLRLGALSPNLVALEASGGFETVVAAALAAARLPVVVVNPAQIRAFAKAIGQRAKTDPIDAVVIAHFAEATRPEPRPMPDEATRLLADLVARRRQILEMMVAERQREERVTVPHLRKSIMRLLKVLERELTSVDTDINDAVRGSPAWREKEDLLASVPGVGPTIARTLIAELPELGQLSRRQVAALAGLAPFTRQSGQWRGKSFIGGGRTSVRTALFMGAMVAKKYNPVLRTFFNRLVAAGKPKMIALIAVARKLLTMLNAILRDRRPWQTA

SEQ ID NO: 395570 - protein, 411 aa, unidentified
MEAIIERAAGLDVHQGSVVACVILGSPGRRPSRETRTFGTMPRDLAALRAWLLELGVTHVGMEGTGVYWRPVHAALEGAFTLIVGNASHMRNVPGRKTDVKDAEWIADLVRHGLVRASFVPPPEVRVLRDLVRHRKALAGTLAAERNRTLKLLESAGIKLAGVMSDVFGVSGMLMLEALADGTATPAAMADLAKRRLRRKVDRLALALEGRLAEHQRPLLRLHIRRLGEIGRDLAELEAAIGAAMRPFAAQQALLVTIPGVDALTAAAIIAEIGADMGAFGSARRLAAWAGLCPANRESAGKRKGHGTRKGDPHLKAALVTAAVSAARAKGTYLRDKFHRLRARLGAKKAAVAVAHKILVAVFHILERAVPFADLGADYLDRLDKHRTAKRLVRRLGALGYEVMLRPKAAA

SEQ ID NO: 395571 - protein, 345 aa, unidentified
MNKQVFAPQATVFCGIDVSAASLAVALIAPDGSLARREFSNNASGHEALSVWLKKRDSPVRVSLEATGIYSLDLALALDAEACVELMVLNPKLVNRFQQTVCRSKTDAADAMVLAEYSQRMPFCRWQRPAASHLALRTVSRYIGSLVVEQAALKNRLCSAESTATTPRAVRVDLKRSLAAIERRVKRLRVEALKLVESEVELRERYQLLTTVPGIGPVNALTILSELILLAPAMTVRQWVASSGLDPVHRQSGTSLNKPSRISRAGNRRLRAALYMSALSASRYDRHLAAFYRALRARHKTGLQALMAVARKMLHAIYGIFKSGTPYDGRRLFPNIQTEVESIAG

SEQ ID NO: 395572 - protein, 340 aa, unidentified
MELYTGFDLHANNSYAGIINADGKREARKRLPNDIGQILQFLEPYKAQTAGIVVESTYNWYWLVDGLMEAGYRVHLANTTAIQKYSGMKHSDDKDDAFWLAEMLRLKILPTGHIYPKDERPIRDLLRKRGHLVKLRTSLILSLQNIIDRNCGMRISVNDIKRLKEDKVTPYMEGNQDLEFAGQVSKDAIDFLGAKIRAIESFVEDRAKLNDSYSNLLTIPGVGKILGLTIMLETGSVDRFEKVGNYASYSRKVSTKWTSNEKKKGRGNKKNGNKYLAWAFSEAAEFARRYDQQAKGYYNRKLQKTNFMVAHNALAHKLARAAYHVMKEQTPFMPEKLFAS

SEQ ID NO: 395573 - protein, 408 aa, unidentified
MEKNEKRYIGLDVHKHYLIALGVDENLEVVLPARRVELSHLEGWMKKTLTRQDEVVLEMTTNTWQLYDELSTYAGSVTVVHPPHVALITRSQVMNDKIAASILARLLAKGLLVGIWVPPQEVRELRGLVAQRQKMTRLATQAKNRLHAVIQRHHLKPPTGNPFAKTNNGWWQALPLGKLEKMNMQSDLETLQFAEQQEARIQKEMTGIVAENEEMGRLLHLAGFGVITTVTVYAAIGDIRRFAEPKKLVGYAGLGTRVHDSGLTTRTGKITKAGRRDLRVVLVEAAHVVANSHPHWKAELARLQPRLGYNKAIVAIARKLLVTVWHVLARKVSDRFAETEKVSEKMLRFAYEVGKGNRPGRQTAAQFARERLDALGMGQELTSIPWGSKKPIPLPPSTLKGRSDVPNK

SEQ ID NO: 395574 - protein, 349 aa, unidentified
MCPDKSRANVARLGLSKEQLALNEGGVAIPDPAEVYVGIDVSAKQLDVAIRPTGEARQYTNDPEGIASIMDRIVPLAPSGVVLEATGGFEMLVAGELELAGLPISLVNPRQVRNFARATGRLAKTDAIDAQVLAQFAEAVKPPVRPLPDADTRELRALVDRRRQLLEMVTSERNRLRLASKRVRPLIQEHIRWLKQQADDLDKDIAKLIRSSPIWRAQEDLLRSAPGVGPVLSSVLLTHLPELGSLNRGQVAALVGVAPLNRDSGAFRGKRSVWGGRTAIRSALYMAALVATRYNPVIKAFYQRLRAAGKPAKVALTACMRKLLIILNSMLRHRTQWGPPHMQTSALLV

SEQ ID NO: 395575 - protein, 445 aa, unidentified
MDVVFPHCAGLDVHKKRITACRVSPDPTGQDADGVLEVQDFGTLTIELLALSDWLSQVGVTHVAIESTGEYWKPVYNLLEGTFTVFVVNAAHVKNVPGRKTDKADARWLAKLMRYGLLQASFIPPQGQRDLRDLTRYRTKLVQERSREVNRVQGVLERANIKLASVATDIMGVSGRAMLEALIAGRADAATMAELARGRMRTKIPVLAQALTGVVRAHHRRLLAIQLAHIDFLDEHIATLSEEIQHVLSTLCPSAPPGSTTDDAGAPPTVPEASPSAPPMTFLRAITLLDSIPGVNQQGAELLVAEWGIDMERFGTAPRLAAWSGIAPGNNESAGIQRSGKTRKGNRALRTGLVQMAHAAAHTKDTYLSALYHRLAARRGKKRAIVAVAHSIVRSAFHMLSRHEPYHELGGNYFDAHRREHLVDRLTRRIERLGYRVALEPAVTP

SEQ ID NO: 395576 - protein, 391 aa, unidentified
MTKHKTETVNDLSRCLDPLDMDATLIVVIEMSQSSWLVAGIVPGVERQPLKKLAIDERSLLNLLSRWRAEAEKKGHRITRIAVAFEAGHDGFWLARWLAAQGVEPHVIHSSSVAVTREHRRAKTDRLDTELLKRGFLGWLRGERGHCKMVAVPTLAEEDAKRPSRERETLVGEASRIITRLKAAFVRLGIRSFNPKLKAAAERLGTLRTPEGEPIPPNTLAALKRDLERHQIIKRQIREIEQTRLDHLAQAPAKGPHAMVLLLARVVGIGVETADMLVQEVLSRNMRDRRAVARYAGLTGSPDESGAKRREKGLARSGNARVRRGMIQLAWRFLMFQKDSALAEWYRQRTANAPSMRKTFVVALARKLLIALWRLARDGVVPEGVRLRPAA

SEQ ID NO: 395577 - protein, 341 aa, unidentified
MDKVIREGAVRVGVDLAKRVIQLHAVDASGRVLTSKALARGKFIECCAKLPPGCIVAMEASSSAHHWARKLAALGLEPRIMSAQLVEPYRSQGAGGKNDANDAAAICEAASRPTMRFIPVKSVEQQSMLCVHRLREGIKEDRTACINRIRGLLAEFGLVFPQSPRELHAVLGDVLEDASNELGTLARLTLQRDERIAAHGQTNESVRRAATLLGIGPVTASAVVATVGDFKQFKSGAQFGAWIGLTPRQRSSGGKNNLGGITKRGDTYLRTLLIQGAKSAVMTAHRRQDRISTWVAALRERSGWQKAVVALANKNARILWAVMTRGQAFDANHLSVKPAAA

SEQ ID NO: 395578 - protein, 385 aa, unidentified
MQKPNDLNQSRIVLKQDSTLIAVIEMSLRSWLVAGIVPGVERQPLKKLAVDESALLKLLNRWREEAEKAGRRIERITVAFEAGRDGFWLARWLRARGIEAHVIHASSVAVSREHRRAKTDRLDTELLKRAFLGWLRGERDHCKMVAIPTTKDEDAKRPNRERLSLVGEQTRIVNRMKAALVRLGIRGFNPKLKKAVGRLEDLRTPEGEPIPPNMLAELRRDMERRRLVSDQIRQIEEARVKRMEQAPGDGPHAMVRLIARVIGVGIETADMLVHEVLSRRLRDRRAVARYAGLTGAPDESGSKRREKGLAKAGNARVRGGMIQLAWRFLLFQKDSPLAQWYRTRTAGAGKNRKTMIVALARKLLISLWRLVTTGEVPAGVVLRAA

SEQ ID NO: 395579 - protein, 368 aa, unidentified
MDNEYYTTIGMDVSDRTTKVCVMAKERGKRRILEETTIPTTKDGLRAYLSVKGADWPVVFETGAHCRWMKREVESLGMKAIVANPSRLRMVTESNTKNDRNDARELARFALADVELLHPVRLRGERCQQALRLMKARDMLVKVRTMHVNELRGFAKSMGFRLPDCPANRVHVLDKSGWPADFESVAWPLMDVLETVDLKIRAYEVQIRSLAESPELKDKVDRVREVYGIGLLSGVALVASIDADPDRFRKARDAGAYFGLVPKQRQSGEMDVQCHITRAGSGFVRRLMIEAAQIAMRDSARDTDVKLKGHRICARGGRIAKKRALVAVARCLVVTAVALLKKPDAEYVPLSESARREFEAIRSGTTAA

SEQ ID NO: 395580 - protein, 318 aa, unidentified
MPQSTRVVGLDVSKHKVDACIRSRGLRLSTPCTPEGEAELVAWLRQYRVGRAVMEASGGYERPWAEALRRAGIEVRIVDPKRIRHFAKAAGRLAKNDPIDAETIAWFAETFSQAEAQPHDPSRAQIDRLLTARRVLTELEAQIAQQGEHSQPALAAKAYGTVAKAVRSERRKLDAAITAKIKADPAFARRVEIIKSVPGLGDQAAAGVIAWFPELGHVANEVAAALLGVAPYDDDSGERKGARHIKGGRRKLRNLLYMPTMGAATRHNPVLKAYYQRLRAKGKEAKVALIACMHKLIIILNTMLARDQTWNSPATAAA

SEQ ID NO: 395581 - protein, 461 aa, unidentified
MSHRNRKSKRKNNEFEGLQIINPKAAGIDLGSESHYVCLPGNGSVEERVREFKTDTPSLKEMSGWLEEAGVTTVAMESTGVYWVPLYEVLDAAGFEVVLSDTRTISNVPRRKTDVLDCQWIQQLHACGLLSGAFRPADSIVKYRSLVRMHSTLTEKSADWLRRIQKELDQMNIRVHRAVSDITGATGMRMLHAIVDGERDPAKLAELRDPRCQRSREEIERELTGNWRDEHLFNLEQCLEMYEFLLQRIAKLEEKILKLLSENQTTSEPPPPPPSKAKKNMMSKRGEEPLRESLYKMAGVDLTSIDTIGVGTAQTILSEIGPDVTMFPSEKHFISYMRLAPGMSVSGGKAIRGKKAKPQLGSSRARQALTMAALSAGKTNTALGAYYRNVARRRGPGIAVFATARKLAQYIYRLLRFGTEYVDIGVEEYERRNYDRRMKTLKARARQMGYHLVPFEEPANA

SEQ ID NO: 395582 - protein, 322 aa, unidentified
MKTIANNPGIGIDVGKSELVTCIRHSNGAAEPPVAFANSSIGFRKFVVHLTNQKVQSDTPILLESTGPYHWNIARYLADEGYLSKVVNPLHTKQIARYSIRKRKTDKIDAGQLAFLASQNYGYAFVETKEIARKKALVRHYWKLKSVIGNLSKHERYLKQHRGITRATVTPYLIAKCESLKEKIIQDWENGNNLKYLDSIPGITPFLGAAILAELAPLERFQRTEQIIAFAGLDPSVKQTGGKSGTHGKLSKRGSRVLRTTLYLAAFGAFNRSLRPLYDTYRKRGLRHSETLCIIARKILRIAVALLKKRRMFDPKYLEVIP

SEQ ID NO: 395583 - protein, 489 aa, unidentified
MSTTSSTHLLGRRGQQFQDLLARHDPTRVLCWPLDVGKNVQWALGHDLFGHLLTPAFSWPTSQAGWDTMLQHLTQTAQDLSATLLLVACEPTGIYHEPLITRFQSDFSLALQDLHSPALRLFFTRPTQTQRNREQQHLRLRKTDPLDLGAIGDLLRRGLATPVPHWTPDEIRTREELRFLRQAHKEHRRLLARLTNRLDQLWPGLIGNPRPVRQAPPDLSFQPLATQFWQRQFVQILLQFCPNPYQALALGESGLIALFHQHDARCGPKTAQKILSAFDHALLPPPALAEIYAELATQEFHHLHQVQTQLETGYARLEAALPQTLARFPLQIPGVTARLLAPHYGRLAPVERWDDADPIWNQAGCTPITHDSGNHHRHGAMSKQGDPGWRDALFHLGESVWYHGAYFGHTYLDARERGQCHIEAVFHTAHRFNRVALHLMQQGEDFAPPVIDYDQFQADFLKRREQFLAHRKTTGPTRPRPCRARRARR

SEQ ID NO: 395584 - protein, 351 aa, unidentified
MFMIGVDYHPSVQQIAFTDTETGECGERRLSHSDGEAEKFYRELKQRGVSVRVGIEATGYSRWFERLLAEMGFEVWIGNAAEIKTQRVRKQKTDRADALPLLKLLLENRFPQIWVPSPENRDLRQLLWHRHRLVQMRTRIMNQLQAIAMNEGKRWKKRLWSEQGRAELEKFQLAPWASRRRQDLTELLDRLNPTIEELTTAVEQEAKKRPEVLRLMTHPGVGFLTALAFVLIIGTPERFQCGKQIGSYVGLIPAEDSSADRQRLGHISKQGSALLRFLLVEAAQAAVRSDPDWKRRYIHLAMRRQKSIAKVAMGRKLAVRLYWMWRREWDYQQFREFGSYAGKLGTGHGVN

SEQ ID NO: 395585 - protein, 380 aa, unidentified
MKKVTRFVGLDVHAEMIAVAVADSGRTGEVQSMGTISNRPEAVSKLVRKLGGPKGLLVCYEAGPTGYVLYWQLTKLGVECEVVAPTLVPEKAGDRVKTDRRDAIKLARCLRAGELTKVWVPDPAHEALRDLVRAREAAKKDQLRARNRLSKFLLRAGRRPPDGTVAWSDAHRDWLRAVTFEHPARQATMVDYLGELDHVIDRVRRLELAIDDAVAQAPLVLREIIAGLQALRGVAKLTATTVAVEVGSFSRFEHPTKLMGYAGITPSEYSTGKSKRKGAITKAGNPHLRRVLVEAAWAYRHRPAKSLAMRARTRALPAALNEIGWKAQHRLCRRYAALQARGKPYGTVVTAIGRELLAFIWAIATHVERAHEQQPTRRAA

SEQ ID NO: 395586 - protein, 356 aa, unidentified
MTNTKYIGLDVHKESISIAVINSVGKVVMECVIETKASTVSQFIDGLRGDVRVTLEEGTWTAWLYDLLKPRVTEIVVCNPRKAALLKDGSKGDRIDAHKLAELLYMNKINSVYHGEHGLRTMKELARSYLTISKDLTRVMNRVKSLYRSWGIPCADKEVYAPRYRAEWLAKISEAGVRRRAEHYYQQLDVLRLLRQEVRRDLLVEAKKHKAWKLLRQIPGIGPIRAAVLIAVMQTPHRFRTKRQLWSYSGLALETHDSAQYHAVKGELRRSKRPATVRGLNKDHNHDLKDVFKGAAMRASTADGPLHDFYENLLAKGRKPTMARLTLARKIAAITLIVWKKEVRFDANYLKPQQAA

SEQ ID NO: 395587 - protein, 394 aa, unidentified
MKLIGIDIGKNNHFFCIMDKETGEIISQPASFSNDKAGFDFLLNQIRYYQKDSVLIGMEDTGHYHFALLKYLLDLQYTVALINPKTTDFNRKMQGGITKNDKTDTINICDILDTPQRRKQYRISQVSSFDLYEQKQLTRQHHHLKEELNVYTNRLQKSIDIVFPEFNSLFRSKYGSVYMNVLKTFGSAHRIANTDIRTIRKCFEIKGKGNRISLTPEKLKESARSSVGISSIAEELQIKHLVMQIELLNEQIAEIDKKIEEFSIQNNSPILSIPGISHFSGTSILAELGDIRNYSKPSQIIKFAGVAPLHYESGQFTAQHTSIAKKGSKYLRKTLYQIILPVIHHNPVFKAYYDLKISQGKGHRCAQGHCVRKLLRVIYHLLTANQQFNPELLK

SEQ ID NO: 395588 - protein, 430 aa, unidentified
MKSNTQNAKIEAITEKTLVLGIDVGSETHYARAFDYRGIEYSKKPFKFSNTEAGFVTFKEWILDLKERHEKDKVVPGMEPTGHYWFNLGKFLQDNEMKPVLVNPHHVKKSKELDDNNPTKNDRKDPKVIAGLVREGRYMIPYLPDGVYADLRTVSNIRFQLQAELTRIQNRISRWFNIYFPEYKTVYGKPDAKSGMLILKAAPLPEDILTLGIDGVNQIWRDAKLRAVGKARAKTLIEAAGHSVGSKEGAVSARMEIRMLLEDYESRNMRLQEVMVLIEELVKGIPMAEKLLEIKGVGIRTVSGFLAEVGDISRFNNPKELQKLAGLALVENSSGKHKGETTISRRGRKRLRYLLFEVAMSLVAKNPEFRELHNYYTTRRLNPLKKMQSLMAIAAKLIRVFYVMLTKGVNYDPKKMVNDIKRPAVYLQTA

SEQ ID NO: 395589 - protein, 397 aa, unidentified
MEGSYDTWCGVDVGKNSHYAVILDGGGEVGRRAVEQDERAIRELLAQVGKRSALVVVDQPGPMSSLLLSVCRQCGVDAGFIPPKVMARAIELYDEDLKTDEHDAFVIADVARAMPALVRPVDRIEGDRAVVRAALARYSALSASCQATACRMHELLLEVCPAMEREFSGDAIKTRFALFVLSNYGGPCALKRSGSARVRKRVLAQKGMGEAAAERAAELVRSIAASQTVRAAGADSLEALIRSDAVTYASMLEEREVAREALADALENVPEACLLMTMPGVGPVTAGTFVAEVGDASGFRSSAALSSYSGLCPRVKKSGTTHNSTGRKRKYNRKMKRAMIQSAFMAVQCHPASREYYQAAMAKTGCHNRAIAALAHRRLCVMFAMLRDGKPFQEVTR

SEQ ID NO: 395590 - protein, 443 aa, unidentified
MKRNRRRHLRGRRGQAFADLVRGVCPEQILCVSIDVSKDFHVVLLHNGLGEVITPSFEIDIFRTGFDQFCQAVEAAIADSAAQVVLVGMEPTGHYYENLARHIQETDHKVTIVNSFAVKENRRQQMMVHEKDDEIDVAAIGDLLRRGEGSPFRPPTGIYLQLQQLDRARLGELKIQTIYKNRVIGHLDRIFPGLILTKAATNGRYEPMFATDFWQCQTLQNLVRVCPDPRQLAALSPANLVALFHQHGCRMGPPTAARIIAYAQKVLWPDPAVVVIRRQLLATDLQTLDQVSVRIAHYSQQLQQELAQTPYQFLTQFKGLPPLRVASLAAAAGDPANYHYAGQLFRRSGLVSGRDDSGARQRQGKGKAVTKTGDIYLRRALNDLLNGLILHQPILRVYYHRLKQTKPVGVARVATIRRAVGILWATLRDQRADSLILRGDNMT

SEQ ID NO: 395591 - protein, 385 aa, unidentified
MLIHQTSADVMFAAYVGIDWADEKHAVCMLEGTGQIEQALDHSPEAIAAWADALRRRFDGRMVAVALEQSRGALIYALMQYEHLMLFPVNPTQLARYREALSVSGKKDDPGDAHLLARFLRDHRDCLRAWKPDNVQTRELARLCELRRDIVDARKKTIQQLIASLKQYYPQALQLAGELHKPLALELLRRWPTLKQLQRAHPGSLRKFFRQYGHRDDEKINALVQSIRGFQPLTKDDAVIRPSALYVGLLIKQIEQFNQAVSSFEEQIAKRFAEHPDAEVFRSLPGSGPALAPRLLTAFGTDRERLQMAAELQSYVGIAPVTVRSGKFCRVQRRYACPKFLRQTFHEFADQARRWSKWSKAYYQLLRDRGKNRAIECRLSGSIVA

SEQ ID NO: 395592 - protein, 407 aa, unidentified
MFFGGVDIAKNKHEICITDFEGGKVLNINIQNRKKGVHKLLDNFERLGITPENCKLCMEATGHYWISLYHHLTELGFEIHVINPVQSKALRDYNIRITKTDQKDALVLADLARFGRLSHSELASETIMKLQTLSRYRFDLVQSVGSLKNKILAILDRIFPEYPDCFSSVFIKSSRKLLKEYSSPEDLADVDLSELTNFLKEHSRGRFGDKKAEQVKALAEGTFGVNMAADAYSLELKLLLERIEFIEDQIDTVEEAINKIMEEMRTCENSSYRHVIETIPGIGPTLAAAIIAEIGDINRFRNAKALVAYTGLDVTVYSSGKFESSRKRISKRGPPVLRHSLWMAAVSARYYEPELKEYYEKKKKEGKHDKVATVAVARKLAHIIFSLWKNDRPYQSDYKWSPPGIKT

SEQ ID NO: 395593 - protein, 310 aa, unidentified
MEENVFVGVDVSKDSLDVAIGAQKDIITFTNDQKGVDALVKKLRRIDAQLIVFESTGGYELLAASCLAEAGLAVVIVNPRQVRNFAKATGILAKTDAIDARVIARFAEAVKPEVRPLKDRATSELTALVTRRRQIVEMIVAESNRLKLANKRNKKDIKDHIRWLQRRLDKIEIDIGKMIQSSPIWRCKDDILQSVPGIGPITSASLICDLPELGILSPKKIAMLAGLAPLNCDSGKFKGRRRIWGGRAAVRSGLYMATMAAIRCNPAIKGFYQRLIAAGKCHKVAATACMRKLLIIVNAMLRDQTLWQQN

SEQ ID NO: 395594 - protein, 420 aa, unidentified
MVYLERGYNLKELPWSKTVSNSFLFKEACMILVGVDVAKDKHDCYIMTSEGEVLFKSFTIANNMEGFNQLYEKILSVIDNFDNVKIGLEATGHYSYNILGYLLDKGLTPYVINPLHSNLYRKSLSLRKTKTDKVDSRIIASMLMSDVSLKPYSNTLYHNEELKSLTRYRFTKVQERAKLKISISRLVTILFPELEKLVPTLQMNSIYALLYEFPSAHAISKAHLTRLTNLLNTTSKGHYTKDKAVLIREAAKNSIGSNMPAKSLELKHTIKLIKELTSEINEIEEEIKIIMNKINSPILTIPGICLSTGAQILAEIGDFKNFSSPDKLLAFAGLSPSTYQSGNMYSSNAKMEKRGSKYLRFALFNAAIYVSYWEPTFSQYLKKKRVEGKHYYVAISHVVKKLVRLIFHLEKTNERYSTVV

SEQ ID NO: 395595 - protein, 421 aa, unidentified
MGKIIERCAGIDVGKRFLLCCVLTGAANEEPHGETLRFDTTVPALERLRAWLQEEQVTHVAMESTGTYWIPIFNILEEQFAIILANPEEVKNRKGHKTDRNDAKHIADLLRHNHIRSSYIPPKPVRQLRDLTRRRVQLTQDATRERNRVQKLLEQSNVKIGNVLTDVFGVSGQEMILALLDGQSTPEQIGALARGQAQHKLPKLIEALQGHRMSDHCRLVIRSSLRHLGCLQEEVELLDEEILSRMRMPPFEQPFALLQTVPGIGRLSAAAILAEIGTDLEPFPSAEQLVSWAGLCPGNRESAGIQKGRQTTHGNPYLRTILVQCAWAATRKQGSVFAARFRQLAPRRGEKRAIVAVAHLMLTILYCMVKRRLEFQGAGCVHQQRRRERRAHHHMRALRRLGLDIRVMPEAAIVAAGQEVP

SEQ ID NO: 395596 - protein, 340 aa, unidentified
MQSYQKNYLGIDVSKPYFDVSLLIVIEYQKQELKTTRFSNDSEGLKLFQKWLKENKVSLDNHTLCVMENTGVYHRLLWQFCSTNNITIHIGNATHMKWSFGIARGKNDVIDSKRICQYAFKHADELRATPALNPVFLKLKDFITSRTKLLEQKNSIKKYLNELKLSNDKATQKILEHSFKASLEGVEKSILLIEKEIDKIIVTDEKIEQNYNLIITVPGVGKFTALYILCCTNNFATKISGKQLASYAGVVPFEHSSGISVKGGNHVHKMANKELKKLLHMCSITSIKYYPEFRAYFDRKKAEGKNGMSVLNAIKNKIVLRVVAVVKKQKPYVDNYSKAA

SEQ ID NO: 395597 - protein, 462 aa, unidentified
MRRRDESETWETRREHLEGLPIIRRNVAGIDLGSERHWVCAATPNAQGREITSFGATTPELIRMAGWLKERHVESVAMESTGINWIAPHEVLEAQGLQVLLVDTRQLARVPGRDKKTDPTDCEWIQRLHSCGLLRGSFRPEEAVCMLRTLVRDKANLVAESGDWVRRMQKNLDQMNVRVHRAVSDIDGVTGMAILRAIVGGERDAQKLAKLRDRGCSKTEQEIAEQLSGHWREDHLFSLQQALKMYDAVQERIAAYEKEILRKLGDLERDEHHEQTAPPLPNPNKAKTIKYRGQEAKRQALYRMSGVDATHIDAIGVETVEVVLSEYGPDLSRFPTEKQFVSHVTLAPRVPKSGGKPVKKKKRNSASTRVAAALRMAALSLRHSQTALGAYYRKMAQRRSGDIAVFATARKLAILIYRLLRWGQTYVDEGAEAYEDRYRQRRIGHLTATAKQLGYQLIPVSA

SEQ ID NO: 395598 - protein, 358 aa, unidentified
MQTQSKEINFQGQNIYIGIDTHKKSWNVSIMTEVLTHKTFTQDPKPEILYAYLQKKFPGATYYSAYEAGFCGFWIHHRLTSLGVKSIVVNPADIPTTNKEILQKEDARDSRKIARGLINGTLTPIHILPMKTMEDRSLVRTRSSLVRDMTRTKNRIKSFLSFYGIEFPDQFSKSHTHWSKRFNLWLETIEGVENSGKDSLNALLDESKNLRASILDITKKIKALSKSDTYKENEALLRTVPGIGLLTAMTILVELDDIKRFRNNDKLASYVGLIPSTFSSGEKEKIGDITPRCNRTLRNALIESAWIASRIDPALMRSYMEYCKTMEPNNAIIRIARKLLSRIRFVLINKKAYELSKV

SEQ ID NO: 395599 - protein, 338 aa, unidentified
MTIETLGIDIAKNVFQLHGANRNGKPVLKRRVMRDQLIEVLTHIEPCTVVLEACTGAFYWARRFEFIGHQVKIISPQYVKPFVRRQKNDGNDAEAICTAARQPHIPLVPKKSIEQQDIQALHRARQRMVNHRTAVVSQIRGLLLDRGFAMAKSITRARRLIPDVLADLDNELTPMARETIAELYDLFRDLDRRISDFDKKIDRVFRQSETCQRIAKIKGVGPKTATAIVAAIGDGAEFKNGRHLAAWVGLVPKQHSSGNKTVLMGISKRGNQHLRSLLVHGARAVVRTAYNKSDPHNQWVNQLRERRGYNRATVAVTNKNARIIWAVLRTGEPYRIAF

SEQ ID NO: 395600 - protein, 457 aa, unidentified
MEQTLAQRNRTFSLEPGKTRQALTITHPNAAGIDIGGASHFVAVPPDRDDEPVREFASFTADLHRLADWLAACGVDTVAMESTGVYWIPLFELLESRGFTVLLVNARHVKNVSGRKSDVLDCQWLQQLMTYGLLRGAFRPADEVCVLRALYRQRGTLLRSQARHVQHMQKALAQMNIQLANVLADVVGETGQKILRAIVAGERDGYVLAALRNVRVRASAEEIAKSLQGHWRAEHLFALKQALDAFDFVGTQLAECDHEIERQLQRLQLHDADPAKGKQRGRARNAPKFDLRARLFRMCGVDLTRIDGVDVTTALAVVSEIGTDLSRFPSVKHFTSWLGLCPGTKITGGKLISGKTQRVVNRAAQALRLAAAALRSSKSALGAYFRRLCARMDKPKAVTAAAHKLARLIYTMLTQGQEYTDQGQDYYEQRYRERVLRALSQRAAKLGMKMVPAEQPA

SEQ ID NO: 395601 - protein, 291 aa, unidentified
MTSSKYIGMDVHKESISIAVMNSAGRIVMESVIETKASMILQFLDGLRGDLQVTFEEGTSAAWLYDLLKPHVTKLVVCDPRKNKSMREGNQNDKIDARRLAELLRLDHLTPVYHGEHGLRTLKELVRSYLTITKDLTRVKSRVKAIYRSWAIPGTGKQVYARCHREEWLGKISEPGVRRRAEFYYQQLDALRGLRQEVRRDLLAESKKHKAWKRLCEIPAIGSIRAAVLLGILQTPHRFRTKRPLWNYGGLAIEMHSSADHRSVRTTPTIQEERLGSRPQPKLQSRSEEPV

SEQ ID NO: 395602 - protein, 435 aa, unidentified
MDRRTVEVDLWGYAMGSDQAFTAFVGIDWADAKHDICMQAAGSSRREFSCIAHEPAQIESWACSLHERFGGPVAVALELTKGPIVYALQKYDFIVLFPINPATLARYRQAFKPSGAKDDPSDAEVALDLLVCHRDKFTALQPQSAPMRTLIHLVEQRRQLVNDKLRFTNRIGNALKQYYPQALAWFEQRDTTLFCDFIERWPTLAQVKRAHRAGLERFFQNHNVRFANVIEERIRAIKAATALTTDEVVISAYRLQVEVLIEQLRTTLRAIDRFDRQIAKLAPTLPDYDLFSALPGSGPHLAPRLLAAFGEQRERFRSADELQRYSGIAPVTERSGKKNWVHWRWQCPTFLRQTFVEWAAQTINKSFWAGAFYRQHRDQGSTHQAAVRALAYKWIRILYRCWQTRSAYNEVTYLNALQRRGSPLFKHIAAASKTC

SEQ ID NO: 395603 - protein, 430 aa, unidentified
MKSNTQNAKIEAITEKTLVLGIDVGSETHYARAFDYRGIEYSKKPFKFSNTEVGFVTFKEWILDLKERHEKDKVIPGMEPTGHYWFNLGKFLQDNEMKPVLVNPHHVKKSKELDDNNPTKNDRKDPKVIAGLVREGRYMIPYLPDGVYADLRTASNIRFQLQAELTRIQNRISRWFNIYFPEYKTVYGKPDAKSGMLILKAAPLPEDILTLGIDGVNQIWRDAKLRAVGKARAKTLIEAAEHSVGSKEGAVSARMEIRMLLEDYESRNTRLQEVMVLIEELVRKIPMAEKLLEIKGVGIRTVSGFLAEVGDISRFNNPKELQKLAGLALVENSSGKHKGETTISRRGRKRLRYLLFEVAMSLVSKNQEFRELHNYYTTRRLNPLKKMQSLMAIAAKLIRVFYAMLTKGVDYDPKKMVSDIKRPAVYLQAA

SEQ ID NO: 395604 - protein, 412 aa, unidentified
MEGETVIAGVDTHKDVHVLCLLDGLGRKIWSGSFGADPEGYDRLAEAIGDPGSCMVVGVEGTASYGAGLTRRLVELGYNVVEVFRPKRDKVRPGEGKSDPLDAERAARKAASGRGCSVPKSQDGWVEAVRQLYVARRLAVATSTSCVACAKSMLTTAPSALRERFRGRERPKDLMPLLARGRKAGDALEESVLASLRSVAAVWKEARSQVESLDERIRALLEANAPALLGVEGCGTTTAAALVVAAGDNPGRLKGEAAFSMMCGASPIPASSGKTDRHRLNRGGNRQANWALYEIAIKRMAYDERTRRYVARRTSEGKSRREAVRCLKRYIAREVYHVLMDPNPDGAAPEGPELAKMRKTMRVTQKKAAAELGLSAATLGHLERGKRRSTKLERRYYELLCELERTLPQTAS

SEQ ID NO: 395605 - protein, 363 aa, unidentified
METTEKTTKNYVGIDVHKKMLEVARLRDSAGKIERQTFTTGGEGITHLLEWLTPEDVIALETGNQSFRLAKTLILKGFDAIVLNAGDLAVIYKSLKKTDREDALKLARLISRIPREELPLVEIPSDEMEDARRLSTEQATWTKQRTALINRLHSIFTQAGRTEITKKDLSSINNREKVVCLLSTRYISEAKRLCQMINHFETMLAAVHFEINQLLDKELSFTTLAMSMPGVGPVTALVLFSYLGDCRRFSNGKQVAYYAGFVPRVDSSGDTVRYGGITKHGAQGIRRVMVQSAWSLVHSKNGNELTLFYERLKATKGKGKAIVAVARKMLCVFYAMMTSGELYRGVELEDIFKKIKNYGIHNF

SEQ ID NO: 395606 - protein, 319 aa, unidentified
MIRNLGQFECFVGVDVSQERLDVCLLPAGERAAFSRDRRGVGRLVAWLASQARLLVVVEATGGLERLLTVALEQAGIAVAVVNPRQVRDFARAAGLLAKTDRLDAYALALYGERLCPAPRPPRAAADHALAALVLRRRQLAQLAEAERNRARRAAEPAVLASIEALLGWLKTALADLEDQIDARLARNPVWQERAALLASVPGVGRVTVSTLLALLPELGELDRRAVAALVGVAPFARDSGLLKGRRTIWGGRAPVRAVLYMAALVAVRHNPALRAFYDRLVAAGKAKKLALTAAMRKLLVILNAMLRDRQPWRAPQPA

SEQ ID NO: 395607 - protein, 429 aa, unidentified
MNSCEQTAQDWLAHRAFGGLDWASEKHNVIVVDPRGKVVEDFEIAHSALGWKKFRERMAPYGAIPFAIETSQGAAVEQLLEAGMKVYPINSKSAKSYRERKAPSGVKDDWLDAWSFADACRIDGQDWRALRPEDPLVKELRLLCRDEVELIQQRTSFICQLRHALGEYYLTALEAFEDWGLVSAWMFVQRFPTPQILQAAGKRQWEKFLHARRLWRTESGPRRLELFAHATELCGTVPMANAKSQLALSLISMLFALEKQLGIYRRRIEELFSRHPDHDLFGSLPGAGPKLAPRLLSEIGDDRGRFEDGPQALQCLAGSAPVTRRTGKCKVRANPDHWPCHQRWACDKHLRHAMHLFSEHSLGQCVWAQIYYQHHRQKGSSHADALRRLAQRWLKIIYRMWMDRKPYDAMLHHQNQLKHGSWVFELKTA

SEQ ID NO: 395608 - protein, 333 aa, unidentified
MENIALIGIDLGKNSFHIHCQDHRGKAVYRKKFTRPKLIEFLATCPATTIAMEACGGSHFMARKLEELGHFPKLISPQFVRPFVKSNKNDFVDAEAICEAASRPSMRFVQPRTESQQAMRALHRVRESTVQDKVKTTNQMHAFLLEFGISVPRGAAVISRLSTLLEDSSLPLYLSQLLLKLQQHYHYLVEQIKDLESQLKRKLDEDEVGQRLLSIPCVGTLTASTISTEIGDGKQYASSRDFAAATGLVPRQYSTGGRTTLLGISKRGNKRSELCWFSVRGIHTKLEHQSGKLADWVRELLCRKSNFVVTCALANKLARIARALTARQQTYEA

SEQ ID NO: 395609 - protein, 341 aa, unidentified
MGEVSTIGLDLAKSVFQAHGADASGAVLFRKKLRRDQVMAFFASQPRCLVAMEACGGGHYWAREIAELGHQTRLIPPSYVKPFVKRQKNDANDAEAICEAVQRPTMRFVIPKTAQAQAAATVFRARDLLVRQRTQIINALRGHLAEFGMVVPKGAQNLPKLVGLIQDGGSGIPTEARSIFEVLAQTLELLQSKICLLDVEITRRARSDGLAKRLMTVPGVGSIVATALVALAPAPETFKRGRDFAAWVGLTPLQNSSGGKERLGRTSKMGERTLRRLLIIGASSAVKAAAIKGTAADPWLMRMLSRKPRMLVIVAFANKIARIVWALMAHGGSYRAPATAA

SEQ ID NO: 395610 - protein, 344 aa, unidentified
MSEITRIGVDTSKAVFTLHGVDAKDRPVRRMTLRRGQMIPSLRKLPPTVVAMEACGSSHYWAREIAVLGHTVRLVPPQYVKPYVKRGKNDRNDAEAICEAAGRPGMHFVPTKTVQQQADGMVLKVRDTMVCQRTALINTVRGHAAEFGLVVAKGAAKVEELLSAIEQNTDIPPVAREMFELLRQQITDINARLAALDARLHAAHKANPVSQRLATIPGVGPITALTLAIEVDPAQFESGRHLAAWAGLTPLEHSTGGKQRIGKISRAGNERLRALLVAGATSLIQAASKPGSRQMTEWLRALLARRPRKLVAVALANKMARVAWALMTSGETYRRDATTVVARA

SEQ ID NO: 395611 - protein, 335 aa, unidentified
MEHYIGIDVSKATLDLALINASGQLLAMVQTENSTKGLVRSWRRWSKEFDLVKDKCLICLEPTAHYSDQPLIALVELEIPTWLANASDMVRSLGMRRGKNDQLDAQRIADYARRFHDKARRFTRDHLRLRTLKKLLSRRRLLVDRRKAHQVLLKDYNPLMPAELRRTMDRLDKAMLRAYDKAIVEVEAMILVEIQRDPELQRQYELVLSVESVGPILAAHLLALTDGFARFGSARQLACHAGVAPYEFRSGSSIRGKTRVSSFAHRQLKTLLHMSAVSSISRPGELRAFYDRKVAEGKGAMSVLNAIRNKIIHRVYAVLARGTPYTKKTLANAIE

SEQ ID NO: 395612 - protein, 480 aa, unidentified
MSQQKKHSKPLGEEKTAAGTGKRGRKRKGMCLEDRPILEANAAGIDIGAREVFVAVPPDRDEHPVRVFSTFTEDLEKLAQWLVSCGITTVAMESTGVYWIPLYDVVEKYGVKACLVDARGMKNVPGRRTDWHECQWLQFLHSVGLLRAAFRPEGDVCAVRSMMRYRTELVEMTSQHIQHMHKALTQMNVQIHHVISDLTGLTGLAIVDAIIAGQRDPVVLAKLRDPRIKASEETIRKSLVGNWRAEHLFTLEQSRKSYQHYQGQISACDEAIEKLLVAFVPRVDPTERPLPPDRKRKQRGRKKKNANPNTFDLRTESYKLFGVDLTQIPGLMAMVLMLFSEVGRDMSRWKTAGHFVSWLALCPDNDISGGRVLWRGMRRVHNRAGDLFRMAAYSLHHDATPLGDYLRRMKSKLGPAGATTATAHKIAIIFYTMVKKQVEYDATLWADRDAEREKRFEAKLKRQAQQLGYKLVPIEERPTA

SEQ ID NO: 395613 - protein, 373 aa, unidentified
MESIAYVGLDVHQEDVKVAVFEQTGETPVVETLVSNTEDRVRTVVRKLSKRWELRCCYEAGGCGYVLQRWLASMGIACVVIAPSLVPKKPGERVKTDRRDARKLALLLRAGMLTEVHVPSPEQERGRGLVRLREVMRREVLRSRHYVLKFLQYRGLAYRDGKNWTQRHWDYLRRVQLDGLDAVTYRELLTLLEFKLDGLKRVEAQVAQLSTEEPYREVVSRLRCYRGIETLTAMVVVSELWDIRRFPTAESLMSYLGLVPSEDSSGGRQHRGSITKTGNAYCRRVLVEAAWHYRWAPRTGIRLKQRQRGQAPETIKRSWKAQYRLHAKYWRVSRHSEKRKAAVAVARELAGFIWAEMHAAARESVPAVTSDAA

SEQ ID NO: 395614 - protein, 328 aa, unidentified
MKEGMTNEQPTIYVGIGVSKDKAAVAMASGGVHDKFLGFGTFENAPASVNRLLKKLSGGGSPVSVCYEAGPTGYGLYRHVRAFGFECCVVAPWLIPVRAGERVKTDRLDAIQLARLLRAGELTPIWVPDETHESMRDLVRALESAAGDQRHKRQLISAFMLRHGRVYHRTKPWTMRYRRWLQSQNFSHPAHQIALQKMLQAERNATERVARLTGHIEALVPEWNLAPAVNALQALRGVALINAVTFMAEIGDVRRFESPVKLMAYLGLVPCEYSTGKTTKRGGITRAGNSRVRHKLIEGAWTYRLQARPGARKLYMLQEQPAEVQDIA

SEQ ID NO: 395615 - protein, 351 aa, unidentified
MEEYISFDSHKHYTLLEREGVESRKARQVRVEHAPGAIRRALACCQPGTAVALEATANWYWIVEEIEQARLVPKLVHPRKAKLMMGLINKTDRLDVHGMNRLQRNGTLPTVWIPPGPLRELRELTRTRVVLVAQRTRWKNRLTATLAKYAASGSEHSDAFGERARGELGARMQRLPEQARWASEQMLRQIDGLREQIGQFEERLKALVQITPAMQRLMSLPGVGVILAATIALEVGDIERFPSAEHLAAYAGTTPRVHASGGRTRYGRTRPDVNRYLKWAFAEAGNSVAVNHLRCPERHVSQLYQRLRERKGHSKAVGAVARHLAEATFYVLSRNEDYQAPTGQAGRTREV

SEQ ID NO: 395616 - protein, 375 aa, unidentified
MKEKVRFLGLDVHAETITVAVAEPGDEVRSLGTIANRADSIRKLVKQLGPVEQLKACYEAGPTGYVLYWQLAELGVKCDVIAPTLIPVKAGDRVKTDRRDAEKLARCHRAGDLTAVWVPDAGSEALRDLVRAREAAKQDQLRARHRLSKFLLRSGQRPAAGLKAWTQLYMAWVRQLRFEQAAQESTRLDYLHEVEHMAERVVRLEQAIAEAVKLASPEIQEVVKDLQALRGIAQISAVTIAAELGNISRFESARQLMGYSGAVPREDSSGKRTQRGSITKTGNAHLRRIVVEAAWSYRLRPGVGPGLRKRQEGVPEELKEMAWKAQNRLHKRYSRLAAAGKDQRKIITAVGRELLGFIWAIGIKAETAAKQRMAA

SEQ ID NO: 395617 - protein, 449 aa, unidentified
MKKSSSERHGLPVIHEGAAGIDIGSRFHVVAVPADITEEPVQTFKAFTADVERMANWLVDLGITTVAMESTGVYWIPVYEILESHGLHVVLANARDARAVPGRKTDVNDAQWIQRLHACGLLRASFHPDREIAALRSYLRLRERHLDYAAAHIQHMQKALTHMNLQLHHVVADITGATGMRIIRSIVAGERNAATLAAMRDTRCKSSVETIHSALVGNYQPEHVFALAQALAMYDAYQAPLEICDQQIAQSLQRLSQQKSPPSEPLPKPRHRTRQPNALNFDVRTMLYQLIGVDLTQIHGIGPYLALRLVADCGTDLSRWRTAHHFTSWLTLAPGCRISGGKVLSAHTRKTKNRVTAHLRLAAVTIGKTNTALGAFYRRLSARIGKAKAVTATARKIAILFYNAMRFGMAYQDPGADHYEQKYRERVVKGLHRRAAEFGFTLQTVEGVS

SEQ ID NO: 395618 - protein, 252 aa, unidentified
MGQVCQIGLDIAKEYFQVHGVDKNGKDVFNKKLKRKNVSSFFANLPPCLVGLEACGGAHYWARKIAKLDAGHTVKLISPRHVKPFVLNNKTDAADARAICEVVGRPSTRFVAAKTVEQQDLAAWHKIREKKSRSAQHWRIRRGRSCWNNDEACKRLRRYRDLARFLPVAHAGDATEYKNGRGFAVSLGLTPKEHSSEGKQKLPGISKRGSNTIRKLLIQGARIITRYALANKTARIIWNLLAKREEYRPVMA

SEQ ID NO: 395619 - protein, 412 aa, unidentified
MTAKDQFAAHVGLDWADKKHDVCVQFKNGDRMFHVIEHTPEALDIWLNELHQRAKGRIAIAVELKKGPVVYALQKYPFVTVFPVHALSLARYRQAFWPSGAKDDPQDAELALDLMLRYPHKIKAIEADNPDIRLLQQLVEQRRLLVEDKRRFVNQLINTLKQYYPQPLEWFSHRDSSLFCELIIRWPSLQQLKRARSDTVRHFMNAKGGPAVAYTEQRVASIASAIPLTTDKTVIEANALMATALASQIKLTGDLIRTYDERIESLFDTLPDAELFKSLPGMVPCMGPRMLAALDDNRNRFNSAEEIQNYAGIAPVTERSGQKSWVHWRWQCAKFVRQTFVEWTAKTVNSSYWARLYYQGQREKGKSHQSALRALALKWIRIIYRCWKTRTRYDEAKYLLALEARKSPLLKP

SEQ ID NO: 395620 - protein, 414 aa, unidentified
MEIVHTHCVGLDVHKKTVVASIIVPDEQGGLRKETRTFGTMTGELLALSDWLLGYDISHVAMESTGEYWKPVFNILEHNFEVLLVNAQHIKAVPGRKTDVKDSEWIAELLRYGLLKASFVPPLGQRELRELTRYRSTFVRTRATLVNRVHKVLESANIKLTSVASDVMGVSARAMLEAIIQGQSTPEAMAELARGRMREKRDLLAKALEGRVQAHHRFVLIELLGQIDSLDETIQRFNEQIEDYCRPFEEAVVLLDTIPGVGRETAEIIVSEIGIEMSRFPTAEHLASWAGVAPGNHESAGKRFSGQTTKGNKALSAALNQAAHAAAGTKHTYLSAQYRRLAARRGKKKAIVALEHTILVIAYHLIQRKEPYRELGADYFDKRRPEVTAKRLIKRLEQLGYSVSLHQPAVLMPA

SEQ ID NO: 395621 - protein, 345 aa, unidentified
MEHYVGLDVSLKLTAICIVDQTGKIVREGMVPSDPEAIAGFIRSHAPHVARVGLETGATATWLWSELKELGLPAICIDARHAKAALKMQINKNDRNDAAGIARIMQCGWYKQVHVKDRGSHAIKALLSSRALLVKLKRDLENQIRGLLKNLGRVIGRAKMNVFARRAAELLEDRPELAAATLPLLRAREAVEQEIADLDRKVLRLARRSAQVQRFMTVPGVGAITALCFLATIDDPNRFKRSRSVGAYAGLTARGYASGETDWTGRISKCGDVMLRSYLYEAANVLLTRVAKWSALKAWGLRLAKRSGLRKAKVAVARKLAVILHRMWRDGTDFHWSSQEAQQAA

SEQ ID NO: 395622 - protein, 355 aa, unidentified
MNSIKYVGLDVHRDTISVAVLNAEGKLVMQSVIATHATTVLDFLHGLRGTLYITFEEGTHSAWLYDLLVRRVAKLVVCNPRKNALLKAGSKSDSIDARKLAELLRAGLLSPVYHGQNSTAAVKHLGRSYAALTEDTTRIMGRLKALYRSQAIACAGQKPYGTRHRDEWLAQLTDSGLQRRARRLYQELDLLQQLRREARRDLILECRKHSEAKLLRTVPWLGPIRVALLIGRVQTPHRFRTKRQFWAYCGLALETRSSADYQMVDGQLERRKKPVFIRGLNRNHNHDLKNLFKSAATTASGSDGPFRPFYENLLKKGMRSEMARLTLARKIAAITLHVWKKGEAFDAEYLKLQAA

SEQ ID NO: 395623 - protein, 427 aa, unidentified
MEEVTDEPLYRDRVCGIDIGKAGMAATIRVPSDANPARRAQETRSFGTTKREVLALADWLRCWQVPAVVMEATGDYWKPVFYRLEAEGFECVLADAKQVKHLPGRPERDPSDSRWLAACFERGAITSCFVATPEFRIIREHTRYRRDLTAERTREKQRAEKLLESAAIKLSSVVTDLHGVTGRDIMDHLIAGERNPKVLAQLARARARRKISELEAALEGAEFFTPQLAALLARMLARIDQLNASIGELTAVVETLLEPYEEQLQQAESMPGWGRRSAQDAVAETGVDMTRFRTGGHLASWAGRTPLDNQSGSRSGRAKSKKGNRYLAAITGETAVAAGKTQTREGARYRRIARRRGKPKAGVALGNTQLKVYHALLSSPGTRYQDLGVDYYDNRASTRRQVRALHKRASELGYTLVPDLTGCPEIA

SEQ ID NO: 395624 - protein, 319 aa, unidentified
MSKRSIVPSDTVVAGVDVSKARLDVVLWPLSESFSVDNDAAGWRVLRRRLQAAGAQRLGLEASGGYERGVMEAVVDDGFDVVLLQPLQVRAFARFRGQRAKTDRIDAALIAECTAQAKSLTCMRPLACKKAADLLTLYEQTAADLARLRNRVERFRDGELAALLTEPIAYLKAFRQTLLDRLRRLVRTHDQLAHRVALLQSIPGIGFLNAISLAARVPELGELTRQQAAALLGLAPFNHDSGTWQGDRHIAGGRARPRRLLYMAAVAAARCDPDIGAFYRRLVGKGKPHNVAIVAVMRKLAAAANTVLKRNAPWIPVAP

SEQ ID NO: 395625 - protein, 328 aa, unidentified
MNKNTIYLGIDISKAVFDVFVSSGELYQFENNKEGFKKFFKLLCKDCHCVMEATGYYHQQLAYYLYERGIAVSVENPLSVKRFGQMQLSKVKTDKADAKLICMYAQNVDLKLWKGESKNLRECFQIIRLIDSYFKQSTALKNKIHGEKTLGNPSSYVVRSLRRNLKSLQKEIKKLEDKLTELVKQDHQELLTKIETIPGIGRRTASMLIVLTGGFTRFDRASQLCSYAGITPIIRESGSSIRGKARISKMGNQKLRNLLFLCSFTACQHNKACKEIYERIVAKGKPKKLALMAVCNKLLKQAFAIAESGLVYDENYRSKNVGLELKKS

SEQ ID NO: 395626 - protein, 383 aa, unidentified
MKSVCGLDVHKDSVYLCILSEFGELIEKVFGVLTYQLEEMRDLMLHHHVVEVSMESTSVYWIPIWRVLSPHFKLNLANPYFIKQLPGRKSDVKDAQWIAECTMKELIRGSFVPPETIQQLRQYDRRIFDLNEEIVRKLSKLDAVLQRCNIRLSNYVSNVDSKSYKAVVRAISQGITDPEELVKLIHGRIIKHHGMDVITASLKGVVSLAEIDMISQLRDELDMAEAHKEKCQARMLEICEREFPEELKRLQTIPGIKERAATSLIAEIGTDMNKFETANHLASWSGLKPRNDESNKKIKSRSITHGNVYLRKTIIECAWAASRTKDCFFSRFSYHQTQVRKKNKMKVLVAVARKMLIAVWHVLHDNTNYIDFTTDRKTSRTKG

SEQ ID NO: 395627 - protein, 330 aa, unidentified
MKTYNLILGVDVSKLTLDISWAERNLHLKIENCNKGFMEMKRWCKINGINLEDTLVVMEYTGGYEYRFIQFCESQKIAYCRISGLEIKRSMGMTRGKNDKVDSFRIGRYGEERIKRLGQSKPLNKNILLLKQLLSFRKRLVRENAGLASTISERVHMFGSAKKDIIIQLAESKIRSNEKHIFKIEEAIQDMIKLDCAIFQSYRILTSIKGIGPVNAWMTIAYTENFTSFTDPRKYAVYVGVVPFDNSSGTSINGKKKVSSLANKEIKQELNQAAKTAICHDLEIREYAQRKLENKHYKIVLNNVKFKIILRMFALIKRNELNIEAYRKVA

SEQ ID NO: 395628 - protein, 389 aa, unidentified
MRFAGVDIASLTHVIAIMTETGKVLVKPTSFGEDAAGYEKAFALLGPNTDVFVVMEATGHYGRNFMAALWARGYQLALINPIRTRLFAHEDLRRAKNDPIDALGLARFGIQKGPLLPTPPFDEATDQLREFVYLLERLTQDFGDRVRQLHRLIDLGFPEFTRQVPNPSAQRATAILAAYPSAQAFSDSCLRELATLRYDGSHYIGKPLASVLVETAKASVGRHHGPAYHLETRYICQDIDRLRFELRQIQQEIERRLAENPVAVLLATIDGLGAIAIARIIAAVGDPARFRSGAALASYVGAVPGTDRSGKGHRRSDPLCPLGNARLRRTLFMTTLGAVRRNPWLGAYYARLRARGKPPKLALLAAMRKLLMAIYSVAKHRKPFVPQLP

SEQ ID NO: 395629 - protein, 411 aa, unidentified
MEAAVITAVGIDVSKSKSTVAVRRPGGEIALRPFEDHHTNSDLKKLASTLKKLGGDIRIVMEHTSTYWRPIALTLKEAGFFVSVVNAMLIHDFSDNTIRKLKTDRADALKIANYALTFWDTLPPFNNEEETRLLLKMQSRANERITATATALRNGLIALADQTFPGVNIAFDPNTKNANGHEKWVDFFLRYWHKDCVCQYSMEAFTESYRGWCKRKNYKFRTDTAHKIYLLAQEGVATLPKFESTKMLITQACKSLNAVCEAKQSTQLEMQRLAAMLPEYEVVMQMEGAGPITGPALMAEIGDVRRFKNKKALVAFAGIDAPPFQSGAFESKSRHVSKRGSPHLRRTIFIVSNIILTRSNPENAVYCFMDKKRSEGKHYYVYTVAGSAKFLRVYYARVTEFLRSQPSSDAC

SEQ ID NO: 395630 - protein, 341 aa, unidentified
MHFIGLDIHKKTISYCVKDVSGTVLSEGTVAATRAQLDDWVKTLPAPWTVAMEATMFTGWIYDHLLPHAAAVKVAHPLMLRAIAAAKKKNDRIDASKICDCLRCDFLPECHMVSAEVRERRRTLRYRKLLVRQNVQLRNKVSQMLMESGVVYNKQKLHKVGYFKELMETNPDISRELKPLLAICRETIVRIGKTESALIRSLRRDPLLHARVERLMTIPAVGPITALTWVLEVDDVARFHSVKQAVSYCGLCGAERSSAETIKRMPISKQRNKHLQSVLIEAAKLAPRLSPELALVYDTEKQKGHANRASIAVARKLVAYLLAVDRSGREFVVAGERRAAA

SEQ ID NO: 395631 - protein, 355 aa, unidentified
MTSTKYIGLDVHKESISIAVLNFAGKVVMECVIETKASTLLQFIHGLRGDLHVTFEEGTWAGWLYDLLKPHVTELVVCNPRKIALLKDGSKSDRIDAHKLADLLYMNKIKPVYHGEHGLRMLKELSRSYLTITKDLGRVMNRLKALYRSWAIPCAGTQVYAPRFRSEWLSKITEAGVRRRAELYYQQLDALRLVRQQARKELLAEARKHRATKLLRQIPGIGPLRAAHLVALMQTPHRFRTKRQLWTYSGLGLETHDSAQYRVVEQQLQRSKKPVTLRGLNTNHNHDLKDIFKGAAMRASTAAGPLHDFYEALLAKGRKPTMARLTLARKIAAITLIVWKKEVRFDANYLKQQAA

SEQ ID NO: 395632 - protein, 311 aa, unidentified
MERFVGIDVAKETFDLCILPEGTIQHRENNPQGIHQTVETLLALNPTLIVMEATGGYEILLAAELQAANLPVAIVNPRRVRDFARARGRMAKTDQIDARIIAEFAATLRPSAQGVLDSQSRNMKALVARRWQLIEIRVAEANRMEHASEKAISQSLQRVLKTLDREIQKIEKQIRDQLAQMPELQSKAQILQSTPGIAETTATMLVTEVPELGRLNRRQIAMLMGVAPINRDSGTFRGKRMTGGGRKEVRTRLFMPTLVAIQHNPVIRVFYERLLKAGKTKMVAIIACMRKLLVILNSLVAKNQSWNPKIA

SEQ ID NO: 395633 - protein, 348 aa, unidentified
MIIIGVDFHPEFQQIASVDTDTGEVTEKRLAHREEAEKFYRALAGQKVRVGMEASGHARWFERLVAELQFELWIGDAAEIRTKRVRKQKTDRQDAQLILRLLLEDRFPQIWVPSGENRDLRQLLWHRHRMVQARTRIMNQLQAVALNEGLRCKKRLWRERGRQQLESFLLAPWASRRRRDLLELLDRLNPTIAELSQAVEQEVEKCPEAQRLRTHPGVGALTALALVLIIGKAERFQCGKQVASYLGLVPLEDSSGNRRRLGHITKQGSSILRFLLVEAAQVTVRSLPEWRSKYLHLMMRRGRKIAKVAMARRLAVRLYWMMRQGWDYQQWVKFGSHAGQPGNRHGVQ

SEQ ID NO: 395634 - protein, 371 aa, unidentified
MKQQSKSSKITVGLDLGDRRHRFCALDERGEVVEEGSICNERDSLRKLAGRYHGALGVMEAGAHSPWISRFLEALGWRVVVSNPRKVRAIYQHERKSDQRDALMLARIGRMDLALLYPVRHGTAEAQQDLLRIKLRDSLVRARVAVINSVRFTLKSLGYTVRNPSSARFHKVAMEEVPESVREMITPSVQALAELTARIKMLELEINTLAQMKYPQSAQLQQIPGVGPITALYFVLKIEDPNRFAHVRDVGAYAGLCPRRDQSGESDPQLRISKRGDAYLRRLLVSAAHYILGPFGPQSALRAYGLMLAADGTAQAKKRATVAVARKLAVLLLSLWKSQQPYQPFPGARLNGQQEDRRSGTIALHRMEATD

SEQ ID NO: 395635 - protein, 358 aa, unidentified
MSKHSENQEVKVMGIDLAKRQFHVHGVDVGGRKVLSKKFSRQKLKEYLVTLLPCTVAMEACAGAHYWGRLLRSYGHEVRLIAPQFVKPFVKSNKNDAADAEAICEAAQRPTMRFVAVKEVEQQDIQSIHRMRSLAVERRTAQISQIRGLVLEYGIEIPTGRFNLLKRLPEILEDAENGLTELFRKELFGLYEELRHLDARIEHYDEKLKQIAQADERLQRLQTIPGIGPVIATALLAAIGDIQAFKNGRELAAWLGLVPRQHSTGGKATLLGISKRGDVYLRQLIIHGARAVLRWADRKTDRTSRWAAVLKVRRHKNIAIVAMANKMVRVAFALLKKGENYRVQPLVAHNTPLGSIEA

SEQ ID NO: 395636 - protein, 369 aa, unidentified
MMFLGIDLHTNCFTCCYLDQEGGKRLETFDLTTQGLERFFATLTKETHVLVEATINTFAFVERFQDRVAQVVIANTHKLKIISFTDKKTDKVDAEKLARVIKTQVLSGEQQASAVMIPSHLVQNLRSLFSTYQLLRKQIVSTKNRIHSLYTQNLMPFTKKYIFGKNSRSLLREIAMEPTLSYQINFLFDELEHLEWKTDQFVEKILVTAHPFMHEIELLTSMSGISTFTAAAIMADIETVARFPNAKAFTSYLRSTPRIESSNTKTIIKSTNKAGRKLSIVLLSQSLNHFRDADPFLKAWNDRLCEFKRKGVVRMGLCRKAFTQIYQMLKKDEPHRYSNTVLHKKKMNEYKNFLRSYGINWEEIQKVPA

SEQ ID NO: 395637 - protein, 441 aa, unidentified
MKIDTIAPEYAAIDLGATDLYVAIADTPVRRFGTFTRDLHALAAWLREHHIQHVAMEATGVYWINPHDVLEAAGFNVTLFDGAGARNLPGRKSDIQDPQWHAMLHSYGLLPRCFVPTETIRHLRSYVRQRDDLLELAAMSVQHMQRALDLMNIRLHHVISQLHGVSGLRIIEAILAGERNPVALARLCAGQIRKNKEAEVIASLEGHWQEHHLFVLRQAHARYGFFQQQLTACDQQIGTLLTHLTVSLPPQTAAPGTKIKTTRHNPVQVPNLYERLLTLSGGRDAQQLPAIGPLSWLKIIAEVGTDLTRWPTPEHFTGYAGLNPRCHRSGQRSRRVPRRKTRLGQIFREAVMSLQNTKDCAVGEFYRRIKGRRGAPIANVAAARKLAELYWRVMTHGLAYVEQGLAAYRQRQQQQTERYLRRTAAKLGFALQPISSPNSDN

SEQ ID NO: 395638 - protein, 343 aa, unidentified
MEHYAGIDVSLELSSVCVVDATGRIVREAKVPSEPEALVGFLGQLGLPLTRVGLEAGPLSQWLHAGLTGAGLEAVLLETRQVKAALSAMIVKTDRKDARGIAQLLRMGWYRPVHRKSPPAQEVRALLVGRKLLHGKLVDVELSIRGLLRGFGLKLGEVSKGRFAARVRELVAGQPMLERVVEPMVRARDVLRAEYQVLHRAVLAIVREDAVCRRLMTVPGVGALVAVTFASAVDDPARFRRSRAVGAHFGLTPKRYQSGETDVTGGISKAGDGMVRAALYEAAHAMLTRTGRFSTLKRWALEVAKRRGMKRAKVALARKLSALLHRLWVDGSEFRFGREAAEA

SEQ ID NO: 395639 - protein, 421 aa, unidentified
MQQEASDFAAFVGIDWADRKHDVCLHVPGASALEASVLEHRPAVIDAWARRLRERFSGRPIAVCIELAEGPIVSALLEHDFFVIFPVNPTMLAKYRRAFVPSGAKDDPSDAALALDLLLRHPERLAPLKRESEDMRALRRLVQARRDLVQDRVRVTNRLTFTLKEYFPQIVEWFRDKETDVFAAFLERWPSLQAVQRARRETIVAFFHAHGVRHAGAIERRVNAIQTERPLTTDPAVIEPALAVVTTLLPQLRALSAGVARLDADIAKRCQALPDFRLFAPLPGAGPVFASRLLAGFGENRQRFADAAAVQKCVGVAPVTERSGNKHWVHWRWACPTFLRQTFVEWAASSIAHSFWARAFYESHRAKGSSRNATLRALAFKWIRILFRCWVDRTPYDESRYLSALQKRQSPLLKFAAAQTQ

SEQ ID NO: 395640 - protein, 351 aa, unidentified
MLTVGVDAHKRMNMAVAIDATGRESARWRGPNSVAGWQQLAAWAAARDADVRWGIEGAWNYGRGLAQHLVEAGATVYEVNARWTAAGRRRARTMAKSDGLDAHAVALVVWREAAALPPVAADDETGVMGLLVGERDGVVAEATRLRNQIHQLLLQLDPDYRQGIPSLKSQRGLRALATYATVDPRPLQQQRAAAVRRLAQRLQLLVEQSRELASQIRAHAARYASLTAICGVDLLTAAALAGILGPGRRFATDAQLAAYAGVAPLEASSAERVRHRLNRGGNRQLNAILYRIALTQARCSPAARAYLARRVSEGKTKREALRALKRYIVRAVWRRWQECLAAPAAPAALAA

SEQ ID NO: 395641 - protein, 344 aa, unidentified
MEISTIGLDLAKNVFQVHGVDPEGNVVVRRTLRRAQVLPFFAKLPPCLVGMEACGTAHHWARELIKLGHNVRQMPAAYVKPYVKRGKTDAADAEAICEAVTRPTMRFVPVKSPEQQAALSMHRARDLLVKQRTQLVNMVRALLAEFGINIPQGVRLALEMARKIVDGEAPPVPREAAKIAGRLSQQALDTHAQLREIDLDLLAWQRTNDTARRLMSIPGIGPIGATALAASVTDASQFRSGREFAAWLGLTPRQHSSGGKERLGRISKMGDKYLRTLLVVGMTSLIKGVKRKPETADPRLVALLARKPVRVATVAMANHTARVAWAIMARGETYRAGHQPRLAA

SEQ ID NO: 395642 - protein, 352 aa, unidentified
MGIVVALDVHRSQITYKALDRETGELRRGRIAPATRAEVRGWLGQFAGHAVEFAVEGTTGWRFVVEEIERAGHRAHLADPAETAARRGRKRRAKTDNADCDLQLRLLLAGELPESWIPPAHILELRTLVRLRKTLIDQRTAWQQRIHAQLFHQGVPAGLRLRTQAGREALVRAELSPAGRELVALGLRMLDTFDLELAPLDRQLRVFARRQPGCRALIERLYGVGPVSATAILAELGDCRRFSSSDDAVRHAGLDITVYQSDEKRAPGHLSHEGPELLRWALYEAAVSAARAGSPDHAYYLQVAERLGHTRACLSVARKLCRRAYHLLRELGEEALAPIERPAGEEAIAAAA

SEQ ID NO: 395643 - protein, 343 aa, unidentified
MQTVTTIGLDIAKSVFQVHGQDDAGQVVIRRQLKRRSVLAFFQKLPPCLVGIEACASAHHWSRELQALGHNVRLIPPAYVKPYVKRQKNDAADAEAICEAVTRANMRFVPTKTAEQQSGLVLHRTRHLFIRQQTAVIKAIRADLAEFGIVAPVGRHGVEELLNVLADPNDKRVPELARACLSAFGAQLRRIKEQVLEFDRLIRAWHRSDEMSMRLDEAPGVGPVLATAVVATVADPKSFRSGRNFSAWIGIVPKQHSSGGKNRLGSISKQGDRYLRGLFVAGALAIIRYAKIHGTKHRPWLTALLARRPTKVAAIALANKLARMVWAMMVKGERYKEPVALAA

SEQ ID NO: 395644 - protein, 355 aa, unidentified
MTFVGFDLHKRYITACALDASGTVVNEIRQLATTIDTVLDWLAALPGPVVIAMEATLYWEWLVARLQEAGHTAHVADAYQVKLIWQARSKTDIVDARKLAELVRSNLLPTIWVPDLDTRRRRQLLRGRAFLVRERTRIKNRIHGHLTAENQLFARSDLYGKAGRAWLEAVALSPVLAAETRRLLHLHDVLTKEIARLDYQVKRTARCDPTARRLATIPGVGVFGALFLHAEIGPIERFRSSHQLAAYAGLVPTTRSSGGKTTHGPLATMSNHWLKWILVEIVQTLKLAPGPVGAYYRHLLRAKGKPKATSAAARKLCCYVYWMLKEEWTYTEWLQQHQASRNSEVRPTQRLGAMA

SEQ ID NO: 395645 - protein, 322 aa, unidentified
MNKYKETFGVDISKDVFDVHGSETGHDQFKNNVMGFKKYLKELPKGSLVVMEATGYYHYRLAQFLYKNGVLVSVVNPLSIKRFIQMKLAKVKTDKSDAKAICEYALINEVPVYNALTDTQSECLQLFRLLDTYLKQRTATKNKIHGEAVLGIPSKFVYRSLIRNKKQLNKEVAAIESKILSLVKEDQQEQLTLLTSIPGIGQKTALFLIVVIDGFRKFETAAQLCSYVGITPTIRESGSSVRGRARISKVGNRKLRNLLFLCSFNACKHNKACRDVYERIVNKGKSKKLALIAVANKLLKQSFAIAKSGRPYDETYVSVLPR

SEQ ID NO: 395646 - protein, 334 aa, unidentified
METLYFLGIDISKKTIDTALTANGSDFCELQLPNQSKSIEVFFRTLKKQISSLEKLIVCLEHTGIYCQPLLDVMVRLQIKVCVEPALQIKQSQGMTRGKSDRVDAKRIALYAMRHKDQLSLWKPQRKCVQRLKALLVTRERLIKAKVQLEVPINESQEYLDPSLRKEMEKYSTSLITQFKKQVERIDAALDQVVKSDEHLNEQHSLATSVPGIGKITALNMIVSTGEFGRITEAKKFACYAGVAPFEHSSGTSYRGRTRVSKMANMTLKRLLHLAAMSAIQCCDELKTFYNRKVDAGKNKMSVINAVRNKLISRVFACINHRRKYQKIYKNALA

SEQ ID NO: 395647 - protein, 326 aa, unidentified
MTEPMVGIDVAKATFDVAMPLESKGKYRTKGKLPNTPAGFDMLGDWMDRHAPGAAVCMEATGVYHEALATFLVERGVTVYVANPAQVAAYAKSELSRTKTDRTDAKLISRFAMAQLQVGASLRPWTPPTPAQRKLRALVHRLNDLEGMRQMERNRLDVSDRAVHGSIADVMETLDAQIAELKKDINNHIDSDPGLRRDTDLLASIPGIGELTAAFVLGCAGDLRRFDDPRKLDAFAGMNPAIRESGKWAGQSRLSKLGHALLRAKLYMPAMTAIRHNVAVRALFDRLVARGKPRKLALGAAMRKLLHIAWGVIRSGKLFDPKTALA

SEQ ID NO: 395648 - protein, 519 aa, unidentified
MPRLSSKPSKARKSFVVQKPHGQLTPRVQQVGPEHFGIVAIDGAKARSRYFLADFYGRVLLEPTTLEHRRGDLQAAIDRIRQAQREHDLKEVVVAIERTGDYHRPVQRAFREAGFETRLVHPFTSKQYRQPADPGNKTDDTDMAAIFRAATQGFGLAEPIWPELYVTLQLLRRHRRDLVDKTANLQRQIREVLHAAMPGYAEQFCHLWDDSAAPMIFARRTTSAAEVRRLGFEGLKAIAEQACLRCRDQTFHKIFAWAEQAPPGHPQPLDLRRRLVHLDDDRLLKTQQILELERELAHHIVQTPYSRLLVIPGINVVTAADLAGELGPMSFYLNPNGITGRAGLMPSRYQSDQVDHANGPLCRRGNRRLRAVLMQTADNLAQCNAHFRARAQSWQRAGKDPRWVRVKIAKTVSRLAFALVGGEGLFRHPCCQPRHYILKKLLEFHREHGTDLQVMRQDLQTAIEQLPAKARAAEVDPLQKELDALANRRGPQPLADIIALVLARLASRVIQSTAESARP

SEQ ID NO: 395649 - protein, 345 aa, unidentified
MEQLIRIGMDTSKRVFQLHGVNAAEDVVLRKKLRRKEVVALFADLAPSVVGIEACGGAHHWARLLRSFGHEVKLLPPEYVKAYRKRGKNDAADAAALCEAMSRPTMRFVPVKSAEAQAALMLAGLRERLIRQRTQLSNAIRGYAAEFGHVAAKGLDKIEPLLARLAADEDLPELAHELFALHAKEYAELQAKLAAIEAKLMAWHRTNACSQRLDKIPGIGPVSAAMLTMKVPQPQLFRSGRDFAAWIGLTPKNHSTAGRTRLGVITRAGDETLRSLLVVGATAVIQQVQRGRGRPSPWLAALLKRKPPKLVAVALANKLARIAWKLMVSGESYRAAPIPAMPVAA

SEQ ID NO: 395650 - protein, 426 aa, unidentified
MSGLLGLEHGRRRKEERVIFVGDDWSEDHHDIEVLDEDGATLERRRLPEGLNGVGQLHELLAGFASDPGEVVIGIETDRGLWVQSLVAAGYQVHAPNPRMVARYRERHVTSGAKSDPGDAKVLADLVRTDRHLHRQIAGDSELAEAIKVIARAHQRQIWARQRQVNALRASLREFYPSALVAFGNDLAHPDALGVLGKAPTPAAGRGLSLSTIAACLRRGGRRRFVEDTAKKIQTALRTPQMEPTTTLADAFGATVRSSVAIIVELNRQIAALETELRSHFEQHPDAEILHSLPGLGSVLGARALAEFGDDPNRYQDARSRRCYAGTAPITITSGKRKTVLARFKRNHHLADLCYWWAFCALTHSPGVRAFYDARRAGGNTHDQALRAVGNRLVGILDGCLRHRVLYDDAKAWGHRTDLSGEGAAA

SEQ ID NO: 395651 - protein, 406 aa, unidentified
MRRRRLADEYPYPSVFAVLAVLRVSVLRVSGNMKNGRPWYNIGTNKKTHHKGGRPMRKIAYLGMDAHASHCVLGDMGADGTFRGNCRFPTSELNIIEALEKIKAKEKYLTLEECNLAYWIAQVASPYVTKVLPCDPKENALIYKGPKKADKVDTKKLCRLLRLGELKEVYHPENDARAIFKAAARHYIDLRDQQVTLKQKIKAMYRYWGVIDVAGEAVYSVKRRHDYLKQIKHFQIKNQLNRLYTLMDETEAMQRNALKAMKQMGRRYPEIKEFKKIPGIADVNAHIFDAFIQTPDRFANRSRLWRYCKLGVTDRSSDGKPLGYKRLDRSGISEIKALTYQAWMSTLSGDNEVRRFYSESLSRTLSRVHARLNTQRKIIAVMYGIWKRGEAYRPQLFLDSLKSGVV

SEQ ID NO: 395652 - protein, 355 aa, unidentified
MSQEKYIGMDVHQATISVAVMDGRGKLIMECILETKASTILEFIQGLHGSLSVTFEEGTSAAWLHDLLKPHVAHLVVCDPRKNALLKDGSKSDRIDARKLAELLRLNKLNPVYHGEHGVRTLKELGRSYLTITQDLTRVMARIKAVYRSWAIPYSGTTVYAPRYRAEWLAKIVEPGVRLRAQRLYQQLDLLQPVRQQARHDLLRESHKHPAVELLRQIPAIGPIRAALLVALLQTPHRFRTKRQLWAYSGFALQTRDSGEYRMVRGKVRRNRERLTVLGLNDNHNHDLKNLFKGAAISASTRPGPLYDFYVGLLQKGMRPTMARLTLARKIATITLTMWKKGVDFDAQQLNRQAA

SEQ ID NO: 395653 - protein, 413 aa, unidentified
MSSTLIVGIDISSELNAASFIDETGNRLVKKTFFFPNDLDGAQQFLNFTISLAQQYNISSIKFGMEATSHYAWHLHTFLASSPELAPFNPLFYVINLSIIKSFKGAYIHLPKTDSIDAAVIAECVRFGQVKPTPLPDLRYAALQKLTRMRYHIVRSLVREKNRALNLISFKFSTYPSECPFSNIFGKASLAIIENFTPDDIASMPLDDLIDFIVKNGNNRLSDPTQIAKTLKAAANRAYRLHHDLAEANDLALSMTLENIRFLESQLKKLDGEISRQLKAFSQTLTSIPGIGDVLAAGIIAEIGDIKRFNNEAAVAKYAGLIWNKYQSGNFNAQDTSLVKCGDQYLRYYLVEAANCVRVHTVRFKEYYNKKYREVPKHQHKRALVLTARRLIPLIFAMLSKGQIYQERGVASI

SEQ ID NO: 395654 - protein, 364 aa, unidentified
METVRFVGLDVHKDSIAIAVADSGGGEPGQLAIVPNDTASLIKRLSKLAPRGQLRCCYEAGPTGFGLCRDLRGAKISCTVVAPSLVPRAPGERVKTDRRDAVKLARFLRSGDLPEVVVPDASTEAMRDLERAREDAKNAERVVRHQLQKFLLRHGRRYPGKTNWTQAHLRWIESQHFEHEAQERVLTDALRAVQLATARIEQLDKDIAELVESWSMKPLVDGLQALRGIQLLTAVTIAAEVGTLRRFESAPRFMAYVGAVPGEHSSGERRHRTGITKTGNAHLRRVLVEAAWCNRFKPSTSRRLTRRQKGVSADVRDIAWRAQNRLHSRYRRMLGRGACTQKTVVAMARELAGFVWAVGQVIEA

SEQ ID NO: 395655 - protein, 406 aa, unidentified
MQVVHERCCGLDVHKRVIVACVLSGRERTIRSFGTMTEDLEGMAAWLEECDVTHVAMESTGVFWKPIHNVLEGHAFELLVVNAQHMKAIPGKKTDVKDAEWIADLLRHGLLKPSFVPSRAQRELRELVRYRKALVRERAAESNRVQKVLEGANVKLASVATRVLGLSGRAMVEALSSGVTDPTELADLARGRLRAKHADLQRALRGMVGPHQQMLLAAQLRHLHYLDGEIESLSQEIASREQPDEAALAQLQTIPGVGRRTAEVILAEVGADLSRFPSAGHLASWAGLCPGQNESAGKRRSGRTRKGSAALREALTEAARAAARTRQCYLAAQYRRIAARRGANRAAVAVAHSILVIAYHLLTKGSVYEDLGSNYFDDRDKVATVNRAVARIKRLGYEVTVTPHAA

SEQ ID NO: 395656 - protein, 342 aa, unidentified
MLRANVRQESATVKDAVRYDHFVAIDWSLKTMAIAHASRRDQIPRVFERPTDLKELKTYLGTLRGRTIITFEESGPAHWLYLELLDHADRILICDPFQNRLLCHGAKTDKIDARKLCELLCARLLKEVYHSDSALYELRLLASAYDDVVRSGVRLLNQKAALTLGHRNEGKSAAFIDVILKENIELYRRSKEQYEHRFHDLAKHNKLVRWQREIDGIGTIGAVKIVACVVDARRFPSSGKYLSYCGLVKHEKLSGGRSYGRRKPRYSRVLKSVYKTAALAVLNGHNPISSYYNVLLAQGVAEHNARHAVARYIARISYGMLKSGTRYNPDIIARRDTNSKSV

SEQ ID NO: 395657 - protein, 342 aa, unidentified
MNRSKKVVRLGVDVGKNTFHLVGVDETGLPAVKKKLRRKQMLIWFANLPACLVAMEACGGSHYWAREIAKLGHDVRLISPQFVKPYVKGNKNDYNDAEGICEAAGRANMRFVTVKTVEQQDIQGLHRIRQSVVKQRTALANQIRGLLGEYGIVVGYGISQVRRRIPEILEDGENGLTAGFRGWLAELLESFRVLDERIKQYDEEVQQAYAANQACRRLGAIEGIGPQIATAVIASYGDGKQFRNGRQFAASIGLVPRQYTTGDRPVLLGISKRGDKYLRTLLIHGARAAIRWMEGKEDRRSRWLQSLVARRGKSKAAVALANKNARIIWALLARGECYRPAV

SEQ ID NO: 395658 - protein, 345 aa, unidentified
MKITTIGIDLAKNVFQVHGVDEHGKAVLNKPLKREQMASFFVNLPACLIGMEACGSAHHWARKLQSMGHTVRLMAPQFVKPYVKTNKNDAADAQAICEAVTRPSMRFVPIKNVEQQGVLALHRARQGFVKARTAQANQIRGLLAEFGFIIAQGRNHIAERVPQLIEDACNELPGAFRRLIQRLLEHLQELDRQVQELEAQIVAWHRQSDLSCKLEQIPGIGPITACALVASLGDAKSFKDGRQVAAWLGLVPRQNSSGGKQNLLGISKRGDTYLRTLLIHGARSVIYHAQNKDQGNPQCGWLNGVVQRRNKNVAAVALANKNARIVWALLARDRSYEPGYVREQA

SEQ ID NO: 395659 - protein, 424 aa, unidentified
MMDIMHERCAGLDVHKAMIVACVRLTIDGKVNRECRKFDTTTAGLLALLAWLTEAGCTHVAMEATGVYWKPVWNVLSDGVFELFLANAAHIKNVPGRKTDINDATWIADLMACGLIKASFVPGEAIQELRSLLRARTQLTREQTSHIQRIQKTLEEANIKLDSVISDILGVSGRRMIEAMIAGVRNPSKLADLAGRRIKASRKELYDALHGRLTDHHRFLLRLYLKQYDALDAAIVEINQQVDAAVTRMDEETKVDQRPFRSLIGLLCTIPGVSTLGAMIILSEIGPDMSRFHTAGHLLAWAGLCPGQNESAGKRKSSRLRKGAPWLKTLLVQCAWAATRKKDSYYKAQFNRLRAKHGPKKAICAVAASMLTAIYHMLKNGTEHKDLGAAHFDRRATKIKANRLVAQLTKLGFKVELQPLPEAA

SEQ ID NO: 395660 - protein, 346 aa, unidentified
MTILDRTRPVTGGVDTHLDLNVAAALDSIGGLLGVAEFRTTRIGHGLLVDWLGGFGPVARVGVEGTGSYGAGLARFLRGAGIEVVEVDRPNRQTRRRTGKSDPADAIEAARAALSGRAQGAGKTRDGNVEAIRALVVAKRSARSSKIKALNQIRHLGFTASDELRERLSGISRQHLGAAAARLRPRAGSDAITFATKTALSTLGRRVLALDEEKERLNVLLAELVGKTAPSLLELHGVGVDTAATLLVAAGDNPGRLRCEAAWAHLCGVAPIQASSGKVTRYRLNRGGDRQANSALWGIVITRLRSDPRTQMYMERRLKEGRSKPEIIRVLKRYVAREVYPHLPRG

SEQ ID NO: 395661 - protein, 423 aa, unidentified
MRVVYPVCCGVDVHKSFLVATIITTHNNQVEPTYQKRRFSTFHRSLLEFREWLVDNQCFHVCMESTGKYWIPVFNVLEDFVQVTLANPKWVSAVKGNKDDVKDSKWIGDLFRLGLVPGSFIPDKEIRVLRELTRYRAKLVACKASEKNRYQNALTVCNLSLDSVASSMFGKSATAIVNHLVSGQSLDAEQCMNLLHGAMRKKVNQVLEAVKGFQMEAEQKVRLRIIQSHMGYLDQLIGILDEEIAQLTKAYKSHIELLCSVPGVKHLTAVIILSEIGTDMSMFGSSKRLCSWAGLVPGNNQSAGKKKSVKISRAGVYLKPALVQAAHAAVKDKNCDYYAQKYRQIAKRRGKKRAIIAIARMILVAIFAMLQTGETFCPKDLVAKEEDSNSKSEKHHRALQKAVKLLQAEGINLPEAFVLSLTG

SEQ ID NO: 395662 - protein, 392 aa, unidentified
MICVGIDVAKDKHDCFIMSSEGEVLADVFTVPNSKEGFERLLQTINTCTGIGDSKIKVGLEATGHYSYNLLGFLLDNSLPTYVINPLHTNLYRKSQSLRKTKTDRVDARTIASMLMSDVSLKPYTNIAYHNSELKSLTRYRFDKVKERATLKSSVARLVNILFPELEKLLPTLHTASSYALLSELPSAKHISEVHLTHLTNLLYTASKGHYDRDKAIQIREAARNSIGTYMPAKALELKHTIKLINEFNNEIAEIESAIQSIMDKIDSPITTIPGISLRMGAMIIAEVGDFNNFDSPDKILAFAGLSPSTYQSGQLNNCYAHMEKRGSRYLRYALFNATKFVCNWNPLFADYLAKKRSEGKHYNVAISHAAKKLVRLIFALQKSGQSYIANS

SEQ ID NO: 395663 - protein, 394 aa, unidentified
MGIDLHKETHTAVMLDCWNTKLGEITFGNKPSEFPKLVRKASRFLTEDKTAVYGLENAYGYGRALAVWLIEKGFHVKDVNTALSYAQRKSVPMYQKSDSYDAEAVALVLINMLDKLPDAIPDDKYWTLSQLVNRRDNICTHLRRLKNQLHEQLCTVYPSYKQFFSDISRATALYFFKEYPSPGHLLGKTAEELAKELRPVSHNNCSVKRAEKILNLVKSDGETRRKHQESRDAITRSLVSDLEHYRIQLEEVNEAIETLLPEFNCTLTTMPGIDVITAANMLSEIGEITRFPSADKLAKFAGIAPVNFSSAGKGKDMCPKQGNRRLQAIFYFMAIQMIQVSTNGTPRNKVFREYYLKRVADGKNKQQALICVSRRLVNIVYGMLKNHTEYREPE

SEQ ID NO: 395664 - protein, 341 aa, unidentified
MEKATIIGVDLAKHVFQVHGAGADGSVAFRKKISRVKLLPFLSSQPRCVVAMEACAGAHGWARDIQAQGHEVRLIAPAYVKPFVKRQKNDMADAEAITEAAARPTMRFVAVKSAEKQASGMVFKTRDLLVRQRTQVINALRGHLTEHGIIAPQGVFHVGRLAAEVENANNHLPVIVTELCTLLLRHIATLDEQIASLDRRIRDRAREDETARRLMSIPGVGPVCATALEALAPPPETFARGRDFAAWLGLTPRQNSSGGKVRLGRISRMGQRDLRRLLIIGATAVVRWAARRGAPAGSWLARMMARKPRMLVAVALANKIARIAWALMAKGGIYRSLAAAA

SEQ ID NO: 395665 - protein, 337 aa, unidentified
MKSIPVYVGLDYHQDSVQVCVLDSAGAVLRNGSYENDMLTIATVAENHGTQVHAAIESCTGAADLADELALRAGWTIDLAHPGYVARMKQNPDKTDFTDARMLADLERVGYLPKVWLAPQEVRELRRLVRYRQQLVDERRRIKLRVSALLRDQRVRCPYASSTKGWHTWLKTTKEVSQESGWILKRHVKRVESLDREIQQVATRLARRTKKDPMVLALLKEKGIGPVTAWTLRAEIGRFDRFRTGKQVSRFCGLSPRNASSGQRQADAGLIQAGNRPLRATLMQAAHRLIRYDAPWKDFAQKLLDRGKPKCVVVAATANRWMRSLFHQMQPAGSSAA

SEQ ID NO: 395666 - protein, 341 aa, unidentified
MRTLYVGMDIHKNFIQVAVMDEAGNIVKEQQFKSDAKEIKRFVKSLKTQKIHAAIEATCTWYHVYETLDALGVETTLVNMRRTKTIAESKIKTDKLDAKTIAQCLRTGFIATAYIPPKTIMEQRNILRHRMSLRKEIARYKNKIHAILLRNGIQHSDYSDLFGVGGMKFLRSLTLSDSEQYSLTSYLNIIETLIHEKTQTAEKIETLCKNNQQAMLLTSIPGISYYSAMIILTEIGEIHRFPHPKKLCSYAGLVPRTIQSGNHVCHGRILKECNQNLKWILGQCTHIHIRHCPNSSITKLYYRVENKKGRNKAIVAASRKLLTCIWYMLMKSETFKYSNDD

SEQ ID NO: 395667 - protein, 395 aa, unidentified
MFYCGIDIAKYKHEASVIDASGKALLDSISFSNSKDGCEKVLTLFEKLGVTSASVVVGMEATGHYWLSVYEHFSSLGYDVKVINPIQSEAFRKMYIRQTKNDSKDSFIIAQIMRFGQYSSTTLSDENIIALRQFSRYRLALVDSCSDCKRRIITLLDQVFPEYAKLFSDTFGVASTELLLNCQTPEDMLVVSTEKLTELLKKSSHGRFGEAKAVEVKIAAKNSFGVSFAKDAFSFQIKQLMEQLVFIENQVKDLEAEISILLNEVSPVITTISGIGDTLGAIIVSEIGDIHRFDAPGKLVAFAGLDVKVNQSGEFSGTKNKISKRGSPYLRRAIWLAAGRAAFCDPVLSQYYKSLRARGKHHLTAVGAVARKMCNIIFVILKENRPYEPRPPQKL

SEQ ID NO: 395668 - protein, 357 aa, unidentified
MESQEVKYVGVDCGKKSIEVVRINSENSLERRQFSTTESGINNLLQWLTLNDIVGLEAGSQSFRIAKSILNKGVQVIVLNPGNLATIYQSLKKTDKEDSLKIARLIQRHPIEELPTVPIPNDEEEDNRRLCSEHENWTKQLTQGKNRLHSLFTQAGLTQITKKHLRTKANREISVALLPSRYQKEAERILKVLDLVEQNLKLIEEEIQEALKKNKAYVQTIMSMPGIGMITSLAIMSYMGDCKRFSSAKQAAYYAGLVPRVDISGDTVRYGRIINRGCHSIRRVIVQAAWSLVRCQHGGKVKEFYQRLYLKKGAKKSIIATSRKMIEVLYVMIRTGKLFDSMPENILNRKLTQYGLM

SEQ ID NO: 395669 - protein, 340 aa, unidentified
MTVIIGIDPHKASHTAVAIGCDERQLAEIKVRATCQQIDRLLAWAEPLGERTWAVESAGGLGYLLSQQLVGAGEQVLDVPATLASRVRVLGTGRSNKNDPNDALSVAIAALRSPGLRSVEPANHREVLRLLAKRNHEIGRLRNIVVSRLHAALANLSPGGISKELNASDAVRLLGDFDPVTPVQQTRCDLALELLDDVKRLDVQLKESHKRIKTAVQASGTSLTGLYGVGPILACELIGYTGDVRRFTTRDQFASYAGVAPIELSSGGRIVHRLSRRGNRQLNHAIHMVAICQIRQKDSEGRVYFEKKAAEGKTKREAIRSLKRHVSNAVYRQLLIDAQK

SEQ ID NO: 395670 - protein, 317 aa, unidentified
MNCIDNQSEINIGVDTGKEQLDLHIRPLDIHFTVNNDEKGVKKAINTIEKYNPTRVVIEATGRLEHAFIIACSEHNIPFVVANPVHVKRFAGALGRLAKTDKLDSATIAHYGEAIKPPLSSLKPLTLRIMSDLLSRRRQLVAMQTMEKNRTKIMPKEITSSIKPVLTALKNQIEKIDKKLLKLIESCPEYKEKNDIIQSMPGVGNIVAFNLLSNMPELGYLTNKQAAALVGVAPINRESGTFEGNRKIKGGRYQIRTVMFMAMMSAMRCNPVFKATYEKLLAAGKPKKVAIIACVRKMIVILNSMVREGVHWNPETT

SEQ ID NO: 395671 - protein, 347 aa, unidentified
MYPFYLGIDLHLKRTYLVLMNGEGEVLDKQRLKNTDIPAYITENVPKETYAVMEATRNWPFFYDLLDKHVDRVELAHAKGVRMIAEAAVKTDQIDATVLAHLARLNFLPIAYAAPKEIRDLRQHLRYREWLIDERRRAKNRVHAVLAGYNLASPVTDLFGRAGREWLQEVVEEELRFSSKKVVIETLEMINQLDIQIKELAKDIPLPEELEPKAELLMSMPGIGKLNSAVILAEIGDINRFNSPKALCNWAGLTPRVHKSDEVVRHGRISKQGSRYLRTAMVSAAMTACRISPRWYGVYEHLSRRIGRRGAKVAVGRRLLTVVYYMLKRDQPYEEDYEQRRSVEQGA

SEQ ID NO: 395672 - protein, 428 aa, unidentified
MSNQEIIRRKQFCQIVKEVRSSKEYLVVGIDVAKDKHHAFMGTATGKSLFRKLVFENNIEGFSRLLRTADEIKSQNDLSKIVYGLEPTGNYHKPLARYLIRCDCNVVLVTGQAVKNNRNLLDGRWNKNDTKDAANIADLVSRGRCLYYDCPSPGIIEIRSLLSLRRRLKREEHSLRMRIRNNLLAQYFPELDRFYNACENETLSIVRYFLYPDTIAAMEFGEFFHLVTRTRRGIAQTLRLRKIHGLAVESVGCPLGPAGEYESDLLVEKLNQVREQIKKTADLIKDFCLEFSEYSYLLTIPGFGPYISARVLASIGDPFRFENRKQLIKMSGYDLCANRSGKTSDKAIPVISKKGNGELRYALYQAAKVASARVDLFRTYFTKLLRGRERERGIKTKMCVKLAAKMLVIAWTLMKKRESFDPAYLNIE

SEQ ID NO: 395673 - protein, 400 aa, unidentified
MIDTSDIGLFLGLDVGKGEHHATALTPTGKKALDKRLPNSEPKLREIFAKLQAKHGTVLVIVDQPAPIGALPIAVARDMDCQVAYLPGLTMRRIADLYPGEAKTDARDAFVIADAARSMPRTLRSIELDSETIAELEMIVGFDDDLAGEATRISNRLRGLLTQIHPHLERVLGPRIQHPAVLRLLEQFGSPALIRKAGRRRLANLIRPKAPRMAERLVEDIFTALDEQTVVVPGTDAAAMIVPSLASSLQAVLDQRKLLATRIGELLEAHPLSKVLTSIPGIGVRTGARILIDVGDGSSFPSAAHLAAYAGLAPATRSSGSSIRGEQPSRRGNKQLKRAFFLSAFAALADPVSRAYYDKKIAQGKHHTQALLCLARRRADVLFAILRDGTLYDPQPAPTG

SEQ ID NO: 395674 - protein, 408 aa, unidentified
MEPKVLIGDDWSQDHHTICFMNPLTGGVAMTFDIPQTPEGFRRVCTERDKLGLRPQDCWVGIETAHNLVVDYYLDHQYQVFVIAPSIVKGCRKRFGASGAYTDESSAILLADLLRTDRARFSPWRPHSPLIQQMVVQVRLIETLRREINRWTNRLEATLLRVNPYPLGLFNKLECEISLQFLLRYPTYEAVQALTLDEFKVFCREQHYTHPRRVPKLYAHLQIPTPTPSPAVAQAYADQVPFFAQTLLPLVQRRKQSLKALQALFVQHPDHPIFDSLPGAGKLLAPSLLVKFGDDRERFPTSKSVQTLAGTCPVTRQSGKYKGIYFRKACDKEFRRISDQFAWLSLDESVWAVTYHTELQRRGIVGSHAIRCLANRWLAITWRLWQDRAPYDEGYHLQRRALRRRPKP

SEQ ID NO: 395675 - protein, 405 aa, unidentified
MNAVGIDVSKGKSTVTIRRPGDIVLMPPCDIPHTQSAINGLINEIKALDGETKVCMEHTGRYYEPVATWLTNAGIFVSAVNPILIRDFGDDSLRTPKTDKADSKKIARYTLYRSTRLKHYGNMDKTRNQLKTMNRQFGFYMAQKTAMKNNLISILDQTYPGANDFFDSPARSDGSQKWVDFVHTYWHVECVRGKSLNAFTEHYQNWCRRKGYNFSAEKAAKVYCLSSDLIAVFPKDDNTKMLVRQAVAMLNVSSETVESLRQEMNKLASTLPEYPVVMAMNGVGTSLGPQLIAEIGDVTRFTHREALTAFAGVDPGKNDSGQHIQKSVRTSKKGSPSLRKALFQIMDSLIKRSPADDPVYAFMDKKRKQGKPYYVYMTAGANKFLRIYYGRVKEYLSSLPEAEEL

SEQ ID NO: 395676 - protein, 346 aa, unidentified
MCSLPVFVGMDYHDSFVRVVVQDTDGSEMGNADRTNHWKAIADFGDRFGRPVRAAIESCCGAADLAEELVSCAGWSVALAHPGYVQRMKQNPDKTDCQDAQLLADLERVGYLPRVWLAPRYIRELRHVVRYRLQLTEQRRATKLRLRALLREQRCHAPEGLNAWTKAWQHWVRHTAELSAQGRWLVKQHLRELARLAIRIHEVEKRLEHLTTNDVEVQRLQQQPGIGPVTAWTMRAEIGHFDRFRTGKQLARFCGLSPRNASSGQRQADAGLIRAANPALRTVLIEAAHRLVQYDPSWQKFAQRLRARGKPGSVVAAAVANRWMRRLYHEMKTSSGELAIAVGPAR

SEQ ID NO: 395677 - protein, 293 aa, unidentified
MAIIGGLDVHRSQITYDWIDTQSGQHQRGQLAPAHREHLRGWLEQFAGRPAAFALEGCTGWRYVVEELQRAGIAAHLAEPADTSTLRGPKHRAKTDQLDARHLRELLAGGRLPESWIPPAQVLEARTRVRLYKALLEERTAWLQRIHATLFHHGVPAQRHLLAPDRRAGLERGSGLSPAAHQQVTVALRMLDHLDAELELLRGELAWFARRQVGCRALDALYGIGPVTAVAIWAELGEVRRFSSSRFAVRHTGLDVTVYASDGKRTPGRLARQGPPVLRWAPPSDAPALGQVA

SEQ ID NO: 395678 - protein, 357 aa, unidentified
MSHTTYSSTTIPALTIGLDLGDRLSQAYAVDAAGTCVEERAVATTAAALTAFLAERPPCRVVLEVGTHSPWISRLVALFGHEVFVANPSAMYGARRRRKRNDRLDAEFLARQGRADVRLLYPIQHRSAPAQQHLEVLRARDQLVRTRTAWINHVRGAVKALGTRLPAASAEAFPTRADAHVPDALRPAVLPLLTLITTLTTAIRSYDAQLEALARTTYPETARLRQIAGVGPLTALAFVLLIEEPTRFAHSRDVGAYFGLVPRLDESSTLTPQLRITKAGDPLGRRLLVSAAHYILGPFGPPCARRRHGEALMQRGGTNAKKRAVIAVARKLAVLLHHLWRHQLTYDPQHGGASRAA

SEQ ID NO: 395679 - protein, 427 aa, unidentified
MEQEQLNRVERFRQFRKQIRGSEQYLIVGIDIAKSKHHATFATTKGRIGHRGLFFENTASGFEHLLTQAQFYQDRDGFEQVVFGLEPTSVYQKPLAEFLIQQGFLVVYVTNEAIKDNRRTMDGRWDKHDRKDSANVAELVGQGKCQYYDLPNMHLRDIRNLLLLRKRLKKQLHGCRIRIRNNLVAQYFPELDGLWHQCEGENLAIVRWCLSPAKIHGLRFEDFFQMVTSGTKGVRQYQRLRQIWEMAPDSIGCRAGQGLELEAQVMVGLVEYILKQLDQVQKMIEELCRSFVEYDYLLSIPGFGTYVSAVVLAAIGNPLRFNKASELIRLAGFDLSAKRSGKTSCSAVPVISKKGKADLRYALYQAALVASSRTPRFKAYYHRVLEGRQREKGIRTKMRVKLAVKLLVIAWTLMKKREYFDPDYIKI

SEQ ID NO: 395680 - protein, 339 aa, unidentified
MQLYAGLDLHSRNTYIGIMDQEFKRLFGKRVLNKLPVILDTLAPFRDQLKGIVVESTFNWYWLIDGLMDAGYQCVHLANPSAMKQYEGIKHTDDQHDAFFLAQMLILGILPQGYIYPKEDRPVRDLARKRLFLVRHKTSHILSLQSLIARCCAQRISANDIRKFTVEDLQQLLKEEYIVLSAQANLDTIVFLKQQIKRLEKTIQKKVKLNKAFQQLMTVPGIGLILAMTIMLEVGDIGRFAQVGNFASYSRCVSSQRLSDGKSKGHGNRKNGNRYLSWAFTEAAHLSRRYNEHFRSYYNRKVAQANTSLATKALSNKLARICYYIMRDQVCFQENLLSQ

SEQ ID NO: 395681 - protein, 359 aa, unidentified
MSTQSKPFSFKGQRIFVGLDVHLRSWSVTVLSEQAVLKKFTQDPSPAALNKFLTNTYPDAEYYSVYEAGFCGFWIHWELCNLGINNIVVNPADVPTMAGERLRKTDAVDSGKLARSLRAGDLKGIYVPDSTTTEIRSLIRLRDSLTKDQTRHKNRIKTHLRYLGIDIPEEFCRPGRTWTNRFVLWLKGLDLETEYGKKTLDLLIAQYEDLRGQQLKMMKELRVLSRTERFDKPLRFLMSIPGIGQLAGLTILSEVDDISRFKDAAHFASFIGMVPMCYSSGEHDGTGNITVRRHAKLRWLIVEAAWIASRKDPVLSAAYVEYCRTMKPSKAIIKIARRLVNRIYFVMKHQQPYVNCYVS

SEQ ID NO: 395682 - protein, 418 aa, unidentified
MWGHFILSNGSFIGKPFKIVHSDPRSRDLAVAKIKEAQETYSLKSRCFLESTGIYHIPLLCFLRDKGFDCSVINPIITKNSTNINIRKLHNDKFDSKKAALVGLNVSLKTSIIPDDSVVDLRNLVRDYYYFKDLQSAVALKLTAELKVSFPAYAKVFSKVTTQSSLKLLSSYPLAEDMLAASKDDIVKIIRSTARFGEAYALRKYDAIIAAAQDTAVFGRALPSNAVRIRLYIDTYQEYQKHLDALLKALHETVDRLQDTLIYDQICLLQSLRGIGFLSAVVLIAEMGNFKLFSSPKKLYAYFGLDPAVKQSGKLNGDKVHMSKRGSSLARRVLHMAALNNVKVDKGSGTPVHPVIYDYYTRKCSGKKKPVAMGAVMHKICNIIFAMLRDNKPFEVITPEEHCRRFAAEHPDKIRKAA

SEQ ID NO: 395683 - protein, 437 aa, unidentified
MAMRKREEVFPNAAAIDVGASSHWAAVPPGRTDHPVREFGVMTGNLHALADWLIECGVDTVALESTGVYWIPVYEVLEQRGLKVSLVDARQMRYVPGRKSDVQDCQWLQKLMSLGLLRGAFRPDGEVCVVRAVARQREVLITEQGQWVQRMQKALVELNIQLTEVLSDVMGATGQAIIRAIVAGERDPHSLARYRDGRVKASAAQIAEALRGNWREEHLFVLTQALAMYDDICRHLHECDDKLQRLLAERAAHAVELGKAPRQGSKQRIAFDARQALANWSGVDFTRIPGLGVTVVMTLLTEIGPDLSRFESVKHFCSWLGLCPGTKISGGKVLYSATKRSANRARQALKMAAQALSHSDSALGAFYRRLCTRMDKLRANTAAAHKLARMVYLMLTRGEAFVEQGQQRYEEQQRQRSVAALKRRAAALGFQINPVAQ

SEQ ID NO: 395684 - protein, 398 aa, unidentified
MSQDVWAGIDAGKIAHHCVVINDAGDKLLSRRVSNDETDLLKLVGEVAALADGGRVLWAADLNAGGAALLIALLVEHEQELIYIPGRTVHHASAAYRGDGKTDAKDAAVIADQARMRRDLHPLRHRDATVAALRMLCARRTDLACDRTRAINRLRAQLLEYFPALERAFNYAHRRAALILLTRFHTPAVIRKAGPEKISAWLRKQGAYRPDLIAVKAVEAAASQYTTVPGEETGAMIVERIARQLIALDTELDDIEKDITEKFREHAYAPAIESMPGFGPLLGADFLAAINGDIANYETPDRLAAIAGLAPVPHDSGRITGNLKRPRRYDRRMLRASYLAAYNSIKTSAESRAFYDRKRVAGKHHSQAVLALARRRLNVLWAIIRDETVYEPIELKAA

SEQ ID NO: 395685 - protein, 337 aa, unidentified
MSKITLIGIDTAKHIFHLVGVDAHGHYGYRKQLSRQRLLPALAQLEPCEVVLEACGASHHWARKIEQLGHRARLIAPQHVKPYRRGQKNDYRDAEAIISAALAPGIHFVGVKSVAQQAEQALHRVRSRVLSQRNAAANELRGLLGEYGLVFAKGIKPLREGAVAFVDRGEAAALGLTELVWDILDEMERLQLRFDAYKCRIAQWVRADETSSRLCAELNGVGVLSASALRVKVADVRDFVNGRNFAAYVGLAPGHRGTGGKVKIGKLQRNHDRYLRQLLIHGARSALRHLGDKQDPQSCWLRELKARRGFNIAAVALAHRNARQAWAILAQEQTAQG

SEQ ID NO: 395686 - protein, 341 aa, unidentified
MIKTPIAVLGIDLGKNCCSLAGLDASGAVVFRRRMTREGVIRFVSGLPVCVVAMEACCGAHFLGRAFTGQGHEVRLMPPEYVQPYVKAQKTDDRDAEAIAEAATRPTMRFVGLKSESQLDLQIIHRARNRLVMSRTRLINQLRAMLLERGIILPKRRMALQHRLDELRSGAPSLSTRMLHLLHDLRDEWSELDRRIRAYDKELAYMASEDERARRLTSIPGIGVINATALVAAVGDASAFARGRDLAAWLGLTPRQHSTGGKTKMLGISKRGNRYLRTQLIHGARAALGHFADKPTSTGAWVRGLMARSHRNVVVVALAAKLARMIWASLRHERAYEPNRA

SEQ ID NO: 395687 - protein, 403 aa, unidentified
MNSVGIDISKGRSTIAVMRPFGEVVISPFEVRHTGSELSKLAKQLKSLDGETRVVMEATGNYHASVAKLLHNAGLYVSVINAKLVHGYGNNELRRVKTDRKDAVKLANYGLDRWLTLPRYIPEEDTRLLLKNCYRQYRQYSKVQTVLKNNLISLLDTVFPNANRLFSSPIRGDGSEKWVDFVAEFWHCRCVSEKSERAFTSKYLRWCRKHGYNFREAKAHTIYAEASGHIGVMPKSETTKLLVEQAVAQLRATSTALAALKHEMQSLASQLPEYPVVMDLFGVGPTLGPQLIAEIGDVRRFYSKKALVAYAGLDAPPNDSGDVTGRHKSMSKIGASSLRRTLFLVMSVYLQTAPLDEPVCQFMDRKRAEGKLYRVYMMAFANKFLRIYYATVKAYLESLEHTA

SEQ ID NO: 395688 - protein, 372 aa, unidentified
MGQASTLYIGLDVHKETIAVAYVSTARQAEVISLGNIGTRQCDIDKVIGQLQTKAKKLVFVYEAGPCGYWLYRYLTKKGLQCWVIAPSLIPKKAGDRVKTDRRDAMQLARLMRAGDLTPVYVPGVEDEAIRDLARAREDTLKDLKAAKHRLKAFLLRQDIRYPGRANWGPAHLRWLATVVCPTPAQQIVFQECVRAVSERQDGLQRIEAELQTQVQTWRWAAIVEAIQALRGVQFIAAVTLIAELGDLTRFTNPRQLMSYLGLTPSEYSSGSRRRQGGITKTGNAHARRVLVEGAWAYRYPAKVSRHLQMRIEKVPKAIQDISWKAQVRLCKRYRQLLARGKNVNQIVVAIAREMAAFVWAIVQEIEGAGAQ

SEQ ID NO: 395689 - protein, 371 aa, unidentified
MGEPSTFVGLDAHKDSIVVAMLLPGAVHPVEWKLVNEPEAVRRLARKLERETCGGVRCCYEAGPGGYVLQRQLVAAGIPCTVIAPSLIPVKPGQSIKTDRRDARKLAELFRAGLLTEVHPPTEDEEVVRDLCRARDDAQRDRTRAKNRLTKFLLRRGCVYCVGRKPTWSQKYWRWLHALPFERPADQIVFEDYLLAVEQVEARLEALDDQLGRMSTTEPYRAPVAALRCFHGIDTVTALALVAELHDPRRFPSARQLTAYLGLVPRESSSGSRRRLGGITGAGNRHVRRLLVEAAWHYRHKPQIGRALRLRRRGQPAAVIALADRALRRLTLRHRRRIYQGKHPNPVTVAIARELAGHLWNALQATTPARS

SEQ ID NO: 395690 - protein, 397 aa, unidentified
MARATQPQNPPTAEVETARLLVSFELSEGRWVVTMRQPGSAKLSRFSMPARDTEQLLRLLTTQRQQAERGGQRAVRIISIYEAGRDGFWLHRWLLAHGVESHVVDPASILGPRRRRQAKTDRIDGEKLLRSLAAWLDGEADRCSMVLPPSVAQEDERRLSRERDELVAERTRLSNRINGLLANQGIAGFKPLQKDAQQALDELRTGDGHALAPHLHMTIVRVLQRLALLGQQIKAAEAERDALLKAVPADTGAASQPAASAEAAMARELFRLRSIGPEFATVLSLECFYRRFDNRRQVASFAGLAPTPWSSGSVEREQGISKAGNRRLRKTMIELAWSWTRHQPSSALTRWFHKKVVGQGKRMKRVAIVALARKLLVALWRYVNDGVVPQGAVLKPN

SEQ ID NO: 395691 - protein, 346 aa, unidentified
MTIVGCDFHPSWQQVAVFDSETGEIRELKLENGNGEAERFYRELSSRALIGFEACGNTQWFEDLLDRLGHEVWMGDAAAIRASYVRKQKTDRRDAAHILKLLIENRFPRLWRPSAEERDQRQLLIHRHKLVGIRARAKNGLQHLMLNRGVQMKRKLWSEAGQKALRALPLEGWAAQRRQDLLKLLSVLDPQIRQLEEAIKSAAQQDPRARLLMTQPGVGAITALAYVLTMGDVNRFQRGKQVASYLGLIPSECSSSKRRRLGSISKQGNSFMRMLLVESAQTVNRLDEGFRKQYQHRCHRMAKGVAKVAAARRLAVRLFWMLRTNTGYPEIAHIEGSPREGVVGES

SEQ ID NO: 395692 - protein, 348 aa, unidentified
MDTIGVDLHKRETQLCIEQADGTITEQRIVTSRERFTAVLGHRPPARILVEASTESEWVACHLESLGHEVIVADPNYAPMYATRSRRVKTDRRDARTLMEACRAGTYRPAHRLSAARRHVRAELAVRDAVVRTRTRYVALAKALVRRDGLRVPSSAAERVGAHLERLAVSPALAAELAPLLTLLPPLNAAIAAADQRLAELEHTDPSVALLMTAPGIGAVTASALVATIDDVQRFASAHQFEAYLGLVPGERSSGELRRIGPITKAGNRRARWLLVEAAWRILRSKDAAGAPLRGWARPIAARRGSRIAVVAVARRLAGILYAMWRDGAPYDASKIRRPRGARQSPAA

SEQ ID NO: 395693 - protein, 379 aa, unidentified
MPNTMRHVGLDVHAETIAVAIAEPDGSVRELGTIRQRPEAVRKLIAKLGGPSGLRVCYEAGPTGYPLYWQLTALGVHCDVIAPSLIPTKAGDRVKTDRKDAAHLARCYRAGDLTAVWVPDAATEALRDLVRAREVTKQDQLRARHRVSKFLLRHGCQRPEGMRAWTGRHAQWLGQQRFALPTLQVVFDEYRATLALLADRVARLERAIAAALGTLAPAQQALVGALATLRGVKQVTAATIVSEVGTLRRFPTARQFMGYTGLVPREHSSGSGIHRGAITKTGNAHLRRVLVEAAWAYRHRATPVSGLLRARQQGQPAPIVAIATKAQQRLCPRYRRFLEQGKPPLAVATLIARELLGFIWAIGHAIEPPPVPLGVHMSA

SEQ ID NO: 395694 - protein, 472 aa, unidentified
MGKGSGNGTTRGDRKRNARRERLRGLLPRDGAVIGIDLAEDKQALAVVDHDVRVLARKTVKVKAFRLGEALDWAVAQATVKGFARVAVACEPTGARWLQVQRLCAERGLPLVCIQPLVSHIAREQQDYTTHKTDEADCVMIARLAVELHCYLPEQLDETWAHLRHLGRRRNQLITAATASVQRIRDFLSVAWPVVTETCAGPFESVTWLAAMQVVTSRCGAQPGKLAEPGLEAFTVLVRGAVPGWGGRRPSGRVCRAMFAALTDTEGAVVSHRRGLLRRCADELGDLQRTRAQLRAVEADMVAVLAELGLARLADIRGLTAVGAAAILAETGDPRRYDSSSSLVKHAGLSPSDNASGAFRGEAHISRRGRPGLRLTVWRAVWPLLIHNPVLAAKYQAMTQAADTAAAAAAAPAEAGSRQVSAAAAAARARRAKARVACAASLLRWIYSLVIHGTGWDPAVASGTASRPAQAA

SEQ ID NO: 395695 - protein, 354 aa, unidentified
MIIIGVDFHPEFQQIASVDSDTGEFQEKRLGHREEAETFYRGLAAAGQKVRVGMEASGHARWFERVLAELQVELWIGDAAAIRARRVRKQKTDRQDAQLILKLMLKDDFPQIWVPSWENRDLRQLLWHRHRMVQARTRIMNQLQAVALNEGLRCKKRLWREQGRQQLEAFRLAPWASRRRHDLLELMDRLNPTIAELSQAIEQEAEKCPEARRLRTHPGVGALTALAFVLIIGQAERFGSGKQVASYLGLVPLEDSSGNRRRLGHITKQGSSMMRFLLVEAAQVTVRSVPEWRSKYLHLMMRRGRKTAKVAMARKLAVRLYWMLRKGWDYEQWKKFGSHAGQPGNRDGVQSITE

SEQ ID NO: 395696 - protein, 395 aa, unidentified
MTHPTAASDVPAAYDPDSTLAMALELSGKSWELGAVVPGLARRPRRRLDPRDMAGLLTQVQRWKAEAVAAGRTIERVVLTYEAGRDGFWIARHLIARGIEVPIMHPASIPVARKKRRAKTDRIDLEMLLRSLLAWLRGDPMSCSMVAIPSETEEDRRRPGRERERLVSERIALENRMQNLLCLHGVCGFKPRLKKAAAQLATLRRFGGEPLPAELMAELRRLLARHQLLSEQLKEIEAAREMVLTEEKPDQTAQQIQALALLYGLGLGTATDLALEVFCRSFRHRQALASFVGLSGTPFNSGGSEREQGISKSGNPRVRRLLMQLAWRWIRLQPQSELSRWFQERTSGAKGRIRKVMAVALARKLLVALWRYLQTGVLPAGALTTKPSVAARAGA

SEQ ID NO: 395697 - protein, 469 aa, unidentified
MKNKRRSKRGRGHRAKGLPAELMQRINPNAAGIDCGAQHHYVAVPAERDEQPVRAFSTFTADLQALADWLEACEVDTVAMESTGVYWMALFEIVQSRGIEVVLVNARHVKNVPGRKSDVSDCQWLQQLHTVGLLRGSFRPEAKIAQVRAYVRHRQMLVEGAGDYVRRMQKALVQMNVHLHNVLSDITGMTGLQIVRDIAAGVHDPAVLAQHRDPRCRASQAEIEASLTGYYRPEHLCALRQCLELYDAHQRHIQECDLEIERVLQDLAAEQPAPTEPLPRARVRRRARDNEPRFEVRELLYQLTGGADLTQIDSIGPFAALRLIAEVGTDMSRWPSAHHFTSWLTLAPHNKITGGKLISSKTPRSANRAAALLRICAMSLARSSTALGAFYRRMAYRTDKPTAITATARKLAILVYRVLSGTLVYQDPGASAYEAQHRSRALNNLRTRAQRLGFQLVALNDDEPPVAVS

SEQ ID NO: 395698 - protein, 338 aa, unidentified
MSIVMGLDQHRGQITGEWIDTDTGEVQRTRVAPADRAAVRKVLQRFRGRELEVALEATTGWRFVVEELRRIGAVVHLAEPAETAGLRGPKKRAKNDRADARHLRELLMIKRLPESWIPPDHVLDLRARVRLRHTLSEQRSEWQQRIQATLYHHGCPQRRQLMTGDGREWLQEQPLPATAREQVTVAVAMIDALEVQIAPLDKELRAYARRQVGCKALMAHYGIGELTAVTILAELGDCTRFSSSRHAVRYAGMDITVHQSDQRRAPGHLSRQGPPALRWALFEAAQVARRPGSPDRDYYLEAAERLGGNRACLSVARKLLKRSYHTLRELGEEALTPA

SEQ ID NO: 395699 - protein, 346 aa, unidentified
MRIIGCDYHPSWQQVCWLETTTGETGELQLAHASGEAERFYRQLPGHALIGMESTGNCQWFVELLARLGHELWVGDAAKIRASDPRQQKHDRRDAALILKLLLEGRFPRIWIPSGEEKDLRQLLIHRYKLVCMRTQVKNELQHLAMNQGITKKRKLWSKAGERVLRELPLRPWSSRRREDLFRIREMLHEQIDRLDQAVVEAAEKNERARLLMTQPGVGPITSMAFVLTMGDVNRFQRGKQVASYLGLIPREYSSGGKQRFGSISKQGNRFLRMLLVEAAQNAVRCDPQMRNEYLHRCHRKAKGVAKVAAARKLAIRLYWMLRTNMGYPEVVRVESSSRVPLVSAS

SEQ ID NO: 395700 - protein, 444 aa, unidentified
MRVMYERVAGIDVHKDMIKVAIRFPGERGTRKTEVLEFRTFWGVLQEVARELRRRGVTHVAMEASGVYAEPVYHALCEQDFTEVLVINPRHVKALKGHKTDARDCRRIAELLECGLLRGSYVPSAEQKEMRDLTRYRKKLVQARTSEIQRMQKALESAGIKLGSVLTDITGVSATAMIDALIDGERRPRVMADLARGTLRAAGKQADLTMALAGRFTAHHATLLRMHRDQVKLNNHAIAGLEEQIAAAAGRWQREMDLLMTIPGFGPVAAATWIAEIGPEPHKYSGSHDKLGSFVTLAPGNYVSARKRRHGRTGDAGTYIKPALIEAAWGAIRVRGRLQARYNRLVRRFGGDKNPGAKKKAITAIAHTLLKIAYQVLRSGEPCAEPGADFCTRRNSPGSQQAWLLRKLEQLNPGATITITLPGVAPPDGGAAAAPPGAALTLPR

SEQ ID NO: 395701 - protein, 351 aa, unidentified
MKNLFIGIDFSKETFDATIICSSMMITSVHEKFENKPSGFSKLRTWIRKNSYGTTEENWLLCGENTGVYCQNMCDWMFAKGIDIWIENALQIKRSLGLKRGKNDKADSANIAEYASRFIDKMKPYVPDSKEIKELRGIFMRRRTFSKMRKQLKNEHQEKIKVLGKDYILHGIAACSEKIIKNLEDAIKKCDKMMCDIINSSPELKKTFDIVTSIKGISLQNGVAMIVYTNNFSKFENVRQMLCFWGVAPFEHSSGTSVHGRTQTSFFANKMLKELISDAAANSIRYNDKIKTYYNRLVNRGKMKGVALNNVKAKLINIVFTMVQRGTKYDPNYDMIKTTNKQKAEILKNAC

SEQ ID NO: 395702 - protein, 387 aa, unidentified
MPQLNDLSRSLVALDQDSTIIAVVELSQSSWLVAGVLPGIERQPQKKLEPSAERLLGLLHRWRDEAVRAGKKITRIALAFEAGRDGFWLARWLNARGVEAHVIHPSSVAVSREHRRAKTDRLDTEMLKRGFLGWLRGERGHCTMARVPTIAEEDAKRPNREREGLVGERTRIVNRIKATLARMGIRNFKPTLRKAAERLATVRTPEGMPLPPNTLAELQRDMARLGFVVSQIREIEQARQKRLEQETETGPHAMVRQVARVIGIGIETADMLVHEVLSRPMRDRKAVARYAGLTGSPDESGARRREQGLARAGNARVRRGMIQLAWRFLRFQNQSALAQWYRARTADSRPGTRKTMIVALARKLLIALWRFVTTGETLDGVILRPAG

SEQ ID NO: 395703 - protein, 395 aa, unidentified
MKANELQVAVDVGARMHRVAVGDGTGRLLEEFDLEHTAAGFAGFFTRIERLRARRGAPVAVAMEGFNGWARPLDRQVLDHGWKLYNVNNLKLARYKEIFPAPAKTDAIDARRILELFRLRGDLAVARGVLQEIVATTEEAERLKRLTRRRRQLVNEKVRVLNRMQSDLQAVCPGLLEITADAENLWFLSLLSARADMRRLAGLRQTSLLALEGVGRAYCAKIQAWQREALFSHEAEWAGPMIVADARRVLALKREIGALDERIEPLIDDCESARRLRTIPGFGPTCSAELAGEIGAIERFATEASLALYLGMAVLDHSSGTHTGTKRPRQVNTRAKAAMMIAVARHMEQVATSRAYYDKKRAQGKAHNQAVRALGRQLVRVIWSMLKHQRDYEVR

SEQ ID NO: 395704 - protein, 387 aa, unidentified
MPQPNDLSRSLSPFVQGNTLVAVIELSLTSWLVAGVVPGVERQPLKKLAPDEKELLRLLQRWRGEAVKNGCTIERIVVAYEAGRDGFWLARWLQAHGIEAHVIHSSSVAVSREHRRAKTDRLDTAMLLRVFMGWLRGERGHCGMVAVPTIDEEDAKRPHRERESLVGERTRTINRMKAALVRLGIRGFKPELRRAPKKLDALRTPEGLPIPPNTLEEIRRDLARLAMVREQIDLIEQARLARIEQAPKTGPNAMVRLLASIVGVGVETADMLVQEVLSRNLRDRRAVARYAGLTGSPDESGSKRREKGLAKSGNARVRRGLVQLAWRFLLFQKDSALAQWYRARTGVQGVRKTVLIVALARKLLIALWRMVTTGEVPHGVILRPAVA

SEQ ID NO: 395705 - protein, 413 aa, unidentified
MSLTPEPAPRRVCAGIDWASVDHAVCILDAEGAVVERFFVLHDAAGLRTLVRRLLKAGVGEVGIERSDGPVVDALLQAELTVLVIAPGQLKNLRSRYGSAGNKDDRFDAYVLADVVRTDQARLRPLVRDSAATTAMRTTVRARRDLVEHRVAAANQLRAHLQLVFPAAAGLFAAIDSAISLSFLERFTTQAKADWLSVKRLGSWLSSVGYSGRTNPQALHTRLLAAPRGTTDTDAEVHATTTHAYVVLLRILNTQIAALEDNLAAQLTTHPDTHIFASLPRVKTLRTARLLAEIGDARGRFPTADSLACLAGVAPSTRQSGKVKAVTFRWGANKQLRDALCDFAGDSRHDNPWAADLYNRAIARGHDHPHAVRILGRAWAHVIWACWHNNLSYDPSQHRALQNVLANTTTQAA

SEQ ID NO: 395706 - protein, 351 aa, unidentified
MVLIGVDYHPSFQTIAFFVEETGECDEQELNHSDGQAEKFYRDLKQRGICVRVGMEATGYSRWFERLLAELGFELWIGDPAEIKAKRVKKQKFDREDARLLLRLLRENNFPQIWVPSPENRDLRQLLWHRHRLVQMRTRIMNQLHALAMNEGYRWKKKLFSELGRAQLEKLALGPWASLRRRELMELLDRLNPTIEELTVAVEREARKRPEAMRLVTHPGVGPLTALAYVLIIGTPTRFQRGKQIGAYVGMIPCEDSSARKQRLGHISKQGNSLLRFLLVEAAQAAARTNPDWKRRYIHLAMRRSKSIAKVAMGRRLAVRLYWMWRNGCEYSPSLEFGSYAGQLGIGNGVK

SEQ ID NO: 395707 - protein, 339 aa, unidentified
MKEVTTIGLDLAKNVFQVHGVDRAGAVVVRRALRRSQVLAWFAKLAPCLVGMEACATAHYWGRELQKRGHEVRLIPPAYARAYVRRNKNDPADAAAICEAVGRPSMRFVAIKTEPQQAVAGIHRVRELLMKQHTMLRNQLRGLMAEFGVVAAKGRRGLNELLAILCDPEDRCIPSPLRAGLIAIMETLQAVERKLEGIDRQMVAAGRADATCRHLVTAPGYGPLLSSAMAALVIDPGAFRRSSDFAASLGLVPRQDGSDGKVRLGPISKRGNGYLRRLLVNGATSLIKAQHVRQDPWVAKLLASKPRKVVAVALANKLARIGWALMTRQEDFRGRAVAA

SEQ ID NO: 395708 - protein, 500 aa, unidentified
MKKRVYSATDIMHVDWQRILTSRGAAGQEAVVGVDVGKLEMRAVLRWADGTFERPWSVANPDQIGALVDRVGELARRGGHRVRVAMESTGTYGDALRQALADAKVEAHLVSGKRAHDYAEVFDGVPSQHDGKDAAVVAELCALGKSLAWPWPAAPDEQVGQLMFLVDQLEVATRAKTQWVLRLEAMLARHWPEASRVLKPGGGTMLRALVHYGGPAALAADPDAAATLQRWGTRWLDGDKVTRVVASAGATAGVRQGATDVARVQWCAQRGLEAHREAGRCQAKLKRLGAAHAAIAAQGAVIGIPTACVLWRHLGDPRRYHCAAAYRKAMGLNLKERSSGKYQGKVKITKRGPGACRRWLHLAALRQIRDDHDVRAWYARQCGRLGKGKGKGKGQGKGKGKGKGKGDDNAGSSSSSSSSSSGRLRVVTALVRKLALAMWVVGAGRGTFEVERLLGLPPRHRGKQRAGQAAAAAAAAAAAAAAAAAACGKGGIAAIAVATR

SEQ ID NO: 395709 - protein, 394 aa, unidentified
MFFVGIDIGKLSHMFCILDASNNEVIVKPVSFNNDKLGFDFLMDQLKSYPKDHLLIGMEDTGHYHFTLLKFLLDSGFSVALINPVTTDLTRKIQLSSTKDDDLDTLTICDVLASNQRRKSYRISKIDSFDLYEQKRLTREHHDLKEQLNIYTNRLQKCIDIVFPEFNSLFRSKYGSIYMNVLKTFGSADSIAHADIRNIRKCFEANRKGRRISLTPEELKEAARNSIGFPSKAEVIELRHLIDIIELINVQISEVDKKIEEFSVQNNSPILTIPGISHFSGTSILAELGDLRNFSKVSQVIKFAGVSPSKYKSSQFEAQHTAITKKGSRYLRKTLYQVILPVIRYNPVFNAYYHHKLSQGKGHRCAQGHCVRKLLRIIYHLVTTDQSFDPKLLR

SEQ ID NO: 395710 - protein, 349 aa, unidentified
MLADELDFVLGVDTHRDVHAVGVVEVRSGVVVFEATIAADSGGYTEALRLAQRHAPGRRAFAVEGTASFGAGLTRFLAERGEHVFEVGRLRRERRSGGKTDALDAVRAARSVLTQKRPSLPRSTGEREALRALIAAREGAVTAKQAGLNQLRDLLVTTPEPLRAELRTLTQARLLNRLVATRPERRRDPELRGTMLALRALARRVQSLTIEERQLAREIEKLIRKLAPQLLEQPGIGALLAAQVVLSWSHPGRIANEAAFARLAGVAPIPASSGQTIRYRLDRSGDRKLNRTLHLILNTRKRTHPPTIAYIERRIQEGKTRREATRCLKRYLARHLYRLLEHGPPIATT

SEQ ID NO: 395711 - protein, 345 aa, unidentified
METMYYIGLDVHKKTIDYCVKDGSGRIYAAGSIRATRLELDMWMKTLPRPWTAAMEATIFTAWIYDHLQPHAAAVKVAHPLMLRAIAVAKKKNDRIDAKKIADCLRCDFLPECYMASTEIRERRRTLRYRNLLVRQAVQMKNKIAVLLMEAGVSYNKQKLHKVGYFRELLATNPDIDEGLKPLLRLCRETVVRLGKTESALVRSLERDSLLVERVERLMTIPAVGPITALTWALEVGDVQRFSSIKKAISYCGLCGAESSSADIIKRTPLSKQRNKHLQTVLIEAAKMAPRNSPELAMVYEQEKQKGNANRATLAVARKMVAYLVAVDRRQKGFLVVENENRTAA

SEQ ID NO: 395712 - protein, 338 aa, unidentified
MKYSGIDLHSNNCVVVVSDESDRILVTRRVPNSLPLVLQVLDSHREELIGVVVEATYNWYWLVDGLQAAGYRVHLANTAAIKRYEGLKRSGDEADAAYLAHLLRLKLLPEGYICPKPLRALRDLSRKRLQLVRSRTQHILSVENIQARESGCRMNVKQVKQLDAQSVQAMPGLLPEVKLALRANVAIIGELGKQIDKLECCLHERVRLSEEFKLLKTTPGIGETLATTIMLETGTVSRFAQVGKFSSYCRCVDSERVSNGKKKGEGNVRNGNAYLAWAFIEAANFARRHCPEAKRFYERKKARTNNIVATKALAHKLARACYHMLREQKPFEVKRCFS

SEQ ID NO: 395713 - protein, 387 aa, unidentified
MPASGSRPDQVAVQVSLAAIFVSLELSRSTWLITSLVPGGREKMSKHSVRGGDIAGLLNHLTKVRDKAHARAGASFPIITIQEAGLDGFWIHRVLDRAGIESHLVDAASILTSRRRRRAKTDRIDGEALLRTLLAYKRGEPRVCTIVRVPSPEEEDRRRLCRERKTLVAERVAHVNRIKGVLFAQGISDYEPLRGDRRQRLEAQRTGDGHPLSPHLKAQIGRELDRLELLLEQLKAVEAERNALLEPANDAAPVAVQALAGLRGIGPEFTAVLWSECLFRSFRNRRQVAAYAGLAPTPWQSGSVRHEQGVSKSGNPRLRSTMVQLAWLWLRHQPTSGLSLWFRERVKRDSGRSKKTTIVALARKLLVALWKFSSSGVVIEGAMMKTA

SEQ ID NO: 395714 - protein, 337 aa, unidentified
MEYYAGLDVSMEETHICILDREGVLIREGKASSTPKMIAAFLADGPICTKVVFETGRMAPMLFHGLSGLGVPVVCIESRQAYQALKSLAGHKTDRNDARGLAHLARTGFYKPTHVKSLSAHAIRSLIAARKKLVGQRVTIDNQIRGLVVVFGVRLPRALSPAFKDAALKVSDGVPGLHAALRGLFAAREAILTAVAAIDSDIKAMTRKSKICTRLMTVPGVGPITALAFAAAIDDPTRFRRSRDVGPYLGLVPKRHQSGEVDYIGSISKRGDVRVRTLLYEAANVMLTRYAAPLKLKSWALAIGQRSTMRKARVALARRLAIILHAMMRDQTDFQAV

SEQ ID NO: 395715 - protein, 349 aa, unidentified
MKIIGCDFHPGYQQIAMLDKNTGEFTEKRLSHSHEGEAAKKFYSELAGPVLVGLEASGQSQWFERLLAELGHELWIGDAAKIRASTERKQKTDRRDAELLLQLLEEKRFPRIWVPTPAERDARQLLLHRAKLVRVRTQVKNQLQALALNQGVQRKWKLWTAVGRKQLENLPLLPWASRRRAELLKLLDELDGSITALDGAVCQEAHTRPAVRRLMTHPGVGPVTALAFALTLGPAKRFRRGKEVASYFGLIPKEHSSGGKQRLGHISKQGSSFVRGLLVEAAQSAVRHEPQMRREYQRLSQRRCRALAKVAIARKLAVRLYWMLREEVDYAQLLQGSDAGQPESFRGRS

SEQ ID NO: 395716 - protein, 337 aa, unidentified
MTKKHTQTTLDVSIEYSAIGLDLAKYDVSLAAVTLNEGEIICIDRVTYAELYELADKLSPTLFAVEPCCGYSQLAHELEARGHEVSVINGKVVKMWIDTHMSGQKTDINDALALARLTADPDLRPIRAKSLEECRIMTVQGVRQQLIGQRTKTLVSFKGFAQTWGIHMPAGRRNLKKMREAVEAKADMMGDAAVSALTTMLDRVKTLDDQIHQLDKDLEALVSANANGRLLKSVMGVGTQIAARFITVVGDVKRFETSRSLVAYIGCVPKNYITGHVNKPRQKKSSAPDLSSKGQGRISRRGDKLLRSLLMQGAACIYMQYCKRQLPDCQLTKWIDK

SEQ ID NO: 395717 - protein, 437 aa, unidentified
MIQAEIERCAGIDVGKKWLAVGVLVGPLDREPRAETRRYGTNVADLEQLRDWLQQQGITHVVMESTGSYWKPVFNILEETLTVYLANPQQVKPRKGHKTDNRDGHWLAHLLRHAMIQPSFIPPRPIRELRDLTRRRKKLIAAGSSEKNRIQKVLEDANVKLGNVLSDVFGVSGQRMREALLEGHAGPEEIARLAQRRARQKIPALVAALQKHRLSEHHRRMIRFRVEHMELLERQILRLDEEIATQIRQIGLARQWELLQSIPGVREDSAATILAETGADMQAFGDAAHISSWAGVCSGNNRSAGKNKSSPTNKGNPWLRGTLTECAQGAAKTKNCFLKEKFWRITAKHGGKRAAAVMAVAHNLLRLVFQVLWTGQPYQERSAGPLEPRQRERMIRHHIRRLGRLGIAVRGPEPAPRRPRRCTTITTKGIARLPASS

SEQ ID NO: 395718 - protein, 390 aa, unidentified
MIYVGIDIAKLNHFASAISSDGEILMEPFKFTNDGDGFSLLESNLTSICDDKDNIIIGLESTAHYGDNLVRYLVASFYKVCVLNPIKTSTMRKNNIRKTKTDKVDTYIIAKTLMLQESLRFVTFYDLDLMDLKQLGRFRQKTIKQRTRLKIQLTSYIDQVFPELQYFFKSGLHQKSVYALLKEAPTPKAIASMHMTHLANLLKVNSHGHFTKEQAKELRVLAQKSVGASDSALSIQITHTISQIELLDSQLEQVEAEMTDIMKFNDSVIMTIPGIGYINGGMILGEIDHVHRFSNPNKLLAFAGLDPSVYQSGNFQARRTKMSKRGSRVLRYALINAAHNVVKNNATFKTYYDKKMAEGRSHYNALGHCAGKLVRIIWKMMTDNVEFNLD

SEQ ID NO: 395719 - protein, 465 aa, unidentified
MEVRVIRRLVGVDLGIASAHTVRVLTEDGREVCRRRCEPTVDSLRRVETAALAGAPAGTVLEVVMEPTGPAWLPIAVFFTARGHRVFRVSSAKAADLRRFLSRHAKSNGIDADTLARLPLVDPAGLHPLELPGTEAAALDRRVRATDRLTVLAAQHKVRIKDLTRQLLPCSPLTGDLGVADLAVLERWADPRALLAAGPARLTALIVKASNGHLDADRAQQWRAAAAAAVELYGDHPAIAWTDLAAEVGTEVRLLRATLGELAAHARERETAYRYADLGGLARSLPGVGDVGGPVLVAGMGRPGRFPNGAAFKSYTGLAPRAAETGNTDRKGQPMSKAGSSLLRTTLIRAADTARKQDPQLARIYYTQMVERGAEHLKAVCVVAGALAERIWTVMNRQMPYVICDIDGTPVTPEQAKQIIAQNFTVPDEVRRRRRSSKTPSRKPAQQPTISSKGGRPPSKPHTAA

SEQ ID NO: 395720 - protein, 375 aa, unidentified
MKEKLRFLGLDVHAETIAVAVAEPDGEVRSLGTIPNRAESIRKMIRKLGLAEKLRACYEAGPTGYVVYWQLAEMGVPCEVVAPTLVPVKVGDRVKTDRRDAEKLARCYRSGDLTAVWVPDEGSEALRDLVRAREAAKQDQMRARHRLSKFLLRSGQRPPAGVRPWTRPYLIWVAQLRFTQIAQEATRQDYLHEVEHMRERVARLEQAIMEAVKAASPALQQVINDLQALRGIADISAVTIAAELGQVSRFDSARQLMGYCGAVSSEDSSGKRTRRGGITKTGNAHLRRIVVEAAWSYRRPPCIWYGLRRRQESISEAAKEIAWKAQHRLHKRYMRLGAAGKDQRKIVTAVARELLGFIWAIGTRAETISSQQVAA

SEQ ID NO: 395721 - protein, 468 aa, unidentified
MFQLGIDVSKKTLDLCLLREGVKGRVKTRKLQNDINAVSAVIAWLSKQHCKPEDVHIIMEATGVYHESLAYGLHKAGGRISLANPHRAREFARGMGMLTKNDRVDAYMLACYGVLKAPEPWLPPPEEVRHLSALLRRRDALVADSTREKNRLEKYLATDTPSVIAESVEAMIGQLNAEIKRLDSLIRSHLNQHPELKKDFDLLTSIKSVGYQLGLNMLVILRSHDFATAEQAAAFLGVVPVEKYSGTSVRGCPKLSKIGPPEIRAKLYLASLCGLRFNPLMKAMYERLCLRGKAKMCAIGALMRKLVHWCYGVLRSLNDQQLDALQCWYPDDGIHIRYQTPGGQMEDIAFASPGQKGASMLQFLLSYGTDPLLLDQPEDDLDCLMLSMSVIPAIMSNKKRRQLIIVSHSAPIVVNGDAEYVISMQHDRTGLYPGLCGALQEAPMKALICRQMEGGEKAFRSRYERILS

SEQ ID NO: 395722 - protein, 454 aa, unidentified
MKKEDQKKIPEETVKKKRFSQGLPVLNPFAAGIDIGDTKHDVAISDGVSGHEVREYPTFTEDLTDLVNWLVSEGITTAAMESTGIYWLNLYLMLEEAGIEPYLVNAKHVKNVTGRKKDDTDAIWLQKLHCCGLLQKSFQPEGEIRTLRAYVRQRRNLVSISSDSIRRMQKALELMNIKLHTVISDLLGKTGLQMVNAILSGVRDPEELILLKDSRIKASDADIKKSLTGIWKEEYLFMLEQAYQEYRFYQSQILKCEERIKDILLTHAAKVLDGDITGLTVKKKKPRKNEFNYAIRPLLKIIATVDLCKVDGISEVSCLELIAETGTDMTKWKNSKHMAAWINVAPNTKITGGRIISSKLQKKKNHAGQTLRMCANSLKTCKSPLGDYARKMKSRLGKRSGVVVAAHKLARIVYTMMKEHVEYNPQIIANDHEKWKENRIKYLEKQLNQLKKVA

SEQ ID NO: 395723 - protein, 406 aa, unidentified
MTVVMIGVDPHKGSHTAVAIGSDEEPLGKVRVRASVTQAQRLVTWAADWPERTWAVEGAGGLGHLLAQQLVAAGERVLDVQPKLGSRVRLLATGASNKNDPNDALSVAIAALRTRTQRPVTADDHDAVLRVWSRRHRDLGRAKNQVACRLHAVLCELVPGGVPEEITAAQATRILERSTPSGAAGQARGELAAELLDDMRGLDTRIRESKKKLAVAVRASGTTLTDLFGVGPVVAATVIGDTGDVNRFPSRDHFASYNGTAPIEVSSGNRKINRLSLRGNRRINHAIHMAAITQIRHAHSDGRAYYDRKLAEGKTHKEALRCLKRRISDALYARLRADARQAAETPVAGPGGQPGNDSDSSAAGSHPVSRLFGQATPEPSLTLRPATTPAKRTSPTPTPKKTRRSP

SEQ ID NO: 395724 - protein, 346 aa, unidentified
MHYIGMDCHISTLDFAVVNEAGRLVKAHRVATSVNGFMEFVKAVPPPRAIFMEEGTLAAWALETCVRFREKLVITDAKKNHWIGSSGQKDDSIDALKLAQLARGGYIKEIHHPVGQRRRFRELMIAYHDTVISTTRIKNKIKAKFRQNGIRCAGATVYSKTYREEWKGKLPQEATLLLILDGLWRQLKQSEQTEKELLAAARAQAKQYLEIKLFKDIPGIGFIHAATVSAILENPYRFANKRKVWMYAGLGIMTRSSGGKTYSEKLSTDYNRLLKYTLKQAAEATIQAKDNPFRRKYLDMTLLHGIAPHRAKLTIARDMLATMWAMWRRGEKYSPEIREKAAYKQG

SEQ ID NO: 395725 - protein, 356 aa, unidentified
MIKDSIVFVGLDLGDRWSQLQVLDQEGEVVEESRLPTRESALRRKFTTTGRWRVAMEVGTHSPWVSRLVKELGHEVIVADARKLRLIYRNPRKNDRIDAEYLARLARLDPQLLSPVHHRRPETQADLALIRSRDALVRGRTMLINHMRGMAKSFGKRLPACSADSFHHKVREAMPQPLQPALEPLLDTLGEMTERIRAYDRQIEDLCQSRYPETKGLRQVGGVGALTSLAYILSLEDPARFRKSREVGPFLGMVPRQNQSGGADPQLRITKTGDVYLRRLLVSSAQYILGPFGPDCDLRRWGLSLAERGGMNAKKRAVVGVARKLAVLLHRLWVTGEDYQPLRQITPATQPALTVN

SEQ ID NO: 395726 - protein, 399 aa, unidentified
MPANLRPHSNRCFAASEQPVLYLALELGWDSWKLGFAPGPGPAPRLREMPARDVTRLLLEVAEAKRRLRLPADCPVVSCYEAGRDGFWLHHCLLTHGIQNLVVDSSSIEVNRRQRRAKSDRLDAAKLLSMLLRYAGGETTLWSVVQAPTVEQEDARQLHRELLTLQQEATEHTNRIKSLLATCGLAIEIDRHFPKKLKELRQWDGRPLPEALHQRLLQEFERLQVANRQARQLQQQRAKEVREREDSTAIEQVRKLLGLKGIGIRSSWLYVHEFFAWRKFKNRREVGSLAGLAPTPYSSGQTNHEQGISKAGNKRMRWMAVEIAWGWLHFQPDSDLSRWFHARFGRGSSRQRRIGIVALARKLLVELWKYLQTGVPPAGAVMADWRPKAIMTTRSLKVA

SEQ ID NO: 395727 - protein, 324 aa, unidentified
MCKIIGIDISKQTFDVCFKTQGKLEHKIYANNLKGFRSLKKEIGNGSIVVMEASGPYYVSLASYLHQYRIRVSVVNPLIIRRFSQMKFYRAKTDKKDASIILEYGIAEQECLTFWKPESPGVQALKQMHTTLELLQKQLTQSKNQLAAFKSSGIVNKEVSKSLARVMVTLEKAIAGLENQMLIVCKKHYAQSLKLLTSIPCIGDKTAMMLISITDDFTKFEHYKQLIAYVGFSPRIYESGTSIRGKGHICKMGKSQIRKLLYLCTWTAKRYNKACKEMYDRLHVKGKLERVIKIAIANKLLKQAFAVATKKQEYIENYQPNICF

SEQ ID NO: 395728 - protein, 398 aa, unidentified
MTESSDYESVQVFIGVDVGKDTHHAVAINRSGKRLFDKALPNDGNKLRSLISDLKQHGQILLVVDQPATIGALPVAVARSEGVLVGYLPGLAMRRIADLHAGEAKTDARDAAIIAEAARTLPHALRTLKLADEQIAELSMLCGFDDDLAAQTTQASNRIRGLLTQIHPALERVLGPRLDHPAVLDLLQRYPSPEKLASLGEKKLAAQLCKLAPRLGKRLAADIAQALAEQTVVVPGTNAAAVVLPRLALQLITLRKQRDEVALEVEQRVLAHPLYPVLTSMPGVGVRTAARLLTEVACRAFASAAHLAAYAGLAPVTRRSGSSIRGEHPSRRGNKALKRALFLSAFAALRDPLSRAYYTRKMSQGKRHNQALIALARRRCDVLFAMMRDGTFYTPQAS

SEQ ID NO: 395729 - protein, 414 aa, unidentified
MDVVYTQCAGLDVHKKTVVAAIIVPDGQGGLHKETRTFGTMTVDLLALSDWLMGHGVTHAAMESTGEYWKPPFNILESNFEVMLVNAQHVKAVPGRKTDINDAEWLADLLRHGLLRASFIPPVGQRELRELTRHRSNFVRERATLVNRVQKVLESANIKLASVASDVMGVSGRAMLAALIEGHASPAEMADLAKGKLREKREQLVKALEGRVKPHHRFILTELLCQIDNVEEAVSHFDEQIQLLCVPFEVAIALLDTIPGVARQTAEIIVSEIGIDMSRFPSAAHLAAWAGVAPGNNESAGKRRSGKTRKGNQALGVALNQAAHGAAHTKGTYLSAQYHRLAGRRGKKKAILAVAHSILVIAYHLIKRQEPYRELGGDYFDQRRPEATAKRLVKRLQQLGYEVVIQSQPANVAT

SEQ ID NO: 395730 - protein, 371 aa, unidentified
MGEGTTYVGLDAHQETIYAGMLVPGSESPVEDRFENTPEAIRRWARRVRSKAAGDVVCGYEAGPLGYGLLRELEGLGLRCVVIAPALIPVRPGDRIKTDRRDARKLALLLRAGLLTEVHVPTPSQEAVRDLTRARGAVKEDQTRMRHRVSKFLLRRGIRYGLGRKAWTGQHGAWLRRQRFEHDADQVVFDDHLLALEQIEGRLSALDTKLEAFAQQAPYREPVGWLRCFRGVDTRTALAVVAELHDVRRFASAPALMAYLGMVPSEASSGGKERRGAITKAGNGRLRRLLVEAAWHYRHRPAVSASLRIRRTGQPGRVIALADRAQHRLYARHGRLLARGKAHNKIVIALGRELVGFLWAALTPQESAATA

SEQ ID NO: 395731 - protein, 366 aa, unidentified
MRKVMAGMDLHGNNVMVGIVDDQGARLQHRRLACELPEIIEFLDPYKAELESVAVESTFNWYWLVDGLRAAGFPVVLANPAKIDQYSGIKHADDKNDAYFLAELQRLKILPTGYVYDPELRPVRDLFRRRMSLMRQRTTLFLSAKSLHQRTTGRGLELRRLKAMEPEEAAALYTHPANQLIAQIQKEHIDSLDQSIRQIEKAVLKVALQQPYYQRLQTIPGVGIILGLTISMEVGNIDRFAGPGQFASYCRTVDAKRISNGKTKGDNNQKCGNKYLAWAFVEAAHGARRFDATCRRWYDRKAGKKCTTVATKALACKLAKAAWFVMAKGTEYQAGKIFPGLTEPKAEEISGEQASASKGVGPNPED

SEQ ID NO: 395732 - protein, 331 aa, unidentified
MNYIGMDIHKQFTVAVVKDEQGNKLAQLKFINTEESFKNFLQDYKPEETKIVIESTCVWEYIYEILEKNKYEVKLANPSRTRAIAEARIKTDSVDASTLADLLRANLVAESYIPPKEIRRMREITRERRTFVKQNTQIKNKIHAILIKRGIKLEYATLCDKALTWIKQKFPEEKIIMHYLDLLEFQKKKLEEINKIITEKSNNDNNAKLLMTIPGIGSTRAIDLVAEIGEIKRFISSDKLCSYAGLVPSIHQSGNTLRFGGLIKQSCKTLKTTLIEASWNIVRTKEQNHLQEFYIKIARKKGKQKAICATARKLCCVVYVMLEKQKEFRYL

SEQ ID NO: 395733 - protein, 366 aa, unidentified
MLQKAELSGQADSENNLGGSSETMYYIGLDVHKKTISYCVKDAAGCVHGEGKIGSTRRELDAWIRILPQPRMMAMEATIFTGWIYDHLLPHADKVKVAHPLMLRAIAAAKRKNDRIDAAKIADCLRCDFLPECHMASTAIRDRRRTLRYRNLVLRQAVQMKNRVSGLLMETGVSYDKLRLHRMGYFADLMSSSDEIGDSIRPLLKICREHIDRSIKLDTGLLRSLERDPLLTDRLRRLRTVPGVGPITALTWALEVGDTSRFHSIKQAISYCGLCSSEKSSADKMMRTPISKQRNKHIQQVLVEAARLAPRYSEELALLYERERQRGNSNRATLAVARKMVAHMLAVERRNTDFVPAGQFKRTSAA

SEQ ID NO: 395734 - protein, 392 aa, unidentified
MVCVGIDVAKDKHDCFIISSEGEVLANVFTITNNRDGLESLMQRIRSCTCPADKIRVGLEATGHYSYNILGFLLGKGLPTFVINPLHTNLYRKSLSLRQTKTDRIDARTIAAMLMSDVDLKSYTDTAYHNEELKSLTRYRFDKVRERAKLKQSVSRLVNILFPELETLVPSLHMASVYAVLSEFPGAKQIADAHLTHFKTVLTNASKGRYDREKAVEFREVARRSIGSAIPAKSLELQHTIRLIRELDKEIVEIEAAIKAIIDEMAPPILTIPGISYRMGAMILAEIGDFSRFDSPDKLLAYAGLSPSTHESGKLKATGTYAHMEKRGSRYLRYALFNATKFVCNWEPSFATYLTKKRAEGKHYNVAVSHAAKKLVRLIYALQTSGKTFQPA

SEQ ID NO: 395735 - protein, 340 aa, unidentified
MGDITTIGLDLAKSVFQVHAVDAMGSVVMRKRLRRSQVLAFFAEIPPCLIGLEACATAHYCARELIALGHEARLMPPNYVKAYVKRNKHDVADAEAICEAVRRPSMRFVPIKTAEQQSALMMHRARDLLVRQRTMLVNALRGHLAEFGLIEAQGLHKVAKLIAIVTDENDGRVPYIARQVLQVMINHIEDIQVRIVGLEKQLLAWHKSNPVSQRLATIPGIGPIIATAIAATVADPNTFRSGREFAAWLGLVPRQNSTGGKARLGGISKRGDSYLRRLLVNSAHTVLLCSKQAKTDPWLTSLLTRKPRLVAAVALANKTARLAWALMSRQDTYRHAAATA

SEQ ID NO: 395736 - protein, 324 aa, unidentified
MNHRNPNHTQTSSPINVGIDMAKAKFDATWTGLDRVLTFENNAQGRAQFIAKLATCNLRVMVVESTGGYEKRLMIEAMKAGFPVVRVNPGRVRNYANSEGVLAKTDHIDARIIMQFAASKDLPIRPLPDENALKLQEWVAREAQLTKTIVIEKNRLENFDDPALRQIVQASITQLEEQRQAVAAQIDAIIESSEAWAATAELVQTVSGIGPKNARALVAHMPELGQVSRQAIAALAGVAPYHNDSGKRKGRRRIAGGRAKVRSLLFMAALTASQHNPPIRDLYQRLTAKGKCHKVAMTACIRKLLTIVNAMVRDQKAWNPATNT

SEQ ID NO: 395737 - protein, 338 aa, unidentified
MNIQTIGIDIAKNVFQLHGVNRSGHVALKRRVMRDQLLTVLAQIDPSTVVVEACTGAFYWARKFEALGHEVKIISPQYVKPFVRRQKNDGNDAEAICTAARQPHIPFVPKKTVEQQDIQALHRARQRMVNHRTAVVSQIRGLLLDRGFAIAKSITRARRAIPEIMAGQDNELTAMVRDAIAELYDLFRDLDRRIGLFDKMIDRIFHESEACQRIARIKGVGPKTATAIVAAIGDGSEFKNGRHLAAWVGLVPRQFSSGDRKVLMGISKRGNQHLRSLLVHGARAVVRTAPRKTDLNNQWVNQLRERRGFNRATVAVANKNARIIWAVLRTSEPYRAAF

SEQ ID NO: 395738 - protein, 414 aa, unidentified
MERMVERAAALDVHKRQVTACVHVPDRKGKRSELRAEFSTMTPDLLALRDWLLGLGVTHVAMEATGVYWKPVYYLLEDDFELLLVNAQHVKNVPGRKTDVKDAQWLCQLLEHGLLRSSFVPPKPIRELRDLTRYRKSLVWERAREANRLQKVLEDANIKLACIASRPLGASGKAMLKELCEGNNDPVALADLAKGKLRAKLPALRQALEGRFREHHALLVSHLLAHIEYLDETIGQLSEEVEERMRPFERQRELLCTIPGVAERTAEVIIAELGPDMNRFPTHRHAASWAAICPGHDESAGKRRSGKTRKGDSWLRTALIEAAQSAAGRTRETYLHSQYLRVKRRRGHKKAIVAVAHSILVAAYYILRDEVPYEELGGDYFIRREDQERLTQRLVRQLERLGQSVTLKPALEAR

SEQ ID NO: 395739 - protein, 422 aa, unidentified
MKPPPEQPAPDWLVHRAFGGLDWASQKHNVIVVDPHGKVLEDFEIEHSALGWKKFRERLAPYGAIPFAIETSQGTAVEQLLEAGMKVYPINAKSAKSYRERKAPSGVKDDRLDAWSFADACRIDGQGWRALRPEDPLVKELRLLCRDEVSLIEQRTSFICQLRHALAEYYPTALEAFEDWGSVSAWMFVQRFPMPQLLQVAGKRAWEKFLHARHLWRTESGPRRIELFSHATELSGTVPMANAKSQLALSLISMLFALEKQLGIYRKRIDELFGRHPDHDLFGSLPGTGPKLAPRLLSEIGDDRERFEDGPQALQCLAGSAPVTRRTGKCKVKANPDRWPCHQRWACDKHLRHAMHLFSEHTLRQCVWAQIYYQHHRQKGSSHADALRRLTQRWLKIIYRMWMDRTPYDPMLHHHNQLKHGS

SEQ ID NO: 395740 - protein, 420 aa, unidentified
MSKSNIASQIVQDQPGTLHVGVDLALEKNVAIVINEKRQRLDRFNFPQDRGGYAYFVQRLKGLCQKHRASGLVVAMEPSNYFWKLLARELEAQGISYRLVNAYTVKKHREGNQLDRSKDDRRDADQIAELSRTGHYTETHLQKGSYEELRQYVTLYDQLIRGLRREKNILWGLVGQVFPELSQVFRDLSRETAQALLRTGVASAVIRNLRAEEFLAQVRTGYGGKRLLVSKLRRVHQLATTSIGVSEGLQALHLAIQVHLDQLQAFQKQLERVTSAMTACLTPLPAACYLLSLKSIQPVSAAIFLGEVGDPCRYHTSAQWVKLAGIQPAPNTSGKKQRSSTPMSHQGRARLRTMLYFTCLRLVHQEEAFTQLYLHLQRRPHNPLTKMQALGVLMNKLLHVLWALIQNQTFYNPAILQSGG

SEQ ID NO: 395741 - protein, 392 aa, unidentified
MIYAGVDIAKFDHVIGAVDETGAEAAKPMRFKNGEDGFERCVAWLESVAESEDDVFVGMEATGHYWMACFAYLSAAGYKVCVVNPMQVRAMRKLKGLAGVKNDRIDSWLIAETLRQGDYDETRLATDDVQALKRLTRYHQGLKQELATVKTQALCVLDAYFPEYAALFSDAFGAASLRVLAECPTPAEVGRRRASTIARLLSDGSRGRLGDGKAAQIKAAAKSSVGIRLGERAASFQIKTMVTQVEFLNATIAKVEAEVAALLARVEPNITTIPGVSTATGAQIAAEIGDVGRFKNAAAVVKYAGLNSGVSESGTFSAQGVPITKHGSPYLRRALWLAANRARQHDPKLRAFYEKKRREGKPHRVAVTAVARKLCHVVYAVMRDREPYDPGK

SEQ ID NO: 395742 - protein, 379 aa, unidentified
MSRHRNGAPVEAELAMVLLVFELSKATWKIGVMRPGSQKLSRYTVEGGDVAAVATLLEKIRREIGSQVRIVSAYEAGYDGFWLHRWLEAQGVESRVLDSASIQVNRRARRAKTDKLDLDQLMRVLAALERGEPKVCSVVRVPSLEGEDLRRLTRERGRLLRERVAHTNRIKGLLFGQGVRDLEPLEKCFLDELGEARTGDGHALTPKLVAEIRREHQRLKLLVEQIADVEAETRSLAKAPEPASTPAKAVQLVRLKGVGPKSAWPLATEVFCRHFDNRRQVGGYFGLDGSPYNSGASRREQGISKAGNPRARALAIELAWLWLRHQPNSTLSRWFFERVGTVKGRIRKIAIVALARKLMVALWRYLETGVVPEGAVLSA

SEQ ID NO: 395743 - protein, 339 aa, unidentified
MKLYGAIDLHSNNNVLMLIDRHDKVRFQRRLPNDAAYILETLHPYRLQIQGLAVESTFNWYWLVDALQEAGYMVHLVNTAAVKQYEGLKFTDDASDARWLAHLLRLGMLPQGYIYPKEERAVRDLLRKRAQMVHQRTTNVLSIGNLLQRNTGSSLAGGRIKRLTEETVDEVLPETDLSLAVKCNLRVMQCADEQVAELERVVLERVKLKPAFKYLRSIPGIGRILALTIMLETGDIGRFPNVGNFASYCRCVESKKLSNSKKKGEGNRKNGNRYLAWAYVEAANFAQRYNPRIRRFYQRKQAKTHPVVAIKTVAHKLARASYYIMRDQVPFDMAKAFGG

SEQ ID NO: 395744 - protein, 362 aa, unidentified
MPTIADAGQARLVTGGVDTHAEVHVAGMVDQAGRVLGTREFPVSAAGYQAALAWMRGHGELVKVGVEGTGSYGAGLARYLAAEGVEVTEVIRPSRQARRRRGKSDAADAVAAALAALNGEASGTPKSGDGAVESIRALQVARRGAVKARTQAGNQLRALIVTAPEQLRDKLAGLTTPQRVTLAARFRPGGLTSPAEAAKAAMAAVARRHQVLTAEIAELDISLEALARHAAPAGFLARAGVGTQVASILLTTAGDNPGRLRTETSFAALCGSSPVDASSGKQRRHRLNRGGDRQANSALWRIVFTRMACDARTQAYVARRTAEGKTRKEIMRCLKRYVAREIYKALVTQARNPAAGIPLTPA

SEQ ID NO: 395745 - protein, 338 aa, unidentified
MKSNMGTPVSVGIDVAKATLSVSICDHDGHEQALAIRNTDTDITTKVLPYLRHYSGKVVMESTGHYHWTPALVLREAGIDIRIVNPLLAKQYTSGTIRKVKTDPADARGLARMAAVCDNLPETFTVSRARLIIRKKLATISTMGRHLQALKANLASLREGQVLLDEVDTPVVAELAESIRQLGISLKHLEVECVQLTESDEASLEIMKRLETIPGVSLFCATLATNWFDINTATSAKSFIGYAGLDISSRKSGTWKGHCRLTKRGNPFLRKRLYSAAWGAVMNYPEYRAYYDKLKAGGRGHKEAVVIIARKLVRTMYCLFRDGVSYDSAKVSFPNRII

SEQ ID NO: 395746 - protein, 360 aa, unidentified
MGKRLSKKESWFKENVLTAQDEIYVGIDVHKDQYHVAIWHNGRIGCIYSMSSDNNKLLQDLHRIRNCLKNVVYEAGPTGYGLVRLLRSAGLPSEVVATSKTPRMADSAAKTDRLDCQQLAEYAAKGLLTFVAIPTEQQEADRQVVRLRDQLISKRKRVMQQIKGFLLQYGIAWPGGGWSKAVLCKLRKMDIGSELRFTLYQYIDEYEFLSSKIAQTNSRLRRIFGSKRHSAAIKIFKSHPGVGNIVAWEFRAEMFDITRFRQPKQISKYIGLCPKISQSGKTCRQGPITKTGRRQLRAILVQAAWAWYRKDPHARQIYNRLLHNTGNGKKAIVGLAKRIAIHLWRMRCDGCLYDAGVVKA

SEQ ID NO: 395747 - protein, 341 aa, unidentified
MNHYVGIDVSLEASSLCVVDANGKIVREGKVVSEPDALIAWLRGLRLELARIGLEAGPLSQWLYAAMRQAGLAVELLETRHVHTALETMPVKSDRNDARGIAQLMRLGWFRSVHCKSMHAQETRALLTARKLLQTKLHDVELSLRGILRGFGLKVGPTTPARFEERIRELVAGHPSLEVIADGLLAVRDALRRGFDRFERQVRDAARCDTRVRLLMSIPGVGAIVSLTFTAAIDDPARFKSSKQVGAYFGLTPTKYQSGETDIDGRISKIGDASVRAALYESAHLILTKPLKGCTALKSWAMKIARRSGMKKAKVALARKLAVIMHRMLADGTSFRNAAAV

SEQ ID NO: 395748 - protein, 415 aa, unidentified
MQTLFQKVAGFDIHKKVIVACVRITSDGGRVKQETKTFGTMTDDLIALFDWCRSHGVTHIAMESTGVFWKPIWNLFDNGSFELLLVNPKELKQVPGRKSDVKDSQWIAQLLACGLLRSSFVPERPQRELRDLTRQRAQLHGEHTRCVNRIHKVLQDANIKLSSVATDVMGVSGRDMLAALITGNLDPDEMAELAQGKLRAKIPDLKRALTGKMTDHHRFLLEQYLDHVAHLEQQIEIFSERIKKALRPFVDEALMEVLDEIPGVNVEMIENVIAEIGVDMSQFPTAGHLSSWTGVCPGNETSAGKRKKSGTTKGNTWLRRALCQAAWGASRTKNSYFQSQYRRLAGRRGKKRAAVAVGRGILEVFYVLLSNRELRYRDLGGDYFDKLDPERLCRHLVKRIESLGYDVDLRLNSAV

SEQ ID NO: 395749 - protein, 347 aa, unidentified
MQFYTKSHTHYCGIDLHAKTMYLCILDSEGNVALHRNIPCDPEKFLRAVAPYRDDLVVAVECMFSWYWLADLCAREGIAFVLGHALYMKAIHGAKAKNDRIDSKKIAALLRGGLIPQSYVYPAEMRATRDLVRRRTHFVRHRGQLLAHIQNTHHQYNYASPGKRIAYKSNREGLAEGFDDVAVRTSLTTDLELVDYYDAIIGNLELTVLRQARGHDRDAYERLKTIPGIGKILALTILYEIHDIDRFPRVQDFASYCRLVKCQSSSAGKIKGTSGAKMGNAHLKWAFSEAAVLWLAKCPEGKPLVDRLAKKHGKGKALSILAHRIGRAVYFMLKRKRAFDLARFLKA

SEQ ID NO: 395750 - protein, 312 aa, unidentified
MGGGFVGIDVSKDRLDVAFRPGGEHLQVGNDPRGMARLVRMLERSQPQLVVLEASGGYEAALFERLSAKQLPVALLNPRHVRQFARASGRLAKTDAIDAKVLAHFAEVMKPEPRRMADAETRKLRVLVARRYQLIQMMTAELHRQSHSLAALREGFVATIRCFKKQIASIDKQLATLIQETPALREKAELLRTTPGIGVVASATLLARLPELGTLDRKKIAALVGVAAFNRDSGKLKGKRAIWGGRSDVRGVLYMSALVAVRRNPPLRDFYRRLRQAGKTPKMALTACMRKLIVILNALVKHRTPWALAASC

SEQ ID NO: 395751 - protein, 350 aa, unidentified
MIIIGVDFHPEFEQIASVDTESGEFEEQRLQHREEAERFYRELGSRGVAVRVGMEASGHARWLEDLLKELQFELWIGDAAEIQTKRVRKQKTDRHDAQLILKLLLEDRFPRIWVPSADNRDLRQLLWHRHRMVQARTRIMNQLQAVALNEGLRCKKKLWRERGRQRLESILLLPWASRRRSDLLQLLDRLSPTIAELTHAVEQEAQKRPEARRLMSHPGVGALTALAYVLIIGDPERFRCGKQVASYLGLVPLEKSSGRRRRLGHITKQGSSMLRFLLVEAAQATVRSDPNWRNKYFHLVMRRGRKTAKVAMARRLAIRLYWMWRGGREYEQQIKFGSHAGQPGNRYGVQ

SEQ ID NO: 395752 - protein, 427 aa, unidentified
MNENELSRLREFRQLKKQIQGSETHLIVGIDVAKDRHHAFLGTATGRTLVKKLIFENSASGFSELLARVEAVRAQSGLSGVVYGLEPTSNYHKPLGSYLISKGCHVVLVGGKAVKNNRELLDERWDKHDTKDAVNIADLVSRGKCFYYDVPSGQIEELRGLLSLRARLKKEEHSLNLRIRNNLLAKHFPELDHFYPACERETLAIVRWCLNPQQIAAMPFDEFFKQVAPNARGIGQKLRLQKIHRIAHESIGCPVDSAVQLQAGLLVEKIKQVREQIVQVEQGIQQRCVQFPSYEHLLSIPGFGPYVASKVLATVADPRRFDSAKQVIRSAGYDLCAERSGKSSDQAVPVISKKGNSELRYALYQAALIASSRHRYFMAYFAKMLQGRERERGIRTKMRVKLAAKMLVIAWTLMKRGESFNPEYLKV

SEQ ID NO: 395753 - protein, 336 aa, unidentified
MALYCGIDLHSTNHLVVIIDDEDRRVLEKRLVNDVSITVNTLTPYRDQLAGIAIESTFNWYWLVDGLQDAGFVPCLANPAAIKQYAGLKYTDDPYDAFFLAHLMRLGILPTGHIYPREQRGVRDVLRRRLSMVRMASRLLLAVQSQIWRSTGINISNNCIRRPDFELPLPPGPVCEGAAAQWRLFQQTQVEIHGLEKLALDLYQGEEYYQLLQTVKGIGVILGLTIGLETGSIQRFKKAGNYASYCRVVKSERISNGKKKGQNNRKAGNKYLSWAFHEAAHFAVRFEPKVQRFYESKRQKKGNNIVAIRAVAHKLARAVFHMLKKHEPFDVDRAFG

SEQ ID NO: 395754 - protein, 365 aa, unidentified
MEMYNSKTKYHCGIDLHKSSAHICVMDKEGNIMLHKNIRDNNFVYMKKVLSPYIDDLTIACESTYNWYPLADFCRSENIEFTLGHALYMKSIHGGKAKNDKIDSKKITDLLRTNLLPHAYACPPDYRAHRDLLRRRIKLVQSKSGISVYMNIFEQQNDLKESTLHMRSNTDKLESLVEYQDFSGIGGVAMERNYQLNTNLLMAYTEELIAVDKDLKEFTLNSAYNEEFEIVKSMPGVGDTLGMVIIYETHDIKRFKSPGKYSSYCRVIKCKKESAGKSYGYSGAKIGNPFLKWAYSQAAVLSKRNPLMKAFSHDLIRQHGERKARAIYTHKICRSIYFMLQRKQKFDPIDFFGRQKYERLQRLNN

SEQ ID NO: 395755 - protein, 337 aa, unidentified
MPVPGMLGIDTAKDELVAKFVEAGARKGKWEMAVPNAPKGVLQLLQNTPPGVPWVIEPTGRYSIAPVQQALAAGQEVLLAPPRKAKAFLNSLQDRAKTDRLDAQGLALFGLSRDASVPLLPYPIKKAHVDELDQLLSARKGLSRARSSLALQAKELPYARPVLAASLKEIDAQIETLDKQIEAATKQHADFEAVQRIDAVPGIGPVTAAAATARLAAKEFKRPDQWVAYLGMDIGVIQSGKRKGERGLTKQGDAELRRLFYLCAQSTLRCKESPFKAQYERELAKKLSKTAAICAVARKLAKLCWSLYTHGTSYDPERVYQQPAPDPATGSGEQAPG

SEQ ID NO: 395756 - protein, 353 aa, unidentified
MKRENAIKQSVGIDCGKIELVCSIGVMNHEFEEEIISNKAFKNTPDGFKKLKEWAKKLSDNSVEMIYVIEATGVYHERVSLYLYNEGCKICVMLPNKVKAFSQTLSVKTVNDKTSAQAIAYMGLEKKLDLWQPPHEVFNKLKQLTREREQLIEERTICKNQLHAEESGAWPNKGSIKRIKQRIWLLDKQVNEVESEIKEIVCQHQWLQEKLEYVCSIKGVALITAVTIVAETNGFNLIRNKKQLVSYAGLDVISKESGISVKGRSKISRKGNKYLRKALHFPALVAVRHNEQMKALYSRLVSKHGIKMKAAVAVQKKILELVYILWKKEELFDLEYFKNKGQQTSVATLCELA

SEQ ID NO: 395757 - protein, 403 aa, unidentified
MYNAVGIDVSKGKSTVAVLQPGGTIVRKPFDVEHSISGLKELRDYILSLDGDTKAVLECTGRYHEPILHSLSDAGIFVSAVNPHLIKNFGNNSIRKVKSDPADAKKIARYTLDNWAELQEYSSMDTTRTQLITLNAQLDFFTKQKASAKTNLISLLDMTYPGVNELFSSPARSDGSEKWVDYAASFWHVDCVRKIGLKSFAERYKAFCQREGYNYSEARAKELFEGSKELVAVFPKERSYKDLIEMSIKQLRTITESTVCIKNEMNELAATLPEYSTVMAMCGVGKTLGPQLIAEIGDVSRFSHREAITAYAGVDPGVDASGKRVNRSNRASKCGSSRLRKTLFLVMSVLLKTKPDDAVYRFLDKKRSEGKPYNVYMTAGANKFLRIYYGKVKAALAAQAKSE

SEQ ID NO: 395758 - protein, 354 aa, unidentified
MIIIGCDYHPGFQQIAFVDTETGELQERRLEHREEAEKFYRDLAAQRMGVRVGMEASGHARWFERLLSELQFELWIGDAAEIRTKRVRKQKTDRQDAQLILQLLLEDRFPQIWVPSWENRDLRQLLWHRHRMVQARTRIMNQLQAVALNEGLRRKKGLWREAGRKQLESFALAPWANRRRRDLLELLDRLNPTIAELTQAIEQEVEKCPEAQRLRTHPGVGPLTALAFVLIIGRADRFQCGKQIASYLGLVPAEESSGERRRLGHISKQGNALLRFLLVEAAQVTVRSDQEWRSKYFHLAMRRGRKIAKVAMARRLAVRLYWMWRKRWDYEQLTKFGSHAGQPGTGDGVQLNTE

SEQ ID NO: 395759 - protein, 314 aa, unidentified
MILSLCCIGIDVSKQALDIFEEAIGTPERIANTPEAIAERIARWHDRDVFVVFEATGVYDRTLAAALARSGIRHTRINPSRARDFARASGRLAKTDAIDARMLAAYARAMEPAADPAVSQIRNALALLAKRRDQLVHMRAQEKNRFSEEQDLTMIKRLQRHLDFLSDDIKAIEDEIQELVRTDPAITEEARLMRSAPGIGPVACMQLISQMPELGRLSPKQIAALAGLAPFNVDSGGHRGKRSIAGGRKRVRDALYMAALNAVRKNGPIKRFYDRLRAANKAAKLALIAVARKLLTVLNAMIRDRKTFVSTPTT

SEQ ID NO: 395760 - protein, 425 aa, unidentified
MNKAKKKALVTGNVIVVGVDIAKKKHWARIYNPVGLDVVKPFPFQNTREGFYRLVSKIMEAQQKEQAERVVVGMEPTGHYWKPLAWFLQQQGYTVVMVNPYHVKKSKELDDNSPSKTDRKDAGTIAALVQEGRFLNCILPRGVYAELRTLYTAREQERSKLNGALNRLQAFLDEYFPEFPIVFKNLLGMAAWWILRHLPLPEDILRLSTEELAEHLKVASNHRVGGKRAQALQEAARNSIGVTAGLAGARVKLSVILDEIEFTNTQLQRIEAALAQALEATGLASYLLSIPGIGVITAAGFLAEVGDLSHYEHWRQLQKLAGLNLVEDSSGQKKGTRVISKRGRRGLRNLLYQASLVLVARNKEFKALYHYLLTRPENPLRKKQALVAISLKLLRVMFTLAREKRLYDPQKALGNYRLGQLQQAA

SEQ ID NO: 395761 - protein, 348 aa, unidentified
MKQSSKVFVGMDVHKDSIDITLAEQGGEVRRFGEVGGDRTALLKAVRKLSSRGGELVFVYEAGPCGFWIQREITALGRVCWVVSPSLIPQRPGNHVKTDRRDSENLARLARAGELTPVHVPDVRDEAIRDLVRARDDAVIAQRRARQQLKALLLRNDIRYVGKTSWTSAHLRWLSELKLAQPAQQIAFQEYVDAITVATGRIERFEQAMRGIQFVHAMTLVAELGDLTRFASPRQLMAYLGLVPSEDSSGQRRHQGSITKAGNAYARRALVEAAWAYRHPARLTRIIALRQDALPKQACDIAWKAQLRLCAKYRRLRARRVLETKIIVALARELSGFVWAIGQHVKPQ

SEQ ID NO: 395762 - protein, 410 aa, unidentified
MDVIYERCCGLDVHKRTIAACLIVPAMGGAPQKEIRTFGTMTEDLLELTDWLAQAGCTHVAMESTGVYWKPIYNLLEATFTPLLVNARHIKSVPGRKTDVKDCEWIADLLRHGLLRGSFVPERPQRELRELGRYRTTLVRERSAEVSRLQKTLEGANIKLASVATDIMGKSGRQMLKALIEGSTDTTEMAQLARGKLRAKIPQLEQALRGCFGAHQRFLIAQQLAHIDFLEETIERLSAEIAERMRPFGEAIERLETIPGVGRRTAEAILAEIGPEVSRFPTYKHLASWAGMCPGNDQSGGKRRSGKTTKGDPWLRAALVEAAHAAGRAKNTYLSAQYRRLASRRGKKRAAVAVGHTILVIAYHLLQRSCGYEELGGDYFDKRDRQGVERRLVRRLEGLGYKVSLDPVAA

SEQ ID NO: 395763 - protein, 343 aa, unidentified
MEEVTIIGVDLAKNVFQVHGAAADGEVVFRKKLARPQFARFMSDHPACEVAMEACPSAHHWARELSAYGHSVRLIAPHYVKPFIKRQKNDAADAEAIAEAATRPTMRFVEPKTAEQQARAVAFRAREQIVKQRTEAINALRAHLYEFGHVAPEGVGYIPRLAKVVDDPGSGLPDLARDICRMVLEQIELLTSRLAAVSAKLAAASRAAAIPRQLQTMPGVGPITALAVETFAPPMDQFRRGRDFAAWLGLVPRQHSSGGKQRLGKTSKMGQRDIRRLLVTGAMAVVRWALRRGAPQNPWLVRMLERKPPLVAAFALANKMARGIWAMLTHDEDYRDPVIACAA

SEQ ID NO: 395764 - protein, 318 aa, unidentified
MKEKLFVGVDCHKNTIACYVEGKFKEFSTTKKGFEQALKWAPKDCNWAIEGAYHFGLTFAAYLISKGCKVYEFNALSTSKARKIYSVSGEKSDYMDAKVISKVASDPEIRLQEVSLATIELKRKISKRDLYVKQRTGVINNVKAGFVQEGINPLYKDFTTKRAIQWLLKQEDSEKRYAGKILETLNEIISQLEKEIEELTPEKAKRLTKIKGISTLRACTIYASTRGKKMSKAQFASYSGVAPVRNESGLKQGHRNNHRGDRRLNSVIYSVSICQSKYDPIGSNYYLKKLQEGKTKRHARKCLSRMLCNQIWKILFMD

SEQ ID NO: 395765 - protein, 392 aa, unidentified
MYIVGIDIGKNHHEASIVSPEGKQIGRSLRFATTHKGADSLMSFIFKNIGNSPCVFGMEATGHYWYPIYSFLKAKGYTIYVINPIQSDSLRKMYIRQTKNDSIDSFLIAEVIRFGQFSTTSMADENILAMRQLCRYRDSVISSRTEIKLRISTIMEQIFPEYEKQFSSLWLSTSMGILEKYLTPENIQNAPLDGLYGIIKDKSHNRLTMDKALSIKEAAADTFGIKIAQEAFSFQLKQLIDRMHFLDQQIEALDCQILGYYEKFDCYLHTISGIGMIGAATILAEIGDTKRFKSSSALVAFAGIDPTVRQSGEFNSIHNHMSKRGSPYLRHAIFLAATTCSFHNSPLNAYYKKERDQGKHHLTATGAVARKLTTVIYAVLRDGKPYEPKKFC

SEQ ID NO: 395766 - protein, 343 aa, unidentified
MKYERIAVDLAKKVFQVCGVNEHVKPQFNKKLTRKAFFEFMTHQAPTTVVMEACYSSNFWGRILLDMGHTVLLIPAQHVTPFVRGNKNDRNDALAIAEASKRPHIRFVPVKTEYQQEISALHRIRERLLKQKIAVSNQARGILSEFGVTFNTGKAAFISGMCVFVKDEKYSLLLRTMMAELLNEYNQLDKRLDNIKAHLTAFVQNNPYGAILLSIPGIGFIVASALIAAIDKGQMFKSPREFAVWLGITPQQYASGNSNRMGGISKRGDRYLRKQLIHGARAVLSHHKNKTDQISLWAGGLLERKCYNKVVVALAHRIARLVWILLQRKTLYVPQMVTETTGE

SEQ ID NO: 395767 - protein, 315 aa, unidentified
MTEKDERFVGIDVSKQTLQVCVLPDSVQRCFDNSPSGQLELRQYLASVGPQLVVLEPTGGYELEPLCALWQSAIPVAVVNPRQIRDFGRALGKLAKTDLLDAELIARYAQTVRPPVRPIPDEESQQLQALVVRRRQLVETRATEQARKHLAKGRVRASIESLIAYLSAQMDELDDELQKLVESHPALHKNDEILQSVQGVGEVTSAMMIALLPELGTLNRKQISALVGVAPLNRDSGRKQGKRQVWGGRAAVRAGLYMATLAATRFYEHRSSYLQALRQRGKPFKVAMVACMRKLLGVLNAMLRDGRPYNPQLQT

SEQ ID NO: 395768 - protein, 344 aa, unidentified
MKIVTLGIDLGKNLNSVVGLDADGRVVLRRRVRRATLAELAHKLQSCTVGMEACCGAHHVGRLFAAHGHEVRLMSPEYVRPYVRAQKNDDNDAEGIAEAATRPTMRFVELKSRERLDLQTVHRVRSRLVAARKSLLNQLRAILLERGRTFRQGRMVLAREIDALLAAPPSDLSSSILSILAEIRAERRALDLRIDALNDRLTEHARADEAASRLTSIPGIGVLGATALVAAVGDGEAFRRARDLPAWLGLVPRQMTTGGKPRLLGITKRGNRYLRMLLIHGARAAMPGLSKQATPLGQWLRGLLARAHRNVAIVALAAKLARIAWATLRREMRFEPIPAGAAMA

SEQ ID NO: 395769 - protein, 373 aa, unidentified
MDTIYIGVDFHARQQTICYLKTETGELVTCELQHEDKEKVRAFYAQFSGHVIVGLEASGYSPWFEALLEQLGCEVWLGDATEIRRRARWRQKNDRRDAELIWDLMHHNEFPRLHRPAVQSREVLRMLRYRQKLTKLSTMSKNSLQAIALQAGLAKGSRLFTKAGQQELNAAVMSPVMQWQREHWLELLEPLNQQLLETMTWFKAQTKDDIRITRLRTHPGLGLLTSLCIVHTLEPVSRFRNQRKVAAYAGFDPVERSSAERKCFLGISKAGSRVLRYLLVEAAHTAIRKDEDLKCFYKRLADRRGRPKAKVAAARKLLIRAYIMLRDEIDYAEFRRRAVAARLARGGQRPNVPAVLIGQPASTERQEPTHSEK

SEQ ID NO: 395770 - protein, 337 aa, unidentified
MTIIRVGLDTSKHVFQIHGVDEHEQPVLRRQIRRSEVEKVFAKLPPTAIGLEACGASHYWARVLRGLGHEVVLLPPQYIKPYVKRGKNDAIDAAAICEAMSRPGMRFVAVKSAEQQAALMLLKVRDLLVKQRTMLINAIRGHAAEFGLIAATGPVKVAELLQQAHSEAAGVPALARALLGVLSGQLEALEVKLKALEAWLMAWHKADPVSQCLATQPGIGPIGAVSFALKVTDPKGFRSGRHFAAWLGITPKEGSTGGRCRPGRISRQGDEALRKLLVLGATARIRFAKPGSASPWLINLLARKPKKLAAVALANKMARILWAMMVSGETYRHPKEA

SEQ ID NO: 395771 - protein, 343 aa, unidentified
MKSTTIALDLASTTIEVAVSNHPGRVRERHRLSRKRVLPFFRKQEPAKVLMEACGSAHYWARAIRELGHEVQLLPPHAVRPYVTRNKTDRADAKGILEAFRNEEILPVPIKSPDQQALAAIHRLRSAWITTRTARLNALRGCLREFGILIPLGARKVAPHVRLALEDAETPIPDLLRPLLAHTLAELEEIEQRIHLAERALVSVEKTHPDVERSRSIPGVGPMISTAIAAFVGDLRRFPSARRFSSYLGITPKENSTGKTRRLGAISRRGDPYLRSLLIQGAHSMLWRAHLKKDPDRVLRWALEVQQRRGTNKAAVALANKMARMIWAVCTHETTYHKEATAS

SEQ ID NO: 395772 - protein, 349 aa, unidentified
MAVTIVEEARAITGGVDTHADVHVAAALDPIGGLLGAGEFPATAAGYARLLGWLGGFGTVCLVGIEGTGSYGAGLARHVTAAGVRIAGVDRSDRQDRRRQGKSDPLDAVSAARAAQSGRARGASKGRDGSVEAIRALMVAKRSAAGERTRTNGQARALVLTGPDDLRARFAAHTPAALVAGLGSLRPRPGGDVAGHATRVALRELGRRAQFLDSQLERPGELIVPLVTAHAPGLLALYGVGPNTAALLLIAAGDHPGRLRSEAAWAHLCGAAPIPASSGKVTRHRHCPGGDRQANHALWRIVFTRLGSDPATRAYAERRTAEGKSKAEIIRCLKRYVAREVYRYLRPGG

SEQ ID NO: 395773 - protein, 347 aa, unidentified
MRFYTTQHPFYCGIDLHARTMYVCILNQAGETLVHRNMPATPEALLKAIAPYREQIVLAAECMFTWYWLADLCAEHGIPFILGHALYMKAIHGGKAKNDKIDAHKIAVLLRGGMLPQAYVYPAEMRATRDLLRRRMHLARKRGELLAHVQNTNSQYNLPAIGKKIAYKANRDGVAERFADPAVQKSIEVDLALIGYYDALLRDVELSIVKTAKHHDANTLYLLQTVPGIGKILSLVLLYEMHDIERFPRGQDFASYCRLVKCARESAGKRSGTSGNKIGNAHLKWAFSEAAVLFLRDNPAAQKFLARLEHKHSKGKALTILAHKLARAIYYMLKRQTAFDLDTFLRG

SEQ ID NO: 395774 - protein, 325 aa, unidentified
MNASELSFIGIDVSKDSLELAMDDKGKTQYLNNDETGIAKLLTAINSVGGNVGAVVFEATGGFERLAAVALCRAGLPVMVVNPRQARDFAKAMGYLAKTDAIDARVLSHFAHMLYQSDRREQLLMKLPDANQEALQALVTRRQQLIQMRVAEDNRLALSNKSQRKSIEAVRKVLNKELARIDHDIDGQLKEHFAEKVALFQGFKGIGAGTQASMMAALPELGSLSHEQIGKLVGVAPLNCDSGKQKGKRITWGGRADVRSMLYMATLSAMRFNAVIKPFYERLLAKGKPKKVAIVACMHKILTILNAIVKSNKPWDEHHFVPKTA

SEQ ID NO: 395775 - protein, 421 aa, unidentified
MGLKKIDYAAWIGLDWGSYKHALCLQPADSREVEHYILEQKPEALHGWFMNLLARFGDRTMAIAIEQTRGAVIHFLLGLESVHIFPIHPKSLKNYRDAIQPSGAKDDPTDAELLLQFLMLHQDKLKPWIPDQPDVRLLLRLVEFRRKMVGKRVRLTNELTQLLKEYFPAALDCAGDLDKLMACDFLSKWPTLEKLQKSCPATIRRFYQEHNARSRDVIEDRLEQIRSAIPLTTDTPVIEPSVFLVQSIAPQLHSVIEAIMRFDQRIKEVFQKHPDAQIFSSFPGAGPALAPRLLAVMGSDRSRFNSSQQVAEYSGIAPVTERSGKSKWVHRRFACSQFVKQSFHEFAGQSIRYCHWARGYYDQKKSEGKRHHAVIRALAYRWIRIIYRCWKDRVPYDEGKYVKSLRQRKPAWLESLPISES

SEQ ID NO: 395776 - protein, 360 aa, unidentified
MNQIIRIGVDTSKNVFQLHGVDEREQPVLRRKLRRRDVLTFFAKLAPTRVGMETCGGSHYWARELRALGHEVALLPPQYVKPYVDRGKNDKADAEAICEAMSRPKVEKRFVAIKTIEQQSSQMLIGVRESLLKRRTQVSNMIRGHAAEFGLVTPKGLAHLEPLLDRIEEDPGLPELVREMFAMLVGQYRHVSAQIREIDAKLLELHRANAMSRRLAQAPTIGPVTAAALVAKVSDPRLFRSARDFAAWLGLTAKDHSTGGKTRLGAITRAGDETLRSLLICGATSVIQQVRRNPEGAPAWLVSLLARKPPKLAAVALANKTARIAWKMMMTGEPYDPHRHAASREAGVVDAVEAGAVALA

SEQ ID NO: 395777 - protein, 310 aa, unidentified
MKTPLPIYYGLDVAKATLRLCGPDLPGGDLPNTAEGHAALLARLPAHAHLVCEATGGYERAVVAALQQAGRAVSVINPRCTRAAAQGGGQRAKSDAIDAAELAAYGRRYTPAPTVQLSPARRRLQELVARRAQIVAARTVEKNQLEHLRDAKVRRQAERRLRTSARDLVQIDAWIEAALAAETTLAAHAARLQQLEGIAQTNAATLLATLPELGTVNDRKAAHLCGVAPFIRQSGRWDGQRHIAGGRAAARTALYMAALTAIVRNHRLKTFYHRLVAAGKPKKVALVAVMRKIATLLNRLLRNPDFHLAD

SEQ ID NO: 395778 - protein, 351 aa, unidentified
MIIIGVDYHPSFQTIAFLVEETGEYGEQELNHSDGEAERFYRELKRRGVSVRVGMEATGHAGWFERLLAELGFELWIGDPAEIKTKRVRKQKTDREDARLMLKLLRENRFPKIWVPSPENRDLRQLLWHRHRLVQMRTRIMNQLQAVAMNEGYRWKKKLFSEKGRALLEKLSLATWASRRRKELLELLDQLDPKIAELTAALEQEAKKRPEVLLLRSHPGVGPITGLAYVLIIGTPDRFPCGKKVGSYTGLIPCEDSSAGRQRLGHISKQGNSLLRFLLVEASQAAARRNPDWRRRYANLMMRREKRIAKVAMARKLAVRLYWMWRNNWQYSQFVEFGSNAGKLGHVHGVK

SEQ ID NO: 395779 - protein, 427 aa, unidentified
MDRDTVNWNERTVFVGFDWASDPFEAQGRHHDVIVVDAPGEMVEDFRFEDTAEGWKQFTQKLRRYTPVVVAIETSSGATVERLLEAGYAVYPVNPHAAKRYRERKAPSGTKTDRLDAWSLADALRLEGNTWRPLKPNDPLTAELRLLCRDEIALIEQRTAFICQLRAALGEYYPAALEAFDDWTLPSAWAFVEAFPTPEALLKAGKRRWEKFLHVHKLYRPETYEKRLSLFAQAQTFCGSPATTQAKSLLALALTAQLRVLQIHLDRFRDRIQQLFTQHPDHDLFGSLPGTGEKLAPRLLAELGDDRERFDSPQALQCYAGTAPVSYQSGQIKKARCRRACQKGLRQTVHLWANLSRAKCPWAEAYYQKKREEGQGHASALRCLGQRWLKILWKMWQARKSYDAELHQRNQVRHGSWVIALMPAPNA

SEQ ID NO: 395780 - protein, 345 aa, unidentified
MDIMYYIGLDVHKKTISYCVKDASGQIHQEGKIGATRCELDCWMKTLRQPWTVAMEATIFTGWIYDHLLPHAAQVKVAHPLMLRAIAAAKKKNDRIDAGKIADCLRCDFLPECHIASTAIRDRRRTLRYRHLLVRQMVQMKNRVSGLLMETGVSYNKQRLHKVGYFRELLSSHQQVQESIRPLLKLSRDTIVRLQKTEYALVSSLQRDPLLADRVQRLKTVPGVGPITALSWALEIGDVSRFRSIRQAISYCGLCGEEKSSADKVMRTPLSKQRNKHIQRVLVEAAKLAPRQEHDLALVYQREKEKGNANRATLAVARKMVAYLLAVDREQRDFVPAEDHRRAAA

SEQ ID NO: 395781 - protein, 337 aa, unidentified
MKDIIYDHYIAIDWAATNMAIARMTKKSNKITAIDVPSDIVELQFYLKNLKGTKILAIEETNTSQWLYTELLDYVNKILICDPHRNSLLSEGPKTDKIDAIKLVQLLKAGLMKEVFHSTDKFIYLRRIVSGYEDLIKAGVRVQNQRYALLRVCGKSGYEKKDVQLSSRDDQYVLESLDRQIQNYVEEKKGYEKEFTKFSKKYSEISHQKSIPGIGLINAVKIVARIVTPYRFADKGHYLSYAGLIKHEKISGGRSYGKKTPRYCRTMKHVYKSGVFAAIGGNNPINDYYEYLLREKGYPDYQAKHRACRRLAIMSFGVFKSGKRYQPYRKKDLKKGN

SEQ ID NO: 395782 - protein, 344 aa, unidentified
MKKATTIAVDVAQAVLEVAVSQRPGQVASRHRLQRGEVLPFFAQQPAATVLFEACGSASFWAREIEKLGHGVVLLPPQHVRRYRTRNKTDRADAKALLEAFRNEEIRAVPAKTPAQQTLAALHRLRSAWLGTRTARLNTIRGLLREHGLPIPAGARRVVPQTLDWVQDSQSPLSAALRFVLFEACSEVRELDERLHKVEVQLEALAKQTPLAVRLRSVPGVGLLTATAIAGFVGDLTRFPTGRHFASYLGLTPREHSSGSIRRLGAISKRGDTYLRMLLAHGARSVLAAAPRQTHPDRLRSWALELASRVGHNKATIALANKLARYVWAVATKALAFQPKEEAA

SEQ ID NO: 395783 - protein, 436 aa, unidentified
MEEVTDEPLYRDRVCGIDIGKAEVHATIRVPSDTNPERRMSETRAFATTKRGVLALADWLRSWQVPAVVMEATSTYWMGPFFRLEAEGLECVLADAKQVKNLPGRPKRDPSDSSWLAQCFERGAVRACFAATKEFRVIRLHTRYRRDLINERTREKNRAEKLLETAAVKLSSVITDLHGVTGRDIMDHLIAGERDPKVLAQLARTRARAKITELQHALEGAEFFTGHHARLLKTMLERIDQIGAQISDLTAVIEELLAPYEEQLAQAESMPGWGRRSAEDAVAETGADMTRFPTGGHLVSWAGRAPLDKQSGKRKGQARHKKGNTYLGGVLGETAISAGRTQTREGARYRKLARSRGKAKACVAVGNTQLKAYHKLLSNPGMRYEDLGPNYYERRAATRRKITWHMRQIEAEGFDVTLTPREPAPGEGAPSGAQAA

SEQ ID NO: 395784 - protein, 359 aa, unidentified
MINDKYVALDVDSANIVAGVYDEKGKCVIEAQMRPEKKAIEQFLSGLKGRLHVTFEEGTQAGWLYEVIRPLASEVIVCDPRRNKLVHSGNKSDRIDVRKLGELLRLGALRSVYHGEQSLIGLKHLVHAFDRLSTDTTRTRNRFKAVFRGRGIGCRGREVYEKSKQEEWLKKLEIEGLRTRADLLYRELELQVELKDEARKKMCKEARKQPAYKLLIQLPGVGEVRAAQIIAATGSPHRFRTKRQYWPYCGLAVVTRSSGDYEWVGEKTKRRKKPVQTRGLNRNFNRSLKAAFKGAALESIRSNEEFKQYYQRMIDNRIRPEMAQLTVARKLAAIALAVWKRGEAFDPKRVNQAARPDNQ

SEQ ID NO: 395785 - protein, 384 aa, unidentified
MANDSITFIGLDTHKEFTEVAYSLSDRRCNINHLGKIKTNKQALEKLSRQLQSKHPKSTLHFIYEAGPCGYWVYRLLTKLGHACYIVAPSLIPKKPGNRVKTDKRDAIMLTQLLKNGDISPIYVPEPEDEAIRDLSRARERAMTDLNDSRFQLKALLLRNNINYDGKSNWSAKHLRWLTELILPHPCQQIVLQEMIQSINERTSRLARLDSELDYHVKLWRYYPVVKSVQAMKGVRLLVAVGVIAELGDLTRFDHPRKLMSYVGLTPSENSSGGRRHLGSITKCGNSRARRLLTEGAHSYRYPAKVSRELQQRQENLSKEGIDIAWKAQLRLCRRFQKLTHRGKHRSIIVTAIAREMVAYMWSISREVSVRPLNPRDRLVRIPA

SEQ ID NO: 395786 - protein, 414 aa, unidentified
MEDILECCCGLDIHKESIVACLLKGPLGAELKPRSEVREFGTQLKDLVALRKWLEKHECHYVAMESTGIYWQPVYAVLETALSDEMHLLVVNARHMKNVPGKKTDMRDAEWIATLLRAGLLKGSFVPERDIRDLRQFTRYRKALIRDITSQKNRIEKLLQSNGFRLSSFLSDIFGSSGLAIMHQLVQVGSISSQSLDRCLKARARQKSGEILSSLNGTLSVPQRTLLKMQLAHLADLQANLREVEAEIHDGFSQFQGPIELLDSIPGIDLTAAYAILAEIGKEMSAFPTAQHICSWAGLAPGSHKSANKQKRQRVTQGNNYLKTMLCEVAWVIASHKKLYLSGWYWRLKQHTDAKRAVVALARKLLVIIYTLLKTNQPYNEQKFMERKNASEQKRVKRMMNELTKLGYAVSLAA

SEQ ID NO: 395787 - protein, 343 aa, unidentified
MKYYAGLDVSMEETAVCMIDEDGTVVGEAKVASDPTAIAAYLSGWPRVVKVGHEAGGLSPWLHAGLEGLGVAVICIETRRMKAFAKASPVKTDRRDAKLIALAMRGGLYRSVHVKSEAAHKLRLALTARGAVLRQARRLQGKIRGDLKVFGIKLGRVGSGGFAGRVKACLAGDDDLWALIAPLLEARQALLAQVRLYDGQLRRLAHGDATCRLLMTAPGVGPLTALAFRAGIDDPERFRRSSAVPPALGLTPRIDQSGERERCGAITKAGDKLLRSLLFEAANALLTRTRSSFALKRWGLRIAKRRGINRARVAVARKLAIILHRMWRDGTAFRRAADPSAAA

SEQ ID NO: 395788 - protein, 329 aa, unidentified
MEVSQAVVGLDVSKATLAVCHQVGAHLQHLEVANTPAGFRQLVRCGGATSLYVLEATGPYYLAVAYHLVAAGAQVAALNPLVVKRFIQMHLGKGKSDRTDAQWLLRYGQQQATPRWQPEEAALVECRQLEHVIELLIRQKTMVYNALEALQMQPVVNPAARKPLQHILCQLTQQVQELEAKLLTSVELRYAREMALLGSIPGIGRKTAALLLLFAGGFTSFQNHRQLIAKAGLCPREFSSGTSVRGKARITKMGGGLIRSKLFMCSWSARKANTACRELYDRLVAKGKNGKLALIAVCNKLLKQAFAIVTSGIPYQADFAKIKAPTLAF

SEQ ID NO: 395789 - protein, 356 aa, unidentified
MPTQVTKKIDFTGKELFIGLDVHKKSWSVTIIVDEIEHRTFTQPPDPDSLRNYLHRMFPGASYNSAYEAGFCGYGIHRELNSLGIRNIVINAADIPTTQKDKLQKRDPVDSRKIARSLEKGSLHAIHVFDRELEELRTLNRTRFYLMRDLRRSKNRIKSFLQYYGETIPLEFDNNQWTLKFVSWLKQVKMKTTSGQEAFSHLILSYEHHRRQLVDLSRLVRQRIREYDNELYSLLKSISGIGPLTSSALITELGNINRFNNIDQLSSYVGFIPRIRESGETTHTGGITFRCNTFLRTLLIEASWQAIRMDPAMMQYYHKHLVNNKGHKVIIKVARKLLNRIRYVMKNRQPYITGVA

SEQ ID NO: 395790 - protein, 370 aa, unidentified
MLDTTTFVGLDVHARSIKAVSLDVMTGEVRAATFGYDAGAVAEWVRSVDPRARCVYESGVTGFDLQKRLSGLGVDCVVGAVSKMIKPSADRRRKNDRNDAEFLARMLSVGNVVEVLVPDDECEAARDLTRALEDARDDLSRSKQRLSKFLLRHGLAFDERTPTGRRKGNWTRAHWSWIESIRFAEGADNDVLAYYVDAVRRAAEEKARLEGLVEAEARKPRWRKGVDSLRCLKGVDTASAADLVFEAGEFSRFGNARSFAAWVGLTPSEHSSGESDRRGAITKAGNKHLRKALVEAAWHYLTCSGRPKDLAKGQAPDRVARRHAAKGVRRPAERREALLARGVHGNKANVATARELACWVWAVGLMAEEA

SEQ ID NO: 395791 - protein, 421 aa, unidentified
MQQEAHEEFAAFIGLDWADSSHDVCLQAAGSATREYCILTHAPEAIDVWVSTLRTRCNGHPIAVCLELNNGPIVSALRTYDFLVLFPINPLTLARYREAFTPSRAKDAPTDAALQLALLLTHRDKLPPLKPQSPAMRALAPLVAHRRRVVNDRVRITNRLTSTLKNYVPHVWQWFQEKDTSVFCDVLSRWPTLKAAQLARRSPLETFFRDHHVRSADLIGKRLQAIKTATPLTSDAGVIAPHVLFVQTLVSQLRVTLDAIETFDHAIAQRAQSHPDFPLFQALPGAGPVFAPRLLVAFGEQRARSASAAALQQYAGIAPVTERSGKKSWVHWRLQCPQFVRQTFVEWAAESIRHSFWAQLYYQQQRDKGKAHQAAVRALAFTWIRLLSRCWQERTPYDEATSLQALTRRGSSLLQNLAKVS

SEQ ID NO: 395792 - protein, 342 aa, unidentified
MEHYAGIDVSLERSSVCVVDATGRIIREAKVPSEPEALVAFFGQLGLRPTRIGLEAGPLSQWLHAGLAQVGFEVVLLETRHVKAALSAMVVKTDRKDARGIAQLLRMGWYRPVHRKSPPAQEIRALLVGRKLLQAKLRDVELSIRGILRGFGLKVGEVSKGRFAARVRELVAGHEMLEAVIAAMLQARDGLQTEFMRLHRRMLAIVRGDAICRRLMTVPGVGALVAVTFKTAVDDPGRFRTAKAVGAHFGLTPKRYQSGETDVTGGISKVGDAMVRTALYEAANAMLTRTVRVSALKRWALEVARRRGTKRAKVTLARKLAGVLHRMWANATDFRWGKEVIA

SEQ ID NO: 395793 - protein, 391 aa, unidentified
MYFIGIDIAKRHHEACIVDERGMVLGASLRFSNSQAGGQKLLTWIQRHDPELTQSVVAMEATGHYWLSLYTFLRKHGVVAKVINPIQSDAFRNLYIRQTKNDTKDSFIIAEIVRFGRYTTTELADEPIIALRQLSRFWFTIVDHIADLKRQVIAVLDVLFPEYEQLFSDLFGKASAELLMEYTTPEEILELDTDELATLLTKHSRGKLGRSKAEEIQAAAQNSFGIDIALDAFRLQVKLLIQQIKLAEEHLQTLDMAISEQLAKVDTNLVTIPGIGPVLAAAILGEIGDISRFSSGVKLVAYAGIDPTVRQSGEFTGNRNKMSKRGSPYLRRALWLAANAAKKHNPIFHDFYQKKLSEGKHPLTAIGAVCRKLIYVVYAVLRDNKPYQPIA

SEQ ID NO: 395794 - protein, 341 aa, unidentified
MTSIIGIDLAKNTFSVCALNSRGKVLYNKKFSRKKLAIFIKTTEVSFIAMEACGGAHHWARMAETAGHKVKMIHPKYVKPFVKTNKSDEADAHAICEAALRESIVSVPIKQIWAQDVLVLHRVKTRLTKNRVALSNEIRGFLLEYGVSIPIGTSQFKKKVAIILGENPDNLTQLFLGELRDLIVEFDEIQEKLLIVKTKILEFAKSHEICKKLQKIPGVGPMISTAIVAAAGSGSNFSNGRHFAAWLGLVPKHTGTGGKTKTTSISKRGDKYIRSILIQGAHTVVNWAKKNDTPQRKWVNEKLRSKHRNNVAVAIANKNARIIWKILVTGEDYNQSIAYCA

SEQ ID NO: 395795 - protein, 349 aa, unidentified
MHPYFVGLDVHKQIIAYCVKEVDGQLVTEGKIKATRIALAEWVKSLPQPWVGGMEATMFSHWIYVALQPHAAELYMGHAARMKAISAGKKKSDKLDSRTIADLLRCNVFPKCFVISPELGRLRQQLRFRQLVVKQQVAFMNKTAGLLMETGIEYQRRRLHGKQYFSELMATTHWVNQELKPLLKFSRQQIESLAGMDKRLIRMLEKHPQLRARVAALRTIEGVGPILALSWALETGTPERFPSIKDAQSYCGLTSAFWESAGQQKRRPLSKQRNQHLQTVLIEVANLAPLYNEKLKALYQKEKAAGADSNQATLEVARKLVAYLLAVDRLFGDRHSSNARPEPMRRLRF

SEQ ID NO: 395796 - protein, 430 aa, unidentified
MHEMNVNRLEEFRQLKREIRHSQEYLIVGIDIAKDRHHAFFGTATGKTLVRRFVFSNDHEGCRKLLDQAEALRVGHGLKKVVYGMEPTANYHKPLGEYLIALGRTVVVVSGVTVKRNRESLDGRWDKHDVKDSANVADLISQGKCLYYEYPSAELRGLRGLLSLKRRLKKQEHGYRVRIRNHLIAQYFPEMDRDYERLGAVGLSIVRWCCPSSQITELDMEPFIERVTSRGIRMATRRRLEAIWEKAAESIGCEAVPGLDHEAKVMVEGLKQIREVIKETEDKIQELCEQFPEYHCILTIPGFGPDVSAKVLGAIGDPHRFQNGKQVLKMGGLDLSADRSGKDSYNAIPEISKRGKADLRYALYQAALIASVRNRDVMIYYTNKLRGREREKGIHNKMRVKLAAKLLVIAWTLMKKKGAFDPSYLKIEEK

SEQ ID NO: 395797 - protein, 429 aa, unidentified
MGKEDLSRINAFRQLKREIRGSKEYLIIGLDIGKVTHHAFLGTATGRRLRRLVVENSASGFEHLLTMVQFFSDRDNLKKIVFGVEPTSVYHKPLAEFLINNGFFVVYATNEAIKKNRSLLDGRWDKNDTKDAANVADLISQGKCQYYDLPEMNLRDVRSLLLLRKRLMKQKHSARIRIRNNLVAQYFPELDKSWNRFEAENLAIVRWCLSPHEMNKLKFEKFCKMVVPQYRTEKQYERIFKIWAMSPYSIGCQAGLALKLEAKILVEGLRNIKEQIVEVEETIEDICLCFHDYKLLLTIPGFGPYISAVVLAAIGNPFRFQKGKELIRLSGYDLNANRSGKNSNTAVPVISKKGKADLRYALYQAALIASSSNTNFRAYFHKLLKGRDREKGIRTKMRVKLAAKLLVIAWTLMKNKESFDPYYIKLKTS

SEQ ID NO: 395798 - protein, 404 aa, unidentified
MNDSMIGYAGVDWAMDGHAVCVVNGHGTAVIEFDVEHSAEGLSEMCRRIAGTGARRVAIERPDGPVVDALLGAGLEVVVVSSRSVKALRERYGTSGNKSDRSDAFVLADCLRTDGHRWRSLEPDSPATVTLRGHVRARKDLVETRVAVANQLRAHLRIVFPGAVGLFSAIDRPIALRFLERFPSATSAGWLSEKRLATWLRANSYSGSKDPAELYTRLSAAPAGVIGVDGDARGAITLAYVNVLKTLRTQIDELNTRLDELLDAHPDAPIFRSLPRCATVRAATLLAEIGDCRARFPDPESLCCLAGVAPSTRASGRHRVVTFRFSSDTKLRAAICDFAGDSWRGNEWAAHRYHELRASGKTHPHAERILARSWTHIIWRCWQDHTTYDPTRHGAHQRLTTQTA

SEQ ID NO: 395799 - protein, 357 aa, unidentified
METAYDGRQIVGMDLHRRRSVLVRMTEDGRRLGTARITNSPEELRREIGRAGKSPKVVLEATYGWYWAADTLEAAGAEVHLAHPLGVKAFTYRRVKNDVRDAADLADLLRMGRLAEAWIAPPEVRELRELTRYRHKLVHLRTSCKDQVHAVLAKLGIPVTCTDIFGVAGSAWLDGLGLPQPYAGKVTSLRQLTGELTAEITMLSEVIADLLAGDRGCQVIQQLPGIGPVLAAVITAEIGDVTRFRNAGQLCSWAGLTPRHRESDIKVARGHVTKQGSRLLRWAVIEAIQRAPADSVAGAVKAGIISRRGKEARNIAKVAAARRLLTLVYYGLRDGQIRCLHRSPAGPPVTQPPARAA

SEQ ID NO: 395800 - protein, 386 aa, unidentified
MHHPTTLPVSEQTCSREDCATLFVSLELSRSTWVATSLALGSRKMSKHTLVGSDARKLLDLLARLKSRAEQRIAAPVKVVAIQEAGLDGFWIHRLLEANGVESHVVDPASIAVHRRHRRAKTDAIDGETLLRTLMAWQRGEPRVCAMTVPLTPSEEDRRRVSRERATLLRERIRHTNRIRGLLFGQGITNYNPLHKNRREGLEKLRTGDGHPVPVHLKAEILREIDRLELVLRHINEVEAERDEMLRPGQASSPVALLMRLKGIGPEFAAVLYLEGLFRHFENRRQLAAYAGLAPSPWKSGSVDHEQGISKAGNPRLRTTMVELAWMWVRYQPASALSCWFRQRVGSERGRLRRISIVALARKLLIALSRYINHGEIPAGAVVKPV

SEQ ID NO: 395801 - protein, 412 aa, unidentified
MEVIYPCCCGLDVHKKSITACVLWAEAQGKNRKEKRRFGTFTHDLLQLADWLGECGVTHAAMESTGVYWKPVWNILAEQFKVLLVNAQHIKAVPGRKTDQKDSEWIADLLQHGLLRGSFVPPRPTRELRDLTRYRVSLAQEINRIANRIQKVLEDANIKLASVATDALGASGRAILKAMLAGEQDPARLAEMAQGKLRNKIPELKLALEGRMTEHHRFLLRQLFDHLRFTESKLGEIEQEIDKRTRPFADKVTRLCTIPGVDQVTAWGLLAEIGLDMNQFPSSEHLSSWACLCPGSFESAGKRLSGKMRKGNVSLRRCLSQAAWAISMTKNNYLSALYRRIAARRGAKRAIMAVAHALLVIAYHMLKRKEDYRELGADHFDRIDVNRTRRSLVRRLERLGHKVTLEPLAQTA

SEQ ID NO: 395802 - protein, 350 aa, unidentified
MRTVAEEYARVVGVDTHAATHTMTLLIGATGAVVEHRTFPTSAAGLRRALTWIRNRTQDQACLVVVESTGSYGAGLAEHFTQGGIVVAEAPTIPAARPRGKDDAMDSARIARAVLGLRLDQLCWPRAGGTRTAIRVLVSARDQMSTERTKIINALTALVRSVDLGVDARKALTSAQITTIAGWRARDEDPAVAACRREAIRLASRIHALGRDLAANMAELRQFTAAQVPELLDLPGVGPVVAGTILLAWSHPGRVRSEAAFAALAGTSPIPASSGNTIRYRLNRGGDRQLNRVLTTIVLVRMRHDQTTRNYLARRRAEGRTTKEIMRILKRYIARQVFRLLAAAHPTPTA

SEQ ID NO: 395803 - protein, 336 aa, unidentified
MSKKVTLKQCLGIDVSMEKIDCCLSFYTEDLKIKVVATSGYENNPDGFVKLREWLNRKQDNSLALHVNMEATGTYHEEAAYFLAGVGYRLSVIQPTKGKQYAKSLDEKNKTDKIDACMLARMGLERELMPWSRPNEQLRRLKRMSRERIGLIRDRNALTNQLHALNHSFDAFRDSVERLKERVALATKQLGEIELQMRELTDSDPELSKRTKHVITIPGVNFVTAITVIAETDGFANVGNRRQLVSYVGLDVVMKESGTLTWRPHISKRGNAYIRAGLYMAAVSSIIHNKTLKTYFNRLKDNGKPGKTGIVALERKLLVLIYTLYKNGQDYNPDHQ

SEQ ID NO: 395804 - protein, 486 aa, unidentified
MAKGKESTFERLQKGQRLNRREKRELAHRLNAVDPGLEVVNRHAAGIDIGNESPYVAVPAGRGAQPVREFGSWTGDLERMAQWLQSCGIETVVMQSTGVYWMAVYDLLQSHGLQVNLVDARGTKNLPGRKSDVQECQWLLKLHTYGLLRSCFLPPEPIRRLRTVWRLRDQHVKEAGRSVQHMQRALTEMNVQLHNVISDLAGVTGQAIVRAILNGQRDAVQLAGLRDRRIQAREEELVESLRGNWKEDVLFELQQAVEAYDFHQQQMAQCDVRLQEYMAALPSREAPPAEATPEGSVPRGPSRKRRAARPPRKPKGNQPAFALQPELQRILGVDATTIDGIDVMTVQTVLAEVGPDLSAWKTERHWSSWLNLAPKRDISGGRVIRHTREHRTNRVGNAFRMAAQSLLRSTSYLGARFRYLRAKLGGIKAVKAMARHLACLSYRLVTRRQTWVDRGAAEFERRRQEREFAMLQRKARDFGMALVPAA

SEQ ID NO: 395805 - protein, 355 aa, unidentified
MSQEKYIGMDVHQASISAAVMDAQGKVIMECLLETKAATILEFVQGLQGTLSLTFEEGTSAAWLHDLLKPRVSQLVVCDPRKAALLKEGNKSDRIDARKLAEMLRTHQLHSVYHGEHGMRTLKELGRSYLTITQDVTRVMNRIKALYRSWAIPCAGTAVYASRHRNEWLAKIVEPGVRVRAERLYQQLDLLQPVRLQARRELLLESHKHSAVKLLRQIPSIGPIRSALLVALLQTPHRFRTKRQLWAYSGFAVETHDSGEYRSVRGKLQRNRERITVRGLNHNHNKDVKNLFKSAAVSASTRPGPLQDFYAALVSKGMRPTMARLTLARKMAAVSLTIWKRGVSFDPQQLHRQAA

SEQ ID NO: 395806 - protein, 339 aa, unidentified
MELYAGLDLHSRNTYIGIMDKAFNRVFKKRVPNHLELILQTLDPFRDQIKGFVVESTYNWYWLVDGLMDAGYSSAHLANPSAIKQYEGLKHSDDQHDAFFLAQLLILGILPQGYIYPKKGRPVRDLARKRMFLVQHKAAHILSLQSFLQRCCVIKIRANDMRHLTVEELEMWLEEEHLVLSAQANLDSINFLKQKIKRLEKAIIQKVKLDKAFEYLLTVPGIGNILAMTIMLEVGDINRFPKVGNFTSYCRCVPSRRLSDGKSKGQGNRKNGNRYLSWAFTEAAQLGRRHNERFRKYYNRKVAQANTSLATKALGNKLARICYYIMRDQVPFREELFCH

SEQ ID NO: 395807 - protein, 373 aa, unidentified
MIEEIAEEPAELLQRAAALDIGKASLVCCVRVPHESRPGARRQEVRTYDTVTPALLELRDWLICQGVTRVVMEATSAYWKPPFYLLEDDIECWVVNARDVKNVPGRPKTDKLDAVWLCKLAERGMLRPSFIPGRPQRQLRDLTRYRRTLVQERSREKQRAEKLLEDAQVKLSSVISDIFGVSGRDMLAALIAGQRDPYALADLARKSMRAKMSVLRQALTGHFTDHHAFLLGMMLDRTDALTAQIDALTARIEEAIAPFAAQIAQLDEIPGVGITTAQEIIAETGTDMSRFPTPGHLVSWAQGPRVRRPGQSRSHRQGQPLARRHHRRGRRIRRPDPDLSGRPLQADRQAPRQKTRPGCRRQLHPHHHLAPAV

SEQ ID NO: 395808 - protein, 337 aa, unidentified
MDILKQNVGIDISQDKFSVSLIVLTKSMKTKRLFYKDFNNTLEGIEDFYSWSNNKKIEGFDLHYTMEATGVYYEELAYFLYDKNCPVHVMLPNRVKKFIDSFDSKSKTDKIDSELIGIMGVERELPLFKPGSKKVRTMRKLTRERYHLIKEKTMIKNQLHAEKHSVDRLEVIITRMKERIAYIDNQIKLVEKDLRDLTKKDDHLSEKIDLLTSIPGIAFVTAATVIAETQGFTNISSIKQLSSYAGYDVQLRESGKYKGKTRISKQGNSHIRHCLYMPAITSISHSGNMRKKYDRINKNKSSKLIGLTAIQRKLLGLMYTLWKNNTKYDENYMLKAA

SEQ ID NO: 395809 - protein, 338 aa, unidentified
MKVATIGLDIAKQVFQVHGADKSGGTVFRRKLKRNEVVRFFSALDPCVVGIEACGSAHYWARMLGQLGHTVRLMAPQFVKPYVKSQKNDANDAEAISEAVTRPSMRFVPQKSVEQQDLQCLHRVRSRLVACRTQLINQIRGLLAEYGIVLAQHPGQVRRSLPTVLEDGENQLTGASRELFRRLYEELAELDAKVTDADHRIEIAFRNTPACRRIAAVEGVGPLIATAVVAAISNGHAFKNGRQFSAWLGLVPRQNSSGGKNRLLGISKRGDPYLRTLLIHGARSVICRAKSKKDKRSLWIVDKQQRLGTTKACVAVANKNARIIWSLIAREQEYRYAA

SEQ ID NO: 395810 - protein, 343 aa, unidentified
MQIVRIGLDLAKYVFEVHGVDAHGKIVVRKTLRRAAVSTFFANLPPCLVGMEASNGAHYWASVLTDLGHQVRLISPQFVTPYVKSNKNDRNDAEAICEAVGRPTMRFVPPKSSEQLAIQAVHRIRHRLVATRVRLVNQIRGLLSEHGIVIARDISRLRRALAEIVGNRGDDLNDLVRMLIREVQVELIELDRRIAFYDRQVRELYRNSELCQRLGKIEGIGPVTATALIAAVGDRTCFKNGRQFAAWLGLVPKQRSSGGRTQLFGISKRGDRYLRTLMIHGARAALGKAGGKQDPRSRWLGNLRERRHPNVVAVALANKNARIVWAMLASDKFYEPKLSVQAA

SEQ ID NO: 395811 - protein, 349 aa, unidentified
MKVTYQTCCGVDVHKSFLVATIVKTTGGIEPSYQKKRFSTFNNSILEFKQWLLDNDCHDVCMESTGKYWVPVFNLLEDEINVVIANPKWVKAVKGNKDDAKDSKWIGDLFRLGLVKGSYIPCKKVRILREYTRYRYKLVSCRSSEKNRYQNALTVCNVALDSVVSDIFGKSSTSIIDYLLEQSGTSINHEEIASKLLRSLKSKEDAVIESVEGYQMTDAQKYRMRLVRAHMDYITAEINDVDKMIENMISSTPDFDNAVQFLCTIPGVKRDSAITIISEIGTDMSQFSSSKRLCCWAGLTPGSNESAGKKKSVRITRAGVYLKPALVQCAHAAVKSDKSPYYKKKLGIC

SEQ ID NO: 395812 - protein, 384 aa, unidentified
MKKNSIVAVELKKPRHRKRAKGRASQRSRSTPAPQQTIGVDLGDKSSCYCVLDAAGEVQSERTVATTKKGMTQTFGRIGPSRIALEVGTHSPWVSRLLRDLGHEVIVANARRVRAITASSRKDDRMDAQMLARLARVDPGLLCPIRHRGEKAQQHLALIKARAALVEGRTALVNTARGLTKSSGERLASCDTDRMGVHQLEGLPAEMQAVLRPVLEVVEAMTEQIQGYDSQLAEIARSEYPETALLEQISGVGPLIALTFVLTLEDPQRFQRSREVGCYLGLRPTRRDSGESQPQLRITKEGDVYLRMLLVQGAHCILGRRGPDTDLKRWGLKLAERGGKNAKKRAIVAVARKLAVLLHCLWVSGEVYEPLRHSQARAAQKIAS

SEQ ID NO: 395813 - protein, 338 aa, unidentified
MSIVYVGIDLAKNVFALHGVDDLGKAALVRPAVPRAKLHELIASLPPCVVAMEACTGAHHWARLFAGHGHTVRLIAPKFVTPYRMSGVRGKTDAADAAAICEAAQRRNMRFVPIKSEQQQSQLMVHRARQGFVQARTACINRIRGLLAEFGHVLPLKADTVRRHAAGLLEDLPAWANTVIGDLLSELHRLDERIGVYDRHITQIAREDERAAQLMRLNGLGATTATAVVAMIGNGHEFRCGRQFAAWLGLTPGQYSSGGKTRLGRITKAGDGYLRSLLILGARSVLALAKGRSDGLSRWALSVQQRRGYWKAVVAIAAKNARLAWAVLHRGEAFKMPA

SEQ ID NO: 395814 - protein, 344 aa, unidentified
MKVVFPTCCGVDVHKTFLVATIITTPADSLQPTYQKKRFSTFNSDLNRCADWLLEHNCLDVCMESTGKYWVPVFNILEKRGIRVVIANPKWVKAVKGNKDDTKDSKWIGDLFRIGLVKSSFIPDLNIRILREFTRYRYKLVSMKSSEKNRFQNAFTVCNVALDSVVSDMFGKSATAITDYLTSDESFDAEHCVSLLQRSLKKKAEQVLESIEGFSIADEQKARIKIIREHHDFIEEMIATVDTRVNEMVAKYEGNINLLCTIPGIDRRSAITIISEIGTDMGQFGSSKRLCCWAGLTPGNNESAGKKKSVRISRAGVYLKPALVQVAHAAVKDNDHPYYKLKYE

SEQ ID NO: 395815 - protein, 356 aa, unidentified
MISRGYLHVPGIVVGVDTHKDEHVAVVIDKLGVRIGQHNLPTTNTGYVGLEHWASSLGEIDAFGVEGTGSYGAGLARFLRGQGHKVVEVNRPDRSTRRRLGKSDPTDAEMAARAVLAGVARDRPKSGVDKVEMIRMIKSTKDSAMKGRTQAINQMKAIIVTAPGELRAVLRGLTTNQLVARCARWCHGQLGTPTAAAKYALRSLARRHIQLTREIEALDTQLARLTAAFAPALIESFGIGPDTAAAILVTAGSNPERLKSEAAFAALCGVSPIPASSGKTNRHRLNRGGDRKANAALYRIVIVRLRYHDRTRTYFQRRIEEGKTKTEVIRCLKRYVAREVFGILHDIGKRSTAYNA

SEQ ID NO: 395816 - protein, 370 aa, unidentified
MPQSSTLYVGMDVHKESIAVAYVAQEFGAAVVSLGTVGTRQCAIDKLIRQLQSKSKQLVFVYEAGPCGYWLYRSLTTKGHGCWVVAPSLLPKKTGDRVKTDRRDAIQLARLMRSGDLTPVYVPAVQDEAIRDLSRAREDTLHDLKTAKFRLKAFLLRHDIRYTGRATWGPAHLRWLSEVVCPTPAQQIVFQEYVRAVTEQTDRLQRLEQELHEQVTAWRLCPVVDALQALRGVQFTVAVTTVAELGDLTRFDNPRQLMNYLGLTPSEYSSGERRRQGGITKTGNSHARRALVEGAWAYRYPAKVSRHLQLRLEKLPKPIQDVSGKAQVRLCKRYRQLSTRGKNPNQVVVAIARELSAFMWAIAQQVPVTA

SEQ ID NO: 395817 - protein, 381 aa, unidentified
MKKNSIAKLQVTKSQLRRKAAKQRLTVGLDLGDRTSRYCILDEAGEKAGENQLPTSRAGMDAVFAKMAASRVALEVGTHSPWVSRQLAGMGHEVMVANPRKVRLISQSVKKNDRMDAEQLARLARVDPKLLSPIRHRGAEVQADLAVIRARAGLVECRTGLINTARGLVKPMGERLKKCDADQVREALGEGLSEEAQNVIGPLLKSVEEITKQIQVYEQKIEEIEKRYPETKVLKQVSGVGRLVALTFVLTVEDAERFEHSRDIGPYLGLTRKQRDSGESQPELGISKAGDELLRWLLVQAAHCILRRGAPESDLREWGLRKVQAVGGKKGGKTRKKKAAVGVARKLAVLLHRLWVTGEVYDPQYNRKARETAKGKRKAAA

SEQ ID NO: 395818 - protein, 346 aa, unidentified
MTIVGCDFHPGWQQVAVFDPETGEVQERKLANGNGEAEGFYRRLPVPALVGIEACGNTQWFEDLLARLGHELWIGDAAKIRASFVRKQKTDRRDAAHILTLLLENRFPRLWRPSAEERDLRQLLIHRHKLVSIRARVKNGLQHLMLNRGVQLKQKLWNEAGQKALQELPLEGWAARRREDLLKLLAGLNPPIRELDEAVEQAAKANQQARLLMTQPGVGPITALAFVVTLGDVSRFPRGKHVASYLGLIPSEHSSSNRRRLGSISKQGNTFMRMLLVESAQTVNRLDEGFRKQYQHRCHRMKRSVAKVAAARKLAVRLFWMLKTNTAYPEIARIESSPRYGVVGAS

SEQ ID NO: 395819 - protein, 326 aa, unidentified
MRTKLGVDISKRKFDVALLDAQGKFRSKVFANDAAGFSQLMDWIESHVQGGKSEAHACMEATGSYHEALAVFLHDSGVAVSVVNPLRVKRFIESEGIRNKTDNADAKALARFAHKHELELWEAPTLGLRRLQALVLRLQTLQDMRQAELNRLDVAHDSVRPSIQAMVDSLVGAIEEVTAQIKSSIDDDPDLRGRKELLQTIPGLGEKTIPQLLAYIGRPERFSSAKALVAYASLSPMIRQSGSSLNRSRGTHPTGHKELRQALFYPAMVAAKYNPPIAAFWARLKAQNKPGLVVVVACMHKLLAIAYGVLKSKKPFDPAHGTALAA

SEQ ID NO: 395820 - protein, 392 aa, unidentified
MFYLGIDIAKVNHVASLIGEDGSILVKAIKFTNSNEGLQKLIDSISDYDQSQIYCAMEATGDYWLSLFSALTDKDFNVSVFNPYQIKSFRGAYSNRKQKNDVIDSIIIADFLRFNGIDQTCLPNDDLLALKNLTRYRSNLVDNISKAKIQIKGILNKVFPEYSDIFSDTFGDASKQILLNCPTPSEITNFNTRKLANLLKKASRGRHGTDTVRKIKDLAKNSFGIKFTGDACSFEIKQLVNQIIFLEDQVDELDLKIKELYSKLDSHLESIPGVGKVIAPVILAEIGDINNFSTTSKLTAFAGIDPSENQSGNKKSTDEKTSKRGSPYLRHAIYQAAFIASNNDPVMHDYYIKKRAEGKHHYVALAGVERKLLGIIFHVLKENRDYRPPKST

SEQ ID NO: 395821 - protein, 423 aa, unidentified
MADKIRVTEYDVFCGMDVDKRSIAGAFLEWDGRMRQVTLPNNAEVVVKYVSKHYEGKRILFVYEAGPTGYGLYDGLEARGRKCLIAAPSMISRAPGQRVKTNRLDARRLAINLRGGEIQGIHVPSGLYRDLRHLVQWRDVCVREVGRRQRRIKSLLLLEGMDFPAERWSQEAIERLRQQQREARSVVGYKLRALLKSLHVARREARDASMRLRGFSRKKEELNRCMGYLMSVPAIGWITASHFLARVGDWRELEAVKKTCGFLGLGPSEHSTGKRVVRGQITGVGDRRLRAKLIQCAWRGIRVDESLATVFVRIWRTNPPQFARQKAIVAVTRLLVCRLHAVLRDQRYYCESPDHRATRGSFPGTDPAAPQSEGSSGRTHPEARFCRKGSRESAPELGADQTQCDGPRAVQRIPGSLSCAIAE

SEQ ID NO: 395822 - protein, 403 aa, unidentified
MNAVGIDVSKGKSMVTILRPFGEIVIKPFEVKHTSSEMNALISRIKNIQGESRIVMEATGHYYEPIAHALTQAGFYVAVVNPKLIKDFSNNSLRKVKSDKADSSKIARYTLDNWNNLDQYTYMDHLRAQLKLLNRQFHFYIKEKTASKNNLISLLDETFPGCNKFFDSPTRDDGHQKWVDFAETYWHVDCVRTMSLSAFIEHYQKWCKCKGYNFSSNKAKEIYAASKEIIAVLPKDNLTKLLVKQAIEQLNTTSKVVEDIRIQMNETASQLPEYPVVMAMKGIGSSLGPQIMAEIGDITRFTHRGALTAFAGVDPGVNESGEYTQRSVPTSKHGSPYLRKALFQVMDVLIKTTPSDDAVYAFLDKKRAEGKPYYVYMTAGANKFLRIYYGRVKEYLRSLPDTE

SEQ ID NO: 395823 - protein, 338 aa, unidentified
MTQILSFVGVDIASASFMACAGAAPWKVTVKPMQFDNVEDGFVSFLDWLKEHNLTPEHTVVCMEATGVYSEGLAYFLYASGYTVAVEPPLSIQRKFPVNASKTDELDCQYIAEYACRYADKLSFWKPRAEILEQVKVLLTTRQHFSVQLTGHKNALHAASRKQVSSDMAKRLHQEMIEQIGKHIKAIDQEIRRLIDSDPTFKQTLLLLLSVPGVGLQLATHLLIAMQDTSDPKTLAAFIGICPIKHESGTSVYSPPTSRHYGPSVLRKLLYLAACSVRTHQKSFQQYFFRKVAEGKHKKLVLNNIQNKILKIACAVVRSQKPYILNYVSVSPMVLKNA

SEQ ID NO: 395824 - protein, 346 aa, unidentified
MRYSTTVGVDLAKNVIQISVISGRGKELSNRSLTRTKFAEFLGKQKPSLVAFESCASAHYWARAAKRHGHEARIIPAKAVMPFRQGHKTDSNDALAVAEAARRPNIKEAPMKTAEQQGLQAIQRSRELLIGECTALSNHLRGILLEFGVAIPQGFASLLRALPEILEDGDNELPDLYRPTLHRMHQRLLELREDIEAMTREVDILVKQHPVCKRLTAIEGIGPIGALSLYAVMGSGKAFTKSREFSAYLGLTPRQYSSGGKTNIVGISKKVGNRRLRSILIQGARAYVYRRKEPRSLKDRWLKDLIERAGPNRAAVALANKNVRTAWAMVTQGTEYQRRLQLEMAA

SEQ ID NO: 395825 - protein, 343 aa, unidentified
MKATTVGIDLAKNLVQVHGVDERGRPVLRKQLKRNQVLPFFANITACLIGMEACCSAHYWARQLQKLGHTVKLMAPQFVKPYVKTNKNDLADAEAICEAVSRPTMRFVPVKNGEQQAVLSLHRARQGFVRARTAQANQIRGLLAEYGMIIPQGLCQIGKRLPAILEDGENDLPGLFRELLQRLGEHLKELDRQVRELDSQIQLWHREHEGSCRLAQVPGIGPITASALVASIGDAKSFENGRQLAAWLGLVPRQHSSGGKTVLLGISKRGDGYLRTLLVHGARSVLRVAENKANYEASWLAGLLKRRHPNVAALALANKNARIVWALLRHDRNYDPGYQASAA

SEQ ID NO: 395826 - protein, 360 aa, unidentified
MSSMPQPQPSDADEVILGVDTHKDVHVAAVLTALGVLLATSSFPTTAKGYRQLLAWARGFGALHRAGVECTGSYGAALSRHLSSEAVTVIEVNRADRGDQRRRGKTDTIDAETAARAVLSGRATAIAKSGDGPVEMVRMFKLVKASAIKSRGQAINQLKAVLVGTDPALRDSMTGLSNPALFRRCAELNHSNPTDTPSAAAFTLRLLARRILELSSEIDELNAQIATTIEASAPRLLQRYGVGPDTAAALLLAAGDNPERLHSEASFAALCGVSPIEASSGKMHRRRLNRGGDRQANSALYTITIARLRWDKRTQDYVQRRVAEGKTRREAIRCLKRYIAREIYHDITSTRAAPTARSAA

SEQ ID NO: 395827 - protein, 409 aa, unidentified
MNAVGIDVSKGKSMVAIMRPFGEVVASPFEVTHTDSELSKLANSLKSLNGETKVIMEYTGSYYYPIAYALHEAGLFVSTVHAKLIHDYGNNTIRKVKTDKADAIKIANYGLSNWLRLPEYLPEEDIRRMLKAFSRQYSKYGKLKTMLKNNFISLTDYTFPGVNELFTSPPRKSDGHEKWMDFAFKFWHCECVCGLTVKAFTDRYQKWCKRAGYKFSQDKAEDIYASACGHWLALPKNETTKLLITQAIGQINAVSENIAVIAREMKRLAESLPEYPVVSELYGVGDILGPQLMAEIGDVYRYRNKGSLVCFAGLEAPPYQSGKFDSQNRSISKKGSPHLRKTLFQVMDITLKRAPADDPVYQFLDRKRAEGKHYYSYMTAGCAKFLRIYYARVKEYFSKLDSEQEPSEV

SEQ ID NO: 395828 - protein, 343 aa, unidentified
MEHIGIDVHKLESQLCILTESGEILERRIRTQRERFAAMLGERAPAKILIEASTESEWVARCLEQLGHEVVVADPNFAAMYATRSRRVKTDRRDARTLAEACRLGAYRPAHRTSDRQRHVRTQLAIREALVQTRSRYISLVGSALRREGFRVATGNAEGFINRVERLALPGQLRSEIAPLFAVLVSVNRQLEWLDGCLAHLAQSDDTVARLCTAPSVGPVTAAAFASTIDEVSRFRNAHQVEAYLGLTPTEMSSGERQQRGHITKAGNSRMRRLLVQVAVSILRLRSPRTRELRDWTSRVALRRGKKIATVALARRMAGVLYAMMRDGTPYAAAQPKAIQEAA

SEQ ID NO: 395829 - protein, 405 aa, unidentified
MRRVIGIDIHRTFGEVVFWEDGRLRRAGRIDMTRTALEGFGKSLLASDEVVIEATANSMGVSRVLAPFVARVIIANPLQVKAIAQAHVKTDKIDAGTLASLHAAGYLPQIWTPDAATERKRRLATRRYQVVRHRTRLKNEVHSILHAHLIPKCPHADLFNARGRTWLAAQPLPEDERAAIDRHVRELDRLAEDLALLDRQIAQDAIDDPAVKRLMTITGINLTVAAAIVAAIGDIGRFNSPQKLVSYFGLNPRVRQSGLGVAHHGRISKIGRSHARAMLVEAAWASAKTPGPLHAFFVRIRARRGHQIAAVAMARKLTVLCWHLLTRGEDYQWARPALVANKTRAMQLQAGHPQQKGSRRGPAYAYNIKALRDREMLVAAQAERSYERFVAQWKPRRPKIGARAP

SEQ ID NO: 395830 - protein, 316 aa, unidentified
MTVTPVFVGIDVSKERLDVARRPSGDGWAVANDDPGIAALVDRLRELPPALIVLEATGGLELAVTGALAAADLPVVVVNPRQVRDFAKATGRLAKTDTLDAAVLAQFAEAVRPARRPLRDADTQALGALLARRRQLVEMRTAEQNRLGSAPRRVRVEIQAHITWLNRRLARVDADLDQAIRSSPLWRAKDDLLRSTPGVGPVLATTLLADLPELGTLTRQRIAALVGVAPLNRDSGTLRGRRTVWGGRAHVRAVLYMSTLVAVRYNPVLQAFYLRLREAGKAPKVALTACMRKLLTILNAMVKHRTPWEDRFAHSA

SEQ ID NO: 395831 - protein, 345 aa, unidentified
MPYFVGLDASKKTTHICVVDRSGAVVQTGVVETSPKAIAGFLRGQGRRYVRVGAEAWAISSWLYEGLARAGLPIVLIDARHAHGLLKSQRNKTDKNDARGIADLMRIGAYRPVHVKSAASQEIRTLLTARAMLTLKAHDIANFIHGALLGAGLKLAKLQRRTYEARVEALIANNAFLKSLVEPLLRARAAILLERDGIEARLLAAARADPVCKRLMTAPGVGELTALIYRSSIDEPGRFPRSRAVGPHLGLTPRTYQSGDAEWRGRITRCGDGLLRRALVTAAMTSLKKNTRESWLKVWARGVAERQGGMKAGIAVARRLAVVLHSMWVTQTDFRWERSTQAERG

SEQ ID NO: 395832 - protein, 338 aa, unidentified
MRLYAGIDLHANTNYLGIVGEDNKIVFKRKLTNDLRGIVAALEPFREQIEGVVVESTFNWYWLVDGLMDHGYRVHLANPAAIQQYEGLKHVDDQRDALWLANLLRLGILPEGYIYPKQDRPVRDLLRKRLQLVRHRTSHILSIQNIVSRSFGLRMRGNDVKRLDEQWVRDLFEEEHLFLAVNTSVGVMRYLGERIKHIEAVVKSRVKLRREFDGLLTLPGVGDILGLTIMLEVGDIGRFAGVGNYSSYCRCVRSTRISAGKSKGEGNRRNGNKYLSWAYVEAANFAIRNYPVVQRYYQRKAARTNGVVAVKAISHKLSRASYYIMRDQVLYDPNKLFH

SEQ ID NO: 395833 - protein, 373 aa, unidentified
MKDDSTLYVGLDVHKDSITVAYSIGMGDVEVLGKIGTTQIEVDRLCKRLKSKSSNVCLVYEAGPCGYGLHRQLAAKGVSCMVCAPSLIPRKPGECVKTDRRDAIKLVRSLRAGDLSAVHVPTVEDEAFRDLARAWAAARQDLKQARQRLKSFLLLHGVRYVGRANWGPAHRRWISTFSFDSPWQQLAFNEHRRTIEDRLAQCERLEAALREAVVDWRFYPVVLALQAMRGIQFTSAIGLVSELGDLSRFDHPRQLMAWIGVTPSEHSSGGKRRQGSITKTGNSYARKLLVESAWSYRHPARVSVDIQRRQESIPKPIIDRAWDAQQRLCRRYRRLVARGKSEHVATIAVARELAGFIWDIGRLGINLAVPRNS

SEQ ID NO: 395834 - protein, 290 aa, unidentified
MELHTIGIDLGKTVFHLVGLNQRGEVVVRKKFSRKQLLHFTANLQVKLIGMEACGGSHFLGRALRGQGHEVRRMPAQYVKPYVKTNKSDYIDAEAIAEAVERPKMRFVPIKSDEQLDLQSLHRVRERWVMRRTAVINQIRGLLLERGITLRQGRRHIDAALPGILEDASAQLSGAVRLLLAQLKLELDHLQMRIDEADAMINKAAGENEACRRLVAIPGIGPVTATAIIAAIGNGAAFKKGRGFSAWLGIVPGENTTGGKQKLLGISKRGNSYLRRLFVQGARAVLQQSA

SEQ ID NO: 395835 - protein, 342 aa, unidentified
MYYIGLDVHKKTISYCVKDASGQIHQEGKIGATRRELDCWMKTLPQPWTVAMEATIFTGWIYDHLLPHAEAVKVAHPVMLRAIAAAKKKNDRIDASKIADCLRCDFLPECHMATTAIRDRRRTLRYRHLLVRQMVQMKNRISGLLLETGVSHNKQRLHKVRYFRELLTTNEEIDESIRPLLKLSRDTIVRLQKTEYALVSSLQRDPLLADRVKRLRTVPGVGPITALTWALEIGDVTRFPSIKQAISYCGLCGDEKSSADKVMRTPLSKQRNKHIQRVLIEAAKLAPRLDHDLAAVYEKAKQKGNANRATLAVARKMVAWLLAVDREERDFVPSEDHTRKAA

SEQ ID NO: 395836 - protein, 341 aa, unidentified
MRKTLFCGVDLHSNNAMYVIADGRDKQLLAKRLPNQLPLVLDSLEPFRQQLRVVAVESTFNWYWLVDGLREHGYPVVLAHPSEMEQYHGIKEADDLTDAAFLARLARLNILPTGYIYPKEDRPVRDLLRRRMLLVQQRTALVLSLQNLATRQSGRSLPWRDIRRLDQTERTELLGDHDCLTFVADQQIDLIEQFNKKIKRFEKKVLEHAQLQPAYERLQTMPGVGVILALTILLETGDIGRFPTVGDYTSYCRCVRAIHSSNGKKKADNNRRNGNAYLAWAFVEAVHHALRVCPKAKSFYDRKRAKRNGVLATKALAAKWSKAAYYVMKRHEPFDLARVFG

SEQ ID NO: 395837 - protein, 341 aa, unidentified
MKNKSFIGIDISKNVIDVSIFCEETPIKDFSHDVFNNSRKGFGEMCTWLKKNHVVLSNCLFGMEFTGSYSMKLEKFLNAKKYQFCMLSTHVVKHYPMGPKDKSDKIDSAKIADFLYRYNGTECVKPYKMPDKTMQRLKTLMNERKFLVEQRTCFMNRRQLCTTKEDAQLYDGYIKKFSRDIENIELEEQKLLATDDSLFTTYKNLLTIPGIGFVNAMNVIVITRNFTAFETARQYASYVGVAPHSHTSGTSVKWRPRPSARCDGQAKADLSMAALIAVQYDAELQSFYNRKLGGKQDSDTKRKALNAVKFKLVLRMFAIGKQNRKWEPLDSKSSNEKLAIS

SEQ ID NO: 395838 - protein, 391 aa, unidentified
MIYIGIDVAKDKHDCFITNSDSEVLFKAFTISNNLDGFNVLYQKIESVMDDVTKVKVGLEATGHYSYNLLGYLVDKGLPTYVINPLHTNLYRKSLSLRQTKTDKVDARTIASMLMSDVNLKSYSDTFYHNEELKSLTRYRFDKVKERAKLKTSVSRLVCILFPELEKLVPTLHMASVYALLSEFPSAKHVATAHLTRLTNLLSESSKGRYGKDTAITFRDAARASIGSNMPAKSLELKHTIKLIQELDSEIDEIENEIKIIMDEINSPILSIPGINYRMGAMIIAEIGDFNRFDSPDKILAYAGFSPSTYQSGQLDGAYAHMEKRGSRYLRYALYNATKYVCHWDPTFAAYLAKKRAEGKHFNVAISHAVKKLVRVIYHLEKTKQQYIKVA

SEQ ID NO: 395839 - protein, 446 aa, unidentified
MRESCTYGSVRGAPGNRCPYRDHTKQYSKQQEKRKRIGNQTLVIGMDIGSEFNAACFMDKEGNVLGRYPTIYNSRKGFDYFQTMLTKTKRKHKLTDVLIGMEPTGHYWRKIAFFAKEKGYEVRFVRTTAVKHQRELDESSPARSDIGDAYTIGNIVREGKYIDTVIEESVFRQLRTLAHARERILRYIVGSTHGLQAHLNDYFPELRQLFWSMQAKGLWRLLETYPFPEDVRDAGRAAVVTLLAKGTGKKRHIREQAEQVYQAAQQSVGLKAIAKADRVRLTMYLEEIKRSDARRQLLEREMKALLKEIPLAQYILSLPGTGKVGCAVFLGELGNPDYFKNPRQIIKYAGYDPKENDSGLRVGRKIISKKGRWLLRKCLFFMVLRLVHRSPFFKGYYAHKKKGCDRPLEKIEALCAVILKLIRVLFALMRDKRMFTEEMPRCEKAA

SEQ ID NO: 395840 - protein, 341 aa, unidentified
MKLTTIGIDLAKNVFQVHGADDKGRAVLRKQFKRAQILPFFVKLAPCKIGLEACGSAHYWARKLQALGHTVQLIAPQYVKPFVKRNKNDAADAAAICEAVTRPDMPTVPIKNAEQQAILSVHRARQGFVKARTAQANQIRGLLAEYGIVLPQGIGHIAQRVPAIIEDGENDLPGGFRLLIARLLDHLKELDRQVGELAAEIESWHRQNAASRKLAAIPGIGPLTATATVASIGDARNFKNGRQLAAWLGIVPKQHSTGGKPTLLGISKRGDAYLRTLLIHGARAVIRTAERKPDADPWLKSLLTRRNKNVAAVALANKNARTIWALLAHDRDYDPHYGTQA

SEQ ID NO: 395841 - protein, 345 aa, unidentified
MSEVYAGRQFVGMDLHRRRSVLVRMSETGEQLETVRILNDRDVLAEVMSRAGESPEVVLEATYGWYWAVDALVELGATVHLAHPLGVKAFSYRRVKNDQRDAFDLADLLRMGRLPSAWIAPPATRELRELVRHRAKLVAMRSQCKAHVHAVLAKGGIWVPMTDLFGVEGNLLLDKVTMPAPYKERIASLRRFIEGFDAEIDLFTGLVQRRLAHDAGYTAIQQIPGIGPVLAAVFVAEIGDVHRFAGPAQLTCWAGLTPSHHESDTTVRRGRITKQGSRLVRWAAIESVKILPGTSRIGAIREQVAHRRGNRNIGAVAAARRQLELVFYALRDHHVRALHRSPHAA

SEQ ID NO: 395842 - protein, 363 aa, unidentified
MKKVSTVAAKQSRNISQQKLTIGLDLGDRNSWYCVLDESGQIQVEQRVRTSAKALREVFGGMPRGRIAVEIGTHSPWTSRLLGELGHEVIVANARKVRLIGESRKKDDRLDAQTLARLARLARIDPELLYPVKHRSAQAQADLMMIRARAGLVRARTGLVNRARGLAKSYGERLRGCNVRNMNPEKAESLSPELQAALEPLLNAIESLSERIEKLAQESYPQVALLKQIKGVGTLIALTFLLTLEDPHRFRKSRDVGCYLGLQPGRRKSGQSEPQLHISKEGDPYLRTLLVQGAQHILGPFGIDCDLRRCGLKLAERGGKNGKKRAIVATARKLAVLLHHLWVSGEVYEPLHNSSRTTVAAAA

SEQ ID NO: 395843 - protein, 325 aa, unidentified
MTAIVGIDIAKDKFDVCLLNEAGKAQQATFANNKQGINQLHHWLKKQGAKQAQVCLEATGIYGDLVAETLYSRKYQVSVVNPARIKAYAESQMRRNKTDALDAALIADFCRTQQPDLWTPPPPELKELRALIRHLDDLKQEKLRASNRLDVQDSSQAVIQHLQAQISLLEEQIQHTLKLIHDHVDRYPDLKRQRDLLDSIPGIGDLTASYLIAELGDISRFQAVGEVVAFVGLNPCLHQSGKRKATHGISRMGRAALRAALYMPAIVAKRCNPRLAAWANQLSQRGLTGKQVIVALMRKLIHLAYAILKSGRAFDPHFGDLRLRA

SEQ ID NO: 395844 - protein, 349 aa, unidentified
MTMTIVEAARAVTGGVDTHLDVHVAAALDPLGALLGTERFGTDPAGYKALLAWLESFGPVTKVGVEGTGSYGAGLARFLRGADLEVIEVDRPNRAERRRSGKSDPLDAVEAARAALGGRAKSISKSKDGAVEAIRVLVVAKRSARQARVKALTQMRHLVITAPDQLRCRLKGLSVAALVAEAARLRPSRSGDAVMAAHKAALCSLARRIQGLEDEIAELDERIEKLLMRTAPELLSRFGVGPDTAAALLVSAGDNPERLHSEAAWAHLCGVAPIPASSGKSTGRYRLDRGGDRHANSALWRIVMVRIARDPDTTAYFERKVKEGCSKRDVIRLLKRYVARELYRYLPRG

SEQ ID NO: 395845 - protein, 334 aa, unidentified
MRTTGTPMPNAQAGPPADRAYVGVDVSKRHLDVHVRYPDGRAPDAFRLTNDADGHAALLDRLAPLSNPLVVAEATGGYEHDAVAAIAAAPLDVVAVNARQARDFARATGQRAKTDAIDAGVLALFAERIRPKVRPLPTAEQEALAGLVARRRQLLEMLGAEQSRLLLAPPSARPSLEAHVRWLTAALEELNAELRRAVEGSAAWRASDDLLQSVPGVGPVLSFTLLSELPELGRLDRREIAALVGVAPLNRDSGSYRGQRSVWGGRSSVRCVLYMAAVSASQHNDVLKAFYEGLLRRGKATKVALVAVMRKLLVVLNAMMRDGKAWSPELVAGA

SEQ ID NO: 395846 - protein, 327 aa, unidentified
MNKQAELPYLGIDVSKKKLDCALLLGSKTRNKVVENSSAGITLLMAWLARQGANELRVCMEATNTYWELCAETLADAGHAVSVVNPALVKAHAQSNGLRTKTDAVDARTLADFCREKQPEPWIAPSPSERALRALVLRHQALVAMQTQEKNRILTAREAVHDSVQIHLQWLAEELKRIEQAIQKHIDDDPDMRRRRDLLKSIPGLGKRTIALLLAYLGTQCRFLSARQFVAYAGLNPKLHESGSSVQRRARLSKIGHAEIRRALYMPAMVALYKTDWGKRFRERLEGNGKPPMLIIGAMMRKLAQVAYGVLLSGKPFDPTLHGACHR

SEQ ID NO: 395847 - protein, 392 aa, unidentified
MNFAGIDIASETHVLAVVSAAGEVQVRATPFGEDAQGYALLFERLGPPEQVVVAMEATGHYWKNLFAALGARGYAVALINPLRTRRFADEDLQRTKTDAIDALGIARFAAQKRPAITRLTDTATEELRELVRLRDRVVGEIGDRVRQLHRLVDLGFPEFTRYIPTLDTQIAIALLRQYPTAQAFVRVGPTRVSKLVYDGRHRVGPELARQLVEAARVSVGAHHGPAYRVQVKYLCEDLETLRFRLRELDADLERHLDDHEVGTLLTSIDGIGKLTAARLVAELGDPAEFASASALAAYVGVIPALRQSGKGRTRTSLTSIGHRHLRHALWMPTLAAVRRNPWLRAYYQHLRSKGKPAKVALIAAMRKLLIAVYAVARKRQPFVPHIATEAQP

SEQ ID NO: 395848 - protein, 428 aa, unidentified
MSNQELIRRKQYCQIVKEITGSDQYMVVGIDVGKDNHHAFMGTATGKSLFRKLIFENNLEGFSKLLKTSDLIKTRNNLSKVVYGLEPTGNYHKPLARHLIRCNSNVVLVSGEAVNKNRSLLDGRWDKHDTKCAANIADLVSRGRCLYYDSPSPGIIELRSLLSLRKRLKKEEQSLRMRIRNNLLAQYFPELDRFYSACESETLAIVKWCLEPDQIAGMDFEPFFQMVTRTRRGTAQLLRLRKIHQQAIESVGCPMGSAAAFEAQLLVDKLEQVRQQLKDTEAAIKDVALEFDEYRYLLTIPGFGLYISSSVIAAIANPFRFKNRKQLLRMAGYDLCAKRSGKTSDNAVPVISKKGNSNLRYALFQAARIASARTEIFRNYFAEMLRGRERERGIITKMRVKLAAKMLIIAWTLMKKREPFDPAYLTIE

SEQ ID NO: 395849 - protein, 373 aa, unidentified
MTDFSKYVGLDVHKETIAVAVAVADAQGGEVRYYGEIANTPEEVVKLVRRLGKEGAKLSFCYEAGPCGYGLHRQLKALRQDCQVVAPSLIPKKPGDRVKTDRRDSLTLARLLRAGELTPVWVPDEAQEALRDLTRAREDMKHMQRMAKQRLLAFLLRHGRRYSGKTNWSQAHFRWLETLKFDQPVQQIVFQEYLDTVLAMTKRVAAFDAQIKVAGAESVFSKQIEGYMALRGIDRLTATTFVAEVGDLRRFPDAPKLMKYLGVVPSEHSSGASKFRGGITKTGNGHVRRVLVEAAWTYRHPARKSAVLQRRAEKAAEAVQEIAWSAQKRLCARYRMFEAKGKPRVQICTAIARELVGYIWAIGQVQPPPPAKA

SEQ ID NO: 395850 - protein, 415 aa, unidentified
MERVLERCCALDVHKRQVTACVHVPDQQGRRSELRAEFQTMTSELLALRDWLQGLGVTHVAMEATGVYWKPVYYLLEDDFELWLVNAQHVKNVPGRKTDVQDAQWLCQLLEHGLVRASFVPPKPIRELRDLTRYRKSLVWERSREANRLQKLLEDANIKLGDVASDVLGASGKAMLSALCEGEANPAALAELAQGKLRAKLPALRLALEGRFSAHHALLVSHLLSHVEYLDETIASLSEEIEVRVRPFERKRELLCTIPGVAERTAEVILAEFGPDMGRFPSHRHAASWAAICPGHDESAGKRRSGKTRKGDLWLRTALIEAAQSAAGRTKDTYLRSQYLRIKRRRGHGKAIVAVAHSILVAAYYILSEQKPYAELGGDYFIRREDQERLTRRLVRQLERLGQRVTVEPATAEVR

SEQ ID NO: 395851 - protein, 346 aa, unidentified
MEIHVIGIDLGKTVFHLVGLNQGGEVVVRKKFSRAQLLRFTSNLHVHLIGMEACGGAHFLGRALRAQGHEVRLMPAQYVKPYVKTNKNDFIDAEAIAEAVERPKMRFVPIKSDEQLDMQSLHRVRERWIVRRTAVVNQIRSLLLERGVTVRKGRKHLVAVLPGILEDPETDLSGPLRVLLAQLQWEMKHLENQIEEVDAVIVRTSGQDEACQRLLAIPGIGPLTATAIVSAIGNGAEFKKGRGFAAWLGLVPAQYSTGGKQKLLGISKRGNCYLRKLLVHGARAVLQTKDKQSSGLSTWLTQLTSRAHSNVAAVALANKLARMAWAVLAKGEAYRPPLLAAELVGQ

SEQ ID NO: 395852 - protein, 424 aa, unidentified
MKVTYQTCCGVDVHKSFLVATIVKTTGGIEPSYQKKRFSTFNNSILEFKQWLLDNDCHDVCMESTGKYWVPVFNLLEDEINVVIANPKWVKAVKGNKDDTKDSKWIGDLFRLGLVKGSYIPCKIVRILREYTRYRYKLVSCRSSEKNRYQNALTVCNVALDSVVSDIFGKSSTSIIDYLLEQSGTSINHEEIASKLLRSLKSKEDTVIESVEGYQMTDTQKYRMRLVRAHMDYITAEINDVDKMIENMISSNPDFENAVRFLCTIPGVKRDSAITIISEIGTDMSQFSSSKRLCCWAGLTPSSNESAGKKKSVRITRAGVYLKPALVQCAHAAVKSAKSPYYKKKYESLVKRRGKKRAIIAIARMILTAIYQMLSTGEQWNPSDLYKINMPVALVEKQKAKAIKQAKKLLQREGLLPPDEPLAS

SEQ ID NO: 395853 - protein, 449 aa, unidentified
MGHYAGVDWAADKHDVRVCDETGEELLAATFAHDEKGLRALCRALARLRVELVAIERPDGLLVERLLDAGLRVLPMHPKQVAAARARFRAAGGKSDRFDAFVLCELARTDSHRFRVLEPDSDETKALRALTRAREDLVHARVALCSQLRAELERFWPGPIGLFTKLDSPISLAFLERYPSPADAGGLGEQRLGAFLARQRYSGGQKPTELLAKLRRAPEGRVGEAELAARRALVLALVTAIKPLVEQIKQLTEQIATALREHPDGEIFLSLFRDPRSVVTAAELLAEIGDCRARYPTRDTLAADAGQAAVAVESGRRKTASFRCGCNKRLRGAFCTLADSTRHWHPWAQDRYAAARARGHEHPRALRTLGRAWCRIVWSCWQRRTPYDPAKHRALQQHCTVTVPTPSGPVPDLPAIQRMLGAAVTEPVARRAEREALDDKPTSAIPPGG

SEQ ID NO: 395854 - protein, 399 aa, unidentified
MMTMTRTEESTAAATPIGTLLLAFELGERVWKLGFTMGLGARPRVRQIPARATDRVLEEIARAKVRFGLPATASVVSCYEAGREAFWLHRWLVAHAVSNHVIDSSSIEVNRRARRAKTDRLDLDGLLNLLARHHHGDRHVWRVVRVPSVDEEDARQLHRTRETVQQDRTRLINRLRGLLTTQGLELPIEANFLTRLEAAQLWDRTPIPAGLRARLQRGWAQLEFLNRTLAELDAERATLAPNPGTTMGRYINALPTLRGIGPIGTWVLATEIFGWRQIKNRRQLGGLVGLVPAAYQSGDSAHDQGITRAGNKHVRRRAPPHGATRLELGPVSARQRPHCVVSGQIRTRQSSVATHWDCRAGPQTAHCPLALCGTRGNPRRSDCERPGGLRHQHIRPPHT

SEQ ID NO: 395855 - protein, 339 aa, unidentified
MLIIGCDYHPSFQQIAFVDRETGECGERKLTHKEEAESFYRDLNGRSVRVGMEATGHARWFERLLAEQNFELWIGDPAEIRAKRVRKQKNDRQDAEHLLQLLVEDRFPQIWVPSPENRDLRQLLWHRHRLVQMRTRVKNQVQAIALNEGIRRKKGLWSKLGRVQLESLSLAPWSARRRQDLLELLDRLNPKIDELSTAIQQAAEQRPEVQRLMTHPGVGPITALAFVLILGVPERFQCGKQVGSYLGLIPCEESTGGRQRLGHISKQGNTLLRFLLIESAHAVVRYDPDWRRRFLHLAMRRGRPIAKVAMARRLAVRLYWMWRKAWDYQQTLKFGSHVG

SEQ ID NO: 395856 - protein, 359 aa, unidentified
MIVVGIDPHKNTHTAVAVQGATGAEVATITVKARQKGHERLITWARSLHPDIRFAVEDCRHVSGGLQRFLLARGERMVPVPPKLMAGARRGARTRGKSDPIDARAVAHAALRHPDLPAAHLAGVERDVRVLVDHREDLVAERTRAQNRLRWHLHDLDPDFFVPTGGLDRYVWLDRTRDHLEVMERTVQVRVALEQVSHIRELTRGAKALERELTTLMRLIAPELLAIRGCAALTAAKLLGETGGVRRFRSEAAFAMHAGVSPLEVSSGEQHRHRLNRSGNRQLNAALHRIAVTQKRIHPPAQAFLLRKQQEGQSEREALRCLKRHLARHVYKTLLRIERRNDPETAQKESLAVDLAESA

SEQ ID NO: 395857 - protein, 345 aa, unidentified
MEIHTIGIDLAKTIFHLVGVNAGGEVVVRKKCSRNQLLRFTANLRVCLVGMEACGGSHFLGRALREQGHDVRLMPAQYVKPYVKTNKNDYIDAEAIAEAVTRPSMRFVPIKTDDQLDLQSLHRVRERWVGRRTAVINQIRGMLLERGITVTKGRRHIEESLPGILEDCDNKLSGALRVLLTELRLEMQYLGRQIEESDQLILRIASELEPCRRLVAIPGIGPVIATATIAAIGNGAAFKKGRGFAAWLGVVPGEHSTGGKQTLTKTSRRGNRYLRKLFVQGAHAVLQKRRTQSTGLSTWLAQLTTRKRIQVAAVALANKLARMVWAVLTKGEAYRPPLLPQPVVA

SEQ ID NO: 395858 - protein, 313 aa, unidentified
MSYTRLDYSPLDVWVLPTGASRSVPNDAAGHSVLCQWLLACAVRLIVLEATGGYERGCASALSLSGCPVMVINPRQAREFARSMGQLAKTDRLDARLLAQLAQVLDRSPKRASLLHDAPDAARADLEARVARRRQLIEMRTAETHRLDTAAPGIRKSIQQIIKALDRQIEDIDHHIDTHLRTHHALARELLDSVKGVGPGTIATLIADLPELGHVPGRQLSALVGVAPLNCESGQRKGQRHVWGGRPQVRAALYMATLSAVRFNPVLKRFYGRLLARGKPKKLALIACMHKLLLILNAIMRTQQPWNPALHEA

SEQ ID NO: 395859 - protein, 424 aa, unidentified
MATRRRTNKVDINALVDLYERCAGIDVHKETVTVCVIRPGTDGSAQGEMATYGTTTRELRQLSQWLQECGVTHAVMESTGVYWRPVWQILEAGGFHLLLANAKQVRNMPGRKTDQADAVWLATLLRKGLIKGSFIAPPQVRALRDLCRSRASLVHDRTRVVQRIEKVLEEANIKLDTVASDLMGVGPRMMLEELIRGETDTTKIAELALGRMRSKIPQLVAALEGYFRPHQTFLLKQLLNQFDDLCRRIERFEQQIEEYSRPFAKQMARLDSVPGIDRLSAAAILSETGVDMDPFPTPQQFCRWATIAPGNNKTAGKQRNGKIGRGNRWLRGSLTQCAWAATHDKNSYFAAQYHRLLHRGKGRALVGVGHSMLAAIWHMLRRDVEYHELGADFFEKQNLEGLKKTYLKKLERLGFKVSVEPIAA

SEQ ID NO: 395860 - protein, 337 aa, unidentified
MKTTLIGIDLAKSIFQVCGVNQAGKRIFNRQVRRAKLMELLIQHPDATMAMEACSGSNYWGRELQQRGFQVKLIPPQHVKPFVKGNKNDRNDAFAITEAARRPNLRCVEPRTLAQTDMIQVHRVLDRMVRQRTALINQIRGFLNEYGIVVARGKEKLLAAIPNLLEDADNGLTSSSRALLQALCDEWRQMNEAINRVDKVLKHQAKADEAAQRLMQMRGVAERIATATIAQVGNGHGYASGRHFSANLGLVPKEHSSGGKQQLGGITKRGNRYLRRLLIQGAWSVIRNVDKNDDRMSRWARQLIERRGKHKAVVAVANKMARIMWSMLYHQTEFRAN

SEQ ID NO: 395861 - protein, 353 aa, unidentified
MVYLGVDLHRKHSVVAALDETGKLMFSRRIESRPEEFRRVFGELEPCSQSVAFEATYGWSWFADLLADVGIDAHMAHPLATKAISAGRVKNDSVDARTLAHLLRTHLLPEAWIAPPVVRDQRRLVRTRVSLMRIGSRLRCRIHAHLADHCIHPPVEDLFGPAGRDFLAEVALPAVVRGRVDAALRLIDQVAVEVSALERELRAAFAGDERLRRLVPIPGIGFTSACVVLAEVGEVSRFHSPDELCSWAGLTPTERSSDEHTRRGHISKQGSRWLRWVMVEDAQRVRHPALVRFFEGIASRRGKKIARVALARRLLTLCFYALRDPAGCKAFPVRPPRARKIRPGALAVGHGLS

SEQ ID NO: 395862 - protein, 347 aa, unidentified
MRFYNQQHQFYCGVDLHARSMYVHVLDQQGQTRFEQDLPAGPEAFRSSIAPFRNGLVVGCECMFAWYWLADLCEDESIPFTLGHALYMKAIHGGKAKNDKIDAAKIAGLLRGGMFPMAYVYPRDMRETRDLLRRRTFFVRQKAQLIAHIQNTNSQYNLPPFERKLSRQPDYSELAERFAHTSTKLSIGADATLINRYQETIAELEKHLVKHAKVHDPATYHLLQSLPGIGKVLGLIMLYEIQDIKRFPEDGNFLSYARLVRCEHESAGKKKGSGGRKIGNAHLKWAFSEAAALMLRSVPAVKVWVQRQERKRGKRKALAILEAKIGRAVYQVWRKQQPFDAKKFLRQ

SEQ ID NO: 395863 - protein, 330 aa, unidentified
MKCHYVGVDVGAKELVVSIDRNGSRESGMVFTNDAGGHRKLIRWATKQGATAQVVLESTGVYGLDLAFALHRAKRVEVMVANPRAIAAFAKASLQRSKTDALDSATILEFSMRMPFVPWVPPDPSILELRALSRRIEAMSKTATQEKNRLHANDQSEELSDFVKEDIRELAELLEDRIERLRKQALLVIEQSPELAKAFGHLTSIKGIADAAGIQLLAELGTLPQDMTTRQWVAHAGLDPRQHQSGTSVHKPARISKTGNAHLRRALFLPAMVASRWEPNVKAFYEKLLAKGKTKMQALVAVMRKILHAIHGMLRHDQDFDGEKFFAVRG

SEQ ID NO: 395864 - protein, 442 aa, unidentified
MPQGRALTRGDRRRNERLARLRSIVRREFAVVAVDLASGKQAVAVTDHDSVVLGRRMFTGDAWVIDDILDWALPIATAAGFAGVVLGCEPTGHRWKPLLDRARARGVELVCVNPMLVHRGREEEDFTRDRSDFKDATIIAKKVTELRCYVPYVLEGHWCRLRHLGARRNEQLVAAGSARQRLRDLLECAWPAVLATAADPLEALTWRAAMAVSTDPAQIVSMGFDAFAAAVREELGRWGGTRRNLRILHAIWQAAQAPGGVSTERAAACERAAYALADYHHALTQLADVEARMLGVLDALELTELVTTIPGLSGVGAAAILAETGDPARFDCARTWVKHAGLCPRANESGTFHGTTTVSRRGRPALRTAAWRALWAGLRHNPIYLARYTHLTTRTRNPLTPGQARTALAAALLRQLFVILTRRVAWDPAIAAGTKEVAPQAA

SEQ ID NO: 395865 - protein, 300 aa, unidentified
MEYYVGLDVSLKQTSICIVDQAGLVVREGVVDSDPEAISAYVKSKAPDAVRIGLETGPTSTWLWTELKRLGLPVICIDARHAKAVLKMQINKSDRNDAIGIARIMQTGWFKEVHVKDIDSHSVRALLASRALLVKIKCDLENHVRGLLKNLGLVIGRAKFNVFAVRVDELIEGRPELVAAVRPLLEARNAVEQQVSELDRKVMRLARHDAHVRRFMTVPGVGPITALAFKATIDDPARFARSRSVGAYVGLTSRRHASGEVDWSGRISKCGDAMLRSYLFEAAGVLLTRVPKWSAVKAWG

SEQ ID NO: 395866 - protein, 358 aa, unidentified
MNLKYSVGLDVSSKKINGCISSIDEKQKVVVKSSMVISNTLKGFSALEDWILKHKKEAIPVVVCMEATGIYHENCAYYLFGKGFDVSIILPNKAKKYLESIGLKSKNDSIDAKGLSQMGAERCLDLWEPMGTFFYQLRLLTRQHQNVTELKTVLKNQLDALGFAMHQLDAVNNQINQTVSLFESQLKELDKEIKAHLKSDEQVSKKAENILKIKGLGVLTLGTVLAETNGFTLFKNYKQLVSYAGYDVVESESGKRVGKTKISKKGNSRIRRALHMPSLVVIQHQVKPFQDLFERTFEKHGIKMKSYVAVQKKILTMIYHLWNKNEEYNANYQINIQEEEQKLSSRAIGFEEDTMAKK

SEQ ID NO: 395867 - protein, 344 aa, unidentified
MAYHTALDVSLRSVSICVIDDDGVILHEAKVASDVDAIVGCLKRFSLDIRTVGFEAGTLTQYLTYGLQSAGYEVICLEARQVSAALAAMRNKTDRNDARGIAQILRTGWYSRVHVKSLESHLIRALLSSRKAVLKKCVDLENELRGLIRLLGVRLPGTLKHGAFDAVLREAIATHAALAPALVPLLDARLVLYQTYLKLDNQVKSLVRDDAVCQRLMTVPGVGSITALTFKAGVDDPTRFKRSRTVAAHFGLTPRRYQSGEVDNPGHISKAGDPDVRSALYVAANALVTRSAEWSSLKVWGRRLAKTRGHQRAVIAVARKLAVIPHKMWLDGTDFRYGSAEAAS

SEQ ID NO: 395868 - protein, 449 aa, unidentified
MTRFVGIDLHKKVAQICILNAQGSCLEELSVPVSRSHLLDFCKKTLKPEDQLVLEATTNTWAAVDLLEPFVGSISVSNPLQTKAIACAKVKTDKVDARVLAHLLRCDYLPKVWQPDPLTRRLRSLTNRRAALVSQRTAIKNRIHATLAQRLIDQEVYDLFVTKGLAWLRNLKLDEDGQLALEADLRLLEALESEIQQMETHMAKMTYSQEDVRLLMTLPGVSMIVAVGLLAAWGDVKRFKTASKAAAYLGLVPSTRQSANKCYHGPITKRGPAKARWLLIQAAQQLMRFPGPHGYFFAKSKRRKNHNVAVCASARKLAVIAWHLLQNRKPYRYALPKPTAAKLAKVRILATGEKRHGGWTKGRKRSELKDQSQRMLTVPTTQSVCLREALPATKQLNDIPPGERKFLSESHGWPHFEKVCTQRKIPRNKQPIVSEAEPWVGTEDSKATR

SEQ ID NO: 395869 - protein, 360 aa, unidentified
MEVGQEVVLHPVVGGVDTHKDLHVAAVVDELDRVLGTRCFATTRQGYRQMLAWMRSFGQLRCIGIEATGTYGAGLLRSMQNAGVDVLEVTAPDKPDRRKHGKNDDLDAQNAAHAAFAGKRTVTPRSRDGMIESLRVLKACRKTAVVAQRIALQMIQNTIVCAPDGLREALRQMTRMQLVRTLAAWRPDLTDYRNVDSAYRISLKSLGRRYVELHDEIADLDVMIAAIVDELAPNLVARNSIGHAGAAQLLLTAGDNPERLHSEAGFAALCGVSPVPASSGKTTRHRLNRGGDRAANSALHIIAIGRLRTDPRTKAYMAKRVAEGHSKLEVIRCLKRYIAREVFTLISQRQKEINQARISA

SEQ ID NO: 395870 - protein, 374 aa, unidentified
MDEDSKLYVGLDVHKDSIAIGVAEAGRNAGRVVGQIPHDLARLLKTLARLGDCDEMHVVYEAGPTGYALQRSLSARGYRCEVIAPSLIPRRPGVRVKTDRRDCLLLAELARAGQLRAVWVPDPGDEAMRDLSRAREDALKARLQARQQLRAFLLRHGVRYSGKSAWTKTFHRWLGDLSFEDANRQIAFTEYVLAVQVADQRLQRVSESLVQAVSGWRFAPVVAALRALRGIDVVCAIGLVVEIGDIARFDHPRKLMAYLGLVPCEHSSGDRVRRGAITRSGNSHARRLLTEAAWNYRFKPRITRCSMRRQQDLSAPIQAIAWKAQVRLTGRYARLQARGVQPNKVCVAVARELTGFVWAIAQASSPACSNPVAC

SEQ ID NO: 395871 - protein, 352 aa, unidentified
MPQPNDLSRSLVALDQNSTIIAVVELSQSSWLVAGMLPGIERQPRKKLEPSPERLLGLLHRWQEEAVRAGRTITRIAVAFEAGRDGFWLARWLAARGIEAHVIHASSVAVSREHRRAKTDRLDTELLKRGFLGWLRGERGHCSMARVPTSAEEDAKRPSRERDCLVGERTRIVNRIKSTLTRLGIRNFKPTLRKAAERLATVHTPEGMPLPPNTLAELQRDMARLGFVVSQIRQIEEARQKRLEQEPETGLHAQVRLLARIVGVGVETADLLVHELLSRPMRDRRAVARYAGLTGSPDESGAQRREQGLARAGNARVRRGMIQLAWRFLMFQKESASIAGGFSGTGRTLTRT

SEQ ID NO: 395872 - protein, 351 aa, unidentified
MKTNTPTDSKTQDRIQQLKLGVDWHVDHFRVARMCDGQSPQPAQRFTPASFLLFVQKQLTLADQIFVVYEAGPGGFHLHRQLTALGVTTFVVHPVKLDPQHKGVVTDKTDARELALKLDRYLGGNLKAMSIVRVPTEAEEQRRSLSRQREQLRRERQRLAAQGRSLCLTQGIRLRGEWWSQKLSIPEWLEPRLQVWRKLIAAVEEQLDALTKQVEALAPKARPKGLGPLTLGMLLAELCDWSRFKNRKQIGSYTGLCGGVSSSGQSHCDLSITKAGNARVRWSLIELAWRMVLYQPQSKAVQRWKHVLLNPKAAARQKKRALVALARQLAVDLWRWQTGKITPEQLGWVMV

SEQ ID NO: 395873 - protein, 430 aa, unidentified
MTKRSSNPTDAVLVAIDMSKHRQEVLIERPEGGPRRRMTVMATKADYDRLATDLSDIGRPIIVGFEATGNYHRTLAHRLLSAGFELRLISSVALARTREALHNGWDKNDSKDAQVILHMLRIGATQRYVDPLAAGINDLQEMSKTHEAISKAKTQAWHRILTHYLPLYFPEIERFAGNSRSDWFLALIERFPTPGSIISIGREAFTEQAWPLIGRKVSKARVVNDIYETASASIALPIDEDSTAITMFRMVVAQARTLIQQRNEIERIAHDALAANRDYQLLRMIPGIGPINALTILAEAGDLRRFSHHRQFLKFCGLDLATCQSGMFRGRTKLSKYGNARLRRTFWMATQVAIRQRDNSFRDKLGRYVAGYPNDPDRRRKAMTALTAKMARVAHAVIKTGTEYRPFVERADTRWKDPSLCSREGATATL

SEQ ID NO: 395874 - protein, 274 aa, unidentified
MSIVMGLDQHRAQITADWLDTETGEVKRGRVAPADRAGVRRFLERFDGQELEVALEATTGWRFVVEELRRVGAIVHLAEPAETAGLRGPKKRAKGDRADARHLRELLMLKRVPESWIPPDHILDLRARVRLRHMLGEQRSEWQQRIQATLYHHGCPERRQLMVGDGRDWLAAQPLSAVARERVTVALAMIDALDLQMRPIEKELRAYARRQAGCRALMAHYGIGELSAVTILAELGDCTRFSSSRQAVRYAGMDTVASNCTSCSGDFGLCGDVG

SEQ ID NO: 395875 - protein, 387 aa, unidentified
MLYVGIDIAKEFHVAVVLSQTGEVLSGPFRFENTREGFELLLSKLPTRDPEALLFGYESTAHYGKNLGVFLLAHGFHVGILNPLQTSSLRKTNLRNAKTDSIDALIIAQALSLSLHSMLSNEPLYDALWGLCVTRNNLMTARARAKIQLATYVDQVFPELAAFFKGNLHLATSYALLKVDTTPALISKVRIDTLTKRLSRASRGRYALPQAQTLKTLARSSVGVDNPALTLQIRLAIEQVELYSKQIEATEKQIDDLLLPMESPILTIPGMGHIQAAIILSSLRNIQSFDHPCKVLAFAGLDPVVRQSGNFKARTTRMSKRGNSLLRYALILASHNIVRNNDVFHTYYLKKIKEGKSHYNALSHVAFKLIRVIYKMLNHPELTFSLE

SEQ ID NO: 395876 - protein, 413 aa, unidentified
MQTLVEHGCGLDVHQATVVACLLRIRNDGKVQKQVRTFGTTTRELMQLRAWLLAEGCTHVAMESTGVYWKPVYAVLEGDELEILVANAQQVKKVPGRKTDIKDAEWIADLLCHGLLRASFVPPLPIRELRDLTRYRRKLIESRSAERNRLLKLLESANIKLASVATDVFGLSGRLMLDALIENRTSLPEMAELAKGKMRRKIPQLELALEGRLEEHHRFLLQLQRRRLEAVDSELAILEQRIRQKLEPYAAQLALLQEIPGIDRTLAGVIIAELGVDMSVFPSVSQLASWAGVCPGNNESAGKRKSSRIPKGNVYLKTALVEAANAAARAKGTYLRDKFYRLKARRGYKRAAVAIAHKILVSIYHMFSQNVSYNDLGDLYLDKLNTHHVTRNLVRRLERLGYAVTLSPLPRAA

SEQ ID NO: 395877 - protein, 425 aa, unidentified
MSDDVMIAVDPHKASNTAAVLDPVPETVIESARFANTMDGYAQLTAFAGRWAQRRWAVEGCFGAGRSLAQRLVADGEMVLDVPAKLAARVRVYSRGHGRKTDKHDAVSVGLAALDGTGVLPVTRDDAMVSLRLLCDRRDELTAQRTQAVCRLHRLLAELTPGGMRRELSANKAQALLARIRPADDVGSVRVHIARDHLADIRALDARIKYIGIQIAALVTASGTGLTGLFGVGPVIAGRLLAEVGDVARFATKDAFASYNGTAPIDVSSGDQIRHRLSRAGNRRINHALHMMAVTQIRYPATPGRRYYERKRTEGKAPKEALRCVKRRLSDLVYYQLLADRRGTIGTCGSPTTPPPTRSTSTSPASRSRRAAPPSRPPHRPAPKGSSRSTGKTTASSASRSSTPAPASTATSSTTPKPTAKTAAS

SEQ ID NO: 395878 - protein, 336 aa, unidentified
MYVLGIDVGKTEIYVRLVERCPGGPPKTIGKQKSFDYDEKGLDELTAWLSSMLIVFSDVHAVMEATGVYWERCAFYLHRMGFVVSVVNPAQIKYFAQSSLRRGKTDSMDADIIARYGATMALKRWEPPVAELENLKLLVHERDGLVKELSQAKNRRHALNTREQPDKLVQKLTEDRIAFLKGQVEAVDQAMRERVAANTALNEQVKLLQSVPGFGFLTSLSILVETAAFSTMETSRQLAAYAGVSPAPHQSGAMNRRGRISKIGNPRLRRIVYLAAVAATRTKTKEKAFYQRLREQGKPGKVAVTALARKLLCVGFAVVKSGKPYDPLYVRLSSET

SEQ ID NO: 395879 - protein, 412 aa, unidentified
MEVLHACCCGLDVHKKGVTACVLWAEGKGKKRKEKRQFGTMTRDLLALADWLRACGVTHVAMESTGVYWKPVWNVLEGQFEILLVNAQHIKAVPGRKTDQNDAEWIADLLQHGLLRRSFVPPTAIRELRDLTRYRVSLVQECNRLANRIQKVLEDANIKLASVATDALGASGRAMLKAMIEGEGDAKKLAEMSRGLLRNKIPELQGALEGRMKSHHRFLLKELMEHLEFVESKIARLEQEIGEHLRPFEEEMEQLGTIPGVDWVTASGLIAEIGVNMNQFGDPEHLGSWAGVCPGSYESAGKRKSGKTRKGNAWLRRCLCQAAWAVSTKRNNYLSALYRRLAARRGTKRAILAVAHKLLQIAFYILRDGKCYRELGADYFDRLHPYRVKRHLVRRLESLGFQVNLVPASEAL

SEQ ID NO: 395880 - protein, 321 aa, unidentified
MSELVIERFVGVDVSKGSLDVHADPPASLLPRQVGYDDASLGGLCDALQRLAPTLIVMEASGGLEQRLACELAARSLAVAVVNPRQVRSFARAQGELAKTDAIDARVLCAFARAIRPAVRPPKDADTRELADILARRRQLVDMRVQELQRQHTATSRAMRKSLLEHVAWLDKRIARLDEDMGQRLRVSEVWRAKDDLLQSIPGVGPVLSRTMLGLCPELGELNRREIAKLIGVAPLANDSGKHRGRRRIWGGRADVRRVLYMATQAAMRHNSDIAAFALRLKTAGKLPKVVIAACMRKLLTVMNTVLRTRQAWCARHHALA

SEQ ID NO: 395881 - protein, 343 aa, unidentified
MEYYVGLDVSLKQTSICVVDQTGAVVREGVVDSDPEAISVYVRSKALNAVRIGLETGPTSTWLWTELKRLGLPVICIDARHAKAVLKMQINKSDRNDAIGIARIMQTGWFKEVHVKDIDSHSVRALLASRALLVKIKRDLENHVRGLLKNLGLVIGRAKFNVFAVRAEELIEGRPELVVAIRPLLEARSAVEQQVSELDRKVMKLVRRDAQVRRFMTVPGVGPITALAFKATIDDPARFARSRSVGAYVGLTSRRHASGEVDWTGRISKCGDAMLRSYLFEAAGVLLTRVPKWSAVKAWGVKLAKRNGLRKAKVAVARKLAVILHRMWIDGTEFNWSKKEIAA

SEQ ID NO: 395882 - protein, 307 aa, unidentified
MKEHVVYCGIDVAKGQLDGALLGKRWQVPNTKAGIRRLIKMLRQRNTCPQVICEASGGYEQDLVELLHQAAVPVTLVQPQRVHQFARASGILAKTDKIDAQVLVRFGQALAPAPNAAPGAQTLLLRELDRQRAHLSGLLVAEQNRRAQLRDPSLRQLSAQLIKQIQGHIVRIDARTQAIIAADQELKAKAKMLTSFSGVGLRTATMLLAQMPELGQLNRREAAALAGLAPFNRDSGTWRGQRRVCGGRSLVRRGLYMAALTAARRNHILAPFYQRLRAAGKPPKVALTAVMRKLLIALNSALSPTPA

SEQ ID NO: 395883 - protein, 319 aa, unidentified
MTATPVFVGLDVAKTTLAVALRPSGEQWSVPNDEAGVAALVDRLRPLHPTLLVCEATGGFERAAIALLAAASLPVVVANPRQIRDFARATGELAKTDQIDAAILALFAERVRPTPRPLPDEATRLLDALLTRRRQLLDMLVAEKNRLGFAPRPLHQRIQQHIRWLERELDDVTQTLADQIEHSPVWRAKDDLLQSVPGVGPIVSAVLLAELPELGALSHKQLATLAGVAPLARDSGTLRGKRMVWGGRAGVRTALYLAALCGRRWNPQLRVFYERLIAAGKPKKVALIACARKLLTILNAMLRDTAHWKAPEGAIQHSC

SEQ ID NO: 395884 - protein, 286 aa, unidentified
MNKFKYYIGIDVSKLTLDVTVLYETVNSTKSEHYKIKNDEKSIAQFVKKQFGKYPKENLLFCFEDTGIYSLPLAYYLNDNELACWQRPAIEIKRSRGITRGKSDKIDSKDIAFYAFTQKYKFRPNKLSIKEIQQLRLLFTEREKVLKSLSSFEKTSENEDFMEKEIFASVSSVNKIIVAQLQKALKAIEAKMLAIISSEDALNQQFKLMTSIPGIGMQTAVYLLIATKGFSTFENWRQLACYAGVAPFPYQSGTSINGRNKVHHFADKKLKIAAQYVCHRCRQVRP

SEQ ID NO: 395885 - protein, 411 aa, unidentified
MLYVGIDWADDHHDVCCTDDTATTLAQFQIAHSTEGFAVLHTQIAQQQAHPAEVLVALETARGLLVYDLLCQGYQVYAINPKAVNRYKDRHVLSAAKDDRLDALAMAHLLRTDRHRFKPLAPPPEHYRLLDRLCLDLRKLIDEKTRLSNQITSCLKEYYPQAVGLFRDVASPISLAFLQAFPDPDTVRQTDRSAFAAFFRAQRYTHPQRVDALYARTHAPAPEADPVVIRAARVRLAALVDQLTVVRTHQGTYEHTIQTILEEVPEAQPLATLPGIDTRLVPELVAALGPNRPEEPKRFAAASDLAKLSGCAPITRASGKRRTVLRRHACDKRLRRTFYDWAMASLSWSRWARAYYDHHKAQHQAHATILRGLGQKWAKIVYAVWSSGDAYDEARHIEQLKRHEVVWALSL

SEQ ID NO: 395886 - protein, 377 aa, unidentified
MKKVRFIGLDVHADTIAVAVAEPGGEVRSVGLVPNRPESIRKLVKKLGPVGSLRVCYEAGPTGYVIYWQLTALGVHCEVVAPTLVPTKAGDRVKTDRRDAAKLARSYRAGDLTAVWVPDAAHEALRDLVRAREAAKKDQLRARHRLGKFLLRHGRRPPIVMTAWTHRHLMWIRQVQFEHPAQEATRLDYLHEVDHVVGRIQRLERAIDEAVKTAPSSMRAVIEALQALRGIALVSAVTIVAEVGELSRFARAPQLMGYSGMGAREDSSGPRTRRGGITKTGNAHLRRIAIEAAWAYRHRPAVGGALRKRQATVSEEVKAIGWKAQLRLHARYHKLLGRGKCRQQVITAVGRELLGFVWAIGITVERQQRKTSSSVAA

SEQ ID NO: 395887 - protein, 359 aa, unidentified
MKTNVKKNKINFKGKMVSIGVDMHKRSWQITALVDGEIVLTISLSRPTYDAFEKALSQFKGNYVRIVYEAGPGGFDLYDRLTADGIECIVTPPSLIPTQSGSRVKTDKKDSLKLATLLESNMLKKVWVLSPEQRAHRQLVRTRRQIVNHRSDVMRQIKSLLLFYSIEVPFSSRQQWTGPFIRWLHDVDCGNEYLNRSLKALVDLFDYLSAEKRRLTHEVVQLGRHKNYVQRVTLLKTIPGIGCVSAMEILVELQDITRFQTADELAAYLGLTPSQYSSGEHIRMGHITHAGNDRVRTTLVESSWILIGKDPHMRCIYEGIKQRRGGKKAIVAVARNLSIRIRRMLLDHVAYEIDFKKAA

SEQ ID NO: 395888 - protein, 359 aa, unidentified
MLAEDIAHVIGVDTHRDRHAAAILDPNGGLLAHLEVASEEAGYTRLLGFVAERAPGRRCWALEGTGCYGAGLASFLAAQGEWVIEVDRPKRPRGRSGAKSDALDAIRAGREALSREHLASPRQRGHREALRVLQLARSGAVKVAADARRQLKALLVTAPEPLRQALRGGTWLAQARACASLQPQSAAPVEDRATVRVLRLTARRVLAAHAEAEQLEKELRALVAAMAPLLLAQPGVGPVTASQLLVSWSHPGRFRSEAAFAMLAGVAPIEASSGKVVRHRLNRGGDRQLNRTLHTVVMIRQRFHQATMTYTTRRTVEGKSQREIRRCLKRAVARQLYRLLERMAALPADRWQAEAQPCS

SEQ ID NO: 395889 - protein, 358 aa, unidentified
MTQVKKLDFSGTTIYCGVDVHKKSWRVNIQDSEFELEDFTQNPDAVLLHKHLTRRYPGATYKIGYEAGFSGFSMQRTLSGSGCECWVVNAADIPTSDKDKKHKQDKADARKLCAYLQSKKLKGIHIPDAAWEHARTLVRTRERIVNNQTRSKNRIWQLIYFSGLPVPAQQQEGKYWSKRFIDGLQKMDCGGSIHLQQSLQLHIKDYLQTRQLLLEATRTIRTLCREEKYAGDIKLLRSIPGIGEINAAVLLFELQDVTRFKRFDHLCSYVGLVPDTSDSGETKRTQGITHRHNYYLRTALVESSWSVVRKDPALLMKYKEYCRRMEKNKAIIRVAKHLLSRINFVLKNKKEYVTGVVA

SEQ ID NO: 395890 - protein, 420 aa, unidentified
MDEITEEPGTLVQRVAALDIGKAVLTACIRVPHESRPGARRQEVRTYATTTPALLGLRDWLACQGVRLVVMEATSAYWKPPFYLLEDGIECQVVNARDVKNVPGRAKTDALDAVWLCKLAERGMLRPSFIPSRPQRQLRDLTRYRRTLTQERTREKQRAEKLLEDAQIKLSSVISDIFGASGRAMLAALISGQRSPRVLADLARGSMRAKAAVLQEALTGHFTEHHAFLLGMMLDRIDALSAQIADLTTRIGQAIAPHAAQVAQLDEIPGIGIIAAQDLIAEIGTGMSRFPTAGHLVSWAKFAPRARQSAGRSKAAVTGKGNPWLGGTLGEAAAGAARTKTFLASRYRRIARRRGKKRALVAVGNSILVIAWHLLSDPAARFTDLGPDWHDRLAPIRRKRQLIAELERLSGKKVTLNDAA

SEQ ID NO: 395891 - protein, 312 aa, unidentified
MIEQCFVGIDVSQDRLDVLLLPQATGFSVANNEAGWNALIARLRDLPVAAIGLEPSGGYERGVIRALLTASLSVRRINPNRLRQFARARGALAKNDRLDARLIAAYVATMPTHVMRHDPAAARIAEIVTVRRQLCDEHVAIENQAAQLEDAMLRRLAKRRLARIETDIRLLDKRLTQMIAAEADLARRYARLTSMPGVGPVLAFTLIALLPELGRMSRKQIAALVGLAPYDFDSGKLRGHRSIYGGRMPVRNVLYMAALSACRYNPALKTFHNRLAAAGKKPKVILVAVMRKMITTLNAMLRDGAGWQPQAA

SEQ ID NO: 395892 - protein, 338 aa, unidentified
MHITTLGIDLAKQVFQLHGVDARGHAVLSRRVKRSQLVEVIASLPPCVIGMEACGSAHHWGRAFEQLGHTVKLMSPQYVKPYVKTNKNDARDAEAICEAVSRPTMRCVTIKTVDQADLQAVHRARSLLIKTRTAFINQIRGLLAEYGLVIAQSPEKVRPALVRFLDDAQTGLTAFARETFSELYEQLVALEQRIAKVNQRLERLFRTHPICRKLAAVPGIGPLTATALLAAVSRPHVFQNGRHLAAWLGLVPRQFSSGGHTRLGGLSKRGNRYLRTLLIHGARAVVQRAAHKTDTRARWLWALKCRKGTNVAAVALANKNARVIWALLAHDEVYRPSA

SEQ ID NO: 395893 - protein, 344 aa, unidentified
MSKLPSDLSSVTTVAVDLAKHVFQVHGCDASGKVIVTEALRRKDVLAFFASLGPCLIAMEACGSAHHWGRELIALGHDVKLIPPAYVKPFVKRQKNDKNDAAAIYETLFRPGLRFVKVRSVDNQAVLMQHKAREMLVQQRTQLLNGLRGHLAEIGIIAAQGASNMRSLGALIHEGHPEIPDVVRASLLPMVAQIDHLDSAIKQIDGDIAAQAKADPVANRLMTIPGIGPVTASALAATVGDPSSFSGPREFAAFLGLVPRQNSSGGKTKLGPITKMGNQYLRKLLVVGAHAVLVHQAKHSDPLRNWARKLLETKPFKLVAVATANKLARMAFALMSQNTRYTAA

SEQ ID NO: 395894 - protein, 312 aa, unidentified
MADMVRLAGIDVSKDKLDVHVAPSGESRTVSYDRRGLAGLRRWLVGLGVALVAVEASGGYEREVSEVLEDAGLIVHRLNPLRVRRFAQLKGRLAKTDRLDARTIAEFARAHPQERQLRRDPRRERLAEHLLVRRHTQEAILDCINQLEHLRDGRLRRLVAARKASMERTLARLDRCLVELIAEHADLAELSQRLRSVPAVGPVLATTLIALLPELGSLTRRQVASLVGVAPFDRSSGRQIGAKSIQAGRALVRNALYMAALVASRHNPVIAAFAERLASKPGKVRLVACMRKLIVTLNAVVRDRSQWQPRSA

SEQ ID NO: 395895 - protein, 455 aa, unidentified
MGKRNGLSRGDARRNARLIRLRGVVRHDRAILAIDLADTKQALALCDHDSRVLARRSVRGHAWQLEEALRWGRGVAVQHGFAGIVVGCEPTGHRWRIVAELCDRLGMDLVCVQPLLVARAREGEDLTGAKSDPKDAVVIARLVGELRCYLPERADQIWARLRQLGARRVQLTTTAGACRQQLRDLLECAWPAVLDTAAKPLDSVTFRAAVSVVLARDQGEPAGIGRLGYARFARQVTSQLARWGGRRRCQRIMRAVWTAATDPGMLTDGVLAQRPGALERARLTLGDWHHALGQLAEAEQRMTGILDQLQLTGLVGSIQGLSAVGAAAILAESGDLARFDTARALVKHAGLCPRANESGAYAGTTRISGRGRPGLRLAAWRAVWGALAHNPVLAARHAHLTSRDHNQLTTAQARTALAAALLRWLWVVVTKRIDWQAAIAAGALDPRKEVTAPAA

SEQ ID NO: 395896 - protein, 288 aa, unidentified
MQVQGGVAPRAPVQGLIGIAVARAVMSTAVRFFLGVDWASETHQVCLVAADGKIIGERAFAHCGAGLAEMCDWLVTTSGAEPPIIAVAIEAPHGPIVEILLERRFQVDAVNPKQLDRFRDRFTVAGAKDDRRDAYVLADALRTDRHCFRRLGVEDPLVVELREWSRMAEDLQQERKGEAAEPLRKRDYHALRTLSGVAPLTRRSGKRCVVLMRQARHLRLRTAVYHWARVAIQHDARSRARYAELRKRGHSHGRALRSVADRLLAVACAMLKSQTTFDPEQAVEAVAA

SEQ ID NO: 395897 - protein, 355 aa, unidentified
MDTTKYVGMDVHTEAISVAVVNSAGKVVMESILETKANTILEFFQGLRGNVQVTFEEGTWAAWLYDLLKPHVTTVVVCNPRKNALLKDGNKGDKIDARKLAKLLHLNNLKPVYHGENGIRTLKELSRSYLTITKDLGRVMNRLKALYRSWAIPCAGQQVYAPRHRSEWLSKITEAGVRRRAEYYYQQLDALQALRHDVRRDLLAESRKHPATKLLRQIPCIGPIRAALLIALIQTPHRFRTKRQLWNYSGLGIETRDSAQYRFVGGELQRSKRPQQLRGLNENHNHDLKNIFKSAATMATISPGPFHDFYEGLLAKGRKPTMARLTLARKIASITLIVWKKGVSFDAKHLKPQAA

SEQ ID NO: 395898 - protein, 364 aa, unidentified
MEKVITHAGLDVHMERIVIATLKGQAREGTILDIPNDSKVIRRTFKRLAAEAYELRCCYEAGPCGYEVYRQLAAMGIACEVIAPALIPVRAGDRIKTDRRDASKLARLHRAGELTAITVPTEDQEAVRDLVRARDDVRKDLTAARHRLGKFLLRHGRAFHDGKNWTQRFWAWVGGQKFERVCERLTFDHYITEVKHLLSRREELDREIEQVAQTKPYAVSVGKLTCLRGLSTLSAMALLSEIGDFRRFDHPRQLMAFVGLVPSEYSSGGKEKRGRITKTGNSHVRRIWVEASWTYRHRPAVSPRARKAHTGQPATLVEYTKRAHHRLHRRYARLIGKGKKPQLAVTAVARELCGFVWGVMTMAA

SEQ ID NO: 395899 - protein, 342 aa, unidentified
MSEITRVAIDTSKAVFTIHAVDADDRPVVRRNLRRHEVVGFFEKLPRVDVAIEACAASHHWARTLQAMGHRVRLIPAQYVKPFVKRGKNDRNDAEAICEAAARPGMASVPVKSAVQQADAMLLSVRELLLRQRTQLINALRGHAAEFGLVKPIGDKGVAQLVAEIVADAALPTPAAEALALLGSEVERIEARLAAIDVKLLARHKAGDGVGPMSRMLAEVPGIGPIGALSLVLRVDAAQFKSGRHFAAWLGLTPRDHSSGGKQRLGGITRAGNERLRQLLVLGATAVIRYAKPGRASAWLLALLERRPRKLAAVALANKMARIVWAMMARGEAYRPTATAQV

SEQ ID NO: 395900 - protein, 313 aa, unidentified
MSTPCYVGLDVAKAHLDLAVYPPPSPPQRFSQDEAGLTALVAHVRTLAPALIVLEATGGYESEAATALALAGLPVAVVNPRQVRDFAKAMGQLAKTDQLDATLLALFAARVQPTPRALPDAAHQELTALVARRRQLVEMLTAERNRLPLARGRVKQDVQVHIHFLEQRLKDTDTDLRTTIHASPVWRTREQLLRSVPGIGPTTAASLLADLPELGQLTRQQIAALVGVAPLNRDSGARQGPRVTWGGRATVRGPLYMATLVATRYNVPIRAFYQRLRAAGKPRKVALIAAMRKLLSILNAIMKSQQPWAPAHP

SEQ ID NO: 395901 - protein, 401 aa, unidentified
MRAIDTRGRELSKSAFPFSNTLEGFQGLMDWATKLAASNDKEQIILGLEPTGHYWFCLATWLIGNGISVVQVNPYAVKQTKEVEDNSQLKDDRKDPKLIANLVKDGNFGMPYLPEKLYADIRRLSMLRDQINEDRIRDLNRLHREMKIYFPEYKDAFGKIDGAFCLEVLKVAPFPEDLVTLGAEGIRQIWHEAKLRGRGYVNATAIFENAKKSIGIQDGAKSSKLAVKWFVHRMIESNEQLTDIERRLHQMCMEIPYAENILAISGIGENTLCGILAEMGDISRFDDVKEIQKLSGLGLVACSSGKHKGETKISHRGRKRLRYWLFQAAKSAVAHADEFKELHTYYTTRKDNPLKKMQSLIVIACKILRVIFAILTKGMTYDPKKMLRDIVRPNEQSVQVA

SEQ ID NO: 395902 - protein, 406 aa, unidentified
MEDNSAKIFIQEVFSMPMYFVGIDISKYKHDCCIISAADQQIISKFTITNDKDGFEQLLTALNSLSNPEDIKIGFESTAHYALNLELFLENAHHSFMEVNPVLIKEYKKSTTLRRTKTDSVDCESIARWLITVEYKPHSKGFYHAYSLKSLTRLRDRLIRQRSFYLVKITNVLDHTFPEFKPFFNERLSKTALYLLENYGSAEKMARMNSASYDKLRCISRGKFSIQQFLRLKELAANTVGVNNSIFDLELNTLLTLYKSLSDEINTLETEIIKLIEEVHPHYMSIPGIGPISAAVIYAEYGDISNFSNPGQMLAFAGIEPGINDSGTESHGGRMVKHGSSQLRYVLLNACLPLIRFDLTFATYYEKKRAEGKKHRVAITHVAKKLIRVIYALERQDVDFNAQKLR

SEQ ID NO: 395903 - protein, 291 aa, unidentified
MEITVVGLDIAKRVFQLHGVDAAGKTVLRRKLQRAEVLAFFKALSPCLVGIEACGTAHYWAREIRELGHEVRLMPPSYVAPYVKRGKTDAADAAAICEAVTRPTMRFVPIKTAEQQAVLMLHRTRDLLVRQRTMLVNALRGHMAELGVIAPQGIARVADLVAVLLGENTTNVPALARQALRGLAAELEALDRGVKEIEVAIVAWHKDNEASRRLATIPGVGPITASAIVATITDPFQFHSARHLAAWIGPVPRQHSSGGKQRQGGFPNAKQHRSAKLKLRSREPVGERHAR

SEQ ID NO: 395904 - protein, 308 aa, unidentified
MHYLYYVGLDVSKETFDASLVAFEDANEMAHRKFANSRKGICSCLHWVEKRHGIRLVDVIFCAEDMGSYISEMAVCASDRTLNFNFSLISPLVIKYSMGIARGKTDRVDARRIAEYAITHYRKIALYLPAEKELCQLRTWLILRAHLAKQLVAKLVLLEKLDYKEKFADVSIQRSMLQEEIAYAETHMKTIEREMKELIAADSNICRNYKLLTSIKGVGPITAIVMLCSTLNFTKITDHRKFACYCGLAPFEHSSGTSVCGGCHTSSMANRDIKVQLNRSALIAIRCDPQLKAFTNAKWLKVNINSAS

SEQ ID NO: 395905 - protein, 385 aa, unidentified
MGSQTFIPRDYDVFSGLDVDKRSISVTFTDHDRFLKSLRMPYSAEHLLNHVRKHFPNKKVAFVYEAGPTGYGLYDGIVAQGYPCLIAAPSMIPKAPGQRVKTNRLDSRSLSENLRGGQLKSIHVPSLLYRELRHLTQLRDVLVSELAGMKQRIKSLLLFEGIEFPPAPAGSQWSFLVKDKLRKLPCSGTVRFKLDQLLDSLEFNEKQVLKAIREIRRFCQNDPELSQCMQYLMTLPGIGWITASQLLARIGDWRELNNIRQLGGFLGLVPTEHSTGERTDRGSITRTGDERLRSKLIQASWSAIRQDGELREFFRTVYRKHPREVASRVAIVAVARKLSVRVAVVLMKQRPYEVREKVHSAPLTQEETSPQGTTRREPEPGEKNS

SEQ ID NO: 395906 - protein, 407 aa, unidentified
MNAVGIDVSKGKSMVAALRPMGEVALLPQEFLHTDVGLEQMAYAIIALGEDTRVVMEATGRYHEPVASALHEYGIYVSVLNPLYIKQSGGGSIRKVKTDKADAMKIAKYGLDNWVDLREYTPMDTIRQQLKLCSRQYNLYMKTVVSLQNNLISLTDKTFPGVNELFSSPERADGHQKWVDFVMTFWHCDCICRVSEKAFTERYQKWCKRKGYHFSSEKALDIYAGSCGHFTTLPKNDNTKLLITTAAQQLLAGKITLAALREEMTRLARQLPEYETVRAMYGVGETTAAQLMAEIGDVRRFPRRSSIVGFAGVDPAVDQSGKHEAQSTPTTKRGSPHLRKTLFQIVCTYLKKAPADEPVYQFLDKKRSEGKPYFVYMTAAQNKFLRIYYARVKECLEAFAAQNTVQD

SEQ ID NO: 395907 - protein, 364 aa, unidentified
MKIVGCDLHARQQSIAMVDTETGEFTEKRLMHEGNAVRDFYASLEGPVVVGIEATGAMQWFLELLEELGIKCRVGHPAKIRAAETRKQKHDRRDAEVILDLLVMKDRFPDIWMPSTEQRDLRTLLRDRHQWVKMRTRLQHTLQAIALNHALREGRALWTAAGQGALQGLALPPYTDQRRDELLSLYTQLEKRIQQLDKQVETEAQQRPRARRLLTHPGVGPVTALATEVFLGDPTRFATANQVASYVGMIPCEHSSGKKQRLGKLTKEGNSLLRYLWVEATLHAVIKDAELKRFYRRKLIQKGMGKARVAAARKLGIRLWIMLRDEIDYEEFCRRGKLRQKGKAHAGMPDFNSGPARVVTGSTE

SEQ ID NO: 395908 - protein, 388 aa, unidentified
MIYVGIDIAKTNHYAAIIDYSTGELIESPFLVTNNKQGFDLLYSKIKNFDKDKVLIGLESTAHYGNNLIFYFHEKQFNLGIINPIQTATLRKTRIRKVKNDKVDSVLICEALSLGYYNLLSDYDIEVLEIKSLCRFHKDLKDKAAEAKIQLNTYVDQLFPELNSFFKNNLDIKTAHELLKLYQSPQDISNVNLTKLSNLLIKSSRGHYDKSRAIELKKLAKNSVGINNLALSIQIKMTIELIELLESQINDIERHVSEFIKKSDNVITSIPGIGDMTAAIIISEIGDINRFNNPGQVLAFAGLDPSVKQSGTFHASSTRMSKRGSSLLRYALILAANNVQLNTKTFNEYYNTKRLQGKLHYNALGHCAGKLIRNIFYMLKHNVKFNLD

SEQ ID NO: 395909 - protein, 443 aa, unidentified
MEQDKGSSVIPRWERVKLFAGFDWAKNKHDVVVLDATGRIVAEMVIENTAEGWHGLGQKLVTLVGEDLSVVGVAIETNRGPAVERLLQLGCTVYPLQPKAASRYRDRKAPSGGKTDRLDAWSFGDALRTDGHAWRALKPEDPLIQELRLLCRDEIHLIEQRTALVNQLQESLYEYYPAALEAFDDWTMPATWAFVQRFPTPQALAKVPKRRWQKFFHTHKLYHPATAEKRLEIFARATAFCGNEAVTKAKSMLALSLAKQLALLGTQLKAYRQRIEALFQTHPDHDMYRSLPGAGAKLAPRLLAECGDDDDRFDTHEGLQCLAGTAPVSYSSGQMHKVRFRRACRKPLRAAVHLWANLSRKESVWAQVYYQQKRDEGKSHACALRCLGQRWLKILHAMRETKTLYDEALHLRNQVAHGSWVVALSPATPASRPDHRKRRLQPC

SEQ ID NO: 395910 - protein, 401 aa, unidentified
MKTVLSVDVAKNKSMIMLMNSDGEILIDTKEIKHNLEEFEKVKEKIKEINPQNLTVFMESTGTYHLPVERYFKENGFNTLVINSLTTKNNYDTIRKTKTDKEDCYRLAKLFFVNEVEYHDLSKKDLYADLKAMTRQYFYLLQNNVSCKNRYKRLINICFPELEKIFKTTRIYDDTALNFIKEFPHAEIVKEKRIDALYNNLYKTNGRNLNFYKRLAETIKIASTNSYPGVNKEHEDTKNLSDMAKIVQNNNNIINELRDKMIETAKQSPYFKIINSFYGIGEILTAEILGELGDITRFDSPKEIIAFCGLDPTIKQSGKSINVKGAISKRGNKYARYILFNCSQMVVKLGASNYPEHPVYIYYQNKKAEGKHFYESLTACSTKILRMLYSMCKNNKQFLEN

SEQ ID NO: 395911 - protein, 372 aa, unidentified
MPQRSKVFVGLDTSKLKIAVALAEEGRQGEVRFLGEIDNTPEAVRRLVSKLASRHSEVLFCYEAGPTGYGLQRQISALGHECVVIAPSLIPKRPGERVKTNRRDALTLARLHRAGELTAIWVPDPGHEAVRELVRAREAAMADLRAKRQHLQSFLLRHGRLFPGRKPWTRAHARWLSELAFEHPAQYLVLREYRQGIEDAQARLERLTQQIAEVLTTWSMAPVVEAYQALRGVALLTAVTFVAEIGDVRRFESPRQLMAYLGLVPCESSTGERVRRGSITKAGNTRVRRVLIEGAWTYRFPARMSRLLQERQANLPQIVRTIAWKAQVRLCARYRRLMAAGKRQTVVTTAIAREMAAFLWAIGHAIEPRSAA

SEQ ID NO: 395912 - protein, 355 aa, unidentified
MNDTKYIGLDVHQATISAAVLDSTGKLLMESILETKAATILQFVDGLRGSVHVTFEEGTCAAWLHDLLKPHVANVLVCDPRKNALLKSGNKNDRIDARKLADLLRSGLLSPVYHGENGVRTLKELARSYLALNRDVTRVMNRLKAIYRSWAIPCAGQRVYAPRYRSEWLGKISEVAVRRRAEIYYQQLDALRSLRQQVRRDLLAEGGKQGATKLLRQIPSIGSIRAALLIALIQTPHRFRTKRQLWAYSGLALKTSASGEYRFVEGQLKRSKKFLAIRGLNVNHNPDLKNIFKGAAIRAAAVPGPFQQFYAALVATGMKPTMARLTLARKIAAITLIVWKKGVRFDAEYLKQQAA

SEQ ID NO: 395913 - protein, 407 aa, unidentified
MIFVGVDWAEAHHDVHVEDGDGKRLGRARLPEGVEGIARFHDLIAPFADDPAEVVIGIETDRGLFVAALVATGYDVYAVNPISTSRYRDRHSASGAKSDAGDAKVLADMVRTDRHNHRLIAGDTEGVEALKVLARAHQRMVWSRGRQTNLLRSTLREFYPAALVAFDDLSSPDALEVLRITPTPTLGANLSQPKIAAALRRGARQRRIDESAVKVQTALRSEQLQAPAVVATAMGASVAANVAVIAEMCNQIAQLAAGLEANFEQHPDAEVVRSLPGLGTVLGARVLGEFGDEPNRYATAKSRKNYAGTSPITRASGTKRTVLARHVRNQRLADALYLWAFASITASPGARIYYDLRRAAGDSHHQALRALGNRLVGILHGCLTHHTAYDETIAWGHRAETNLHEAA

SEQ ID NO: 395914 - protein, 353 aa, unidentified
MTVYCAVDFHARQQTISYFDTVDGEIRRRELHHQKDDVRGFYAQFRGEVIVGLEASGYSAWFEEMLEELQHTVWLGNPAEIRRKAPRRQKNDRRDADLILDLMLKGDFPHLHRFSAESRTVLRQLRYRHKLVKVRTIAKNSLHAISINAGLPLKRGLLTARGTERLQALALPPVLAQQREEWLQLVTVINQRIDTVEAALAQVAASDEAVTLLRTHPGIGLLTALGLRYTLLPVARFSTTRKVTAYVGLDCIEDRSAERCHMGSISKAGSRLLRFLLNEAGHTACRKDPDLKRFYQRLVHRRDRPKAKVAVARKLLVRSFIMLRDHIDYAEFLRRGVAARSARKTHRPSMPVL

SEQ ID NO: 395915 - protein, 320 aa, unidentified
MAQNDLVVAGIDVAKDKVDVCIRSLSLRRTFASTAEGRRELASWLRRKKVGKAVMEASGGYEREWAKALRDARIEVRIVDPKRVRSFAQSAGRLAKNDTIDAEMIAWFAETFDEARGQTYDAVREQLHQMVHARQALKDMQSKLASQGEHAVPAAVQRIHARISKTIAAELVTIEIAISALIQATPHFTELAEIIESVPGIGRTTSAALIAAMPELGQVNNKIVASLLGVAPFDDDSGRRRGERHIKGGRRRTRNVFYMACLGAATRHNPVLKAFYDRLVAKGKLKKVALTACMRKLISILNIMIERRQKWDAKCYAVTC

SEQ ID NO: 395916 - protein, 350 aa, unidentified
MSEHITIGMDLGDRHHTIVVFDNQGNEIACERIANTKLSLRKYFQRYAAATVAVEAGTHSPWISRELEQLGLGVYVGNPRKLRLIWDSHDKSDERDARILAMVCRLEPRLLWPVKHRNAQAYSDLELLKARDMLVQSRSKLINHVRSVVKSHGERLPGCSAASFARRVTGLLPAQLKDALFYLIETIADMSQRIVQLEHKIEQLSKQRYPETQVLHQVAGVGPLTAMAYVLTIEDPSRFSKSRMVGAYLGLTPRRDQSGASDKQLRISKAGNRYLRKLLVNCAHYILGRFGPECDLRRFGLAIAARGGKNAKKRAAVAVARKLAVLLHRLWADQRCYEPFYAIGSNREAA

SEQ ID NO: 395917 - protein, 511 aa, unidentified
MSHNPSKSFRKKTTRRKSRRSSQGSTSSGAEIEIVRYGVGLDVHKENIVVSVAAQTEQNLIIQIRTHKFRNQPQGLQELTQFLQKYLPVSHYLMECTGIYHRPVYHALEDAFPNSKTKIIAMNPLLVHRKLTDLGNKHDKADAQGMAELSFYDRLIRPSYIGTPEFFHLRDTLRNYKHAKKAANKYVNRIHRVLCSVNFMHKLNLHHEWELHLLDFMITTEGPMKRAFKAMVESSQLEKRSISSLMKHQDDYVPYFNIELPKTSRFNLRQLVIQYLQAETNAAQYLLQTEKQILKDAEFEYWYLQLLRIPCVGQVSALRLITELGDFRRFVNWKAFAKYCGVVPEIKESGGTFTPGHINRFTNTHLRTALSQIAMLYVNGYAKGSDLAKFAHRQYVLRGLPYKKAVMRVAQKLSRIIYQVLVNNVSYDATFEQTKAKIQRLQRRNTKHGTMLEFPQTRSLRRDISQLLVTNSQYMTSKSRFFLIKGFQQLIRKANVVELQGTKVDSKKNKI

SEQ ID NO: 395918 - protein, 337 aa, unidentified
MKLTTYGVDIAKRVFQIHWVVPETGEIQRKKLKRADVMAFFRLQAPGRVVMEACGAAQHWARQWQPLGHTVQLIHPKFVRPFVMANKNDAADAQAIWTAAQQPGMRFVLIKSEAAQAVLALHRIRSQLVKFRTMQMNQLRGLLGEFGIELPGGREAGLAALRDIDWERVPALLHAALQMQMQRLRELDEQMALIERQLAQWLRSDDTCSRVAEIPGVGLLTATAMIAAMGDAHHYRSGRAFAASLGLVPRHSGTGGHVQLGGISKRGDRYLRTLLMHGARSVILHQGKDKASPWLRDLLARRPFNVAVAALANKMARTIWALVAHQRRYESGYGIVA

SEQ ID NO: 395919 - protein, 340 aa, unidentified
MKKLSVVGIDIAKQVFHLVGMDEHGTILVRKRLYRAQVMAFIAQLPPTLIGMEACGGAHYWARRFREHGHEVKLMAPQFVKPYVKANKNDMRDAEAIAEAVTRPTMRFVPTKDVDQQDLQALHRVRERLMGERTALVNEVHGLMHEYGIVIPKGVAKFRQAVVEKLESEQDKLTPLSQEMFWKLMEEFVALEKQLAYYQEKLEALATTHPECQRLMTIPGVGPLSATALVAAVSDASTFKNGRQFAAWLGLVPRQHSTGGKERLLGISKRGDSYLRKLLIHGARVTLRWVGLKTDRRSQWMRQLLERRGKNRTAVAVANKNARIVWALLTSHQDYQPVQA

SEQ ID NO: 395920 - protein, 473 aa, unidentified
MTIATTPVCLGIDVACRAEHQATLAVGGKTAWKGRKFSTRPAELQRLWADLGLADPAELTVVLEPTRNAWIVLAHWFRARGARVVMVPTTQSADLRAYYSKHAKNDRLDSEILAKLPLLHPEGLREFTGPGSADPLRRLTKQRSTMVKRRTAVYSRLDALVELLGPAWYAVLGSNYGKAALMVLARYADPHAVIRLGQARLTRFLVRHSRGFWREDHARALILAARETLTLWTGPDGVAGMDFAELAADIAAEAEQARFLTEQIEDLDERIANLYDQADPDAIIASAPGVGPVVSAIIAGRLGDPHRFTSLAAVRAYSGLVPKVSQSGTSDPKLALTKAGDPLLREALYLAADQARRIDPQLGAKYARLMSGDRHHDSAICHIAANLLTRIATCWRTGKPYILRDVDGREVSQAEGRAIIKERYKVDQKKRVAAAGRRIQPRRKQGTDRESQRSQSAPTSRPATTTISSPQVA

SEQ ID NO: 395921 - protein, 321 aa, unidentified
MQANPMFVGVDVAKATLVICVQGVSGKRTVANDARSIQSWLKTLPEQAVVATESTGRYHALLARLVHRSGRNAYVLNARDVHLYAQGLGARCKSDRVDAQIIARYVAEHHAELHAWAPGSHAQEVVQALVQRRARIADHRAAVRQLLHGFKPLQPQLRQLEARFDALLAQLDRQVDEQIAREPPMADGRTRLRTITGFGPQGSALLAVLMSRLRFANADALVAYSGLDPRAKDSGTKRGRRRLSKRGSAAVRRQMYLAAFSAARSKALGALYRSIKARGFAPTEALVILARKLLRIAWAVWKSGKPFDRTRLTAPVTCAQL

SEQ ID NO: 395922 - protein, 348 aa, unidentified
MAIVGGFDVHRAQITFDYIDTDSGQVTAGQIRPATRPALRNWLQRFDGRDDVAFAVEGCTGWRFVVEELTRARVEPHLAEPADTANLRGRKKRAKTDRADARLLRELLAQHRLPESWAPPSHVLEVRTLGRLYVTLMDERRAWQQRIHAQLFHQGVPSVRALLTSDGRVALSTAELSPAGVQMLQTALGAVDALSLQIGPLRAQLQTIGTNQPGVLALTRQYGIGLLCGTIIWAELGDCRRFSNADQAVRFAGLDVTVWSSDTKRSAGRLARQGSPELRWALFEAAKSAARQTSPDHAYYDAVRDRLGGKRPALSVARKMVRRCYHALRELGDQAWLASAPSSEQQAA

SEQ ID NO: 395923 - protein, 411 aa, unidentified
MLEVKVEKCAGIDVGKKFLAVCILIGLAKQKPVGEVRRFGTSVKELERLRTWLLESGCTEVVMESTGSYWKPVFNILEGSLKVILANPEQVKALRGKKSDPNDSRWLASLLRHGLVQGSFIAPRDIRELRDLTRRRRRLVGDGAAEKNRVQKILEDANVKIGNVLSDVFGSSGQAMLEALLENKQGPAEIAQLGHWSLAPKIPLIVEALEGHRMSDHHRFMIRQCLGHMRHIEEMIEELDKEIGVRLKPYPQQVKLACTVPGIKPTAAASILAETGMDMSPEGPFPDCHHLASWATVCPGNNESADKRKNGRTRPGNRWLRATLTPTGWAGAADKKSLFQFRYQRLKLRRGGQRAVMAIAHAQLIAIYWALRNGTPYPEQLQKLEQDRREAQIRYHLQKLNKLGYAPDMHG

SEQ ID NO: 395924 - protein, 323 aa, unidentified
MMSTSVLGIDIAKQKFAAALLVNGKTKHKTCNNSAEGFETLNLWLQKQGIQKVHACMEATGNYGEDLAIYLHDAGHIVSIVNPARIKGFAQSELVRTKTDKLDAALIARFCLAMKPGPWIPPAPEIRSLRALVRRVDSLVDMRTQEKNRIHTAHESVIFLIKEHIAYLDQEIEKIRRQIANLIKQHPDLKRKKELLDSIPALGKVTIPHILAELDDPGKFSHVREMVAFIGLAPKETLSGSSVKGKPRLCKIGHARLRKALYMPALVSIQCNPVMIAFYNRLKDKGKNGKVIVCAIMRKLVHVIFGVLKSGKKYDPNFLTISA

SEQ ID NO: 395925 - protein, 417 aa, unidentified
MAMKIVRFNCCGMDVHKNLVVATIGITDSKTNITEYFQRSFSTLNSDLYRLKDWLKSHHCSDVCMESTGKYWIPIFNILEDEINVRLTHPKYVKAIKGKKTDKKDSKWICDLFKHDLIKFSFIPPREIRELREIARYRYKLVCMRSSERNRYQNCMTVSNIGLASVISDPFGKTASNIMKEVMKSNVIDDDKILKLVHRNCKNKDKILDSLHGYRIESDQRFKMEKSLDHMEYLDQLIDSCEVELIKRAYPLRRSFQHITQIKGISALSAILIISEIGIDMSQFESDKQLVSWAGLSPANNESAGKKKSVRISKAGQYLKPLLVQCALSAIKDKASYFGRKYSNIKKRRGHKKAIIAIARMMLVSIYHMILTGEEFQPTDHESLMSPKSNTDQSLTVEKALNFLKRSGIDISSILVN

SEQ ID NO: 395926 - protein, 343 aa, unidentified
MKTVTTIGLDIAKSVFQVHGIDAAGKVVIRKQLKRGRVLPFFMKLPPCLVGIEACASSHYWARELTALGHEVKLMPPAYVKPYVKRQKNDAADAEAICEAVQRPSMRFVPIKSPEQQAGLALHRTRHLLIRQLTATTNSIRAHLAELGIVAPVGRRGVDALIALVRSDEDGRIPSLMRACLMTLSLQAQALKEQIRILDQRLVEWHRSSELSIRLDAIPGVGPALATALVASVADPKSFRCGRDFAAWIGLVPKQNSSGGRERLGNITKAGDRYIRSLFCAGALAVIRFVKQHGAKHRPWLTSLMDRRPIKVAAIALANKLARMAWAMMAKGESYKEPVALAR

SEQ ID NO: 395927 - protein, 349 aa, unidentified
MTDRYLSYIGRIVYVGVDVHKETYTVTCVCNKQIVKTATVQADPAGLAASLLRWLPGATLYSAYEAGFSAFVLHRALTTAGITNIVVNPASVAVAANDKVKTDRRDAKKLAIDLADGRLRGIYVPTEEEELARLLPRTRAQIVEHRATIARQIKAKLHQFGLIAPASRRMISNRYLREIAAWSLPPELRVSLTLLAEQWRFATRQLIEIRRLLREQAAAQADLETVYRSVPGIGAVVARTLATELGDMTRFANERALFSYTGLTPSEYSSGPSVRRGHMSRQGSGRVRHVLIETAWRALPRDQVLQEIFDRIAATRGKKRAIVAIARRLTGRIRACFRHGTTYAVGTYA

SEQ ID NO: 395928 - protein, 344 aa, unidentified
MDHFAGLDVSVKETSVCIVNDTGRIVREVKVASEPEALLAVLKNPAYHFERIGLEAGPLSQWLFSALAEAELPVVCVETRHMQAVLKAQINKTDRNDTRGIAQMIRVGLYRPVHVKTLRSQKLRMLLTHRKLLQSKAIAIENDLRGTLRNFGLKVGMVGKVRFEARIQELVENLPHLAELVEPLLIVRRALREQIVILHRRLLAIVRDDEVCQRLMTTPGVGPVVALTYRATVDVPARFRKSKSVGAVFGLTCSKYQSGEIDRSGSISRCGDEMMRVMLYEAAQSMLRSKKWSWLKAWAMQIARRRGMKKAIVALARRLAVIMHRIWVDGTEFRWTREQAAAAA

SEQ ID NO: 395929 - protein, 415 aa, unidentified
MKEQEIAVYIGVDWGDEWHSVHLRAEGSTKIEHFELEQKPDLLHEWIAQLRQRSGGRRVAIAIEQRKGAVIHALMMYDFLVLYPINPKALARYRETFRTSGAKDDPTDSELLLDLLSKHRDKLRAWIPDTVQVRKLQLLCEQRRKMINQRVALTNRLISLLKQYFPQALDWVGDIASIQCCEFLMNWPDLAAVQRVRKTTLEKFYRCHNCRKASVIDERISQIASARPLTSDPAIIEPLSLSVQTYATQLRSLIRAIEQFDKRIAHVFAQLPDHDLFDSFPGAGEVCAPRLAAAFGSDRARWDSAVQIQSHSGIAPVTERSGKALWVHHRLACPKFIKQTFHEFADQSIRFSPWARAYYDQQRGRGNDHHAALRALAYKWIRILFRCWKDRKPYDEEKYIQSLRRHGSTLLEHFA

SEQ ID NO: 395930 - protein, 415 aa, unidentified
MEKKEITFEQVIERGCGIDVHKKVLVVTIRGTGIKEETRTFNSFTESIEQLRDWLKKMGITHIAMESTGVYWKPIFNILEADFEIILVNARHIKNVPGRKTDKKDSKWIAKLLLSGLLKASFIPSKSIRELRDLTRYRRKIVGQIASEKNRIQKILEDANIKLSSVVSDMSGATATKIINAMIDGETSINESLKFRDGKMQSSIEELASSLKGNLTEHHKFMLTTIKESIIEKELIIEKLDKRIDEQLQASELKLDAELLQTIPGVGKDGSASIIAEIGNDMSQFPNEQHLSSWAGMSPGNNESAGKKKSSRITHGDKYLKILLVQCAWAATRTKNTYLRKKYDSLVGRRGKKRALIAVGHKILIAAYFILKDKIKYKELGAEFLQEKKKDKQVKYYLKQLKELGAEIEIKNHVA

SEQ ID NO: 395931 - protein, 438 aa, unidentified
MASISKIEYFRQIKNSITKNKKYLLIGIDASKSSSVACFYNIEQEILLRKYIVEHNIANFQQFCAKIEQIMKMNDFQLAVIGVEPTANYHKPLCEYLKNKGYLATYVSSVAAKNNRKTIDSGRWGKNDPRDAYNIIDLMRQGKILYYRDENTESKDIHKYLMLRQRLVKLKSILKNRIQNNIWACHSPELCSIFSNSGDPDSLVLLENCPSSQQVRNMDFQSFMKLFPEGSKTRSKRSARLRQIWLKAKTSIGLPIPSSTTFEAKLISRDIQRTQKDIACIDKILSDFCLQPGVYRNLMSMPGFGVFTTSVFKSILGDINDFRHSRQIVKFAGLDIEPMASGNFKGKEKISKKGNSLLRFAVCQAVNIAVAKNKVIRQLFQDKLKERGSSKEAKAKLKIKFAEKFLKTAFVLLKNNVQFDINLFTVPVDDPVQGTVRA

SEQ ID NO: 395932 - protein, 376 aa, unidentified
MREKLRFLGLDVHAETIAVAVAEPDGEVRSLGTIANREDSIRKFIKKLGSPEQLRACYEAGPTGFVVYWQLTQLGVECAVVAPTLVPKKPGDRVKTDRRDALKLARSHRSDDLTAVWVPDEGSEALRDLVRQREASKQDQLRARHRLTKFLLRSGHRPPPAVKAWTERYMEWLQQIHYTQPAQEATLVDCLNEVEHMGARVRRLEEAILEVVKLAPQPMQEVIRGLQALRGVAHISAVSIATELGNITSRFQSARKLMGYGGTFPSEDSSGKRIRRGGITKSGNAHLRRIVVESAWSYRHRPWIGAKLRRRQEGVPAEITEIAWKAQNRLHRRYMKLMATGKDQRKIMTAIGRELLGFIWAIGIKAEAACKQQMAA

SEQ ID NO: 395933 - protein, 361 aa, unidentified
MGGLKHQKEKRSMEYFAGLDVSVKHTSVCIVDETGKIVREVKVASEPAALLAVLPSPTYHFKRIGLEAGPLSQWLFSALADAGLPVVCVETRHMRAVLKAQINKTDRNDARGIAQMMRVGLYRPVHVKTLRSQKLRMLLTHRKLLQSKAIAIENDLRGTLRNFGLKVGMAGRTKFEARIKELVEDFPDLAALVEPLLVVRRTLREQLDLLNRRLLAVVRDDEVCRRLMTVPGVGPVVALTYRATVDVAARFRKSKSVGAVFGLTPARDQSGERDRPGAISRCGDDMMRTTLYEAAQIVLVHSAKWSWLNAWAMKVARHRGMKKAIVALARRLAVIMHRIWVDGTEFCWTRQVAAVCQPPMI

SEQ ID NO: 395934 - protein, 481 aa, unidentified
MRTKPPEKIQKATSPSKRGHWNEMNRKQRREMMRQIQSEDLSLEVVHPHAAGIDIGNECHYVAVPPTRDSQPVRHFGCTTVELKALAEWLKQCGIRTVAMQSTGVYWIAVYDILETAGLEVYLVNARDTKNLPGRKSDVQESQWLMKLHTYGLLRNSFRPSQEIRTMRTYWRQRNDLIRAAVSHIQRMQKALTQMNIQLGNVLSDVSGVTGQAILKAILAGERDPHKLAALRDPRVKASEEQIARYLEGNWQEDLLFVLKQEQEAYEFCQQQMAECDRQLQQYLQQREDRSQGASLPQEMRKGRLVRKKGNKPMFALRTELFRITGTDLTQVDGIDVVTAATILSEAGWDMSKWEDEHHFVSWLRLCPDNRISGNKVLAKGRLPTNNRASIALRMAASTLRVSNTYLGAQFRRFRTKLGAPVAIKAMAAKLARLVYRMLRYGMKYVDQGAKIYEAQHRQRQIGQLKWNAAKLGFRVLEAAT

SEQ ID NO: 395935 - protein, 358 aa, unidentified
MKYIGCDFHPSFQQITMLDLETGELVRRRLVHGNGEARAFYEALQGPVVVGIEASGNTLWFERLLSRLGHELWMGDATRIRRQDPRMQKYDDRDASLILQLMVEKRFPKVWIPTMEERDLRQLLIHRHHLVRMRTRVKNQLQHIAMNQGVQRKYKLWTQAGLKVLRELELEPWTRLRRETLLEMLEELEQKIRPLEQAVEREVEARPAARRLATHPGVGPVIALATVLTMGEAKRFANSRSWVSYLGLNPRERSSGVKRRMGGISKQGNPFLRFLLVQGAAIAARGDKSLARVYARLKAKKHHGVAKVAVARKLAVRLYWMARTQKPYPEVVRMQGSQSHPVAEVMAVRLNRPPASRP

SEQ ID NO: 395936 - protein, 463 aa, unidentified
MEGKARRNHRPRKGPSLLERVNPNAAGIDCGSAEHYVAVPQDRDAEPVRRFKTFTADLHRLADWLSSCRIETVAMESTSVYWIPIYEILVARGIKVVLVNARHLKNAPGRKSDVTDCEWLRDLHSVGLLRGSFRPEEEIVTLRSYLRHRETLVQSAATMVTRMQKALVQMNLQLPVVIKDIIGLTGLRIIREIVEGETDPAHLAKHRDPHCRASEAEIRAALTGHYRPEHLFALKQNLELFDALQRQVEACDVQIEACLAAQAAKMTSPSSPLPTPRHRRNRRSNEPQFDVRTILYRLVNTDLSQLDGIGPHAALRLISEIGTDMSHWRTERHFTSWLTLAPNNRVSGGRLLSSKTQPSANRAAAIFRMAAMSLARTQTALGAFYRRLACRIGKAKAITATARKLAILVYRCLKGQIVYSDPGAAAYDLRHRDSVVRRLRRRAAALGFNLVSGETGEILDGVS

SEQ ID NO: 395937 - protein, 390 aa, unidentified
MRYFIGIDVAKFKHTACVIDTYGTVLIESFDFTNDIIGFQSLLKNIKPFLKKKHLVGMEDTGHYGDNLRNFLLDKQYKVVMLNPIVTSHIRKASNKAKNDRIDCFVIANTMMNPNFYRDQHVQSIDYTTIRQLTRMHHTHTEEINRYKCQLQKSIDIVFPEFNSLLNTKYSKTYLEILDTYHGAHTIANTDIRLLRNTLKNVGVGRSVSISAEQLKKAAKESIGQHNLAIEMDIPFLISLIRRLTSILGEIDKKIEEFSHQLNSPILDISGISHFSAMSIISELGDITYFSSEKKLIKFAGVNPCVYESGTYSMTHTRLEKKGSKYLRKTLYQIIDVVIRFNPIFQAFYQKKISQGKSYRCAQGHCIRKLLRVIYKILSTGERFNPEKLK

SEQ ID NO: 395938 - protein, 403 aa, unidentified
MKRLNSAKRIQENQRIFLGFIWLNFAGFGLSLAQFMEWPAPPSGVVGLPAVQEEELDMALATISVLGADLGKNVCSVVGLDSSGAVVMRRKMRRETLAGLAGKLPACVVAMEACCGAHHLGRLFAAHGHDVRLMSPEYVRPYVKAHKNDDRDAEGIAEAATRPTMRFVELKSQDQLDMQTLHRSRDRLVGERTALINQLRAILLERGLVAAQGKRKLEQFLAVLMDEQGGAGLSPRMISLVADARAQWAELDRRIAAFDAEFVALAKENEDARRLATIPGVGALIASAFVAAVGRAESFERGRDLAAWLGLVPRQFTTGGKPKLLGISKRGDKYLRRQLIHGARAALPYVAERDTPLGRWAKALLGRAHRNVAVVAFANKLARIAWAVLRRQQRFAAQPTMAA

SEQ ID NO: 395939 - protein, 374 aa, unidentified
MSPIDVVDGVRSQQLAALGVVVAIESHQGALDMQITTIGLDIAKNVFQVHGIDATEKVVVRKQLRRGQMLAFFKALAPCLIGMEACATAHYWARELTKLGHQVRLMPAKDVKAYVKRNKNDAADAEAICEAVRRPTMRFVPVKSAEQQARLMQHRARDLLMRQRTQLINALRAHLAELGIAAAQGREGIKELLAIVAQDGDTRLPVDAHASLIVLAAQLQAVQTMIGSIEKRIVAQHRSSEENKRLQTIPGIGVLGASTIVAVVPDPKVFRSGRDFAAWIGIVPREDSTGGKQKLGPISKQGDRYLRRILVVGACAVLRRARQQPEKYPWLTQLLARRPFKVVAVALANKMARIAWALLAKGGTYRAPALAAAA

SEQ ID NO: 395940 - protein, 308 aa, unidentified
MTTIYTGLDIAKLNLQLHLLGRRHDLPNTAAGHRRLVKLLAALPGAHVICEATGGYERDLVAALHDARIPVSVLNPARVRHFARATGQRAKTDPLDAAILTAYGQALQPQPTAPRTPQEHHLSELIRRRVQVLALLVAQRQQAQRLTVPALRRQAQSLVRRLERDLEQIETQLTQLQAQAKALDERVQKLIAITGVGTITALGVLAELPELGTLNRRQAAALAGLAPHPRESGQWHGRRRIGGGRAPVRRALYMAALVAARSNRQLKAFYQRLRAAGKPAKVALTAVMRKLIILMNHTLKNPNFVPQN

SEQ ID NO: 395941 - protein, 344 aa, unidentified
MKVTTVGIDLAKNVFQLHGVNEYGKTVIKKQIRRDQMAEFFVNLPACLIGMEACGSAHHWARKLQGFGHTVKLMAPQFVKPYVKTNKNDSADAEAICEAVARPNMRFVPIKNIEQQAVLALHRVRQGFVKARTAQANQIRGLLSEFGLIVPQGIGYIASRVPELIEDASNELPGSFRILVQRLLDHLKELDRQVDELEMQIVKWHRQSDASNKLAQVPGIGPITASALVASLGDAKNFDGGRQVAAWLGLVPKQHSSGGKQNLLGISKRGDTYLRTLLIHGARSVIYRAQHKPESCSWINGVVSRRNKNVAAVALANKNARIVWALLANEREFQPDYTTAKVAT

SEQ ID NO: 395942 - protein, 433 aa, unidentified
MQDAEDEPLFAERVAGLDIAKAEVEVTIRVPSDTRPGRRQQETRTFGTTRRQLLALADWLRSWQVTKAGMEATGDYWKPVFFLLESQGFDCDLYNAAQVKALPGRPKTDRADSIWLAKIVERGMIASSFVPPEPIRKLRTHTRYRRHLTQARTAEKQRVEKLLEDGHLKLSSVISDIHGVSGRDMLNALTAGQRDPRALAQLARGTMRGKIRRLEEALECSFFTSEHAAVLAMMLTTIDHYTAQIEQLTAKIEVLTEPWLHQIGQLDEIDGIGVICAQDIIAEIGVDMTVFPTASHLVSWARWSPQVKQSAGKRKGSNATGRGNPYLGAALGEGVASAGRTQSFLGAKYRRLTKRMPKKKALVATGNSMITIMHALLSDPDARYTDLGADYYEQRMHARRQARNHVKSLERLGYKVVIEALSPDTGQPLTAAG

SEQ ID NO: 395943 - protein, 279 aa, unidentified
MDKHIKVYVGLDVHKDSISLAAAQEGRETARLITQIPHDVNMLLKKLAVLGDAQSVHVVYEAGPTGYGLQRALIAHGYACEIIAPSLIPKRGGDRINTDKRDSIRLAELSRAGELHAIWVPDPSHEALRDLARAREDAVNARTQMRHQLRGFLLRHGIRYPGKTAWTKMFYRWLGTLKFEERSSQIAFGEYLLALEASDERVNRMSVALMQSIEGWRFEPVVKALCALRGIDVISAIGLVAEIGDIERFDHPRKLMGYLGLVPSEHSSGDRISRGAITK

SEQ ID NO: 395944 - protein, 322 aa, unidentified
MAMLSFGGIDVSKDRLDITVLPDEQCSSVSNDAAGWAELVEQLRGSSITAIGVEASGGYERGVVRALLAANLSVRQINPFKLRQFAKASGTLAKNDRLDARMIASFVAIMPTRSVQRQAPMIEQLAAMLTVRRQLSDHKVATENASKLLEDSMLRRLSRRRVARLTADIELLDQRLVEIVTADAALAYRFRLLTSMPGVGAVLACTLIALLPELGQMSRKQVAALVGLAPYDFDSGKLKGRRCIWGGRARVRHVLYMAALSASNWNPALKGFHDRLEATGKKPKVVIVAVMRKMITTLNAMLRDGTTWVDRYNGRRSVPTAR

SEQ ID NO: 395945 - protein, 388 aa, unidentified
MFKTVERPDAPAAIRMDIGAIFVSLELSRSTWLLTSVSPGAAEKMSQHATPAGDLRRLFECLAELKRKALARTGKTYPIIVIQEAGLDGFWIHRALEREGIESHVVDAASIAVPRRRRRAKTDRIDGKTLLRTLMAFKRGEPRVCAMAKPPSVEEEDRRRLGRERKTLIAERVEHVNRIKGLLFTQGAIDYQPSRRDRRARLEALRTGIGDPLPARLKDLISRELDRLELLLAQIKAVEAERDALLAEQSRQAPAAAGMLLAFKGIGPEFAAVLWLEGLFRSFANRRQVAAYAGLAPTPWRSGSIAREQGASKAGNPRLRATLIELAWLWRRHQPKSALTLWFEDRVKANGGRVKKALLVALARKLLVALWKYVTTGLVIEGAVMTTA

SEQ ID NO: 395946 - protein, 423 aa, unidentified
MDILYERVAGLDVHKDTVVACVRILADGKATRECRTFATATEQLGELRAWLEECRCTHVAMEATGVYWMPVFRILGEGKFELIVANAAHIKNVPGRKTDMNDATWIANLLACGLIKASFVPTEEMQELRALTRTRKQLVREQTRHVQRIDKTLAEANIKLGSVISDIMGASGRRIIEAMIAGIRQPRKLAGLASKQIKATPKELYDALHGRLTDHHRFLLDLHLRQWDGLDETIRKIDREIDQRIAHIDTKAGDDSAPFHTLIELMYTIPGVSAVAAPAILSEIGRDMSRFPTAGHLVAWAGLCPGQNESAGKRKPSRLRKGAPWLKTMLVQCAWAAKRKKDSYYRAQFFRLQANRGPQKAVCAVAASILTAIYHMLKDGTEHRDLGAGYFDRRPTKVKANRLVARLNKLGFTVQLQPIAEAA

SEQ ID NO: 395947 - protein, 347 aa, unidentified
MRFYTKQHRYYCGIDLHARTMYLCVLNQQGEILLHRNMPCSPDFFLKAIAPYREDMAVAVECIFTWYWLADLCSKENIPFVLGHALYMKAIHGGKAKNDKIDAHKIAVLLRGGMLPMAYVYPALMRSTRDLLRRRMHLMHKRSELLTHIQNTNSQYCLPQFGKKIAYKKNRQGVAEHFADSSVRKSIEMDLSLIDHYDKLLTEVELYITQNAKIHDVNAFNRLRSVHGIGKILALVILYEIHEIDRFPTVQDFVSYARLVKCAKESAGKRHGSSGAKIGNVHLKWAFSEASVLFLRANPAGQRYADKLTSKHGKAKALSILAHKLGRAVYYMLKRDKAFDMNKFLNS

SEQ ID NO: 395948 - protein, 448 aa, unidentified
MAKKISYRAVPIERLTSALLAALLVGASKLIVAIDVAKLKMMAGFGSEDGSVVRLVRFESPMQTREFVELVVATGRALGVRVEALMEPTGTYGDGLRALLVSRGVSVFMQSPKRVHDAREVFDGVPSLHDAKSCVVMAQLHRQGVSRAYSPLSEDRVRLRALVRRREVFEKPLQMHLSELEGLLGRHWPELLIDMDVWRRKTPLELLVAYPCPAEVALHREEAREVMRRASGNTIKELEIHRVLDSASRSVGTSASDEEREVIRAVAREALHVRGSIATIDKVIERTAEEHEATRGIAKVVGRVTAVVLVAYLGPLSEYASPATLEKACGLNLKIKSSGNLIGRPSITKRGSSEARAWLYLAAMRLVKNDPLIAAWYRARGGYRGDRKLTALIAVTRKLARALWHVARGAPFDATKLVDARALDVTPRTPLAAPASSPTSHDAPAPLG

SEQ ID NO: 395949 - protein, 344 aa, unidentified
MKDVRILGVDLGKNSCSIVGLDGAGRVLLRRRTRREGVIALAAKLPGCVVAMEACCGAHHLGRLLVEQGHEVRLMSPEYVRPYVKAQKNDDRDAEAIAEAATRPTMRFVALKSEAQLDVQVLHRVRDRLVGQRTSLTNQIRSILLERGIVVPQGRRSLLEALAVLSSEPDGSQVGTRVQRLLDDMLDQWRALDARIKALDDEFAEMARNDPAARRLATIPGIGVLNATALVAAIGDGRTFSRGRDLSAWLGLVPHQATTGGRPKLLGITKRGSRYLRKLVIQGARAALPSLARTATPLGGWLRGLLARAHGNTVVVALASKLIRIAWALLRNETRFVAGGAAVA

SEQ ID NO: 395950 - protein, 407 aa, unidentified
MIFAGVDWAEAHHDVHVQDEQGRRLAGGRLPDGIEGIARFHEMVAAHAGDAGEVVIGIETDRGLFAGALVAAGYQVFAVNPLSVSRYRDRHSVSGAKSDPADAKVLADLVRTDRHNHRRVIPDTDLAEAVKVLARAHQSMIWNRRRQLNQLRSALREFYPAALAAFDDLASADAIEVLKVAPEPRLGAALSKTQIGAALRRGGRTRRIDQRTAQIQAALRAPQLQPPPVIAAAMGAAVAAQASVTGEMSRQIAVLEQQLAADFEQHPDAEVVRSLPGLGTILSARVLGEFGDVPDRYADAKSRRNYAGTSPVTRASGTRRVVLARHVRNRRLADAIYLWAFSALSISPGARVFYDQRRAAGDTHHQALRALGNHLVGFLHGCLTKHTVYDEQTAWAHRPRPELKTAA

SEQ ID NO: 395951 - protein, 450 aa, unidentified
MSDANDRGGDGDGDGDGDGGGGGGGGGGGIIGFDQLTHFGGFDWASAEHLFVVVDPRGKIVLSWRFPDDAEGWAQFHRRVADFPRLGVAIETSCGPAVERLLDAGLAVYPLNPKAATRYRDRKAPAGAKDDALDAWSFGDALRTDGHGWRPLLPQDPLTTELRLLCRDEVKLIAQRTALVNQLRAALCEYYPAALDAFDDWVCESSWRFVIAFPDPQALVAAGRRKWERFLHAHKLYRPETAQRRLAGFADATKFASPNPAVTRAKTLLAVALAKQLCLLQSQLDAYRARIVELFHDHPDHDCFGSLPGAGPKIAPRLLSELGGNRQVFATAEALQNYAGTSPVTRQSGRSRIVTVRRACNKTLRATVHLWADLSRRSCAWAEAYYRKKREDGMAHAAAIRCLGQRWVKILWRMWRDHAPYSEALHMKNQTEHGSWVIRLLPGTPAATGG

SEQ ID NO: 395952 - protein, 355 aa, unidentified
MKILALDLSKYKTVGCDYEAETGRHEFATVLTTPKGLHDLIVDREPDRVVIEICSIAGWVCDLVRSLGIEMQVASTNDERWQWRKVKTKNDRRDGLKLAQLSARNELDLVHVPRSEMRQWRALIAYRHHLVQRRTKIKNHIRELLLREGQLLPRHRSAWTQEGLAALEAMVKPLGEVSMDELWRGELEVELAQFKAVQTQLTEVVAKLDALGAANHNVRLLQTTKGVGPRLAEAVVTMFDDPRRFRRGASVSAYIGMVPKQWDSGETARLGKITRHGNRLVRSLLVEVAWCALRHNPWARETYQRISGGKKSRKKIAIVAVGRKLLVRCWAMLRDQTEWHWEGQSAVVTPPAPTA

SEQ ID NO: 395953 - protein, 332 aa, unidentified
MTYCIGIDVSKQSLELWDGIHEEEVPNEKGLKTLKKLLKKKYGGEWNQAVRFIYEPTGPYSNYLRAFAAEHEVQVYEVNPKKSANFAKVVGNRSKTDTVDAKMLYSFHLLLKESEFSIPEMDEIAEQLGAYLGSYEMIQKTRTMPSNHLQSLEYKSGVTRKLKDSLEKELKHLGTMEEQLEKEMEAYAEDHQETREDLGNLLSVKGIGVISAMGLLYLFRKYPGANRNEITALAGLDPVRRQSGSSLNGGRKISRAGDPMLRKVLSLACMNSIQHNQCIQAFYKHLVSDHHKKPNVALVACMRKLLLIAHHLYVTESKYRTLEHDATLCLTS

SEQ ID NO: 395954 - protein, 323 aa, unidentified
MSKHSMVCAGIDTGKYKLDVALNGCAEQLQIDNAADGYAALSVWLKRCQVKRVGIEASGGYEQEVVAWLRRDGFVVVVFQPAQVRAYAKFLLQRAKNDKIDAALIAACTAAIKKIHAPPDPRLAPLAERMTLIDQLTEQIAGYKNFREGSRDLRVRQLWKEQIAHLNKLLRAELKELVAATRQHRDLAERLDLIESVDGIGLKTAVAILVRMPEIGRLTRTQVASLAGLAPFDDDSATHVGIRHIGGGRERLRGSLYKAALAAAFHWNPQLIAFYRRLRAAGRPHKYALVACARKLLIFVNTVVERGTPWVSNGSPSAVRTAA

SEQ ID NO: 395955 - protein, 326 aa, unidentified
MQSYLGVDVSKAKLDVALLLPNDKFKSKVFANARSGHQALVQWLLAQLPSGLQSLHICMESTGGYHEALACALHDQGLIVSVVNPLLVKRFAESNGQRNKTDAADAKCLAQFCREKRPERWEAPSVGVRTLQALVARLETLQDMRLAECNRRDVAHVSVIESIAGVIAELDAAIAQVKAQIAKTIDDDPDLKRRAQLLETIPGLGEKSIAQLLAYIGRPERFRNVKAVTAFASLTPLIRQSGTSLDKRRGTHPMGHQELKRALYFPAMVAGRHNPLVATFWNRLKAQGKPGKVIVVACMHKLLAIAYGVLRSGKPFNADHLKPNAA

SEQ ID NO: 395956 - protein, 346 aa, unidentified
MKITTIGIDLAKIVFQIHGVDERGKVAVRKQLKRAEMSSYFANLEPCLIGMEACGSAHHWARKLEGYGHTVKLMAPQFVKPYVKTNKNDMADAEAICEAVSRPNMRFVAMKTVEQQAILSVHRARQGFVRARTAQANQIRGLLSEFGIVIPQGIGAIAKRVPEILEDGENGLPGTMRNLIDRLTENLKEMNRQAKELEAQIQIWHREHAASRKLAEIPGLGPITASAIVATIGDAREFKNGRQLAAWMGLVPKQNSSGGKQNLLGISKRGDTYLRTLMIHGARAVIRFAGKKAEPESWMRKLMVRRNKNVAAVALANKNARIVWALLAKDRMFCPDYAPAEKTAGA

SEQ ID NO: 395957 - protein, 270 aa, unidentified
MMLIGCDFHPSWQQVCWVDTETGETQQCKLVHAAGEAEKFYGQFSAPARIGMEATGNCQWFVEMLAALGHEVWIGDAAKIRASDVRQQKHDRRDAALLLRLLMEERFPRIWTPSSEQKDLRQLLIHRYKLVRLRAQAKNGLQHLAMNQGLQKKNRLWSKAGQQALRDLALQPWASRRREDLLNVLVMLDRQIESLDLAVQQAAEQNENTKLLMSQPGIGPVTSLAFVLTMGDVSRFPRGKQVASYLGLIPREYSSGGKQRFGPLSKATGL

SEQ ID NO: 395958 - protein, 367 aa, unidentified
MKYVGIDLHTNRFTCCYLSDNSKEKRTETFNLDSQGLISFYSTINKDTYILIEATVNTFSFAALFKDMVKEVIVANTYQLKAIGVPEKKTDKLDAAKLAEKLKVQIVSGVQQIVPVLIPPKEIRDLRALFATYRSLRKEIGRTKNRIHSLLKENLYPFTKEYIFGKKARQVIRKISPDRLLSFQINLLMNALEHLEAAFDKLVNEIMKAGVQYMPQIEILTSMTGISVITAIAVIADVSDISRFRNSKHFASYLRSAPRVESSNDKTIIKSTTKAGRKLSITLLSQSLNHFRDSNKMLTRFYERASVYKKKGIVRMALCRRVITQIYQMLKKHEYHYFRNSVLHEKKMAEYKKFLKGENIIFSQIAA

SEQ ID NO: 395959 - protein, 346 aa, unidentified
MRIIGCDLHSRQQTISMLDTETGEVTEKTLAHEGETVREFYAALPKPVLVGLEATGSMFWFLRLLEELGIEYRVGHPAAIRKAETRKQKHDRRDAELIRRLLVENRFPQIWLPTAEQRDLRTLLQHRHQLVRMRVMTQNGLQGLALSQGLRRGAKLWSQAGQQALDSLPLADYSRTRRQQLQELRQQLNQRLQQLDQAVSEQAERRTGARLLLSHPGVGPITALATEVFLGDARRFPNAKAVASYAGMIPSEHSSGGKQRNGSLSKQGNPLLRQLWVEAARAAARKDARLKQFYRKKLVQKGLGKAVVATARKLGIRLWIMMRDQIDYTEFCRRAERRCPHAGMPE

SEQ ID NO: 395960 - protein, 387 aa, unidentified
MPSTPPKTSAQSRAATHGDTAMLCVSLELSSTTWLVTSLAPGCDKMSKYRIEGGDSCGLLDLLRRLQARAAKQLGAPVRIVTIQEAGFDGFWIDRLLEAAGIESHVVDPASVAVPRRRRRAKTDKIDGELLLRTLLAWLRGEPRVCSMVVPPSSEEEDRRRLARERDILVNERSAHTNRIAGLLSTQGIRGYRPLRRDCRARLEKLETGDGRPLPPGLKAEIGRELDRLELLRQQIAEVEAARDSLLAAEDNSPGKLLLQLRSIGPEFASVLWLEGLYRRFDNRRQLAAFSGLAPSPWRSGKIDHEQGIAKSGNAKLRSTMIELAWLWLRYQPDSELSRWFQERVRGNKTRRYRKITIVAMARKLLIALWRYVTEGIVPEGAVMKAA

SEQ ID NO: 395961 - protein, 362 aa, unidentified
MKKGIKRASQMEAKHNINAAMTVGLDLGDRFSRYCLVNALGEVVEEGRIQSSLEAMRRHFEGELRLRVALECGTHSPWVSRLLSELGHQVVVANARKIAMITASTSKNDRNDAEQLARLAAYDPRLLSPLRHRSQQRQQDLNLIQVRATLVRARTMLINALRGLVKSAGSRLPSCSTESLAVRAPAHIPSALAAAGRPLLEQIVALNGQIAGLDREIEKLREKYPEIGVLRTVPGVGPVVAAAYVLTLDRCDQAGNRAAGAWLGLRPRQKQSGDSDPQMRISKEGDRYLRSLLVQSAQYILGRFGPDSALRRWGMKLAQNGGKRGKKRALVAVARKLAVLLHSMWRSGKRFEPFPQPAAAAA

SEQ ID NO: 395962 - protein, 427 aa, unidentified
MFRARDEFKHSGFLQRHGLLVGRLWGQNQSIWRVTSETAGASGGGRVISKEGQAFYSSKRFDNHLDGFSERRSTVGGISQPQLLKGGDEMKLYGAIDLHSNNNVTVLTDEQDKVVYQKCLTNDLPLILEQLSPYAPSIEGIVVESTYNWYWLVDGLMEQGHGVHLANTAAIQQYEGLKYTDDDSDARWLAHLFRLGVLPEGYIYPKEERAVRDLLRKRSQLVRQKTANLLSIQNLYSRNTGSSISANRIKQLNSEKVDAQFPNVDLALAVKANLTVIRSLETEIAILERIVKERVKLRPAYRYLLSMSGIGQILALTIMLETGDIRRFRKVGNFASYCRCVGSEKLSNGKRKGSGNTKNGNKYLSWAFVEAANFAIRFEPLIARYYQRKKSKTHRVVAIKTVAHKLARACYHVMRDEVPFDVNRAFA

SEQ ID NO: 395963 - protein, 453 aa, unidentified
MAQRNRSISRKPGRSRAALTITHPNAAGIDIGSAAHFVAVPADRDDEPVREFPSFTVDLNAIADWLAACGVDTVAMESTGVYWIPLFELLESRGFTVLLVNARHVKNVSGRKSDVLDCQWLQQLMTYGLLSGAFRPAEQVCVLRSLWRQRGMLLKNQARDVQHMQKALTQMNIQLTNVISDVVGETGQKILRAIVAGERDGQVLGAMKNTRIQASVEEIAKSLHGNWRAEHLFALKQALGAFDFIGTQLTECDQEIEAQLQRLQTHDGEPAKGKKRGRARNAPKFDLRTQLFKMCGVDLTRIDGIDVTTALAVISETGADMSRFPTVGHFASWMGLCPGTKITGGKVMSGKTKRCANRAAQALRLAAAALRTSRSALGAYFRRMCSRMDKPKAVTAAAHKLARLIYTMLTKGEEYTDQGQEYYEERYRERVLRQLSQRAQKLGMKLVATEQPA

SEQ ID NO: 395964 - protein, 378 aa, unidentified
MRFYNRVHRFYCGVDLHARTMYLCILDHGGAIVFHREVPAEPGALLEAIAPFREGLVVACECLFCWYWLADLCQAENIAFVLGHALYMKAIHGGKAADDKIDSSKIAHLLRGGNLPFAYAYPKGLRETRDLLRRRMYLVHKRAEVVAHVVNANSQYNLPPFGKKLIYARNRQVLKIAQRFADASVRKNIELDLALLDSLDELIGDVELYLDRTVKVDDADSFYRLRSIPGVGKILALVLFYEIHDIGRFASEGEFLSYARLVRPLKTSAGKVKGGGGAKIGNAHLKWAFSEAACLLARESGQAKRFLARKEKQHGKPKALGILAARLGRAVYHMLRQKRAFDAKRFWNGEPKVPPTPKGKSVMTPGRRRKGARCVLEA

SEQ ID NO: 395965 - protein, 392 aa, unidentified
MFYLGIDIAKVNHVASLIAEDGSILVKAIKFTNSNEGLQKLMDSIKDYDQSQIYCAMEATGSYWLSLFSSLTDKGFNVSVFNPYQIKSFRGAYSNRKQKNDVIDSIIIANFLSFNGINQTSLPNDDLLALKNLTRYRSNLVDNISRAKTQIQGILNKVFPEYSDVFSDTFGEASKQILLNCPTPNEVVSFNTRKLANLLKKASKGRHGTDTVRKVKDLAKNSFGIKFTGDACSFEIKQLINQIIFLENQVDELEHKIKEIYSKLDSHLESIPGVGKATAPVILAEIGDINNFSSPSKLTAFAGIDPSENQSGNKKSTDEKTSKRGSPYLRHAIYQAAFIASNNDPIMHAYYVKKRAEGKHHYVALAGVERKLLGIIFHVLKENRDYRPSKLS

SEQ ID NO: 395966 - protein, 394 aa, unidentified
MIIIGIDIGKNKHEATLIDEKGNIIGKSIKFENSTAGFNKLISSINNYNISNDKFVFSMEATGHYWLALFSKLVESDYNVQVINPIQTDACRKFYIRETKNDSKDSFLIAQVTRFNGYSKTTLPDEVMISLKELTRFRTFLVDDISDYKRKATVVLDKIFPEYTQIFSDTFGKTSKEILTKYPLPKDILNEDLESLAKVLSTSSKGRLGYSKAEQLQNLAKESFGIKFATEALVMEIKSILSTIEHLQNQVSKLDEKIAVLLRSLGTTIETIPGIGPVLGAIIVSEIGDINRFSHASKLVAYAGIDPTVKQSGEFNATKNRMSKRGTPYLRRALWTASIVAAFNDPNLHEYYLKKKNEGKHHGTIIGAIARKLIYRIFIVLKDNIPYQCNKCEA

SEQ ID NO: 395967 - protein, 387 aa, unidentified
MSASAYSPVQAAIDVKLAAIFISLELSRSNWLVTSLSPGSGEKMSKHSVHGGDAAGLLDLLARLRVRAQARTREIFPIIVIQEAGLDGFWVHRTLEKEGIESHVVDAASVLTSRRRRRAKTDRIDGEALLRTLLAYKRGEPRVCSMVRAPDPGEEDRRRLCRERRTLVAERVEHVNRIKGLLFAQGVSDYEPLNRNRRQRLEELTTGDGRPLPMHLKAQVRRELDRLELILEQLKAVEAERDALLAPAAASTPAGMTALAGLRGIGPEFAAVLWFECLFRSFSNRRQVAAYAGLAPTPWQSGSVQHEQGVSKSGNARLRTTMIQLAWLWLRYQPTSELSLWFQERVKRDNGRGKKAAIVALARKLLVALWKFVSSGVVIEGAAMKAA

SEQ ID NO: 395968 - protein, 312 aa, unidentified
MTDIICGVDVGSETLDARIGQDGAWQQFTNTVEGIAALAAFCQSHRADLVVMEATGGYERQPFAHLWAANMPAAIVNPCAVRRFAEAMGVLEKTDRIDCGVIAWFAGVKRIKPTPPASATQCRLAALVVRLRQLTELRVEQSNQRRLVTEPDVLLDFQSILTTIASQIRVLEAKIAATIAADPLWAALDAAFRSVKGVADRTVARLMAQLPEIGTISNKAAAKLTGLAPIARDSGKRQGKRPIRGGREGVRSLLFVVAEVVRRHDPDFKAFHQRLCAAGKPKKLVRVALARKLLVRLNAKARDVRNELAHAA

SEQ ID NO: 395969 - protein, 415 aa, unidentified
MVDVIVERCAGLDVHRDTVVATVRVPGSGKSRRRRVQETRTFGTTIGQLERLSDWLAECGVTRVGMESTGCYWKTVFYALEDRFDCWLVNARHLRNVPGRKSDVIDSRWCCELVELGLVRPSFVPPPEIRRLRDLTRLRATQVQERTRAIERLEKVLQDAGIKLTSVASGVYSVSARAMLEALLAGVTDPAILAELARGRMRKKIPQLREALASRFDIGHHGVLVAGLLAHIDALDQAIGNLEARIGIATAPYADLIELLCTIPGVGVRIAEILIAECGLDMSVFPTVAHLASWAAICPGTNQSGRKRGSGKTRNGDTWLCTALTQAAHAAVHTKNSYLASHYWQLRGRRGDAKAIGAIRHDILTAYYHIVRDRVAYRELGSDWLSRRHSPEHRTRRLVKQLEALGHHVTLQPAA

SEQ ID NO: 395970 - protein, 374 aa, unidentified
MEHYSTLYVGMDVHRDSFTLAHYALDMKQPTGIVKTDNDYRRIVAYVHRLREKYGKETRIVCGYEAGCLGYTLYHQLTKAKIESIILAPTTLPSPRGGKRVKTDGRDAANIAQCLAYGTYSPVHVPSAEDEQVKEFIRMRNDHCQMLKKLKQQILSFCLRHGYQYSGTRSNWTQAHMKWLDALQPEGLLGDTLEEYLTSFRYHQNKLERLDRRIEEISREETYREPVGKLCCLIGVKPLTALSVVSEVSDMHRFPTAEKFAAYLGLVPGEHSSGNSVRRSSITKAGNVHVRALLTEAAQSYTRGKVGYKSSALKKRQSGQSETVIAYADRANERLRRRYYQMTLQNGKRGNVAKTAIARELACFMWGLLTDHVV

SEQ ID NO: 395971 - protein, 400 aa, unidentified
MKFVGWDWASISHDVTVMDDQGRVVERWALRHTEQALGETLARLARHGQPAEVPVIIERSAGLVVDRLLAAGHPVVPVHPTAFHAARPRWGAAGAKSDPGDSYKLADYLRTDGHRLRRLQPLDPGLRELQALVRLREDHVRARTAASNQLGALLDAYWPGPKAMFCKLASDIALAFLTDYPTPQSAARLGHARLAGFCRRHAYRGGKPPAELLARLRTAPVPPNGLAPAVLAQLVTTQIQLLRSLQATIAELEAAIKQRVAQHPRAELLRGLPGVGTINLAQLLAEVGPILDRVSTAEQAAAECGAAPVTKASGKTSGVYFRWAANPRARTALTAFAHNARMQSAWAGRLYADARARGKRNPHATRIVARAWLRVIWACWHTHTPYDPRAHLAEQRLAAA

SEQ ID NO: 395972 - protein, 409 aa, unidentified
MLFVGDDWAEDHHDIELMDASGRVLARARLPEGAAGMARLHAMIGEQLGDDAEDAGVAVGIETDRGLWVQALVAAGYEVFGINPLQAARYRQRHSVSGAKSDPGDSHVLADMVRTDSHQLRLVASDSEGAQAVKVVARAHKTLIWERTRHVQRLRHQLRDFFPAALEAFEDLDAPDTLELLAKAPDPASAAKLTTAQVSAALKRARRRNISDKTAVIRAALRGDQLTQPPAVTAACAAVIRSLVAVITTLGEQIKVLEKQVDAHFSQHPDAEIILSQPGLGPVLGARVLAEFGDDPHRYASSKARKNYAATSPITRQSGKKKTVMARYVHNDRLRDALDGQAFAALNASQGARACYDAHRAAGAGHRAALRHLANRLVGILHGCLKTRTLYDEAAAWPQIASQEIKTAA

SEQ ID NO: 395973 - protein, 382 aa, unidentified
MKKAITGVRRFVGLDVHADTISAAVAEKEAAVRDLGAIANREESVRKLAKRLTEGGPWAACYEAGPTGYALYWQLTKLGIPCMVIAPSLVPSRAGDRVKTDRRDAQRLACSFRAGELTPVWVPDAAHEALRDLVRAREAAKQDQLRARHRLGKFLLRHGKRTPQQMRAWTESYLQWIKGKVAFNQRAQQVTLEDYLNEVDHVGERISRLEKAIDEAVEQAPASMRELIQALQALRGVAKVGAVTIVAEVGSLTRFEHPRQLMGYSGAVSSENSSGAKIRRGGITKTGNAHLRRVIVEAAWSQRYKPVLSVAMRKRQEGLSAEVQELAAKARHRLHLRYVHLLGRGKTKQEVVTAVAREMLGFIWAIGVSVERAQVQRAKGAA

SEQ ID NO: 395974 - protein, 403 aa, unidentified
MNAVGIDVSKGKSTVTIRRPGDVVLMPPCDIPHTQSSINNLIRQLHSLDGETKACMEHTGRYYEPVATWLSDAGIFVSAVNPKLVKDFNNDSLRKIKSDKADSVKIARYALDKWQSLEPYSITDELRAQLKVMNRQFHFYVKQKTAMKNNLIGLIDQTYPNANTYFNSPTRSDGSQKWVDFVSTYWHVDCIRKMSLNAFVEHYQNWCKRKKYAFNKSKAEEIYTKTKELVPVFPKNEITKHIIRQAVDQLNSTSVTVETIRTLMNETASKLPEYSIVMQFKGIGPSLGPQLMAEIGDVTRFTHKGALTAFAGVDPGVNESGSYAQKSVPTSKRGSSNLRKTLFQVMDVLIKTMPQDDPVYQFMDRKRTQGKPYYVYMTAGANKFLRIYYGRVKEYLSVLPDPS

SEQ ID NO: 395975 - protein, 371 aa, unidentified
MTEAVKYVGLDVHKETIAVAVADGERGGEVRFVGTVANEDDAIRKLVKRLTGPGVTLNVCYEAGPCGYGLHRLLSKLGQNCIVIAPSMMPRRPGDHVKTDRRDAMTLARLLRAGELTAIWVPDEAHEAVRDLIRARRSAQDDAIGAKQTVRSFLLRHDRRFGGKAAWTKMYWRWLSEQRFEFPHQQLAFEEMQKRVLEAQARVARLEAALAEAVDAWRFAPLVRNLQVLRGIRLVSAATLVAEVGDLTRFDNPKQLMAYVGLVPSEHSSGAKTKRGRITRAGNAQARTMLIEAGWSYRLPAREERRYRERVIDLPEDIQAIGWKAQVRLCQRYRRLAATGKPQPKVTTAIARELVGYAWDIARRVSPAIAG

SEQ ID NO: 395976 - protein, 347 aa, unidentified
MLALHRDLDVVIGVDTHNDTHTAAAVGATGAVLEHLTVPADPAGYRQLIAFGRRHDARLWAIEGTGSFGAGLTTALLARCERIVEVDRPQRPARRGGVKSDDIDAVRAARQALAGVGLSEPRRRGDREAIRVLLTTRAQAITFRTRAISALHALVTSAPDGLRERLRTLPLGQLLQTCAGLRDSSRRSVEESATVLALRSTARRALGCEREAAELEVQLDRLVRRLAPELLGQLGIGPVVAGQLITSWSHRGRIRSEAAFAKLGGAAPIEASSGTVTRHRLNRSGDRQLNRALHTIVLVRMRQDSATKDYVQRRLAQGKTIRDIKRCLKRYIARQLFRQLEALSTTT

SEQ ID NO: 395977 - protein, 364 aa, unidentified
MEATGRFVGIDLGKRTYEMCLIDQNGKITRTNGKTDFKGLEKLCERLGADDLVAIEACNLAMRIERQIRMSVGCKVCILNPYKLAIIYMSTRKTDKEDALKLARILKSHDEDELPIVTPPTDEEWERRKLLSEYKSLKGLRTKEINKLHAIFEHAGFTQFKRKDMCCEKNRNNILPLLKGYEKEEAERLIERLSLIEKQIEQLMQRINEKAESDEKVQIAMTVPGIGPITALAYVAYMGDLSRFDNPHQVSNFIGFVPKVDNSCTIRHSGRTTKRGNALLRSMLVQAAWSAVRSKNGGALKDKYKYMSQTKGIPKGKSIVTTARKIGELLYMLLKTNTEYKPQKFITPEVKISKLAEEALAVNM

SEQ ID NO: 395978 - protein, 323 aa, unidentified
MEEGRIQSTVAALEKHFGGEPRMRIGLEAGTHSPWMSRWLNSYGHEVIVANPRKIPTLTRSESKNDRNDAEQLARLAAFDPKLLHPIEHRSLERQQDLNLIHTRSVLVRARTMLVNSVRGLVKSAGGRLAACSSESFPEKVSATVPRELKAACEPLLKQIVQMNRTLEAMDKQIEGLAKKYPEIVLLRTAPGVGPVVAACYVLTLDRPEAMETNRQAGAYLGLRPSQQQSGDSNPQCGITKTGNTYLRSLLVQSAQYILGRFGPDSELRGWGLKLAASGGRRGKKRAIVAVARKLAVLLLSMWRKGQKFEPFPHSATQPVAAV

SEQ ID NO: 395979 - protein, 419 aa, unidentified
MSGQLDPELLVGIDWATEKHDVCLLAPGGVVLGEKTFRNDGAGLAEMADWIADHLAGPPEAAHVAIEVPHGPVVETLLERRFHVFTLNPKQLDRFRDRFTVAGAKDDRRDARVLADSLRTDRKAFRCLEVDAPAVLELREWSRMADDLQQDRNRMTNRLREQLRRYYPQALQVGTDPGADWFLSLVEAVPTPAAAREADPREVGRLLKQHRIRRITAAQALDLLRQKPVCVAPGTAEAALAHIGQLTVRLRLVNAQLREAHKKLDQICRHLQAEDPGNAEVEGRAGGQRDIEILRSLPGVGRIVLATLLAEGARPLRDRDYHAARSLSGVAPVTRRSGKRVVVVMRQACQVRLRRAMYHWGRVAAQRDPLWKERYAALRARGHSHGRACRGIADRLLAVAIAMLRDGTLYDGARLRKSA

SEQ ID NO: 395980 - protein, 312 aa, unidentified
MGGGFVGIDVSKDRLDVAFRPVGEHLQVGNDPRGMARLVRMLERLQPQLVVLEASGGYEAALFERLSAKQLPVALLNPRHVRQFARASGRLAKTDAIDAKVLAHFAEVMKPEPRRRADAETRKLRVLVGRRYQLIQMMTAELHRQSHSLAALREGFVATIRCFKKQIASIDKQLATLIQETPALREKAELLRTTPGIGVVASATLLARLPELGTLDRKKIAALVGVAPFNRDSGKLKGKRAIWGGRSDVRGVLYMSALVAVRRNPPLRDFYRRLRQAGKTPKMALTACMRKLIVILNALIKHRTPWALAVSC

SEQ ID NO: 395981 - protein, 362 aa, unidentified
MGTITMGVDLAKQVFSVAELDAAGRVRQRRDLKRDAFAAWLVQLPPGTVVAMEACSGAHHWARRCHAHGLVPRLMAAQFVKPFRKSQGNKNDRNDAEAIATAARQGNMRFVAVKTVDQQARLSWHRVREGYKAEGLAISNRLRGLLAEFGVVVARSDHALRRALGDEVVRQQLPAMLHGLLDDLQRHWQQVRERVAACDAGIATHAKADVRSLRAQQLLGVGPLTADAVIATIGDGRDFMHGRQLSAWLGLTPTQHSSGGKQRLGGISRRGDSDLRTLLIQGARSSLQRANAVALEKASAEQIWIRALTQRLPFGKVLVAIANKHARQLWAMLARDEDYDAEAWLRHPMVQRPAKRSHAMAA

SEQ ID NO: 395982 - protein, 388 aa, unidentified
MGPVVGLDVSKGASVLQAFTERNKPYGRCKRIAHTPEGFEQLGELLKELEKSTGFEPAVVLEATGHYHRSLVAYLEREGYQHFIVNPLQSKRAKGTHLRKVKTDAMDAWHLAEMYYRGDLKPHRTWSEALTELQHLTRQHEFICSMLVQAKQNARALLDQVCPAYETVFDNLFCSTSLQVLRQMLSSTPVTAETIQAAAGSSHGQAWVQEKLERIQALPPLSQSSKAQQMALLSVLNMVLTGQEQLRQLEKAMEELAMMLPEVELLRTIPGVGDKLAAVLAAEIGDASQFETPKQLVAYAGLDPGVHSSGKFTASSSRISKRGSKRLRRALYLAAQCGIRNGVNERLKAYFEKKRKEGKPCKVAVIACANKLLHHVHAILVKGEPYKA

SEQ ID NO: 395983 - protein, 416 aa, unidentified
MEAYYIAGIDVHKKMLAVVIAAVQPGEWEFQRRRFGTTPAQLRELAGWLREQGVSEAVMESTAQYWRPVWAALQGQLRLHLAHAHSNGARRGRKSDFRDAERLTHRLVAGDLVLSFVPDAEQQSWRDLTRTRYQLVVERGRVQSQVENLLERASIKLSSVITDLFGSSGRRILQALSEEAGAPWHSQNLARLAHPSLRASHEQLAEALDGHWSSEHRLLLQLHLERLSLLDRQIETLQQQMAESMKAHQAAVARLCQVPGIRTDAALQLLAEVGPTAAAFPSASHLASWAGLCPGQQESAGQSYSKRPAQGNWQMKRVFHQVAHAAALKKGSFFQHLYRRLIVRMGPQKAIGALANRLCRLIWKILHEGVHYVAKGTAPLDPRAIRRRQQKVAAEFRKLGYNVQYVPLQPVITLAT

SEQ ID NO: 395984 - protein, 331 aa, unidentified
MKFKSFIGIDVSKSKLDAYLKINHLHAIFNNNEEGFKELVEWVTENSGLVLARELLFGFESTGIYSSELALFLDKHPLPFYIMSGLELKRSLGIRRGKSDKADSKDIAEYLYEKQEKIEPTFLPSQTIQDLKKLFNYRERLVKERAAFKTRLKEYETIVSRNKLKVYLKSHTTVIACLDKQIETIEKEIQKLTHSEELLMNQYKLLNSIKGIGPQTALALIILTGGFTKFSSSRRFASYAGTAPFPNQSGTFNGRTKTSKLANKRIKTLLTLCAGTAIQYSTEMKNYYQKRVGEGKSKMSTLNIIRNKLLSRAFAVVNRNSNYVDTLKYAA

SEQ ID NO: 395985 - protein, 422 aa, unidentified
MRAVGLDVHLDFCEVAIVEDGEVRSAGRIETKPEQIELFASSLGPKDRVALEVTGNAWEIARIIEGHVAQVLVVSPSDTGIRQARAKTDRLDARTLARLLAAGSLDAVWRPDRQTWVMRRRLSRRSQLVWARSRAKNEIHAVLMRQLVGRAPFSDLFGVKGREWLSELELAHEERETVDSAVRQIEFLDAEISEVERLIATAALESTEIRRLMSVPGVNVIVAASFLAAIGDISRFENPRKLVGYLGLDPRVRQSGPGPATHGHISKQGSVRARHALVEACWSAVRQPGPLRAFYERIRARRGHSVAIVAAARKLACLFWALLTRQEDYAYAQPSLTKKKLRRLEITAGAARYTPGAAGIWSANDAVRQAERELARQAEVAYTRTVRDWHAAQANKVGASATLGRASNQPSKGKAARQTTSP

SEQ ID NO: 395986 - protein, 458 aa, unidentified
MTPRQDHLPHPQRRSRCVRLHVTNPDAAGIDVGADAHWVAVPVERDPEPVRRFGTCTADLEALADWLQACRVTTVALESTGVYWIPLYELLQARGFQVLLVDARQVARAPGRPKTDVKDCQWIQRLHSYGLLSAAFRPAEQVVVLRAYLRQRDMLVTYAGQHIQHMQKALEQLNVKLTEVVSDITGVTGMAIIKAILGGARDPVGLAKLRDPRCKESEATIARALQGTWREEHLFALRQAVTLYEFYHQQIGVCDQAIEAHLRTFADQSGGQPLPYRPRRRKREANEPRFDARARLYAACGVDLTAIEGIDETTALVLLSEIGTDMSRWPSLKHFASWLGLCPQHKISGGKILSRRVRRGSSRAKRALRLAARSLHHSKSALGAFFRRLKARQGTPSAITAAAHKLARLVYTLLKHGTDYVAQEMAAYEVRYRERKVQSISRQAQALGFVLVPAVAGE

SEQ ID NO: 395987 - protein, 413 aa, unidentified
MEKVYDKCCGIDVHKKLIVACFKCGKKQEVREFGATTRELLKLADWLGSGGCEMVAMESTASYWKPLYNVLESSGLNAMVVNARHMKAVPGRKTDVKDAEWIADLLQHGLLQASYIPDKDPRELRELVRYRKSLVGERTRELNRFQKMLEGANIKLSGTVSDINGKSARSILEYILTGESFDDAKYDEMYDKKVIAHNLKATKEQIIDDLNGVMSPLQRKMMRTLLKHLDELNIHIKELDDDIDRFMKPEEKQASAAIQDVTGIGNTSAQAVISVIGTDMERFPDDAHIASWAGLCPGDNESAGKRKSGKTRKGNALLRETLINCAHAAVKNKKSYFYAQFMRISAHRGKKRAYVAVAHSMLVAIYHILKDGVVFKDLGADYYNQFNKERKIKAYLKKLKALGWEDPAAGQPA

SEQ ID NO: 395988 - protein, 323 aa, unidentified
MQNMMIGVDLAKNVFQVHGASQTGEVLYRKKLSRKQFSAFMALQEPSLVIFEACGSAHYWAREMEALDHEVRLIAPQYVRPFVKRQKNDAADAEAIVIAARQPEMRFVEPKTIEQQSRAAVFRGRERLVHQRTADVNALRALLYEHGHVFPAGIRHLNRMTALIEDEISGLPMLIREECKDLLAQIAEKTARIIERTVKLKTLAAQSDKARRLQTMPGVGPLTAVAVEAFGPDMAQFKTGRDFAAWLGLVPKQHSSGGKERLGRMTKAGQADIRRLLIIGAMSRLTWLGRRTIPAGSWLSRMLARKPKMLVAIALANKMARQI

SEQ ID NO: 395989 - protein, 412 aa, unidentified
MKQMRERVGGLDVHRDSVVACTRVAGPTGSVEIAKERFSTTQQGLAELSAFLMEAGVTTVAMEATGIYWRPIYYALEGLFEELWLCNAQHVKNVPGRKTDLSDAEWLADVAAHGMVRPSFVPPPEIRELRELTRYRKTQVDARAKEIQRLEKVLQDAGVKLTSVASMVWSASSREMIEAMIAGERDPVVLAQMAKGVMRKKIDRLEVALQGNFKPHHAILCRQVIDHLDFLDRSIATLSAEICSRLAPFEPQVALLSSIPGVSVTTAQVIVAETGGDMGRFPTAGHLCAWAGVAPASHESAGKRRPAGTRQGAPWLRRALVEAARAGSRTKDSYYSAQYSRTARRRGPNKAAVAVAHSMLETAWHLLTTGAFYQDPGADYFERRHDPAIEAKRLQRRIEALGFSVTITDNAA

SEQ ID NO: 395990 - protein, 413 aa, unidentified
MDVLHPRCCGLDVHKSSISACILLREAGRVQKHQRRFGAMTQELQELAEWLRQFGVTQVAMESSGVYWKPVWNILEGQFTVVLANAQHIKNVPGRKTDQKDAEWIAQLLQYGLLRASYIPCEIIRDLRDLTRMRASLSQEGSRISSRIQKVLEDANVKLASVATNVLGKSGRAMLEDIITGEDNPEHLASLALGHLRVKIPQLRLALEGKIRSHHRFLLRRLLDQIQFLEHEIALLDERLEDIGRQRPDLAQAVARWDTIPGIDQVAAWALLAEIGDNMAQFPSAEHLASWAALCPGNHESAGKRLRGTTRQGSTWLCRMACQCAWAAARTKNTYLSSQFRRLAARRGKKRAIIAVAHTLIVIGYHLHKNQSNYDDLGGDYFDRIHSDGLKRYLVKRLQQLGHKVTLEPTEVA

SEQ ID NO: 395991 - protein, 353 aa, unidentified
MKPRSTKSKGMNEVEGNRNDVLYIGADVHERETQLAIFEPGGTLLQEKRIPTKDLQSYIHCLPAKEKHLALESVGFIYPLYDKLKQVPGCDVAVANPKRIRQTSDSKQKHDRADAKLLGNLLRTNFLKRSYMPDQETREKRFLINDRVKYGLRRSELRGSIRWLLKRRGIEIEQDPFSREGRRKLREEVQLQEIDIRLQELELIESIVEKLDRQIYYAVSLDEKAKLLDTLPGIAPYTALFLSSAFDNVDRFPDSKHACAYLGLVPSLHQSGNVSFTGHITRDGNKFLRRNLVECARSAVRKDPRLKEFYLKLKHKRGERKALIAVARKMVSYAFWMLKRNQTYEELTPWDGS

SEQ ID NO: 395992 - protein, 372 aa, unidentified
MNQNILYVGLDVDDTQYHGSAFSKDTGEVIDFKCRPTLKGLLQQLDRMARHFKGHKIKLCYEASYVGYCLQRDLVSNGIHCDIVSPSSIPSPRGKAIKTDRIDAGYLAQFYANDLLTIVQPPDEEQEQDRDMLRSRQKVMQQRNQLRKHLQAVLRRNGLHYKAQTQYKSHWTKHHYFWLVRTIDGLSGSLKVNLELLLRQLIALNEVLTEYGQQIDVLANSLRYQSAVQSLTCYKGIKNVFALTIITEIGDIKRFSHPRKLVSWIGMDIREYSSGGKYNRFGITKHGNRYIRTAFVEANQRGYRTAKIGQDLKSRRKHIAPELVNIADRCLRRLNKKGNRLLMVGKHPNKVKVACAREMVGFVWESLNKAAA

SEQ ID NO: 395993 - protein, 482 aa, unidentified
MKKPSIYSDRSQELLVLFEKAGNLSKLMCVPIDYAKKDHLVMFCNGNGEVLRKPFSVNNSVDGVKYLLDQVSRSCRFRHIQFNHVFFGGEDVNSYAENFANTLRAKGWLVANVNAHDAKKQRENLQASTDRLDLMGIATMLLSRRANCCPAQTGVYRNLRTLVRHRKKLVKMKTEVRNRIHTIVDRLFPGFLNEKKSGIRPFTNSSLYLMQERFSAPQIRRRQRGALIRNLEKRGTKKTEQVAAKLQEYASQVLTTPDEYTATLQVSLTNHVIHYRCLFDGAQQLVNEMAQLLAQTQGAFLTSIKGIGIVLASGVTAEIGNPLVQRSTDQLASYAGIVPKVKQSGGRQGSSITGRVSKRSNHILKDFVVQSAFHIGRYGPKDLHDDFSRREAAGQHAEFGIARRFIRMAMCMMRTSQVYLPPDKRSTYTKPERRADYYLAMWPYLRDKWSKASTLNVAFAKDKPLGQWRYIVQEVYGIKLKM

SEQ ID NO: 395994 - protein, 319 aa, unidentified
MAQKDRVVVGIDVAKDKVDACIRSLSLRQTFPSTPQGHRQLVAWLRKHKVDKAAMEASGGYERDWAKLLRQAGIEVRIVDPKRVRSFALSAGRLAKNDAIDAEMIAWFAETFSEAPGQTHDAAHEELVALVKARKGLIDVKIRLQSQNEHAVPGPVQKAHARVLKSLAAEIAKLEAAISAMVKATPEFAERAEIIESVPGFAEATSATLIAGIPELGQVSDDIAAALIGVAPYDDDSGKRRGERHIKGGRRWVRNAIYMPCLGAATQNNPVLKAFYQRLIAKGKEPKVALIACMRKLIVILNTLIARRQKWDPSRYALN

SEQ ID NO: 395995 - protein, 346 aa, unidentified
MKVLLKQTVGIDVAQNELVVSLGRMDEQISIEVYGYKVFPNTKKGFLSLVSWVNKQTSTTTEVRYVMEATGVYHESLAYYLYSIQKQVSIVLPNKISNYAKTLDIKTITDKSASQAIARFGLERQLEVWQPPLKIFNDLRQLCREREQLVHERTMLKNQLHAERTSATSSESSVKRTKKRIALIDLQEKQIREEIAILIKGDQTLVEKMKIVSSIPGIGNLTAVTIIAETNGFELIKNKRQLVSYAGLDVREKTSGTSVKSKPRISKRGNRNLRKVMHFPALTAIRTDERFRDIFLRMVSRHGIKMKAIVAIQRKLLELTFILWKNNSYYNSEHQHQIIPFQEVAM

SEQ ID NO: 395996 - protein, 344 aa, unidentified
MSEYAGQQFVGIDLHRRRSVIVRTTESGEVLESVRILNDVESLNRVIERAGEDPEVVLEATYGWYWAVDALQEAGARVHLAHPLGVKAFEYRRVKNDFRDAADLADLLRMGRLPEAWIAPPATREVRELVRHRAKLVALRSHCKAEIHAVLAKCGIQVSMSDLFGVAGTALLDRLQLAAPYAARIASLRRLIDDLDFEIEVFTNAVQGRLHADPGYVAVQQIPGIGPILGAVFVAEVGDVTRFDSAPQLACWAGLTPKHHESDTHVRRGPITKQGSRLVRWAAVESVKRVGPHTRVGAVRDRVAERRGGNIGAVAAARQQIEYVFYALRDGHVRALAHPARASA

SEQ ID NO: 395997 - protein, 452 aa, unidentified
MEERLYASKVLSLDCIERNAAGIDVGSTEVYVAVPADRDPQPVRCFATFTADLRAMVAWLVQCGITTVAMESTGVYWVAPYELLEEAGIRVCLVNSRHVKHVPGRKSDVQDCQWLQYLHSVGLLNASFRPKSEICALRALSRHRSSLIESAAVHVQHMHKALTQMNLQIHHVLSDMTGQSGMAIMEAIVSGQRSAVQLAALCHQRVRSAPETIIKSLVGNYRSEHLFTLKQSLTVYKQYQQLMTECDLEIKRMTELLNGKIDPPPQTLLPPPGSSKAKRSKNQFHFNMESELNRIFGVDLTAIPGISTLTAHTLLAEIGPDLSRFPNVGAFASWLALCPANNKSGGKVLSSKTRQTNSRASTALRIAAQTLARSKSHLGNYYRRMRARLGGPQAVTAAAHKLARIIYHLLTTGQAYDETVFLKEDKKQAQRHEKRLRKQANALGFQLVPVAA

SEQ ID NO: 395998 - protein, 338 aa, unidentified
MRLYAGIDLHSSNNYLGIIDEENKLVYRGKLPNDLRKIVKVLEPFKEEIEGVVVESTFNWYWLVDGLMEQGYWVHLANPAAIKQYEGLKHVDDKRDALWLANLLRLGILPEGYIYPKEERPVRDLLRKRLQLVRHRTSHILSIQNIISRNRGKRVSSNEIKKLDEEHVRELLKEEHLVLSVNASVGVIRYLTDKIEQIERVVKRRMKLRKEYEGLLTLPGVGEILALTIMLEVGEMGRFQKVGNYSSYCRCVRSTRISNQKKKGEGNRKNGNKYLSWAYVEAANFAIRSYPRVHSYYQRKKAKSNGAVAIKVISNKLSRASYYIMRDQVVYDEAKLFN

SEQ ID NO: 395999 - protein, 342 aa, unidentified
MYYIGLDVASKSSFVYVIDGRGKKIESKEIPTDKDSYRQYFGDWSKKAVYVAVEAGGHTRWIHDTITGFGINVYVVNPHKVKLIAESKKKTDKIDAKILAELLRMDGLPKRVHVATGDSRELRDLLRSRQQLIKSTTNVMNHVRGLLRQEGIRLRPKALCTGEIFGRLRESGGVPAHFVPILACYESTIAELYKQRRALDTVIAGYEHEDIDLLRTIPGFGEVSSKTVFAAVSTIKRFQRAKQLTSYCGLVPTVRSSGERAEYGHITREGRSEVRQMAVQSAHALLRCKTIESFPLRKWHERVAKRRGFKTAVVGLARKLVEIAFYVLRDRRAYDARLLQVA

SEQ ID NO: 396000 - protein, 401 aa, unidentified
MSSILAGKVEFVVGVDTHRDSHTAAIVSATTGGVVDQLTVATDASGYRELQDFADRHAPGRRVWAIEGTGSYGSGLTTALLEHGQWVVEIDRPTRPARRDRAKSDDLDAVRAAREALGRDHLALPRARGDREALRVLTTARAGAVVAGTKAINQLKALIVNAPQPLREQLRHATSDQQLRRCARLRTQPTHSIEHRATIRAIRGTARRALALAAEAAEYETELKQLVVAICPALLERPGIGTITAAQFLISWSHPGRIRNEAAFAALAGAAPIPASSGTITRHRLNRAGDRQLNRALHTVAMTRLRIHEPTQAYTARRTAEGKTPRETAPRRAPAGGPPPTRDPPRRGRGGPPGGGRGGGGGGGAGGRGGGGAGPPGGGAGPPPPPGPRPESITRRGNQEI

SEQ ID NO: 396001 - protein, 347 aa, unidentified
MKHLFIGLDVHKKTWAVTIQEQQLVLKRFSMEADADLLIAYISKHYPQHDVECCYEACCLGFGIYHALTKAGWQVLVVNPADIPRGNKQSTTKTDKVDSAYLAKQLASGHLKGISVPTHKQEQFRSLFRRRNDLVKNLRRIKCHIKSMLLYFGIPIPLQYDNINWSKDFIQWLHKQRWSYSPATEALKSRLSEYQFLRKEYLHVCNELRAYARKQYRKEYYLLRSIPGVGPFTAIGLLAEVGDIKRFKGIDKLSSYIGLVPSVRSSGEKSYSCGITYRSKSLLRSYLIEAAWIAAKKDPVLMQYYQERKGSDHKKLIIKLAAKTLSRIYHVIKAGEPYQITPQPAVV

SEQ ID NO: 396002 - protein, 443 aa, unidentified
MINPDAAGIDIGHREHWCAVPVERSAKPVQRFGTFTEDLEKLADWLKECGIKTVAMESTGVYWIPAFQILERRGFEVRLVNARQVKNVSGRKTDVLDCQWLQRLHSYGLLNASFRPADEMCVLRSYLRYRDELVCARSVQCQHMQKALQQMNVQLHQVLSDITGLSGLRIIEAILAGERDAEKLANLADRRVHASKATIQRALKGDYRSEHMFLLKVAFELHGTYEKKIHECDEQVIAEMAKLPARVDPKQKPLAPRKPGRAPIRDMVAGKDLREELYRWTGVDLTAIEGIGVLSAQVILSEIGTDMSRWRTEKHFTSWLGLCPDNRISGGKILSSHTRHVINPVADALRIAATTLERNKSALGAFYRRMKGRLGPASAITATAHKLARLIYRLLKHGDAYVRQGIEVYEQKYRERLIHNLKKTAASFGFQLTETKELTQCVS

SEQ ID NO: 396003 - protein, 332 aa, unidentified
MFLGIDIHKRYAQVAVMDEAGELVEEVRVENANLDDLAQQYAGAEAAIEATSNYYHIHDTLSEHLDVTVAHPEKLNLISDTDKKTDRVDAKELARLCRLNSVPESYVPTDEIREARALVRGRQKLVENRTEYANKIHGLLSDHGITRKTKPLSVKGREFLRELSLPEPWEELLRSYLEIIETLTDEIERLDEAIEDRAGSLKETQLLMTIPGVSYYSALMIYAELGEIDRFDRDKEVVSYVGLNPVIRESGDSRFEGGISKRGSGRMRWILVQCAQTAVHTCNDEYLRRFYDRLAGKKSSQEAIVATARKLLVSIYHMLDRREVYNPPGVSA

SEQ ID NO: 396004 - protein, 369 aa, unidentified
MTESSDYESIQVFIGVDVGKDTHHAVAVNRSGKRLFDRALPNDENKLRALISDLKQHGQILLVVDQPATIGALPVAIARSEGVLVGYLPGLAVRRIADLHAGEAKNDARDAAAIAEAARTLAHTLRTLKVADEQIAELSMLCGFDDDLAAQTMQASNRIRGLLNQIHPALERVLGPCLDHPAVLELLQRYPSPEKLASLSEKKLAAQLSKLAPRLGKSLAADITRALTEQSVVVPGTNAAIVVLPRLALQLITLRKQRDEVALEVEQRVLVHPLYPVLTSMPGVGVRTAARLLTEVACRAFASAAHLAAYAGLAPITRRSGSSIRGEHLSRRGNKTLKGALFLSAFAALRDPISKAYYTRKINQGKRHN

SEQ ID NO: 396005 - protein, 351 aa, unidentified
MDTIGLDLHQRESQLCVCDADGTVTERRIVTSRERFTAVLGNRPRTKILLEASTESEWVARHLQSLGHEVLVADPNYAPMYATRSRRTKTDRRDARTLMDACQTGAYRLAHRLSDPRRHIRAELAVRDALVRTRTRYVALAKTLVRRDGLRVASSESHLVAQRIGALSLSPALEAELQPLFTVLAPLNEQIAAADGRIATLAATDPLVARLATAPAIGPVTASAVVATVDDITRFRSAHQFEAYLGLVPGERSSGEKRHVGPITKAGNSRVRWLLVEAAWRLLRTKSAEAAALRGWAHGVAGRRGKKIAVVALARRLAGILYAMWRDGVPFDASRIRNPRIAAAEGTARAG

SEQ ID NO: 396006 - protein, 352 aa, unidentified
MSQKPESTIAVVGIDIGKNSFHVVGLDKRGAIVLRQKWSRGQVEARFANMPPCLVGMEACVGAHHLSRGLKALGHDARLMPAKYVRPYSKGQKNDFRDAEAIAEAVQRPTMKFVATKTADQLDLQALHRVRERLVSQRTGIINQIRAFLLERGIAVRQGLRFLRAELPRILTTPPDVLSPRMVRIVEDLAGDWRRLDERVEILSDEIEATACQDAGCERLMSVPGIGPIISSAMVAAIGTGDVFTKGRDFAAWLGLVPKQISTGDRTILGKISRRGNRYLRVLFVQAAWVVLIKPKSWERHGLKSWIEAAKKRLHRNVLAIALANKLARIAWSVLARGRDFEAGSIATVQPV

SEQ ID NO: 396007 - protein, 331 aa, unidentified
MFPVSIDVSKNTLDLCMLYDGIKGRIKTRNIQNNRHSVENILRWLRLQHCSPEDVHVVMEAIGVYHERLATELHDAGFRVSLANPHRSREFARGMGIMTKTDKVDAYMLACYAFLKKPHRWEPPAPEIRYLGALLRRRDVLLGDALREENRLEKYLSTDTPADIISSCRRMAQLLREEVSNIERQIKAHIKASPALRRDYTLLTSIKSVGPQLGMHMLVVLRSHNFASAEQAAAFLGVVPIEKRSGTSVRRRPRMSKIGPPQLRAKLYMSALCGKIYNKRMRNIYDEMCLRGKPKMVAIGALMRKLVHWCYGVLKTGTVFNDEDLKPVLST

SEQ ID NO: 396008 - protein, 348 aa, unidentified
MLFHKPATRYYCGVDLHSRTMYICVFDAVLQVILLHKNIGLDPEYFLNVISPWAKDLTVAVESTFNWYWLYDYCESEGIHFALAHSLYLKAVNGAKTKNDRIDSEKIARITAGGTLPMAYAYPREHRSIRDFIRRRNHFVQMRAELLSHIQCLNMQENNLPLGHSTKNISLRPTIPGHFMDPVVRMSVEANLAAIQHYDAIIAKMEKEIRKIAYDKKQKEMSLLTTVPGIGDITALIIAYETNDINRFAGRQEFCSYARLIGCEHESGGKKKRSPGSKIGNPHLKWAFSEAAVHSKLHNDRIRKYADKLETRHKKGVANGILAHKIGRAVYYMLKNGTVFDLDKFLQN

SEQ ID NO: 396009 - protein, 347 aa, unidentified
MSTHGQSVLGIDTHKHIHVAVVLNGLGRNEATLQFPASDAGTATLLSWGREHGAPLTAGVEGTGSYGYQLTRALQAAGITVFEVNRPDRANRRRKGKSDPIDAEAAARAVLAGQATAVPKDREGTVEALRALTIARNSAVKATTTASHQIKALLVVAEQDMRDQMHVQSRLQLATRCSALAPSSGLRAALASLGRRWLQLHQEILALDRLIRDLVLRAVPKLIERPGIGIHTAAQLLITAGANPDRLHSDAAFAALCGASPVQSSSGQRHRHRLSRGGDRAANSALWTIANNRMIHDQRTREFADRRREQGDSRKDTLRVLKRYIARETFAIIRAALRPEQALTHVA

SEQ ID NO: 396010 - protein, 345 aa, unidentified
MIIGCDFHPSWQQIAWLDTETGETGEQRLVHAGGDAERFYRQLAAPALIGMEATGNSHWLVDLLSELGHEVWVGDAGQIRASYVRQQKTDKRDAAHILKLLAEGRFPRIWVPSSAVRDLRQLLLHRHKLVGIRARVKNELQHLCLNKGVQRQRKLWTKAGQKVLRELPLKRWAGRRRDDLLGLMTMLDQQIEPLDEAVKAEAQRDKMALLLQTQPGVGPITALAYVLTMGDITRFPRGKQVASYLGLIPREHSSGGRQHLGAISKQGNRMLRMLLVEAAQTAVRLDPGFRKEYQHRCHQKPKAVAKVAAARKLAVRLYWMLRTRQGYPEVVRIESSPRVRLVGEN

SEQ ID NO: 396011 - protein, 497 aa, unidentified
MKKPHSPRSVKPHHNNSGGKSRKRRHGGVPVEVQALESLKQINLHAAGIDIGSAENYIAVPGQAVKEGEPTVRCFGVTSPEHDAAVEWLRGCGITTVAMEATGIYWITLYDQIEAAGMTVVLVDPHHVKAMPGRKSDVLDCQWLQQWHTYGLLRGAFRPDGATRRLRTLTRQRGELVATSASHQEQMQKALIEMNVQLHQVVSDIDGETGLRIIQAIVGGERDPKELVKLRDPRIRKSTVAEMEAALKGHYREELVFVLQQNLESWRFYRQQLEACDQRILRTLESFPLAAPKPVSPKPEPPVPLAAKPAKEYVLKKQSLGRGKNAPTVDLVGVLQRICGVNLMAVSGLNVLSVLMLIGEIGVDMSRWRSAKAFCSWLGLCPGTKISGGKVLSRRSRRVVNRAAVLLRVVAVAVGRSETWLGRFYRRKKAHLGAPKAVTATARKLACIIYHLLKYQDAFVPVNEAEYEAKAKAQRIAHLRREAKRMGLDLVDSEKAA

SEQ ID NO: 396012 - protein, 344 aa, unidentified
MSEITTVGLDLAKRVVSLCGEDATGRVVVQRTLRREAVLAWFVQRPPCLVGMEACSSAHWFARELAALGHTARIIAPEFVRPVRLSGKNDANDAAAICAAVRQPQLRFVAVKSAEQQARLVVHRLRQGWQEERTAGLNRLRGLLAEFGRVYPNSAAAGLAGARAALADETLPAALRQGLARQLEHLRELETQLAACDREIAQQARDDPRAIRVARLCGVGALTASAVATTVVDASQFRCGRQFAAWLGLTPRQYSTGGKTRLGRITRRGDTYLRGLLVQGARSALQAAMRAAPERRTRLAAWMVDTHQRIGYHKTLVAIANKHARLIWVLLTRDEPLRAHAAVN

SEQ ID NO: 396013 - protein, 378 aa, unidentified
MKKRITTIWIGLDVHKDTIAVCWLRGDSRQEETCQIPNEPRAIRKLVRRLGAEGDLRVCYEAGPCGYPVRRQLESLGIACDVVAPSLIPRRPGDRVKTDRRDARKLARLYRAGELTPIHIPTEAEEAVRDLVRCREDLGEDVARQRHRLGKFLLRHGRIWRDGRAWTLRHWAWLRAQRFDDPAAQRTFDEYLAQLDFGLDRLRAFDRELEAVAEQAPWQPLVARLRCLRGIDTLSALTLLAEIQDFRRFRSPRELMSFVGLVPSVHASGGTERRGGITKNGNAHVRRILVEAAWHYRHRPTEAGRLRARAQTQPEAIRAEALKAQHRLHRRYWRLVGRGKLPPIAVVAVARELCDFIWALLVKHEPLAAPAPRLRATA

SEQ ID NO: 396014 - protein, 383 aa, unidentified
MRSVALDLAARKIAYCEVANEQVIERRTVGSLSRLEDLLGPECPAGRVAIEACREAWHVHAKLEGWGNQVLLVDTTRVKQLGVGQHGRKTDRIDAEVLALAVERNQIPTAHLLSPQRQQLRMRLGVRRALVETRAQYVTTVRGLVRAHGGKLPSCSVEHFVDHVRSAKLDDEVSELFAPLLALLDMLNEKLAQLERQLEQECADEPVIAQLMTTPNVGVITAAAFVSVIDDAHRFGSSRKVGAYLGMVPSEKSTGDRRRLGSITKKGNSYIRSLLIEASWGIMRRRDDDPLRRWAQAVAKRRGKRVAVVALARRLAGVLWAMWRDGTVYDPAWVGQRSARGLARQAQNLDLRAAAMKRAADKVRHRARSYQHHLPKTKEVTIS

SEQ ID NO: 396015 - protein, 411 aa, unidentified
MRRVIGMDIHRTFAEVVFWEEGRLRHHGRVDMTRSGLEGFGRSLRRTDEVVIEATGNAMAVVRLLSPFVGRVVVANPMQVKAIAHARIKTDKIDAGVLAQLHASGFLPEVWVPDERTERLRRLVARRNQVVRHRTRVKNEVHGILQAHLVPKCPHADLFNNRGRAWLERQMLPDDERAAIARHIREIDRLAEDLAALDRDIAGEAVDDPQVRRLQTITGVNAIVATGIIAAIGDIKRFSEPRKLVSYFGLNPRVRQSGLGIAQYGRISKHGRSHARAMLVEAAWAAAKAPGPLRAFFLRVRNKRGHQVAAVAVARKLAVLVWHMLTKEQDYFWVRPALVAAKQRQLALKAGAPNERGVGRRGSAYAYNVKELRNSEKAAAENAERAYELMVRHWRPRGPKRRTDATKEERP

SEQ ID NO: 396016 - protein, 355 aa, unidentified
MESTKYVGLDVHQEATTIAVMNSAGKLIMESIVETKAITIRQFIQGLHGDLHVTFEEGTWAAWLYDLLKPYVTKVIVCDPRKNILLKVGNKSDRIDPKKLAELLRNGALSEVYHGENGVRTLKELARSYLTISKDLGRVMNRVKALYRSWAIPCAGTQVYALCHRSEWLSKITEAGVRRRAEHYYQQLDALQTLRREVRKDLLLESRKHNATKLLRQIPCIGPIRAAQLVALMQTPHRFRTKRQLWTYSGLGLETRDSAQYCYVEGQLQRSKKPQQLRGLNSNHNHDLKNIFKGAATTASVSAGPFHDFYQALLTKGMRPTMARLTLARKIAAITLIVWKKGVRFDPQHLKQQAA

SEQ ID NO: 396017 - protein, 340 aa, unidentified
MGDITTIGLDLAKNVFQVHAVDAAGNVVVRKRLRRGQVLVFFARIPSCLVGLEACATAHHWARELIALGHEARLMPPNYVKAYVKRNKHDVADAEAICEAVRRPSMRFVPLKTVEQQSALMMHRARDLLIRQRTMLVNALRGHLAEFGLIEAQGLHKVVRLITIVMDEMDRRIPDIARQVLKVIVHQIEDIQTGIAELETQLLAWHKNNPVSQRLVTIPGIGPVIATAIAATVADPSTFRSGREFAAWLGLVPRQNSTGGKARLGGISKRGDSYLRRLLVNSAHTVLLCSKAAKTDPWLTSLLGRKPRLVAAVALANKTARVAWAIMSRQDTYRHVAAAA

SEQ ID NO: 396018 - protein, 356 aa, unidentified
MPMLAELVDGVIGVDTHRDTLTAAALTPVGGVLAQTTVRADAAGYRQLLGFAKLHVPGRRLWAVEGAGSFGAGLAAFLTGCGERVVKVGRPKRPARRTPAKSDALDAIRAGREALAQVHLTSPRRRGDRQALRVLLACRRGAITARVAATGQLKALIVGAPEELRTQLRGRPTLQQVRSCAKLRARPARSLEHRATVHALRATAQRIQALDTEAASLKAEIATLVAAAVPWLLEVRGVGPISAAQLLVSWSHPGRFRSEAAFAALAGTNPIPASSGQVTRHRLNRGGDRQLNCALHTVVLVRLRDDPETKAYAARRTAEGKSLRDIKRCLKRTIARHLFRLLERYDQPGVEILRAA

SEQ ID NO: 396019 - protein, 344 aa, unidentified
MGEVSTIGLDIAKSVFQVHGVDVDGAVMIRKRISRAKVLEFFAALPSCLVGIEACPSAHHWSRQLQVLGHKVKLMPPSYVKAYLKRSKNDANDAAAICEAVSRPSMRFVPTKSQQQQSGLMLHRSRQLLVRQRTMVSNAIRGHMAELGIISAKGRNGTAELLEIVADADDDRIPAAARFSLEVLARQYANVTAEIRIIEKRIHAWHRSCQDSRRLEEIPGVGPIVATALVAEVGDWKAFSSGRNLAAWIGLVPKQHSTGGKERLGRISKQGNRYLRWLLVAGAMAVIRYARQHGTKRPWLAHIMERRPIKVAAVALANKIARMAWAMMVRGEPFKEPRLLSDAA

SEQ ID NO: 396020 - protein, 410 aa, unidentified
MLKIVYPVCCGIDVHKTFIYCCIATTDNKGITTYKSNRFSTFTNQLKRCATWLKEKDCKDVCMESTGKYWIPVYNILELSCNIVLPHPKYVKAIKGKKTDKRDAKWIADLFKHDLINGSFIPPADIHQLSDLTRYRNKLTNFIVGEKNRAQNCLTVSNIKLDYVFTYVFGKASSSIINALLLNPSEKITDVSKFRTRGMKSTDEEILAAIDGNICNEQAEKLKIIRSHMDSIEECKANLESVILNLAEKYLPKLNLILSVLGIKSFSAVSIILEIGVDMSVFPTSKHLCSWAGLTSQNNESAGKKKTTRISRGGAYIKPLLVQCALAAVKSNKHPKIRNRYLALKKRRGHKKAIIAIARTLLTAIYNILKKNEPYNPDLYKKSDLPPQHKTVSFDEAVFILQRQGYIITS

SEQ ID NO: 396021 - protein, 320 aa, unidentified
MSASSVMVGIDVAKEHVDIAVLGAERIAQRWANDAEAHSALAAALQPLNVALVVMEATGGYEAALACALQAAGLPVAVINPRQARDFAKSMGRLAKTDTIDAHMLAEFASVLVRRKDLANFIRPLADTQQQALAAMVTRRRQLLGMLLSERQRLQLAIPVVRPSIEAMIDAIRKQLDDVDAQMVTHVRAHYSALDELLRSASGISPVASATLIAELPELGRLNRRQIAALVGVAPMAWDSGTTRGHRRIQGGRFDIRRVLYMAALTASRRNPAIAAFYQRLIAAGKPPKVALVACMRKLLTVLNAMVKTSTPWDSSLHSA

SEQ ID NO: 396022 - protein, 343 aa, unidentified
MTHYIGLDVSQKLTAICIVDDTGRRLWRGQCTSDPEHIERVVRRHAEKDGRIGVETGPMTPWLVHELRSRGLEVTCLDARHARAALKMQINKTDPNDAEGLAQIMRTGWYRSVHVKSFGSHRARALLGARVQLVGMTTRLSNHIRGVLKTFGLLPGPMRGVPFDRRVEAMLADRDDIAPIIQPMLVAWRQLRQQVATFDKAVRRLVKSSPACRHLMGIPGIGVLSVLAYVSMIEDPARFGRSRSVGAHLGLTPKRYQSGEIDRSGRISKCGDTLARTLMYEAAVVLMTRVKRTCGLKEWAQAIARRSGAGKARIALARKLSVIMHSIWRSGEPFRWSEQPAAA

SEQ ID NO: 396023 - protein, 462 aa, unidentified
MARRKRKNTSSSDALPPQLATVNLHAAGIDVGAEEHWAAVPPCDDPQPVRRFGANTADLEALADWLWGCDVTTVALESTGVYWIPLFELLETRGFQVLLVDPSKLPRSGRPKTDVHDCQWLQRLHTYGLLSACFRPEEQVVVLRSYLRQRATLLADAARDIQHMQKALTQMNIKLQHVVSDITGVTGLAIIRAILAGERDPLQLARWRDPRCKQDEAAIAAALHGTWRVEHLFVLQQALERYEFQHRQLAACDARIAAHVETFADQSHGAPLPPKRGQRRRHRNRPAFDPREPLYRMTGVDLTRIEGIDETTALIVISEIGLDMSKWPSEKHFTSWLGVSPQRRISGGKVLSSRTRPTTNRAAAALRLAAASLHHSQSALGAYFRRMKSRLGTSKAITATAHKLARLLYSMLKHGTAYVAQGLEAYEQQYHERVVKHLSRKARKLGYALVKPGEATVETSLA

SEQ ID NO: 396024 - protein, 387 aa, unidentified
MYLVGIDISKYKHDCFIATEAERIKAFQFENNRFGFDQFLSTLKALDQSQEIRIGLESTGHYGMNLKQFICASGYTYLEFNPYLTHQFSKAMTLRKTKTDKVDAKTISSMLGPVDYKTLHTSFYHINELKQCVRYRDLKMKLRSKILVELTNILDRSFPELKAFFNQRLVGSAIFILKRFKSRSRIAKLTPSDYESIRKYSKGRISYVKFQKLKLLAMNSIGYETNSDVLLMLESIHTYEYLSSTIETADQKIIELMKDIPQTLTSIPGLSLISAANIIAEIGDFKNFSNPAQVISFAGLDSSVNQSGTMETRGHLVKRGSGLLRATIWQVTFCALKYIPVLYDYYLKKKAEGKHHKVALTNCARKLTRTIYNLGFNQLTFDPSQFR

SEQ ID NO: 396025 - protein, 343 aa, unidentified
MTKDTMIGVDLAKNVFQLHAASMTGHPKYRKKLPRNNFAAFMAQQPPAIVVMEACGSAHYWAREMIKLGHEVKLIAPQYVKPFVKRQKNDAADAEAIVTAAQRPEMRFVDPKTAEQQSRAILFRARERLVHQRTELVNALRACLYEYGHVVPQGIHNIKRIEGILDVPNSDLPDLMREECKELLVQIAEKTIRINARTGKIKALAAEADAARRLQTIPGVGPLTALAVEAFAPAMECFKCGRDFAAWLGLVPRQFSSGGKERLGRISKAGQADIRRLLIIGAMSRLNWLGRKSIPEDSWLARLAARKPRMLVAIALANKMARTIWALMTKGEDYRDSAQAAVA

SEQ ID NO: 396026 - protein, 315 aa, unidentified
MDHNKAVYGVDVSKRNLVIAGYDEQTPVVVPNLPESIAAWLTQLPRGATVAMEATGAYHQVLARLAHAAGMQVYVLNPQTLKHYAAAIGQRGKTDGCDARMIARYVVHEQAKLRRWLPPAPAADRLSQLLERRHTLVEARQTLAQSLAVPMLKAPRQSLLANVDRTLRRLDTLIRHQIARLPGMALLYERLKSIVGIGPVVAAQLVAVFSTLNFAKVDSFIAYTGLDPRPDDSGARVGRRRLSKRGPPLLRCLLYNAGMAAANSRVFKPVYRQLRERGLQTIEAIVILARKIARIAFALYKSGQCFDAQKHLKIA

SEQ ID NO: 396027 - protein, 317 aa, unidentified
MSEPLFIGIDVAKDTFYVASCPAAINISLPNSSTGIHKLLDFLKLHSIALVVFEATGGYERPIVAGLLQADLKVVVASPRQVRDFARGIGEFAKTDPIDARVLARFAQVVQPKPKPQFSPKRDELSDLVRRRSQLVDLRTQELNRSQTIRHPRVRRSVQKMLKTLDCQIAELDEIIQQHIKADDDFRQKDKILQSVKSIGPQTSAILLSQLPELGQLNRQQIAALVGVAPYDFRSGRYAGQSHIRGGRKDIRCALYMSVLSAMRFNPVIHRFANRLLAKGKLHKVVSTACIRKLLTILNTMIRNKTLWHPEQILKNP

SEQ ID NO: 396028 - protein, 429 aa, unidentified
MEEVDDAELVVERVAALDLGKAGLESCVRVPHPQRPGRRMQELRGYGTTTAQLLEMVAWLRQWRVQRVVMESTSTYWKGVYYLLEAEEFDCWLVNAREVKNVPGRAKTDRADAVWLAKVAERGMCRPSLVHPPEIRRLRDLTRYRRALVQDRTREQQRVEKLLEDAQIKISAVLSNLHGVTGRAMMDALIVGERDPRTLAQLAKGQARKKTGALEEALRGFFTDHHATILQMMLDNTDRISAQIAALDARIEEAIDPFSDQAARLAEIPGVDAVAAAELIAEIGVDMTRFPSAAHLVSWAKFCPQTHQSAGKSKAKGRGKGNPWLAGTLGRIAFANSRSDTFLGTRYRRLARRRGGQKAIVATGNSILTVVYHLLSDPETSFIDLGPGYYESRINKHRRARDLAIQLQTLTDQHIVIRDGKAVITDTAA

SEQ ID NO: 396029 - protein, 384 aa, unidentified
MDVVVTSNPKPEGKHMKTEKYVGLDVHKDTTVIAVADGGRSGEVRLFGTVSSDLRALEKALKKIGGEGVTLHVVYEAGPTGYVVYRRLKRLHLDCIVVAPSRIPQANGARQKNDRRDATMLARLHRAGELTPIHVPDDVDEAIRDLTRARADAMHDLTRAKQRLKSFLLRQGMHYPGKASWSAEHQRYLRSLQFPIPSLRAVLEEYLFAYDQIVQRVQRLEELLAVHVPQWRMYPAVQALMCMRGFRLTAAAMLVAEMGDIRRFSHPKHVMAFLGLVPKQNSSGQTTRMGAITKAGNPHARWILVEVVQHALMTPKVSRQLGIRQEGQPAIYRDLAWKAQVRLHKRGWHLLRRGVMKAKVNIAMARELVGFIWDLLCHVPEPVK

SEQ ID NO: 396030 - protein, 413 aa, unidentified
MERLLERCAALDVHQASVSACVRVPGEGDQRRECNERFGATTPDLLALCDWLRGHGVTHVAMEGTGVYWKPVYYALEDEFELLLVNAAHVKQVPGRKTDTKDAAWLCQLLECGLLRASFVPPKPIRELRDLTRYRKTLIADRASEANRLHKVLEDAGVKLSSVASNVLGVSGRLMLEALCQGANDPVALAELARGRLRSKLPALRRALESRFRDHHAFLVAQILAHLDYLDEAIAACSARIDEQIAPFASALTLLESIPGVGRRNAEVIVAEIGADMSVFPSSRHLASWAKLSPGNNESAGKRKSGSTGKGSPWLRSALVESALAATRTRGYLRAKYWRIRQRRGHQRAVIAVAHAILEISYHMFQSGELYRDLGDDFFDRRDNERATQRHLRALERLGYRVTVESAPDREAA

SEQ ID NO: 396031 - protein, 373 aa, unidentified
MPKYSTAFGMDVHLRSTTVCALDADTGEAVTRRFPGNPWGEIAGWMDGFPGPSLAAYESGYLGFAPQRELAGLGVECVVAAVSKIPRSAAGSASKNDRNDAARMAKAILAHDISPVWVPSPEVEGIRDLAGAYGGATARLATAKQRLLAFLAKRGFVYGGTTPAGNPRKYWTYDFLRWLDKVRPEDDGGVRTLAALRNEVEAAAEARADLLSEYRAAVDASPIAAEVAALQSIKGCAFALAAAFSAEVGDFTRFRSGRQVTAYFGLAPSQRSSGDSVRLGGISGAGNALVRKLAVEGSWCYAAARHQPKLMPRDTGVPLEIRMHGRKGSERLLRRREEMLARGMPAAKANAATAAELVRWLWALGMMCREGAE

SEQ ID NO: 396032 - protein, 354 aa, unidentified
MTDTSRHSIPAFSSIGVDIGKDVFHLVGFDQEGRIILRRKIKRLGLVSAFSKLPRCVVGMEACLSAHFVSRTLRRLGFEPRIIPAIYVKPFVKGQKNDFNDAEAIAEAALRPNLRFVKEKTQDQLDLQAMHRVRSRLVSRRTSTINQIRAFLIEQGIAVRTGAHNLRKSLFAILKNREDEISPRMHDLIVGLYEDWLWLDERIETITGEIEAISRREVNCQRLVSVPGIGPIISTAVVAAIGTGEAFERGRDFGAWLGLVPRQYSTGGKAILGRISKRGSKYLRTLFIQAAHVILMRPHNWEKFSFGPWLTEAAKRLHRNKLATALANKLARIAWSVLRNGRRFDAHLPQIAAI

SEQ ID NO: 396033 - protein, 380 aa, unidentified
MLIVGCDYHPSFQQIAWVETDSGEVGERALMHSTGEAEKFYRKLNDDGVKVRVGIEATGHARWFERLIADLGFELWIGNAAEIRAKRVRKQKNDREDARLLRTLMIENRFPRVWLPDVSNRDLRQLLWHRHRLVQMRTQVKNQLQAVALNEGVRRKKGLWSEAGRAQLESFQLMPWASRRRKDLLELLDNLTPRIAALTAEVENQAEHHREAQRLMTHPGVGPLTALAYVLIIGSSDRFRCGKQIGSYLGLIPCEESSARRQRLGTHQQAGQRASAFSADRSSAGSHPFQPDMATRVRASDHAPGTTDRGGGAGTQTCCPFVLDVAQRMGLREVTGIRFARGAARDRLWCEVEHRQSDWAPCSLVKREFEQVIMVGTSIE

SEQ ID NO: 396034 - protein, 318 aa, unidentified
MRKETTYLGIDVSKEYLDMAQHLSDKEWRFTNDYTGISELINQVKKMGLIVVIVEATGGYEAYLTAMLAAHNVSVVVVNPRQVRDFAKSIGRLAKTDTIDAKVLAHFGNAVKPEPRLLRDKQTQELKDITTRRRQVSEMIVAENNRLHTAGISMREHIQAHIEWLEQDLSKIDRDMRNLIKNSPLWGEMDNLLQSVPGVGNVLSSTLLAELPELGTLNRRQVAALVGVAPFNRDSGTLKGKRTVWGGRSAVRKVLYMSTLVAMRYNPVIKGFYERLCGNGKAKKLAIIACMRKLLIILNAIIRNRTPWFYSRCEILKS

SEQ ID NO: 396035 - protein, 314 aa, unidentified
MDIRDQAKRHVVGGVDTHKDLHVAAVVDERDRVLGSQSFATTRQGYRQMLAWMGSFGEVQRIGIESTGSYGAGLLRFVQTVGIEVLEVTTPDRHDRRRRGKNDDLDAQNAAHAAFAGQRTVTPRRRDGLVESLRVLSACRKTAVAARRVALQLIQNTIVCAPDGLRDVLRSMTRMQLIRTLAAWRPDLTAYRDVEAAYRITFKSLARRYLELHDEIADLDIMIGAIVDELAPDLVARNSIGHVGAAQLLLAAGDNPDRLRSEASFAALCGTSPIPASSGKTIRHRLNRGGDRHANSALHIIAIGRLRTDPNTKT

SEQ ID NO: 396036 - protein, 322 aa, unidentified
MSQPNPLCVGIDVSKATLDIAANGDIAQFTVSNDPDGFGTIIDELRKHSVALILMEATGGLESAVTCLLQAEGFDVTVINPRQARDFARAMGYLAKTDRIDAKVLAQMAEVINRHPERERFIRTLPDTERQVLAAMVVRRRQLIAILVAERNRLYTAHPQSRKSINIIIKALEDELARIDEDMHNHIRIHFKDLAARMSSIKGVGNMTVAALLAEVPELGHLSRRAISALAGVAPINRDSGTMRGRRTIFGGRDGVRTSLYMAALVATRFNPVIKTFYTRLLAAGKPKKVALVACMRKLLTILNAMLRKNEEWNESYHQVIP

SEQ ID NO: 396037 - protein, 421 aa, unidentified
MQGVEDNEEIIERVAAIDVGKAEVVVCIRIPDPARPGRRQQEIVHSSTLTPRLLVLADRLVELGVTRVVMEATSDYWKPVFYLLESRGLDPWLVNARDVKHLPGRPKTDRLDAVWLAKVAERQMLRPSFVPPGPIRLLRDLTRYRAGLVKVRTAEKNRVEKLLEDAQIKLSSVVSDIFGVSGREMLAALLAGERRPTVLAQLARTRMRPKIPLLEEAFVGQFTEHHAFLLRLMLARIDEAGADIAALEDRIRQLVAPFATVVTRLDEIPGVGATAAWTVIAEIGLDMSRFPTPAHLSSWARFAPGVNQSAGKTKGRGATGHGNRYLGQALGEAAVATARTHTFLGERYRRLARRRGGPRATVAVGRSILVIIWHLLSQPETRYHDLGSDYTRRRTDPNRATRKHVQRLEALGYTVALTPVA

SEQ ID NO: 396038 - protein, 339 aa, unidentified
MSEFTKKKHFIGVDISKDKLDLALVHEKSPDVFEDKVVNNSFKGFEDIQKWLSKKKIKFEDCLFCMEHTGTYGILFYAWLSQMEIDFCVEPGLQIKRSLGMSRGKNDKVDARRIADYAYTNRGKLVSFSLPSTLLLQIKQLLTYRDQLTRIKVSLKNSLQSHDQYRRVSGLKSISDDIEDQIEECKCRIEKVEEEIKGLIRSDKTMKKNFDMATSVKGIGLVIAAFMLVTTNNFTGFENGRKYACYSGIAPFDNTSGKHKGRTKVSHLANKRMKTLLSNGANTARHWDPELKVYYDRKIQEGKPHSLVINSIRCKLVNRVFAVVKRQTPYVHIYQQNFA

SEQ ID NO: 396039 - protein, 365 aa, unidentified
MTSMTSPTAPVTVIGGVDTHGQTHHAAVIDQVGRQLGDREFPTTPAGYRALLTWLRGHGQLERVGVEGTGSYGAALARHLRSVGAGVVEVDRPDRKARRAKGKSDPLDAYAAARAALSGTATGTPKTRDGRVEAIRVLRVARSGAVKARTQGTNQLKALLLTAPAELREQLRHLSTTTLIATCARLRPSSELTDPEQATKTALRRLARRHQHLSEEIAEADTELRTLVTAAAPRLLALPSVGIEVAGQLLTSAGDNPDRLHSEAAFAHLCGVAPVPASSGRTHRHRLNRGGDRAANNALYIVVLGRLRYDSRTRVYADRRTKEGLSKPEIIRCLKRYVAREVFAVLTAPTVEDPVATTTTMSTAA

SEQ ID NO: 396040 - protein, 434 aa, unidentified
MHQAPGHWLNQWLLDLLLRKEVFALPSPLFVGIDVSCKDNKVQLLHSDGAEITRFSVPNNYPGAKSLSEKITGVMGKNKFDSLVIGLEATSVYGHPLVYFLRQEPSIKAHNPRIHVLNPKQVANFKKAYPELPKNDWVDAWVIADNLRFGRIAKEVCMDEKFYALQKLTRERYHVAKNLTREKNRFLSNLFLKFSTLAQEDIFSNKFGATATAIIEDFFSVDDIAYMDVEKLAEFLNKKSKGHFADPHELADIIKKAARSSYRLPKTVNDSVNQVLAVSLVAIKALKKQLETLDKAIETQFALIPNTLQSIKGVGPVYAAGIVAEIGDIKRFPNHAALAKFAGLAWSEHQSGQFKAEITHMIRSGNRYLKYYLLEAANKVRVHDPEFKRFYELKYAKTPKTPHKRALALTARKFVRLVYALLHSNRLYTPPKGE

SEQ ID NO: 396041 - protein, 422 aa, unidentified
MEVMHERVAGLDVHKETVVACVRVMVGGRRPKRECRTFATTTEGLLNLLEWLTATRCSHVAMEATGVYWTPVWKILSDGDFELIVANAAHIKQVPGRKTDMNDATWIADLLACGLIRASFVPEEEIQELRSLMRTRKQLVREQTRHVQRLQKTLEEANIKLDSVVSDIMGVSGRRMIEAMIGGERNPQRLAALADRGLKASPKQLYDALHGRLREHHRFLLKLHLTQWDALDATIRDIDRQVDGQIERMDETTKDEQPPFRQLILRLCSIPGIGPLSATSILAEIGRDMRRFATAGHLVAWAGLCPGQSAGKVKSARLRKGAPWLKTMLIQCAWAAKRRKDSYYMAQFQRLKARRGPQKAICAVAASILTAIYHMLRANSPHRDLGADYFDRRSPDAKARRLVRQLTKLGFAVNLQPLDNAA

SEQ ID NO: 396042 - protein, 344 aa, unidentified
MRYYSTEAEWIAGCDLHNRSVYVVVLQRGGKVVLDRNFRRDKATLLELLGKFGPSVAVACESVNLWTWLRDICVEAEVPFYLGDAKQVAGPRFRRSKSDKEDAHQIANLLALGKLPVAYAYPSNLIALRGLNRDRLALVGECDRISGRLRAIAQEHGLSGRTAELLGMEQAEIRAAFANPLVEERISVLLEQLRRARRSRIRLARRIRKEIFSFGREMKLLQSIPGVGFLTAATVLLEVGEFNRFENDGEFRAASGLVNRYRTSAGKRVGRRFRDGNPYLKRALVGAAVFAARMDEGIKKQLWKLSRNRRRTEANCILANRIASAMFAMIKSGESFDSLRFARG

SEQ ID NO: 396043 - protein, 296 aa, unidentified
MKKHSKKANETGRRSASQGQPEITIGIDVGDQYSHFCILDAAGEIVKRGRVSSTQAGLEKEFGKIPAGRIALETGTHCHWMSEVLSQLGHEVIVADARELKSISGSRRKNDPRDAEQLARLARVDVRLLHPVRMRKRKTQQDRSVLRARDLLVASRTQLICAIRGMVKADGSRLADCAAESFPEQVGAAIPEGLRRALAPLLETLDVLNEKIRYYDQLVTHMAEEEYPETCLLKQVPGVGPVTALYFRLVIEEARRFQHSRDVGSYLGLVPKQQDSGESTPELRISKAGDEGARRL

SEQ ID NO: 396044 - protein, 415 aa, unidentified
MEWRERTAFVGFDWARDHHDVVVVDREGRIVEEFRFDDTAEGWQRLVKALGECVHPAVAIETSSGAAVERLLEAGFAVYPVNPLAAKRYRERKAPSGTKTDRYDAWSLADALRLDGHTWRALKPDDPLTVELRLLCRDEIALIQQRSSLVCQMRAALAEYYPAVLEAFDDWTLPSSWAFVEAFPTPQALVKAGKRKWEKFLHTHKLYRPATYEKRLSVFAQAQTFCGSPAMTSAKSMLAVALAGQLRVLEGHLDKYRARIQELFAKHPDNELFGSLPGAGPKLAPRLLTELGDDRERFASPQALQCYAGTAPVSYESGQIKKARFRRACQKVLRQTVHLWANLSRDSCPWAETYYQRKREQGQSHACAVRCLGQRWLKILWKMWQTRTPYDPELHQRNQIQHGSWIIALVPTPAT

SEQ ID NO: 396045 - protein, 336 aa, unidentified
MRELLFVYIGVDVSKETLCVDAGDAFRGVVPNTPDGIRKMLAVVKRKLGRGRASHVCLEAAGPYGEALLAVCRGGGFPCSVLNPAKVRHYAKAMSESAKTDPIDARVIREFAEAKHPAADRVPGSAETLLRQLMTAREALTKSAVQLEGVLDSMTCASARKAVTQAVGCIKRKIRALEDGMATALKADRRLEGLAAELAGIDGVGALSAAKIVALVPEPGSLGRRDAASIAGLAPFRRDSGKFSGKAFISGGRASVRRALYMPALVAVKHNPTLKAFYQRLVGQGKPFKVAITAVMRKLFIHMDGVAHKWLAAHGGTGEGNAPQPFPLLPSFPRTP

SEQ ID NO: 396046 - protein, 329 aa, unidentified
MRTDHSDMTHYELLVLAVSLELAAAKWKVALHDGRRDNPAVHTVAEPQAASRLQAVLTLIGQHKEKWALPANVRVVVSYEAGQDAFWIFRALQARGIECHVVDPGSIPVERHKRRAKTDRLDAVKLVINLRAWLRGERGRTRVIRVPSPQDEASRHLMRDRGQLQKEVLQHRDRMRKLLVTLGCWDEVDSRKFAGRLARGELRCHDGAPLPVELHERLVRECARLTLAEQQLAALEKTRQSSLPEPARERIAHLTRLSGTGPVGGSRLALQLFWRQFTNRCQVGACVGLAPQPYDSGESQVDQGISKTGQPTGACAAHRDGGPGSATNP

SEQ ID NO: 396047 - protein, 406 aa, unidentified
MRRQVKRGPGPSSTLITPDRAGNVVGVDPHKRTLTATIVDPRGGLVASEHFRVSGDGHRALEAWAKQFGSIVRFGVEGASGWGRHTAIFLIGRGYDVRDVCPNRTAQHDRARQRGKSDTLDSERIARETLAHPLLPKAFKRAGQDAGPDQQTELLAVWWTARCSLIKRRQHLLTESEALLRELPLELVERLPNATRVRPRLAALPHLTARRRLTPPAALRVRILAGYRAQIADLDAQERQITRQLAELVSHSGSTLGQLCGLSTVSVAELLVEVGDPRRFTEGGFGRFNGTAPLAASTAEGPGEPVRHRYNPGGNRRVNAILHRMAVTQLRCEPRAKKIYADARANGQHTKKEARRILKRHLSDVVHRRMIRDLAAHPAQPLLVAQPRAGAAQSRVARQGRAKRAA

SEQ ID NO: 396048 - protein, 408 aa, unidentified
MKLLVGIDVSSEKLDSCFLDSEDQTLLEESLPNTIAGASQIKAHILKFNESVHYDRIIVGMEATSVYSFHPSTFLAEDQDLKALKVEVVVMNPKAIHRFKGLFDEDKTDQIDAYRIADFLRFDRFNVSLLKEEQYMALQRLTRSRYQLICQLTEMKQHFLENLYYKCNTLTKEVDTSVFGSTMMDLLTDSMSLDEIAAMPLENLAAFLQEKGRGRFSDPDKLAKSISKAIKGSYRLGKMMQNSVDIVLASYAMMIRTLKKEIQALDKAIQNLITTIPESKSLLSIPGIGPVYAAGILAELGQIERFEDEAKIAKYAGLYWKRKQSGNFESERTVMTKTGNHYLRYYLVEAAGSVMRNEPVYREYYLKKYHEVPKHQHKRALVLTARKLVRMVDVLLRNHQLYAPERSV

SEQ ID NO: 396049 - protein, 340 aa, unidentified
MKQLYAGIDLHSNNNYLAIIDEQDKRIYKHRWPNKPDIILAELEPFKESIVGIVVESTFNWYWLVDILMDEGYKLHLANPTAIQKYKGLKYSDDSHDALWLAHLLRLEILPEGYIYPKADRPIRDFLRKRGHLVKLRTSLINSLQGIIYRNYGYKLNANKIKQSNENHVSSILSSNYHLELSGEVSKDTIDYLTRQIRKIESVILKEIKLRDSFKKLQTVPGIGKIIALTIMLETGSIKRFHEVGNFSSYCRKVPSKWTSNDKKKGKGNSKNGNKYLAWAFSEAAEFARRYDKSIRAFYDRKAAKTNRMVAHSALAHKLTRAAYYIMRDNVEFECQKLFA

SEQ ID NO: 396050 - protein, 346 aa, unidentified
MSYLGVDLHTNSFTVCRRTKQDKESIRTFQIAHVADFRKTLRKRDLLAVEATGNTAWFVSQVRDRIRKVTVVNPFQFEVIRRSVKKTDKNDAKTLALYLSKGMLPEARMKTKENAQLHSLATTRDKLVKQRTALINKIHNVLNSYGIKFKKESLGTEKGLKSIWAYEWDVIVRIELEVLVEQIRSLNKSIKTLDKEMTEHGQKLKGHENLTSIKGIAARSATVLLTVIGDVNDFADENKLAAYFGIVPRVSDSNETVRHGRITKHGSKLGRTTLVQCTLVAKRYSPYLRQYYERIKSHRGSGKAIIATARKFLGIIYNTLTNGWVFEDFPNFVLASSCVKKQSKLE

SEQ ID NO: 396051 - protein, 400 aa, unidentified
MLSIGIDVSKGKSTVCGMKPGGEIVYTPFEIQHTREGMSDLVSLLRSSGEEVRAVLESTGSYHCPVVAALLENGIFVSVVNSLRMKRFCSQSIRKVKTDRIDAMQIALYGLAYWQELQPTRLPEDTYRELQLLARQYYQMTSMLIKAKVDFNALCDQVLPGMQELMSDHAGRHKLSDFVLRYRHTIHILEMGETRFRKDYCKWAEKKGYRNCERMAALIFATAQNGIPVLPNAPSTQIVITEAIRVLHTVEASRDAILTQMQALAKTLPEYSLVREMPCIGDTLAPRLIAEIGDVRRFHSKRALIAYAGIDAPPYQSGKFCANNRHISKRGNRYLRKTGYEVMQSYVMHKPANDPIFTFIEKKRSEGKCGKLAMVAGLNKFLRVYYGKVTELYRSLPAIE

SEQ ID NO: 396052 - protein, 379 aa, unidentified
MEIITRNEKILYIGIDVHKDTYSLCCFDFFRNEISDEMTIKATTKAVIKYLEAIKKKHKEEILFACGYEAGPTGYGLCRGLQKAGYGCVVMAPTTMSNPEGKKRVKTDRIDARAIARILAYKSYSQVHLPSEEMEALKEYTRARDAKKRMFKKAKQELLSFLLRNGKSYPESGNYWTEKFFKWIKTVQFSEKWMQEAFNEYLAEVYSLKAKIELMDMKIREIAELEIIKDKVDKLVCFSGIDVITAVETVVEIHDFTRFATAAQFVSYFGLCPGEDSSGKTKNMLPLTKAGNKRVRALFCESAKAIKRTNPYGQKSKRILERQKNASPEIVAYADKATKRIRTKMKHLEERGKNYNVSSAAGARELACFVWGMMNGKIA

SEQ ID NO: 396053 - protein, 292 aa, unidentified
MTKVRTWVGLDVHAAKVVACVVDAESGEMCVQRLPGDTSKVVSFVAGLPGPTRAAYEAGPTGFGLARAFDAVGIGCVIGAPGKIERPAQDKVKTDRRDAERLVRLLMIGGLHAVGVPTGEEEALRDLVRAREDLRGDLMRARHRMGKLLLRHDVRYDGTSDTWSHRHRQWLSMVRLPERGAQATLLDYLGAIDALIIRRDQLEATIAELVPVSPWAQDVARLRCMRGIDTLSAIGLCAEIGGFERFEHPKQLMSYVGLVPSEHSSGQSRRQGAITKSGSQHARRLLVEAAWH

SEQ ID NO: 396054 - protein, 343 aa, unidentified
MGDYIGLDVSMKETAISIRRAGERVWRGKCSSDPSRIAQIVRKHAPNVVRVVFETGPLSVWFYHALKEEGLPAICIDARHAKAALDMAANKTDANDADGLAQLAEVGFYREVRVKGFDSMLARSLVAARTKLVRITVELSNQLRGLMKTFGLIVPSGKGRNFEANVRRLLIDQIKLSNILLPMLDAWHDIRMRAADLTKLLLAAARKSHACRLLMTIPGVGAITATSFATAIEDPSNFKNSRAVGAWLGLTSRRYQSGEVDYSGRISRRGDRHLRGLLYEAALVILTRSSAESDLRNWGLKLRERLGFKRAAVAVARKLAVTMHAMLKTDTAFNRAIDAKVAQ

SEQ ID NO: 396055 - protein, 316 aa, unidentified
MTEPTVFVGIDVSKARLDVAVLPNDTTWTTTNDEQGIERLVTQVKELGPSLVLLEATGGLERRVLGKLVGAGLPAMAINPRNVRDFARSLGRLAKTDRIDAQVLARFARDIRPALRPIADEQTQELHAQLTRRRQLIEMLVAERNRLAAAETSKLRKLIKEHIEYLQTTLNVNDYDIDQTIKQTPVWLEKVDLLQSIPGVGRVTAMTLMAMLPELGTLGRKQIAALVGVAPLNRDSGTFRGRRMIWGGRASVRAVLYMSALAGITWNPVLKALYRRLKAAGKPSKVALVACMRKLLTILNAILRDGSPWRAQELST

SEQ ID NO: 396056 - protein, 369 aa, unidentified
MQDSKFIGLDVHKATISVAPAKGERGGETRHWGTIPHRTDHVRKLAEKLGADGRRLCFCCEAGPCGYGLHRQLVEMGHDRIVVAPSLIPVKAGDRVKTDRRDAVMLAKLRRAGELTAVWVPDSAHEAMRDPVRARATAVRVTGKARQHLQGFLLRHGRIYPGKKGWTKACRRWLTTVRFEHPARRIALQDHIHAVTDAEARIERLTKQIADLLPGRSLAPVIDAVQAMRGVAFIVAVTVVAEVGDFNRFDNPRQLMACLGLTPSEHSSGASVRRGGITKAGSGLARRALIEGAWSCRMQARVSRKLLDRIETLHQAVRDIAWKGQLRMCQRCRHLMAAGKPKVVATTAIARAMAGFIWAIARTVTPARA

SEQ ID NO: 396057 - protein, 481 aa, unidentified
MKAKPQEKIQKATDPSTRGHWNEMNRKQRREIMRKIQSEDLSLEVVHPHAAGIDIGNESHYVAVPSTRDSQPVRRFGCTTVELKVMAEWLKQCGIRTVAMQSTGVYWIAVYDILEAAGLDVYLVNARDTKNLPGRKSDVQESQWLMKLHTYGLLRNSFRPSQEIRTIRTYWRQRNDLIRAAVSHIQRIQKVLTQMNIQLANVLSDVSGVTGQAILKAILAGERDPHKLAALRDPRVKASEEQIARYLEGNWQEDLLFVLKQEQEGYEFCQQQMAECDRQLEQYLQRRDDRTQGASLPKEMRKGRLVRKKGNKPAFDMRAALFRITGTDLTQVDGIDVTTAATILSEAGWDMSKWEDEDHFVSWLRLCPDNRISGNKVLGKGRLPTNNRASIALRMAASTLRVSNTYLGAQFRRFRSKLGAPVAIKAMGAKLARLVYRMLRYGMKYVDQGAKFYEAQHRERQIGQLKWKAAKLGFRVVEAAA

SEQ ID NO: 396058 - protein, 412 aa, unidentified
MEVVFNRCCGLDVHKETVAACVWVRDEVAKVRKEIRTFGTMTQDLLLLHDWLMAHKVTHVAMESTGVYWKPVYNLLEADFTVLLVNAAHIKAVPGRKTDVKDCEWIADLLAHGLLKGSFIPPEPIRDLRDLTRYRKSLMDERVREVNRLHKLLQSANIKLSSVATDVMGASGRAMLEALLEGSTNPEVLAELARGKLRAKLPELKKALEGRFRSHHRFMLEQILLHLDFLDQQLQRINQEIAKRSGPFQEEITLLCKIHGIEIKGAQNIIAEIGVDMSRFPTDDHLCSWGGLCPGNNESAGKRKSGRTRKGDHWFRRTMIEVAWAAARTKNSYSNSLYHRIAARRGKKKAIVAVAHSIAVIIYHVLKYKKPFFDLGADYFDKLNAAHIKRHHVKRLESLGFKVNLEPLTEAA

SEQ ID NO: 396059 - protein, 378 aa, unidentified
MKRILKIGMDVHSTNYTLCAMELVIGAEDRVFANVQVTPDYKNIILFIENLKQKLGLNDTYDIECGYEAGCLGYSLYNQLTAAGVKCVILAPTTMLTEQGQRIKTDSRDAHLIAQCLSYGGYHPVYIPTEQDDSVKEYLRMRDDHKKALKKIKQQIGMFCMRHGYYYEGTKWTIAHLKWLKKLELTPMYQETLNEYLTSYDEQTAKIERFDARIEEIASQAEYAEKVKKLGCFLGIKTHTALSLIVETGDFTRFAKGNVYAAYLGLAPGEHSSAVKVNRLGITKAGNSHLRLLLVEAAGGICKGAIGHKSKALRQRQQGNSAEVIAYADKANARLRSKYYRLIRHGKKRNVAVAAIARELACFVWGMMTDNINVIEAA

SEQ ID NO: 396060 - protein, 415 aa, unidentified
MALKIVYPVCCGIDVHKTFVMACIASTDSKSVTTYKRHRFSTFTKGLNELSQWLCENDCKDVCMESTGKYWIPVFNILEHSCNITLAHPKYVKAIRGKKTDKKDAQWIADLFKHDLVAGSYMPPLPIRQLRDLMRYRFKLTNFTSSEKNRLQNSLTVSNIQIGNVVSDTFGKSSMNIIDKLLDNPLDSSFEIEPLIHSSMKGKLTELELAIEGLITPEQAGKIKVIKQHYEDLESRKADLEAIILSLAESYRDEINLILTVPSIKNLFSAITVVSEIGVNMDVFPTAKHLCSWAGLTPTNNESAGKKKSVRISRAGCYIKPLLVQCATAVVKSEKHPEIRNRYLQLKKRRGHKRAIIAIARLLLTAIYHILKNKEPYNPRLYKTSDVRPVNREITVEQAILLAKAQGYHIMTAVT

SEQ ID NO: 396061 - protein, 355 aa, unidentified
MYGLKHQKEKRSMEHFGGLDVSVKETSVCIVDETGRIVGEAKVASEPDALLGILQNGAYRFKRIGLEAGPLSQWLYSAFAEAGLPVICVETRHMRAALKAQINKTDRNDARGIAQMMRAGLYRPVHVKTLRSQKLRMLLTHRKLLQSKAIAIENDLRATLRNFGLKVGVVGTAKFEVRINELVADIPDLAGLVEPLLVVRRVLREQIAVLHRRLLAVVRDDEVCRRLMTVPGVGPVVALTYRVTVDVPARFRNSRAVGAVLGLTPRRYQSGESDRSGAISKCGDEMMRVMLFEAAQILLVRSAKWSWLKAWAMQIARRRGMKKAIVALARRLAVIMHRIWVDGTEFRWTRKVAAV

SEQ ID NO: 396062 - protein, 482 aa, unidentified
MKKRNIYQNQSQELLSLFEQAANNAKVMCVPIDYAKKDHVVMFCNGYGDILRKPFSVKNSPAGVDFLTDQVMRSCRQRAISEKHVFFGGEDVGSFADNFVSTLRCQGWLVAGVNAHEAKTQRENLQASTDRVDLMGIAKTLLNRRANCSPAQSGIYLNMRTVVRHRRKLVDITTEVRNRIHAVVDRLFPGFLNETKSAITPFSKSSLWLMQERFSAPQIRRRRRSTLIEALRRLGTRKPERTADKLQQYATQVLKPPQDYVHMLQLSLAQHVKHFCCLQESIGQLEKEIAINLAQTQGAFLTSVRGIGIVLAAGVSAEIGNPYEQKPLNNLVSYCGIIPRVKQTGGPQGETKTGKVAKRCNRILKDYAVQSASHLGLHGPADLMSDYKRRDASDQHADFGMTRRYLRMAMCLMRTSQIYLPNGLRKAQAQIEQRADYYLMTWPYLRDKWQKLGALEIAFKADHPLGQWRKIVQQFYGIKLTL

SEQ ID NO: 396063 - protein, 364 aa, unidentified
MKRKVYVGMDVHKETIRIACLTSNTKEIVKEQQIKHNEVQIKKFVNKLKSEWNEIHSCYEAGVTGYPLYRYLKSLGVNCILVAPGKIPRQSSDKIKTDKRDAIKLAKLLRSGELESIHVPSEEDEAVRDYLRSRDSLRLDLGRNRQRLMKFLLRKGITYSKTKYWTVSHNKWLNNLQFNNEILQETFNDYYSRVRVQEENLKAMDKRIQEIAESEPYREKVGILRCFRGVDYLTAMFLLCEVCDFKRFKTAGSFMSFLGLVPGEYSSGSKRKQTGITKTGSPRLRRILTEAAWQHRFPGTGSKIVTARRSGQPALVVALAEKASLRLHKKFRNLQQRGKTPQVMITAVSRELSGFLWAAMNLVA

SEQ ID NO: 396064 - protein, 460 aa, unidentified
MAVLMGAGHGQPRRRGGEGATASAIIHDSELRAHSPCEQRIYVGLDVGYREHVAAACPLSNFNLERKPDGWKRTRTIHFSSDAAGFGRLKRYLEGHSTNPGDFLILLEPTGSYGLTVLLYLLGKGYQVLQIENRAVKDYREKVFGSETKTDDTDARLMARMAFLHELVGEEFSIQPVLVVDPDAAALRSMVNDLAKLQKEITRRRNQLQQIAAATFPELKTFFKGSTAAPAARALLLHFGTPNELAAAPVETIAEVLRAAHAYSHAMRAAELRSSAQQSAGAPMLSHHQWRQAWLINQLNALENARRELVDQVALAVASHPYAPIIESLPVKSPIWTATLIGAIGDINRFRTASEFKAYLGWYPQLTRSGTSVDETGLAKNGVRPARNVLGQMTVILLSSTIRPTEFRDVYGRLTARGMRPANALGSRGWQALGRAVRHAQSDGTVRRSQTPTAAWPTTN

SEQ ID NO: 396065 - protein, 343 aa, unidentified
MDIAVLGIDLGKNSCSVAGLDASGKVILRRRMQRKTIVGLASKLSPCVIAMEACCGAHHLGRVFSAQAHTVRLMSPEYVRPYVKAQKNDDRDAEAIAEAATRPTMRFVTLKSEEQLDMQTLHRARDQAVRERTSLMNQLRAVLLERGVIVPQGRAKLRLRVTELLRHGTGELSSRIQLLIEDMLTRWQGLDERIAVFDAEFTAEAKRDEAARRLTSIPGIGALNATALVAAVGDAETFARGRNLAAWLGLVPRQATTGGKPRLLGITKRGSKYLRKMLIQGARAALPTLSRSNTRLGQWLRGLLARVHSNTVVAQISQSLSRSAWDRTAVFSSARAEGPSAKG

SEQ ID NO: 396066 - protein, 448 aa, unidentified
MSKIKTKNETVKRISQLTVINPTAAGVDVSDTEMMVAYPINSVQLEVRVFGCYTIDLHSIAKTLKANGITTVAMESTGVYWIPLFLLLQEYGFEVCLVNAKHVKNVTGRKDDESDAEWIQKLHSCGLLRASFQPDSQTRTLRSIVRHRKSLESTCSVYINRIQKALELMNIKVHTIISDIDGKTGLFIIESILAGERNPEKLADLRDKRIKASREEIIKSLQGHYTAEHLFELRQCYQLYRTHRQMIEECDREIEKQLIEQIASKNGGVVAEIAEVKRKASKKHKLPFNATSYLKEIFGVDITEVFGISELSALAILSEVGTDMSKWKTEHHFTSWLGLAPNTKISGGKIISSRIMKKKHHAGQAFRMAANGLHNSKSPIGDYYRRLKAKAGAGKAVVATARKLAIIFYKMVACQQNFNPKMLIDFQEKYKQKKINQLKRKLQLLEAA

SEQ ID NO: 396067 - protein, 349 aa, unidentified
MIVVGIDPHKQTHTAVAVDAASGRSLGELTVKARTAGFERLVEWAREFDQERTFAVEDGRHVSGHLERHLIARGERSVRVPPRMMGEARRIDRVWGKSDPVDATAVARAALAHPDLPEATLAGPEREIGLLVAHRESLVRERADKICKLRWLLHDIDPDLAPVPRSLNRFVTLRRLAQVLQAMDASVEVEICLDLIARCADITTRANELERRITSLMRTHAPALLQIPGCAALTAAKIVAETAQIDRFPTEGHFARYAGTAPIPASSGARHRQRFNPRGNRQLNTAVHRIAVTQIRMHPSARDYVAKKRAEGKTKTEAIRALKRHITRVVFKTLISMEQPTDRLTAAAA

SEQ ID NO: 396068 - protein, 367 aa, unidentified
MKKVSTAAVRQSRNISHPKLTIGLDLGDRNSWYCVLNEAGHIELEQRVRTNAKALREAFGSMRRSRIVLETGTHSPWISRLLSDLGHEVIVAHARKVRLIGESRKKDDRLDAQTLARLARIDPELLCPVKHRSAQAQADLTVIRARAGLVRARTALVNTARSLAKSYGGRLRGCNVRNMNPEKAEGLSPELQAALEPLLNAIESLSERIVEYNERIEALAQHSYPQVALLKQIKGVGTLIALTFLLTLEDPHRFRKSRDVGCYLGLQPGRRNSGQSEPQMHISKEGDPYLRTLLVQGAQHILGPFGVDCDLRRWGLKLAERGGKSGKKRAIIATARKLAVLLHHLWVSGEVYEPLHNSSRTTVAAAA

SEQ ID NO: 396069 - protein, 399 aa, unidentified
MTESTLIVAGADTHADTIHVAVISMTGAPIGDREFPTTRAGYAAAITFLTSSGQVERIGVEGTASYGAGFTRALTAAGVEVVEVTRAVKSTRRLKGKSDPLDAYSAARTALAGDGLATPKDDATAGLRALQIARRSAVKHRTAVINQLKAMLISAPDAVREKYSGLTTLKLIEAIARCRPDALTDPWAQSVLVAAKMLAQRVQFLETQADTLQAQIDAWVSEANPGLRAAYGIGADTAAQLLITAGANPHRLRSEAAFAALCGVAPVPASSGKTNRHRLSRGGDRAANNALFRIALVRMSHHQPTKDYVQRQLAKGHTRMEILRKLKRAIAREAFKLLTRHIAVPDYADLRPARQAQNITVTAAANHFGIWPTMISRIERGLQRDDAFADTYRNWLNAA

SEQ ID NO: 396070 - protein, 397 aa, unidentified
MYIVGIDIAKRKHEAAVIDGDGAVIIKPFSFTNNCSGYNRLLAMLTKAKLPLDEVSFAMEATGHYWLALFTRLQKEGFRVQVINPVQTNSIRSFYIRQAKTDPRDALLIAEVIRFGHFSESTLHPENIYELRELCRGRHAIVSMQADVKRKVVALLDQVFPEYETAFTNLFGDTSMAILQTCPTPKELSEMRLEELCHLIEVSSHKRFRMAKARELQALARNSFGFAMAGDVFSTMIRLYAKHLDFLKQQVREMDRKIAEIMETLDTPITTITGIGPTLGAYILSEIGDISRFSSAAKLAAYAGIDPTMRQSGEYNGVRNRMSKRGSPYLRHAIWLAASSAVLHDPALKLYFQKKRDEGKPYMASVGHACRKMVSIIYAVMRDNKAYTPYIPNEISA

SEQ ID NO: 396071 - protein, 430 aa, unidentified
MKSNTQNAKIEAITEKTLVLGIDVGSETHYARAFDYRGIEYSKKPFKFSNTEAGFVTFKEWILDLKERHEKDKVVPGMEPTGHYWFNLGKFLQDNEMKPVLVNPHHVKKSKELDDNNPTKNDRKDPKVIAGLVREGRYMIPYLPDGVYADLRTASNIRFQLQAELTRIQNRISRWFNIYFPEYKTVYGKPDAKSGILILKTAPLPEDILTLGIDGVNQIWRDAKLRAVGKARAKTLIEAAEHSVGSKEGAVSARMEIRMLLEDYESRNIRLQEVMTLIEGLVKQIPMAEKLLEIKGVGIRTVSGFLAEVGDISRFNNPKELQKLAGLALVENSSGKHKGETTISRRGRKRLRYLLFEVAMSLVSKNQEFRELHNYYTTRRLNPLKKMQSLMAIAAKLIRVFYAMLTKGVDYDPKKMVSDIKRPAVYLQAA

SEQ ID NO: 396072 - protein, 469 aa, unidentified
MSKGSGVSRSERRRNARKERLRGLLPRDGAVIGIDLGDEKQALCVVDHDVRVVWRKTARVRAHELGGVLDLAVGAARAAVTVACEPTGPRWMQVARLCAERGLPLVCVQPLVSHIAREQQDYTPHKRDESDAVLIARLACELHCYVPEQLDETWAHLRGLGRRREQLVRASTASVLRVRDFLSVAWPSAVTAAARPFGSVTWLAAVAAVTQRCGADPARLAAMGEEGFLALVTEGAREWGASRADRRIARKVLAVLDDRDAVGWSRRGLFRRIADELGDLRRSRAQLKAVEADMAAVLGDELGLARLGDIPGLTLLGAAVILAEAGDPSRYETSSSLVKHAGLSPADNSSGAFEGQSHISRRGRPGLRTAAWRMIFPLLLHNPVMAAKYQALVAAAEDAAAAAAAAARPGSAQAAQAQRAARAARARARVACAASLLRWIYFMAVHDAEWDPAAASGGRWTPDGLPEAA

SEQ ID NO: 396073 - protein, 327 aa, unidentified
MSIITLGIDISKVKYDVAILQDDQYLEGVFENNVKGHRSLAKWLKKHRAQSAHVCIEATGRYGDALAAFLYERGYAVSIVNPARVNAYGASRLMRNKTDGEDAKNIAHFCATQKPRLWSPAPPEVQELQALTRRLENLKADRTRELNRKKSGIISQSVLQNIEEHIAFLDEQIAVVEKQIFDLIKAHPDLRRKHGLLASIKGVGDITAAKFLAEIPDISRFDSAPELAAYAGLTPKTHKSGSSVNRRGRLSKTGNSHFRTAFYMPALSAIRYNPIIRALAQRLEERGKQPMTIIGAAMRKLVHLAYGVLKTGMPFDPNYLVNMQETA

SEQ ID NO: 396074 - protein, 411 aa, unidentified
MQVVHERCCGLDVHKKSVVACVLLSFPDGRVVRHVRTFATITADLLALDDWLRQLDVEQVALESTGLYWRPVFNLLEDGRTITLVNPRNMKAVPGRKTDVKDSEWIADLLRHGLLQPSFIPLKPIRELRELTRYRKTLVGERADVVNRIQKVLETANIKLAGVATNILGKSGRAMLDAMIAGEEDPVVLAELAQARLRRKLPELQQALKGKVEAHHRFLLARLLEQIDFLDGQIQQVQDEIERRLLPHELAVQRLQTIPGVGPLAAAYIVAEIGVDMSRFPSAKHLASWAGLCPGNRESGGKKLSGRMRKGNGWLRSVLAEVAWAISHTKDNYLAAQYQRLAQRRGTKRAAMAIAHSVLRIIYYMLRDGTTYEDLGSDYFDKLDQARIQQHHIRRLEQLGYTVTLTPAAAA

SEQ ID NO: 396075 - protein, 320 aa, unidentified
MYIGIDVAKAELVMATGASGALTTFTNDETGLTTLVAALRALAPTLVVLEATGGYEIPCTAALAAAELPVVVVNPRQVRDFAKATGQLAKTDRLDARVLALFGERVRPEQRPLGTEAQLELADLLARRRQLLEMRVAEQTRLGQAVGRHRAVVKQSLKKHLAYLDRELRITDTELRERIRQSPVWRERDDLLQSVPGIGPTVAQTLVAALPELGRLNRREIAKLAGLAPLNQDSGTWRGKRTTRGGRTSVRAALYMACLSAIRYNPPIRAFYERLCRAGKAKKLAVVACMRKLLTILNHLVRTGQRWESTEIAPPLLSPL

SEQ ID NO: 396076 - protein, 375 aa, unidentified
MKEKVRFLGLDVHAESIAVAIAEPDGEVRSLGAIPNRSESLRKLIKKLGPAEKLRACYEAGPTGYVVYWQLAELGIQCEVVAPTLVPVKAGDRVKTDRRDAEKLARCYRSGDLTAVWVPDEGSEALRDLVRAREAAKQDQMRARHRLSKFLLRSGQRPPTGVRPWTRPYLIWVAQLRFTQIAQEATRQDYLHEVEHMRERVARLEQAIREAVKLASPALQQVINDLQALRGIADISAVTIAAELGQVSRFGSARQLMGYCGAVPSEDSSGKRIRRGGITKTGNAHLRRIVVEAAWSYRRPPCIWYGLRRRQESISEEVKEIAWKAQHRLHKRYRRLGTAGKDQRKIVTAVARELLGFIWAIGIRAETTSNQQVAV

SEQ ID NO: 396077 - protein, 262 aa, unidentified
MESKTTGVDLAKLVFAVCEVNAKGSVCGRRELKREGFHAWILAQPEGTIVAMEACSSAHYWGRQCQAHGLIPKLMAAQFVKPFRKNALVKNDRQDAEAIATAARQGNMRFVAVKSEAQQVRLCWHRVREGYKKDALALRNRLRGLLAEFGVVPAPSVTALKRALADLDSYHLPDSLQRLIRMQQEHLAAIEIGMAECDARISAQAKADERCERIRELAGIGPVTADAVVASVGNAAEFKNGRQFAAWMGLTPTQFGSGRKVQ

SEQ ID NO: 396078 - protein, 439 aa, unidentified
MILIREVADAPVIMGISKPAGLKSPCGEVKTMKPLFVGIDVSSRNNVAYLMKPDGSEYSSFSVQNNLGGAKLLSEKIVSALRSMQLERVVIGLEATSIYGDSLVYALREDGSLGRFQRKIHVLNPKQVRKFKEAYPDLPKNDWVDAFVIADHLRFGRIAKEVYMDDYRYQALRTLTRARFDVIQNLTREKQRFANYLFLKCSGIAQDKAIPNTSATTIALMEHFETVDDLANAILEELTAFIIEAGRGKFVDPDATAKAVRAAAKGSYRLPKTVNDTVNQAMSVSIASMRALKEQIKVLDKAIEQQFEIIPNTLTSIPGIGKVYSAGIIAEIGDIHRFDSQASVAKFAGLVWHKDQSGEFKAEHSRMIKSGNRYLRYYLLEAANSVRRCDSEFRRYYNLKYHEVNKFQHKRALALTARKLVRLVFRLPKDNRLYIPPEG

SEQ ID NO: 396079 - protein, 426 aa, unidentified
MARQKRSVEGEFDIFVGVDWGTEFHRACVLNARGEILRGCRIDHNGEAITEFLRSLQQLTNGGPSRIAVAIEVPRGPVVEAFLEGGFAVFSINPKQLDRFRDRHTTAGAKDDSRDAYVAADSLRTDQHCFRRIATDHPDVVRLRELSRTEESLGEALRRTVNQLYQLLLRYYPQLLQLNSAPDEPWVWALLEAAPHPQCGAKLTLARLKSLLAKHRIRRWAAEEVQVILRTPPLPLSAGSAEAISEHALLLLPQLRLLHTQRKKVHDRIEAWLNHMTVVGRDHPECCQHRDIGLLLSIPGLGCLIAANLYTEAADSLAQRDYAALRAHSGVAPVTKQSGKSKQVIMRRGCSQRLRGSVYHLARCSVLHDPHSKQHYAHLRSIGHTHGRALRGVADRLLSMLVAMLKSGKPYDATRRSTAAATAPAT

SEQ ID NO: 396080 - protein, 344 aa, unidentified
MDGTTIAVDVAKSVFEVAISEHPGQVRERHRLTRERFHRFLAEQPAALVLMEACGSAHHWARHAQACGHRAILVPPHVVRPYVLRNKTDRSDAKGLLEACRNEDLRPVPVKSETQQALAALHRLRSTWLATRTARINTVRGLLREFGLVIPTGARQVVPHVWTLLEDVDSGVPGLLRPALAAAAREIREIEERLHAVERQLETAAAETLIVKQLRTIPGVGLLTATALVAAVGDVQRFPSGRHFASYLGLTPRESSTGQRRRLGGISKRGDSYLRMLLIHGARAVLCRAKAKTAPAPDRLRTWALQRERLRGHNKAAVALANKLARIVWAVWKHGTSFGAVPTM

SEQ ID NO: 396081 - protein, 341 aa, unidentified
MTFYSGIDLHSKKSHVCVIDKDGKKVKEENLNNDLTLILQFLKPFGKDVHIAIESTINWYWIVDGLQEAGYDVKLAHTLGLHMITGAKVKTDRRDAFKLAKLLRMGEIPEAYIYPKEKRPLRDLLRRRAGLVQQRSECYSSLRVQFMKYNLNTMSGNGVKQLLPSDVDIMPIPQELKDYCVMILQRIDLLSSQIDELETYLKNVTLEDPKFKLLLTLPGVRYVLGLTIYYEIGDIGRFDSVRQFASYCRLVPGISQSSDKVKRGKGSNQGNHYLKWAFIQAANIAARYYPTLRKFRDKHANRRKGNAATMVANCILAHKIANATFHMMKEGVPFDAVKLFG

SEQ ID NO: 396082 - protein, 387 aa, unidentified
MEVSNSRIVGLDVHPDSFAGAILEGRDPWQARVVSTSTRVALPLLEKWALRHTRESDVLVLEASGNAFAVAERLREVKRKVLILDSHRAGKVGKTYCATDRIDAIKIARIYLSALSPLVWQPDQKTRERREVFSAYQGVVKEGMRLKQQIKSMLNEHCLRLEKGFRLSHKSALNRLLKLRSWTEAQKMLLQQLHAGLVGARARRQQLRHYMASEILADKELLRLTRLCGINLITLYGLIAAIGDIRRFTSARKLSAYFGLNPTVEESGNYQGPSALKRHGRGAIRALLVQSAKKLLQVNNPLQKWGLAIAMRRGRNKAAVAVARKLCVAVWHVMQGHVIGAIERMDTLHTKLHKLATDLGLSAIKQLGYDTKEAFVQKKLYLLRSYP

SEQ ID NO: 396083 - protein, 345 aa, unidentified
MELGAHAGISLDPPEQLLELTLAVIRLGKRGSSRPFQTIRSPVMNGIGIDVSKRQLDVGTTDGKTLQVSNSRSGFAELDLWLQGHPAVQIVLEATGGYEQPVLDFLHNAGHPVVRANALRARKLAQGLGHMAKTDRLDAYALAKMAALVKLRSYQPLEPWQREMRDFVRARRQAMHALTVARQQQEMVGNRELRRLLQANITCLQRTVERLGKRISEQVSKQPQLAVLKSMKGVGPGLQAVLASYLPELGKISGKAVASLVGVAPMSHDSGTMRGKRSIHGGRAEIRQVLYMASMSAMRHEPRLRDFYQSLRARGKEGKVAIVAVMRKMLVILNARMRDGGSIPA

SEQ ID NO: 396084 - protein, 409 aa, unidentified
MLKIVYPICCGIDVHKTFVIAVIAITNSQGITQYQKRRFSTFTNSLNDLKKWLEAYSCFHVCMESTGKYWIPLYNVLEDEMNICLAHPKYVKAIRGKKTDKKDAQWSADLYKHDLVAGIFIPPAKIRQLRDLFRYHMKLTYMQTSEKNRYQNSLTWSNIQIASVVSDVFGKSSQKIIQHLLNHPDEEIDLPTLIDRRMKAPIEQIETAIEGEISDEQAEKLRVIKAHYDAITFCKNDLQKLISELGEAFEHERQLIQTVPGFQNEFTALRVISEIGVDMSKFPTAGHLSSWAGVCPTCNESANKKHSTKISKGGHYLKPLLVQVANAVVRSDKYPEFKNKYLQLKKRRDHKKAIIAICRKLLVAIYHVLKNDEVYNAELYHYQEYVSPKKTLTVKQAVKLVINHGYQVV

SEQ ID NO: 396085 - protein, 418 aa, unidentified
MEILTQCACGLDVHQATVVACLLTVLSDGKVKKQMRTLGTKTRDLVELRPWLQSQGCTHVAMESTGVYWKPVYAIWEEGPFQLTVANAQHIKHVPGRKTDVKDAEGIADLPLYGLLNPSFVPPKPIRELRDLTRYRRKLVESRSAERNRLLKLLETANLKLSSVASDVFGVSGRLMLDKLAEGKATPAEMAQLAKGRLREKIAELEPALEGRREEHPRYLLKLQLRRLKDLEQDVQEVETRIQTKLQPYQQEMDLLRGIPGVDWGGAAVIISELGPDMQGFASAAQVSSWTGVAPGNHPSAGKRRRARVTKGNVHLKTALVEAAYAASRAKGTYLRDKFYRVQARRGAKRAAVTVAHKILVAVYHMLSKKVPYQDLGEAYLDKLNQHHLKRNLVRRLQRLGYGVTLQPQAAPAGQPSR

SEQ ID NO: 396086 - protein, 344 aa, unidentified
MDHFAGLDVSVKETSVCIVDDTGKIIREVKVASEPEALLAVLKNPAYHFKRIGLEAGPLSQWLFSALAEAELPVVCVETRHMQAVLKAQINKTDRNDARGIAQMMRVGLYRPVHVKTLRSQKLRMLLTHRKLLQSKAIAIENDLRGTLRNFGLKVGMVGKVKFEARIKELVENLPDLAALVEPLLIVRRVLREQIIILHRRLLAIVRDDEVCRRLMTTPGVGPVVALTYRATVDVPARFRKSKAVGAVFGLTCSKYQSGEIDRSGRISRCGDEMMRVMLYEAAQSMLHSKKWSWLKAWAMQIARRRGMKKAIVALARRLAVIMHRIWVDGTEFRWTREQATAAA

SEQ ID NO: 396087 - protein, 343 aa, unidentified
MVGGSSPQADRLGSVFWKETHVCVVTRNGTVVHEAKVPSTPASIAAALARVPSCRWILFETGRMAPMLYHGLTRLGLPVVCVESRQAYQALKSLATHKTDRNDARGLAHLARTGFFKPVHVKSLPAHAIRALIIARKKLVGQRVTLENQIRGLAVVFGVRLPRALSPAFIRQALQASEGIPGLSAAMRGLVAARAAVLAAVVAIDGDIRKMARASGACRRLMSIPGVGQLTALAFTAAVDDPGRFRRSRDIGAYLGLVPRRYQSGEVDYTGAISKCGDRGVRTLLYEAANVMLTRYKGQLKLKDWALAIAKRSTMRKARIALARRLAIIMHAMLRHGTEFKPA

SEQ ID NO: 396088 - protein, 419 aa, unidentified
MSFKIFKFNCCGLDVHKTWIYACIGITDSNNRTEYKQARFSSFSKGLHQLCVWLAKYNCNDVCMESTGKYWIPVFNILEQHKIWITLSHPKYTKPMKGNKTDRKDAKWICDLYMCGMVKPSFIPPADIRELRDLVRYRFKLTCMITGEKNRAQNCLTVSNLKLDDVFSDVFGKSSRSITEQILQHPGEKFDVSPFVDSRCKTPIEEIQAAVDGNISKEQAVKLRQCLDHIDELQKHISEVEQEILRLSDKYEAALNLIRTVPGFDKNPMTAIQVLSEIGGDMSVFPTAKHLVSWAGCCPRNDKSDRKIKSTRISCAGSYFKPVLVQIANALIKSKKHFEFTTRYKRIKTRRGHKKAIIALCRMILTAIWHILTDLKPYTSDGFLESRPVKKEKVLTTSQALNLLRQRGYLIKDEPSPVS

SEQ ID NO: 396089 - protein, 342 aa, unidentified
MQAVTIGLDIAKSVFQVHGVDADGRVIIRRQLKRRYVIAFFDKLAPCLIGMEACGSSHHWSRQLQALGHTVRLMPPAYVRPYVKRHKNDATDAEAIYEAVGRANMRFVPTKTTEQQGGLVLHRTRHLLIRQQTSVINAIRAHLAEFGIVAPVGRHGMEELLHVVADVNDKRLPEVVRACVGALGGQLRMLKAQILHFDRMIMVWHRGNETSKRLDALPGVGPALATALVASVADPRAFRSGRDFSAWIGLVPKQSSSGGKQKLGSISKRGDRYLRGLFTAGALAVIRYAKLHGTGHRPWLTALLARRPTKVAAIALANKLARMAWAMMARGQRYREPMALAA

SEQ ID NO: 396090 - protein, 350 aa, unidentified
MQYVGIDWAYRRAAWCAKQADGTIVGEGFVPADEDGLARLVIELGPEVRACLEMMSGAVWVRDQLAGAGWQVEVADARKVKNVAPLACKTDKVDARVLAELCRRELVPALWIPSLEERALRERLKRRLHLVRLRTSAKNRVFGLLTQWGLRIPADRLRRPDAMELLEARGVPEVWRRSVAEALAVIELLDERIAPLDRELGPLARADRRVCLLSTIPGIGPLLGLTIAAEIGDVARFPSPRKLIGYSGLAPRVKQSGERSRTGELSKAGSRTLRFAAVEAAQGAWRETNPWHRLYSDVKARTGKANPAKSAVARKVLIACWHVLSLDEPFKPPHPPTDLVPASSLCFLAA

SEQ ID NO: 396091 - protein, 359 aa, unidentified
MAVIEGQERRIVGGVDTHKDLHVAAVVDEQDRVLETRCFATTRQGYRQMLVWMQSFGELRRIGIESTGSYGAGLLRFMHQAGIAVLEVTTPDNQDRRRRGKNDDLDAQNAAHAAFAGQRTVTPRSRDGMIESLRVLMACRKTAVSARRVALQMIHNTIVCAPDGLRDQLRSLTRMQLVRTLAAWRPDLTAYRDLDSAYRIGLKSLARRYLELHDEIADLDAMIAAIVDELAPNLVARNSIGHIGAAQLLLTAGGNPERLRSEASFASLCGVSPVPASSGKTVRHRLNRGGDRAANSALHIIAIGRLRTDQRTKDYVARRIAEGHSKLDAIRALKRYLAREVYTLITQRRREINATRIAA

SEQ ID NO: 396092 - protein, 363 aa, unidentified
MATMPQLERRVTVGVDSHKDVHVAAAVDQIGRILATTQAPTTLRGYAQLERWAGELGRVERFGIEGTGSYAAGLARWLTGRGWQVVEVNRPNRHKRRRRGKSDPVDAEAAARAALAGDDTTTPKAATGAVEMLRALRVARRSAVKARSQAANQLDSLVVTAPDQLRAQLRRLPAAQLVEVAATLCPGELHSPLAAVKLALRELARRHQALSAEIDRLDAHIAKLTSTTAPGLLARRGVGAQVATALLVAAGDNPTRLASEAAFAALCSASPIEASSGRTVRHRLNRGGDRQANNALWTIVITRMACDERTRRYVERRTSCQRPSCGPRWWPSRSPHPWGLLRSCSCGCLLGCGPGACGTTRPR

SEQ ID NO: 396093 - protein, 338 aa, unidentified
MEPKYRRCCGIDVHKKSVTVCVLPPVGKPEMEVRKRNFRTFTRDLKQLRAWLKNCKVTEIAMESTGQYWRSIWNLLEDHFEKLILVNPQHIKGLNGHKTDPKDAQWIAELLETGKLKGSWVPAREIREVRDLTRQRVHVLEDMNRVKNRIEQLCQTGNIKVSSVATDLFGVSGRRMLKAVVEGKHDAGWMADYARGSLRGKRRELELALEGSFTGNQRWLLDKELRQLEWLESQIPVLEQEIERQLEPFQEAMRRLMTIPGIDRKTAWTIVAELGVDMGVFTDAKHLASWAGLCPGNRESGGKRMSGRTRKANRYVKRGMCQAAWAASHSKNTYLHAF

SEQ ID NO: 396094 - protein, 338 aa, unidentified
MSESALIGIDLGKHTFHLHGQDKSGREVFRKKCSRAHMMQFFASSQSCVVAMEACAGSHCVARQLAAIGHTPKLISPQFVKPFVKGNKNDFVDAEAICEAASRPSMRFVTPKTESQQTLSVLHRMRESLVRDRTRTANQMHGFLLEFGVSLPRGLAIMKRLAVVLAEHELPVRLTVLLQRLHNHLIYLDEQIKAMDKELACQVADDDLGSRLLSIPCVGPITASLLAVEMGDGEQYRCSQDFAASVGLVPKQYSTGGKANLLGISKRGDKHLRQLLVQCSRVYMQRLDHQKGALADWVRSLLSRRHSNVVACALANKLARIAWAIAAHHTQYEAGPGA

SEQ ID NO: 396095 - protein, 344 aa, unidentified
MKHYVGLDVSVKETSVCIIDEAGKTTREAKVASEPEAILAVLMDEALSIERIGLEAGPLSQWLYSGLAETGLPVICVETRHMKAALSAQLNKSDRNDARGIAHMMRVGLYRPVHVKTLAGQKRRMLLTSRQLLQAKALDIENDLRGTLRNFGLKVGVVGAAKFEARIRELVADQPDLAAITEPLLTARRALREQLGVLHRRLLAVVRHDEVCRRLMTVPGVGPVVALTFRATVDVPARFKNSKAVGAVFGLTPRRHQSGEIDRMGSISKCGDAMVRTMLFEAAQVMLTRTIKWSWLKAWGMKIARHRGMRRAIVAVARRMAVIMHRMWANGTEFHWAKPTAETA

SEQ ID NO: 396096 - protein, 386 aa, unidentified
MGTQTFIPRDYDVFGGLDVDKKSISATFFDHQGFLKSVTMPYSVEYLVNHVRKHYGDKKVAFAYEAGPTGYGLYDGLEAQAYKCLIASPSMIPKAPGQRVKTNRLDSRGISENLRGGQLKGIHVPTPLYRELRHLTQLRDTLVSEMVGMKQRIKSLLLMEGLEFPPAPAGSQWSFLVKKKLRVLPCSSTVRFKLDRLLDSLEFDEKQVLKASREIRRFCQNNPELSQCINYLKSLPGFGWIVSSQLMARVGDWRQIKNIRQLPAFLGLVPTERSTGERIERGSITHSGDGRLRSKLIQASWSAIRQDGELREFFRTVAKGHPRHCAPRIAIVAVAHKLSVRASVVLMQQRPYEVRQKVQSAPLTQEETVPQGTTRRLREAGESTAP

SEQ ID NO: 396097 - protein, 466 aa, unidentified
MEVLYARCAGVDVHKKTVVVCRIIPGPEGKPIKEIRTFTTMTRDLLALSDWLAEGGVTHVAMESTGVYWKPVYNLLEGTFPLLLVNAAHIKQVPGRKSDVLDCAWIADLLRHGLLKGSFVPERGLRELRELTRYRTALVRERAAEQNRVHKTLEGANIKLSAVATDLMGVSARQMLAALCTGRSDTEAIAQLAKGRLREKIPLLEQALEGDFQPHQRFLVAQQLAHIDYLEGLIDQVSEEVAQRLEPLAPPPSGPAPAPGSDALDEAAAFAAAELEARREALHLRLALAGLQEQEAVEGPLSFAAAVALLVTLTGISQRTAEVIVSEIGTDMSRFPSAGHLCSWAGLVPGLNVSAGKRHGNRTRRGSPWLRSALVESAHGASRSKGTYLSAQYQRLAARRGRKKAIVAVAHPILATAYYLLKNRTTYEELGDAYYDARDKEAIQRRLVRRLEEIGYTVTVELAQAA

SEQ ID NO: 396098 - protein, 422 aa, unidentified
MLEETHDTEEIIARVAALDIGKAELVCCVRVPSAQGSGKRAQEVRTYPTMTRSLLVLADRLRELGVTRVVMEATSDYWKSPFYVLEAHGLEVWLVNAKDVKHLPGRPKTDRLDAVWLAKVAERQMLRPSFVPPPPIRRLRDLTRYRADLVAVRTAEKNRVEKLLEDAQIKLSVVASDIFGVSGRDMMAALIAGERDPKALAQLARRRLRAKRSLLEEAFYGHFSDHHAFLLQTMLARIDQASADIATLEAHIEAEIAPFAQAADRLDEITGVGRAAAQVIIAEIGVDMGRFATPGHLVSWARFAPGVKESAGKKKGKGTTGHGNPYLARVLGEAAAAAGKTSTFLGERYRRIARRRGTKKAMVAVGRSILIIIWHLLSDPDARFHDLGPGFYDTRIDADRKKRNHVRQLEALGYTVTLQPAA

SEQ ID NO: 396099 - protein, 359 aa, unidentified
MDQLIRIGVDTSKHIFQLHGVNAVEQPVLRKKLRRREVAGYFAKLAPTVVAIEASTGAHDWARLLSAMGHQVRLIAPQYVKPYVKRGKNDAADAEALCEAMSRPTMRFVLVKTAEQQAALMLAGSRERLIARRTQLGNVIRGYAAEFGLVTAKGTDKIEPLLARLAAAQTVPSLARELFAIHGKEYRQLQAELEVVEAKLMAWHRDDACSRRLAQIPGVGPIGATMLVMKTPDPTSFPSGRHFAAWLGLTPRDHSTAGKTRLGVITRAGDETLRSLLVVVATAVIQQARRGRGHPSPWLVSLLQRKPPKLAAVALANKIARTAWKLMVTGESYNARPAPTTLTRVAVTRSADQSTAMMP

SEQ ID NO: 396100 - protein, 398 aa, unidentified
MTESSDYESVQVFIGVDVGKDTHHAVAINRSGKRLFDKALPNDENKLRSLISDLKQHGQILLVVDQPATIGALPVAVARSEGVLVGYLPGLAMRRIADLHAGEAKTDARDAAIIAEAARTLPHALRTLKLADEQIAELSMLCGFDDDLAAQTTQASNRIRGLLTQIHPALERVLGPRLEHPAVLDLLQRYPSPEKLASLGEKKLAAQLCKLAPRLGKRLAADIAQALAEQTVVVPGTNAAAVVLPRLALQLITLRKQRDEVALEVEQRVLAHPLYPVLTSMPGVGVRTAARLLTEVACRAFASAAHLAAYAGLAPVTRRSGSSIRGEHPSRRGNKALKRALFLSAFAALRDPLSRAYYTRKMSQGKRHNQALIALARRRCDVLFAMMRDGTFYTPQGS

SEQ ID NO: 396101 - protein, 496 aa, unidentified
MGNRLEGAGQAAQDHVWGCPIWLPQCLWEMELRGLDWPAWGSGTTKCRALEEAARRTVSKLLCPSTGHPSFPKGGPMDRAVADVMYAVACGLDVHLAVVVACLVRSGPKGGSVFEERSFATTLRGLRELRDWLLAAGCEAVGMEATGVYWLPVYSVLEGHVQMVVGNPNHMQNLRGHKTDRKDAKWISGLIRHGLIRPSYVPKLEFREARELTRSRRQLINARTSMRNEISRLLAHQGIPLGSDGLLSNIFGASGMAILEALAEGRSVLEELPKLLHRSVKHKVGILAAALEAGLGEVSRQLLAMHLGRLEAVEEDIQKVETLIAKQLEPYGDKLELLMTIPGVSYISACVILAELGVDMTQWPSEKHLSAWGGVAPGCRESAGKHRKAATRKGNPYVCTTMVECAGAAVLKKGCHLGQKYKHLCARTGSKMKARMAIARKLLVIVYHVLGNLEPYREPEAKPPSPRNMQKSIQRHLRELQKLGLNVQITEFEPAS

SEQ ID NO: 396102 - protein, 404 aa, unidentified
MSQINLTNEPLFAAVVGIDWGDKKHAWSLQPVGSDQRERGEIEHTPEAVESWASMLSARFHGQPIAVALEQSRGALVFMLAKYAHLHLYPIHPRAAAQFRAALYPSGAKDDPVDGDMLLELVLHHRAHLRPLQPDTEQTRLVQHLVEARRKLVNEKTRQVQRLTDKLKLYFPQMLDWFEKVDSPLVGALLLRWPTLEELQKARPATLRSFLTQHNCRSQELIDERLKEIPQGIPAIRDAAVIQSAVGMTQILVALIATLRQGIDKLEKQIEQAARAHPDFPIFDSFPGAGPALAPRLLAAFGSLRDRYAVASDVQKFSGIAPVMERSGKSEWVHFRRACPKFLRQTFHEWAGHSIAFCDWARVYYDQQKRAGKDHHAAVRSLAFKWIRIAFRCWQDRVPYDDAR

SEQ ID NO: 396103 - protein, 459 aa, unidentified
MRTIGLDLAVQTAHKAVVLDEGGHFCTPILTVHTRPSELSQLLAQARDGASSAEVQIVMEPTGMAWFPVAVYHARQAVPVYLVNSQEVADLRRYYKRHAKSDRIDARVLARLPRVNPDKLHRLTLPSATALACQRGCKQLDHLATQITAIKNRLQAIDRFAWTGLEEQVFADPFSPAARFFREHWYDPRQVVQVGANAIRQQWEARAVDADDGDAWVEPLLTLAQQVLTLYGTDGQFLDFGQLQAEVQRDQAWLTWLEQQHHTLRLRTVRPLYRAVHPSRNLETLKGVGQDSAAVYASFIGDPRRFSSTRLFRGWSGMVPSSAQSAENEAKGLHVTQAGPDLIKKYAYLDAEIARRYDPQIAAIYYDQMMHKGKHHKQAACACATHLLDRVLAVLRADQPYDVRDTDGTPLTGQQARAIIMERYTVPQEVRRRTGYPLGEAQSASAGRSTGRTADHVGE

SEQ ID NO: 396104 - protein, 309 aa, unidentified
METLITHCAGMDVHQETIVVCTITGPVGGSPEVETRTFSTMTKSLFELLQWLETKEVTHIAMESTGIYWRPVYNILEGYFDITLANAQRIKNVPGRKTDVSDAEWIAKLLRHGLVEPSFVPPSDLRELRELTRLRKKQVGGLTAKKNRLQKVLESANIKLGTVISDVFGVSGRNLLERLMEQGFIDASDIEGRVKGVVKKKVSALADSLFGTLDEHQIFIIRFLWNEIAFYEESISKLDERIEQYLASYKEEMDLMQTMPGVKKTTAASLLAEMGNNMDQFPSAAHLTSWAGVSPGNHESAGQKKVPGL

SEQ ID NO: 396105 - protein, 371 aa, unidentified
MKSIIYIGMDVHKKTYSLCALLKETGEIIGETKIPADVSLIIKFIENAKKSVDSDDVQIKTGYEAGCLGYSLYWQLAEKGIECDILAPSTMHRSAKNKVVKNDRRDAKNIATNLANGTYKSVHVPTDEDVEIKEYIRMMHDFKIELKKVKQHINAFLLRFGHQYPAKSKWVPAHIKWLKELELSDMHREILDEYLSQLEILSEKIERFKHRLEELSQKETYNEKIGQLRCIKGIDTTAAMTMHAETSDFDRFPTANAFAAYCGLTPGEDSSGESYHRLSITKQGNSMIRTTLIEAAQVLVRGTIGKKGKKVKSKQKDQDVKVIDYADKAVIRLQKKYHRMIFRGVKRNIAITAVARELACFVWGIETGHIS

SEQ ID NO: 396106 - protein, 365 aa, unidentified
MEHFAGLDVGVKETSVCVVDKDGTILLEASVPTDPDILAATLKPWRRSLRRVGHEAGSLSPWLQRELEARGVPAACLDAFAARDAMKAQRNKTDRHDARAIAHLMRTGWFRKVHVKSEASYRLRFLLSQRETMVRKRVDVENSIRQSLKIFGLRMGVCNKHGFGARARELVGDDAVLSGLVEAMLRVRTVLVEEIARLHKLVIGVVARDELCRRFLRIPGVGPIAALSFKTAIDDPARFANAKLVGAYFGLTPKRWQSGKTDRQGAISKMGDQAVRRALYEAGHILLTKYRGKAAIKIWGEKLMKTKGHHKAAIAVARRLAMAMWAMWCDGTEFELVPGAPMPEREAERKAQKQLGATNAKLIPA

SEQ ID NO: 396107 - protein, 376 aa, unidentified
MTKGTRFVGLDVHAATIAVAVAEPTGEVRGMGTIPNEPEAIRKLMRRLGPAEQLRVCYEAGPCGYTLYWQLTRAGISCVVIAPTLIPVKAGDRVKTDRRDAEKLARSFRSGDLTPVWVPDAAHEALRDLVRAREAAKKDQLRARHRLQKFLLRHGRRPPAGTAAWTEKYRRWLSTVRFDAPAQEAPRADYVAEVEHARERIGRLERALDDAVEATPAAMRAVIDALQALRGIAKLAAVTIVAEVGRLSRFDRPRQLMGYSGAVASEHSSGPRVRRGAITKTGNAHLRRIVVEAAWSYRHRPAIGPTLRQRQAGQSAEVTAIAWKAQERLHGRYRRLLARGKVKQQVVTAIARELLGFIWAIGVAVEGQPQPDGRAA

SEQ ID NO: 396108 - protein, 358 aa, unidentified
MVDKVTEAAVVGGVDTHKDLHVAAVVDQNNKVLGTQYFSTTRQGYRQMLAWMTSFGTLKRIGVECTGTYGSGLLRYFQNAGLEVLEVTAPDRMERRKRGKSDTIDAECAAHAAFSGIRTVTPKTRDGMIESLRVLKTCRKTAISARRVALQIIHSNIISAPDELREQLRNMTRMQLIRTLGSWRPDASEYRNVTNVYRISLKSLARRYLELHDEIADLDVMIAAIVDELAPELIKRNAIGYESASQLLITAGDNPQRLRSESGFAALCGVSPVPVSSGKTNRYRLNRGGDRAANSALHIIAIGRLRTDAKTKEYVARRVAEGHTKMEAIRCLKRYISHEVYTLLRNQNRRINSIPITA

SEQ ID NO: 396109 - protein, 362 aa, unidentified
MSKTEKTRRLCVGVDLHKTQFTVSALTEDGEVILQEEYRTTPKGYSEFIEEMHRYEEEDGCSIELAVETTGNARFFKNQMEKEFFDVTVVNTNKFKVITYSTKKTDANDALTLAMYLQKEMLPEAHLCSQTSEEIRRMLKTRRILVQSSVKIKNQIHGMLLGYGIETNAAQFQSKRKRQELMNDLANHYYSDFTASSLEVMLNILDVLAEQIKDVEEQIETMVEDNEDVELLKTIPGVGKIGAATIASYTEDLERFDGDFKRFAAYIGIVPNVHNSNETVHLGHITKNGPQELRTAFVQVALGMIRASKQTSDWRLIEDYQCKKTEKGSGRAIIALTRKIARIVFVMLENRETFNPELMLNK

SEQ ID NO: 396110 - protein, 312 aa, unidentified
MVCAGIDTGKRKLDIALDGRPERLQVENTATGHEVLLAWLRRQQAQRVGIEASGGYEQAAVCQLRRAGFLVIVFQPGQVRAYAKFRLQRAKNDKIDAALIAACTAAATKVHAPPDPRLAPFAEHLTMIEQITEDVVCFKTRRETAREERIRHFWSEEIARLKRLLRLELKQLVAAIRQHPDLADRLDLIVSVEGVGLRTAVAILARMPEIGRITREQAAALVGLAPYDDDSSDHVGVRRIQGGRERLRKALYTAALPAAFHWNPQLIAIYERLIASGKPHKVALVACARKLLIFVNTVVARGTPWVPRTALP

SEQ ID NO: 396111 - protein, 387 aa, unidentified
MQASAPRPEQAAIHVNLAAIFVSLELSRSTWLITSLSPGSGEKMSKHSVRGGDAAGLLDQLGGLRTKAQARTGETFPIIVIQEAGLDGFWVHRVLEAEGIESHVVDAASILISRRRRRAKTDRIDGEALLRTLLAHKRGEPRVCAMVRAPTPQEEDRRRLCRERKTLVAERVGHVNRIKGLLFAQGVSDYEPLHRDRRQRLEELTTGDGRPLPAHLEAQIGRELDRLELLLKQLKAVEAERDALLEPTSDDGPTPATLLAKLKGVGPEFAAVLWSEGLFRSFGNRRQVAAYAGLAPTPWQSGSVQHEQGVSKSGNPRLRTTMIQLAWLWLRHQPTSELSLWFQERMRHNDDRGKRTAIVALARKLLVAFWKFSSSGVVIEGAVMKAA

SEQ ID NO: 396112 - protein, 348 aa, unidentified
MQSKSQIRSIGIDLGKTTFHLVALGSRCQVVVRKKFSRSQLLVYTANLPSSLIGMEAGVGSHFLGRALREQGHEVRLMRAQFVRPFVKSNKNDYRDAEAIAEAVERENMRFVPIKTEDQLDLQALHRVRERLVSRRTSVINQIRAFLLERGISFAKGPARLRREIPEILENADEKLSTRMRRLLDFLWQEWKHLQLQIESLSEDLEKIANSDAACARLQQIPGVGPLVATAVVSAIGNGAAFHKGREFAAWLGLVPGQWSTGGKAKLLGISKRGNPYLRKMFIHGARAAVLRVKREGSYLGQWIGGLESRAARNVVIVATANKLARISWAVLSSGENYRPRPALAVAS

SEQ ID NO: 396113 - protein, 414 aa, unidentified
MEAIIERACGIDVHKKNIVACLLIGKPGEKPKKTVKTFSTMTEDLLACKDWLESEGCTHGALESTGVYWKPIFNILEESMEVILANARDIKNVPGRKTDVRDCEWIADLLRHGLIKRSFIPPKPIRELRDLTRYRRKLMQNRSSELNRIQKFLEDANIKLSSVVTDINGVSAKQMIHHLIKNDMNPLEIADLAKGRLRNKITELEKALDGYFSEHHRLILRVSIQMVASYDKAIEELNREIDQRMGPYEEISERLQTIPGVKKNTVESIIAEIGVDMSRFPSDAHLSSWAGVSPGNNESAGKRYSGRITPGNRWLKASLNEASWAASRTKGTYLKARFQRLAARRGKNRASVALSHTILIMAYHIIKEQRTYYELGADFFDRLHEEQLIKRLTSRIKALGYMVNVQKLNTAACN

SEQ ID NO: 396114 - protein, 380 aa, unidentified
MKIFVGIDIAKLNHFAAAISSDGEILIEPFKFTNDADGFQLLVSKLESFDKNSIIIGLESTAHYGDNLVRYLVAEFYQVCVLNPIKTCQMRKNNVRKTKTDKVDTFVIAKTLMMQDDLRFITFFDLDMMDLKALGRFRQKTIKQRTRLKIQLTTYVDQVFPEIQYFFKSGLHQNAVYALLKEAPSPKEIASMHMTHLANLLKVNSHGHFTKEQAKELRILAQKSVGANDSAISIQITQTIQQIELLDSQLEKIEAEMTDIMKFNDSVIMTIPGIGYINGGMILGEIGDIHRFSNPNKLLAFAGLDPSVYQSGNFQAKTTRMSKRGSRVLRYALVNAAWNVVRNNATFKAYYDAKRLKAGLTTMHLALCRQACQSHLEDAH

SEQ ID NO: 396115 - protein, 464 aa, unidentified
MALTLGIDVAVRAAHQGTLARDGITVWRGRKFSTRPAELERLWDDLNLADPGDLTVVVEPTRNAWIVVAEWFRRRGARVVMVPTTQSADLRKYYSKHTKNDRIDSELLARLPLLHPEGLREYSGQGPADPLRRLVKQRSTMVKRRVAVYARLDALVELLGPDWYAVLGSNYGIAALEFLARYADPHAVLRLGRGRLSRFLIARSRGAWRSDHAAGLIAAAKETLVLWGSDGMNFAELSEDIAHEAEQALFLTRQIKQIDERVANLYAEADPDGIVASAPGVGPVISAVIAGRIGDPHRFTSLAAVRAYTGLVPKVSQSGVSKVESSITKAGDPLLREMLCTAADQARKIDPQIAAKYQRLMAGDRHHDSAICHLATLLVTRITTCMRTGQPYALRDIDGTPITEAQGRVLVKERYQIEPRRRDNIRHQRMRDRRNQGAGQESQESPSAPTSRPATNHPTSQHIA

SEQ ID NO: 396116 - protein, 425 aa, unidentified
MSEKIVVGIDVSKAFSDICILSPNNDIIKRLKISNDITGMKSLIYVLEKVEDEYKDTAVIIMEATAHYHQILANFFRKHNYEVIVINPIQSGALKNINIRKIKSDKTDAYNIALLYRIKNYNETITHSDTVNSIKKLCRQHKELTDEIVEHINRLIAFLDISFPDFKKVFTDLQGKTPLSLLEKYPTIQEVLSPENKQDIIQLIKENSHKSSSYAEAKYEKLLKAAEKSIEVCIVSLSSAVLIQTTVRVIFSLQEALKAIDDEIKRLSLLDEKFHKEIVLLQSIPGVGEYTACVVLSELGDISNFSKPKELVAFFGLDPGVSQSGTYNRKNNKISKRGSPHVRSILHMLAKSNVYPNRNLEYLNPVMRAYFDKKIAEKPYKVVMCAIMRKMVQIIFAVLRNQKSFELRTPEEHQKLIREKSKLVA

SEQ ID NO: 396117 - protein, 339 aa, unidentified
MGCSRRIKRRKATTKFMYAALDLHERSIQCVLKDDTGKVVRESKMGKDEDRILEFLDGTHASVVMESGYNHQRIYDLLKENGYDVKVAHPLMVKAIAYAKVKSDKVDARMLADLLRAGMIPEAYVPGKDVREIRDLVRRRHYMVKLRTMLKSKVHAEVATRWIKHDGDLFTEEGRSYLRTLSIDAVNDYLDTIEFLDRKIRELDAKVKPKAESDRYAKLLMTIPGIGHYSALLISSEIADINRFPDPEHLCSYAKLSPGVHQSGDTQYTFSGAGNSMLNWIMIQCTRVHVRRCDSAITRFHEQVGRRRGENVAIVAAARKLMRTVYVMLKEEKAFRLDG

SEQ ID NO: 396118 - protein, 423 aa, unidentified
MMKLKYSICCGLDVHKNVIVATIVITNKDGVSEYMQKSFSTINSDIQRFHNWLIENNCYHVCMESTGKYWIPIFNYLENDIDVCLTHPKYVKAIKGKKTDKKDSKWIADLYKFDLVRCSFIPPKDFRQLRELSRYRFKLVCMKSSEKNRIQNCMTVSNVGIASVLSDPFGKTATEIISYLLEHTADSMDEKAVRKFIKKGAKSKSDEIIEAIKGYTIETDQAKKLELARGHLEYLDDMITQTEVELYVRIKPYYEFVEFVSTMPGMTELSSTIVLAETGVDMNIFDDARHLCSWCGLSPSNNESAGKKKSVRIAKAGDYLKPMMVQCALAAIKSKKQPYFAIKYGRIKKRRGHKKAIIAIARMMMVCIYHMVSEKKPFTPADYEELMKPQNHVERVVLNENNVFAYLESLGYDSSKLVKRNDN

SEQ ID NO: 396119 - protein, 451 aa, unidentified
MNKNVSMEIINPNAAGIDVGSRSHFVAIGQGNEDVREFGVYNEDLKAIASWLKENGKTSVAMESTGTYWQSLFTVLQNEGLQVILCNGKFTKNIKGKKTDVQDCQWIQKLHTIGLLTGSFLPDAVTEKLRTYCRHRSNLLEQSSDITRRMQKYLRLLNLRLDVVVRDITGLTGMAIIKAICDGESNPELLASLRHGNCKKSEQEIAKALQSNGKEDYLFALTHEYNTYLYMQKAIEKCDKKIEILLQEQIDNDHNKREHTIGKKVHKRINKNAPKNFDVNLIAYQYFEGVDLMAIEGVSHSTILSIMSEVGLEGLKKFESAKQFASWLRLAPNNKVSGGKVLSKKVPKGSNRLKIALRNAANAIGLLKDTPLSNFFHRISYRKGHISAVSATARKLSVIIWNMIIKKQPYNNDHGYEFLDQKRKRKVKEMKKQIAKFEISTDELGLNFSSL

SEQ ID NO: 396120 - protein, 352 aa, unidentified
MSMLAERVGFVIGVDTHRDTLAAAVLSAPTGGVLAQTQVAADAAGYAALRVWAAGHAPGPRAWAVEGTGSYGAGLAAGLVDAGERVYEIDRVTRGRRGGKSDAVDAVRAAREALGREHLPTPRQHGKREALRMVLTSREGAVRARTAAWNELAALIVTAPEPVRALLRAHRGEQLLDAVARLPHPAGEPLVIEVASTTIRAVATRVGLLSAEVADYDRQLAGLLDGHQLLEEFGVGPVVAAQLLIAWSHPGRVRSEAAFATLAGAAPLPASSGRITRHRLSRKGDRQLNRALHVVALIRLGRHPETQAYATRRRTQGKTNREILRCLKRALARRFHRLLTRLESPQPTALPA

SEQ ID NO: 396121 - protein, 483 aa, unidentified
MKNKQPEKTEEAPCRPTQGHWHEMNRKQRREMMRKIQSDDLRLEVVHPDAAGIDIGNESHYVAVPPTRDSESVRRFGCTTAELKEMADWLKQCGIRTVAMQSTGVYWIAVYDILEEAGLEVYLVNARETKNLPGRKSDVQESQWLMKLHTYGLLRNSFRPSQEIRTLRTYWRQRNDLVRAAGRHIQRIQKAMTQMNLQLANVLSDVSGMTGQAIIKAILGGERDPQKLAEFRDSRVKASKEEIARSLEGHWQEDLLFVLQQEQSGYEFCQKQMAECDQRIEQYLKQREDRSAGDNLPEEKRKERLRKKKKGNAPQFDLRAELFRMTGADLTQIDGVDVMTAMTILSEVGWDMSKWKTEHHFVSWLRLCPDNKISGDKIIGKGRLPTNNRATSALRMAASTLRLSNTYLGAQFRRLRTRLGAPIAIKAMAAKLARLVYRVLRYGMQFVDKGAEFYEAQHRTLQINYLKWRAAKMGLQIIEAPAA

SEQ ID NO: 396122 - protein, 357 aa, unidentified
MEKRLKQSLGIDVSKLTLSLSLGFLNDRLVKDFTFHPDVSNDISGYKVLLKWLKVSVDSSVDMLVVMEATGVYHQGIAHYLHEQGYAVCVMQSGRVKRYAQSLDQRSKTDALDSRMLSMLGLERAIRIWYPPSEELQELKGLSRERSSLLNDRTMENNRQGAISSSVYSNTKALKRHKIRLKLLNTQIEAVEQEMRLVISKNEVLERKLDFLMSIPGISFISAATVVGETLGFESIANAKQLASYAGYDVVLRESGNFKGKTRISKKGNSHIRAALHMPSMTCVRCNPTLKKFYTRLKPKKAKPLVALIAVQRKLLILMYTLWKNEEVYDAEFEIKKQQKHEALAAQDNNLINQLVS

SEQ ID NO: 396123 - protein, 411 aa, unidentified
MEQIHDRVAGLDVHRDQVAVCVRTPGPRGGVHMDKARFDTTAGGLAALAEWLAGQAVALAAMEATGVYWKPVYYALEGRLEVWLCNAHHVKNVPGRKTDMSDAEWLADVAAHGMVRPSFVPPPPIRELRELTRYRKTQIDVRAAEIARLEKVLQDAGIKLTSVASKVLTQSGRAIIEALIAGQRDPAALAGLAKGKLRPKIPQLTAALRGHFGAHHALVAARILAHLDFLDETIGALDAQVAARVAERCQPAARLLADVPGLERRSVEVIVAETGADMSRFPSPAHLASWAGLCPGNHESAGKRRRVATTPGNQWLRRALIESARAAARTKDSYFGAQYRQIARRRGPNKAAVAVAHSLLDVIWHLLTTGEVFADLGADYFTSRQDKEHQARRLISQLEKLGFTVQLTDAG

SEQ ID NO: 396124 - protein, 384 aa, unidentified
MKNDNIVFIGLDTHKEQTQVSYILDHRTAEVNNLGRIQTTKTGFVKLARQLQSKYQHATLHFVYEAGPCGYWIYRLLTSLGHCCFLVAPSLIPKKPGDRVKTDKRDAQNLARLLKNNDIDPIYVPEPEDEAVRDLSRAREVAMRDLNDAKHQLKSMFLRNNIHYKGSDNWSLKHIRWLTEIVLPHPCQQIVLQEMIQSISERMARLKRLDNELTHQVKKWRYYPVVKAIQAMRGVRLLIATGMIAELGDLSRFDTPRKLMKYVGLTPSEHSSGNTRKLEAITKCGNGRARRLLIEGAHSYRHTAKISKEMQLRQEGLPKTIIDKAWQAQLRLCRRYQRLMMRGKPRNVVITAIAREMIAFVWSISREVVLPRVDPRTRLSRVPA

SEQ ID NO: 396125 - protein, 446 aa, unidentified
MSHRRQVPSRGVARRNAKLKALRKLVSRDRAILAVDLASAKQAAVVLDHDSVVLGRRMFTGSAWCISEILAWAGPIAVKAGFSGLVLACEPTGHRWKPLVVTARAASIPVVCVQPLLVHRGREGEDFTRNRSDFDDAVIIGRLTAELRCYVPYLPEGPWARLRHLGARRAELLVRATAARQGLRDLLECAWPALLAAAAEPLDSVTWRAALAVGTDPAVIASMSVEAFTAALRGQVRALGGQRVCHRIARAIHAAAAEPGGIAAERAAALERAGFAYGDWMSALAAIAEVEARMVTVLDELHLTCLVTTIPGLSAIGAAAILAETGDPARYDSPRTWVKHAGLAPRANESGTYRGQTKTSGRGRPGLRTAAWRALWGALRNNPVWSARHAYLISRDRNRLNDGQARTAVAAALLRQLFIVITRRVPWDPAMAGASASRPEVTTAAA

SEQ ID NO: 396126 - protein, 410 aa, unidentified
MEALHQRCAGLDVHKKTVVASVRLAEGSKVVTEVRTFATTTSGLLSLSDWLSGNGCTHVAMEATGVYWKPVWHVLSDGEMELILANAAHVKNVPGRKTDVSDATWLAELLAHGLIRASFVPDGQTQELRVLLRTRKQLVREQTRHTQRIHKTLEDANIKIESELSDMLGKSGRAMLNAIIAGETDPARLAALAHPGVKSPQAKLQEALRGRVTAHHRFLLKLHLGQIDQLDAAISTIDSEIEANLAPFRTAVELVSTIPGVGPLGAQVIVSEIGTDMSRFPNAGHLLSWAGLCPRNDESAGKRRSTRLRKGAPWLKTMLVQCAWAAKRKKASYLQAQFLRLRSRRGPQKAICAVAASILTAVYHMLKDGTPYEDLGPDHFVRRSKTTQTQRLVRRLEHLGYTVDIKPLAA

SEQ ID NO: 396127 - protein, 469 aa, unidentified
MAAEKKLWNRGERKEFARQLQSANPGLEIVHPHAAGIDVGNQAHYVAVRPDRDPEPVRRFECFTADLYRLADWLKNCGVKTVAMQSTGVYWIPLYDILEERGFAVYLVNARHTKNLPGRKSDVQESQWLLKLHTYGLLNNSFQPSSEIRTLRTYWRQRAEHVAGAATCIQRMQKALTQMNLQLANVISDLSGLTGQRIVRAIIAGERDAQRLAGFRDPRVQASQEEIAKSLEGNWRPELIFLLQQEMAMYDTYQQRIAECDQQLHKHLTSFADHAHQVRSQSAQGKAEGKKAKKPAAKNAPRFDLSSELERITGVDLTRIHGIDVMGSQTILSEIGLDMGRWKTEAHFASWLGLCPDNRTSGDKVLRRGTRHVVNRAALALRMAANSLLRSQSYLGAQYRRLRTKLGAPKAITAMAHRLARLVYRMLKYGQQFVDKGMEYYEQRYRNQQVQLLQKKAAKLGLQLVQAQT

SEQ ID NO: 396128 - protein, 347 aa, unidentified
MEYVGIDLHKKESQICLLTETGEVMERRIRTEPQRFAEALGGRPRARILVEASTESEWVARCLEALGHEVVVADPNFAPMYATRTRKVKTDRRDARALQEACLLGAYRPAHRLSDAQRHVRGRLAVRDALVRTRTGYIALTRALLRRHGWRVPTGSAATFSRRVMTLALPGRLLSEVAPLLAVMRTVNHQLAYSDGAIETVTRPDARVQRLRTVPSVGPVTAAAFVATIDDAGRFHRAHEVEAYLGLVPRELSSGESQRRGRITKAGNRRMRRLLVQAAVSILRLHDSRTVTLRHWATGIAARRGKKIAVVALARRLAGLLYAMLRDGTTYDPRVSTRRVDAAAVPV

SEQ ID NO: 396129 - protein, 317 aa, unidentified
MTPIICGVDVSSISLEAFVSPAGPGRSFANSAEGIAQLACFCQQHGVELVALEATGGYEKQAFALLWAQGVAVALLNPRAVRDFAKAMGWLEKTDRIDARMIARFAAVKGSVASTPASAEQQHLKALVTRLRQLTQLHVDQRNQRLLVTDATVRASISKLLKVVEAQKRSLATKIAAVLASDPLWKELEQAFRSIKGVADRTVAAVMADMPEIGLLSNKAVSKLSGLAPLARDSGKMHGRRLVRGGRRQLRAVLFVVAGVVSRHNPDFAAFHQRLSAAGKPKKVIRIALAHKLLVRLNAKARDVRIRFEAANACQTA

SEQ ID NO: 396130 - protein, 413 aa, unidentified
MNAVGIDVSKRKSTVTIRQPGDIVLMAPRDYSHTKSSIDELIATIKGLPGETKVCMECTGRYHEPMATWLTDGGLCVYTVNPKLVKDFGDESLHVPKTDKADSKKIARFALDRWSKLRQYSRMDEKRNQLKTMNRQFNFYTDLKTAMKNNLIALLDQTFPGVNGFFDSPARNDGHQKWVDFSDTYWHVDCVRGKSLSAFIEHYQRWCKRKGYNFNADKAETIYRAAADLIAVFPKDDVTRQLIQQAVSTLNAVSQTVESLRMKMNEIASQLPEYDIVMAMDGIGPTFGPQLIAEIGDPTRFTHREALTAFAGVDPGAKQSGDYDRKSNRTSKRGSPYLRKTLFCIMDGILKRAPLDNPVFAFMDKKRSQGKPYLVYMTAGANKFLRIYYGTVRDYLREKGLWPEPESKEINPD

SEQ ID NO: 396131 - protein, 346 aa, unidentified
MLHIGLDLSRKRVDVCLISDQGELVDQFPAPADRDGLYGLTRRVAVYDQPVRGVVESMNGARFVHDELVKHGWEVLIADAQRVKGLAPLACKTDKIDARVLAELSFRDLVPAIWLPPAGLRRERERSRYRLHLVKHRSTLKHRIHSTLICFGYQRSMSDLFGVAGRRLLKELDIPEPWRGHVDASLELIDDLDRRISEIEDELQRAGADHRYVPLLMTAPGFGWITSFTVACELGDITRFSSPVKLVGYTGLCPRVNQSGDVDLRGPVSKHGPRYLRWGLMEAAIHAATHPLYKERYQRLRRRHGRQRGPKVAQIDLSRQLAKAIWYMLTRNQPFAPAGATFRLAA

SEQ ID NO: 396132 - protein, 354 aa, unidentified
MDEDENRQLVIGVDTHKDLHVAVALDALGVRLGQLLIPATTAGYAQLEQWGRAHGTPTAFGVEGTGSYGAGLTRFLRQRDYRVIEVNRPDRAARHRQGKTDPLDAEAAARAVLAGVATAVPKAGDGTVELIRVLKVARDTAVRARSQALITLKTLLVTAPAELREELAGLADTALLHRCAGLRPGAVTTPQAAAKHALRALAHRWLDLHREVHLHDGELDRLTQEQAPELRAAFGVGPDTAAELLIVVGDNPRRVHSEAAFAALCGVAPLPASSGQTMRHRLNRGGHRHANAALYRVVIVRMRWHPATLAYTKRRLAEGKTKPEIIRCLKRYVAREAFRHLLHRSGVDASPPAA

SEQ ID NO: 396133 - protein, 331 aa, unidentified
MINKTAQFAGIDVGAEELVLVVRKNATSMKAQKFANTPADRARLVAKLAKLPGLRVCLEATGVYHLELAVALHDAGVELNVLNPKAAHNFAKALMKHSKTDAIDADTLAQYAERMPFTAWVRPTPQALTVRSFARRINALTRQKAMTKNQLHALSFGPDLPRAVLDDAKLAIAQLEKRLARLSSKAQAFIGMHEDLKRVFTLLLGIKGIAQTSAIALMGELLLLPKGLTHKQWVRYAGLDPRVFDSGKSVHKAPRLSKAGNRQIRQALYMPALSAKQHDPYVKAFFQHLIEKGKKPLQALCAVMRKLLHAIHGMLRDNRAFDNTRFYATAA

SEQ ID NO: 396134 - protein, 342 aa, unidentified
MQVTTIGLDIAKHVFQVHGIDWTEKVVVRRQLRRGQVKEFFEALAPCLVGIEACATSHYWARELTKLGHEVRLMPAKDVKAYVKRNKNDAADAEAICEAVRRPTMRFVQVKSAEQQSQLMLHRTRDLLMRQRTQVINALRAHMAELGMTAAQGNAGLRELLAIIAGAADERLPAEAHASLIVLAAELQAMRTLIASIEKRIIAHHRSDEASKRLRSIPGIGLVGATAIAATITDPKAFRSGRDMAAWIGLVPRQDSTGGKQKLGPISKQGDRYLRRILVVGAHAVLKLARQKPEKYPWLTQLLARKPFKVVAVALANKMARIAWALLVKGGPYRARALVAAA

SEQ ID NO: 396135 - protein, 402 aa, unidentified
MRFTGIDIGAERHMVAIVDESGAVLLRATSVTEDAPGYRRLLELLGDAGDCLVAMEATGHYWRNLYAALATAGFTVALLNPLRTSRFAEEELQRTKTDAIDALGIARFAAQKRPTATRLPEAALEELRELVRLKEQIVQQFGDRVRQLHRAVDLGFPEFTRHVRTLQSELATAILSRYPTAAALRTASVSKLARLCYDGSHHVSEALARALIEGAKQSVGAHHGEPYQLEVRYACEDIDLLRRRLRALEGDIERRLGQHEVGKLLTTINGVGPQTAACIIAEVGDPLRFHSARALASYVGVIPRLHQSGKRKFSASAKVPLGNARLRRALWMPALTAIHHNPWLRAYYQRLRAAGKRPKVALVAVIRKLLAAVYSVAKHRRPFVLPPIFTPAAGGAVVPATQ

SEQ ID NO: 396136 - protein, 428 aa, unidentified
MNEVERVRLEGFRQLNKEIRGSQEHLIVGIDVAKEKHNAFFGTATGKTLLKRLVFGNDIKGFQRLLTYVEAVKIQHGLEKQVFGLEPTANYHKPLGEYLIKCGLDVVLVSGVSVKRNRELLDGRWDKHDTKDSANVADLISQGKCLFYEYPPMALRDLRNLLSLKRRLKKQEHGLKVRIRNHLLARYFPELDRYYGRSGSEGLAIVRWCLNPSVIAGLEYEQFVGLVAPGSRRIVQHKRLKAIWLKAVDSIGCDVGEAVEFEAKVMVEGLKEIRQAISATNDKIEDICLQFAEYSYLLTIPGFGPDVSSKVLGAIGNPFRFNTQKQVLKMAGMDLNAQRSGNRSDAAIPVISKKGKADLRYALYQAALVASTKDLNFIVYYTNTLRGREREKGIKIKMRVKLAAKLLVIAWTLMKKKEPFDPDYLNIE

SEQ ID NO: 396137 - protein, 341 aa, unidentified
MTDASPILFVGIDIAAKTLAAAWLRPAEAVSRPITLAQSPQGFATLHERLGQTGCTPTETHVVMEATGSYWIALATTLAHTGYRVSVINPAQAHHFAKALLKRAKTDAIDAQTLAHLAALLHPALWTPPPAVYYEVQQRLAQRDALLDVQRQLMNQLHALLFAPFVIASVKERMEELIETLGQQIRALDAEVSAALAADATWAASAARLQSIKGVGLITAAWLLVTTLNFTICSTPEAAVAYAGLAPNPYESGTSVRGRPRIGHTGNGRLRTALYLATLSAAQHNPVIKAFYERLRAAGKPAKVARCAAARKLLHIAWAVVCREQDFDPEYAQRHVQPVAA

SEQ ID NO: 396138 - protein, 421 aa, unidentified
MQVTCGIDWAEDHHDIALVAADGTVVAQRRIGNDAAGFAELLAVLAEHDTPSGEHGDQAEGEGGGALVPVAIETSRGLLVACLQATGRDVYAINPLAAARYRERYRVSGAKSDALDAIVLANSLRTDRHAHRALPRDSEQARAVAVLARAQQHAVWDRVQVHNQLRQLLADFYPAALAAFAGTGRATLDSPAARTILAAAPTPQHARALTVERLGALLVQAGRQRGINREARRLHAILTAPQPCQPPLIEQAMGHHLLAVLRHLDVVCGNVADLTQAAEAAFAAHPDAKIITSFPGVGLLTGARLLAELGDDRARFADAKGLKAYAGTAPITRASGRRALVSARRARNDWLVAAGYMWTVTAIRCSPGARTHYDRRRAAGDSHSAAQRNLLNRLLGKLHHCLQTSMAYDEARAFATSLPTA

SEQ ID NO: 396139 - protein, 384 aa, unidentified
MNPDHTDTPAATEYATVFVAFELSKAKWKLGVIVPGSAKMSRHTIDGGDLVALSKLLGVARTKAGRAGRPVRILSCYEAGLDGHWLHRWLTDQGVINHVIDASSIEVNRRARRAKTDQIDLDLLMRAFLAHLRGEPRACSVVRVPSVEDEDRKRRTREREHLVKERTRHINRIKGLLHGQGIRDAMPLMPGFLSTLDQVRTGDGRPLSPRLKEEIRREHERLVLLCKQIKTIEAEQLAAHRAPAPRSVEAKVVQLAELKSIGPVIAQVLVGEVFYRRFDNRRQVGSYLGLTGTPYDSGNSRREQGISKAGNSRARTVSIELAWLWLRHQPDSELSRWFRERVGNIKGRIRRIAIVALARKLIVALWRYLETGLVPTGAVMRQSF

SEQ ID NO: 396140 - protein, 385 aa, unidentified
MTQFARPTPAAPDYDSTIIGAVELSEKKWVLAVQLPGVKRHTRHVLGASGEELASLIERLKARCAAAVHPVGRVILTHEAGRGGFWLARFLVRRGVEVHVMQPSSLPVDRRARRAKTDVIDVEMLLRTLMAWLRGEPRVCSMVPIPNEADEEARRAHREREDLTGERRSIVNKIDGVLATLGVKGFRALRRDRRKQLTSLRQPDGDPLPQMARARIERLLDRLELVLKLIEEVEATRDAVLKKAAPADEAERMIRSLADLRSIGPDSATLLVREAFVREFRNRRALGGYVGLGGTPFSSGGSEREQGIGKDGNRRLRAAMVELAWMWLRWQPDGALSNWFRARVGQTGGRIKKIMIVALARKLLVALWRYVKDGVIPEGAKMKTA

SEQ ID NO: 396141 - protein, 418 aa, unidentified
MKEELIARLSRRYLALDIHKHYSIVAGVDFEGEVILEPVRVEHTDLSDWLERHIQSTDYVVIESTTNAWYVYDLLEPLAEKTLVANPIKVKQIAQARVKTDIRDTLILARMLAANMIPAIWVPPLEVRNLRYLLSQRRRLMGMHTQVVNRMHSVAHRHHLSHPKGKRFNEKNTAWQQDDELSDEEKFQLDLDRATEKHLSEQAGKITKKLARMSHEKPWAESMMYLMQLPGFGIITAMTVLAAIGDIHRFEDFKKLSSYSGLTPGVEQSGVKNRGKKITKEGRKDLRWAMVEVAQRAVKSDPHWGRRFQELCRRMHRNQAIVVIAHRLLELVWLVLTRRQPYRNFSHERIAYKYLTWSWQLSEEDRDGLTRQQFARYYLMRLGIGHDLERVALNPKHPRRLASEAELLALKPELARIE

SEQ ID NO: 396142 - protein, 371 aa, unidentified
MCGIRCPCRNHCGLCPSWEEDHIQKEIETFPTFTKDLFRLLKWLEDRGVTHIAMESTGVYWKPVFNILEDYFDITLANAQRIKNVPGRKTDVSDAEWIAKLLRYGLIEKSFVPPADIRELRDLTRLRKKWIGQLTAEKNRIQKVLECSNIKLSSVISDIFGVSGRKLLERLMKQGYIEEPEIDACIHGRMKGKRQQIQDSLFGTLTEHQLFMIRQSWKHIESLESLLREIEERIDQLLQAYKQEMELLVTIPGVKKETAAVIIAEIGVDMGQFPTSHHLASWAGVAPGNHESAGKRKSTRTTKGNPHIKSALCEAAWALSRCRNQRLAAKYWSLAARRGKKKALVAMAHRMLTIIYCMLSRKEPFREQPTY

SEQ ID NO: 396143 - protein, 347 aa, unidentified
MKYIGIDLHKQYFVATVMDERGRAKSKERVSTDRAAIRDYFKRVNSDGDTKVAIEACANWGYFYDVIKDMVLEVKVAHPLKTRAIAEAKIKTDSIDSEVLAHLLRADLIAEAYTPDFQTRDKKNILRYRTSLMKIRTMLKNMVHAILTRNHIEEPEFRKLTDKFGKKGKAYLRCFKLKGNDTEILNHYLDLIDGIDNKIKDVERKIREIFREDEICSLIGSIPGIGEILAFLIRHEIDDIERFISASKLCSYAGLVPSTYSTGGKTYQGKITKQGNRRLRWALVEAAQKSITKDLWLRSIYRRIEKRSGKKRARVAAARRLLEIVYRVWKERRPYYEKPVAAALLSA

SEQ ID NO: 396144 - protein, 375 aa, unidentified
MKEKVRFLGLDVHAETIAVAIAEPDGEVRSLGVIANRAESVRKLIKKLGSAEQLRACYEAGPTGYVLYWQLTELGVECAVVAPTLVPVKAGDRVKTDRRDALKLARCHRAGDLTAVWVPDAGAEALRDLVRAREAAKQDQLRSRHRLAKFLLRTGRRPPFAGKAWSQTYMAWVRQLRYEQAAQEWTRLDLLHEVEHMAERVKRLEEAIREAVKLAPVGMQEVIRGLQALRGVAEISAVTVVAELGRVSRFENARQLMGYSGAVPSEKSSGKRQQHGSITKTGNAHLRRIAIESAWSYRLKPAVGPELRKRQEGVPEEIKEIAWKAQLRLHKRYARLAAAGKDQRKIVTAVGRELLGFIWAIGRQAEVAVPQQRAA

SEQ ID NO: 396145 - protein, 458 aa, unidentified
MYRELKPLRQALSTELKATMPPAVPGVEPEHLLHSYLDRLTMYVGCDVADKTLTLIALDADGEELKHLCDVPNTPDGFARIWKWMDGLRCQHHLRITLLAMETSGIYYWAWWDFLADRPNLARVLYNPRTTEHMTEVLSKRVRTDLVDAYALAEQVRLGSTPEVVPSEDSDLLTARFCSRAARDLAQRINDHKNQLRSFVRAYNPAVTQAFPGAKFHHPAVYALLQHYLFADEFVAAGVDAITTVLEDNCRSAFGRDHAQRLVDLCRHTLTRPIGRHVIHQRVRYLTKDILAAQKQKNYFLKTGYGLIKGRQEAKLLRTSTGAGVSNTLALVSEVGDIHRYPSGAHVASFLGLTTSKHISGTTLFQSKRITKQGSPNGRYAAVNMALHLSQRVPKYQAMYKRIKSRKPPRKGHFVALVAIARDFVTNVLYDMWRYQRPFFLEVDDYRAYRKTHPRSDD

SEQ ID NO: 396146 - protein, 341 aa, unidentified
MTVLGGLDLHRAQLTFDYVDSVTGEVHTGRIAPANRVVLRKWLERFDQLGDVEFVLEGCTGWRYVVEEMVAAGVTAHVAEPAETAALRGRKSKAKTDKADARHLRQLLLDGRVPESWIPPTYVLEARALVRLYKDLVDERTGWLQRVHATLLHHGVPAVGGSLVTKAGRQLVAVADLPAAGRYAVDTGMRQVERLTDEMLPLRQQIIAIGSRQPGCKALQGYYGIGPLLSVAIWEELGDCRRFGSSDDAVRHTGLDVTVWSSDNKRTRGHLAKQGPPVLRWALYEAAVYAARPSSPDHAEYRRLRHRLEPHLVLITIARKLARRCYHTLRNVGGDAFPAAA

SEQ ID NO: 396147 - protein, 347 aa, unidentified
MSITMIGLDTAKSVFQVHAVNATGKTEIKRKLSRNDLLAFFKNQELCTVILEACGAAHHWARVLTGLGHEVKLIAPEAVKPFVKKGKKNDAADAAALCAAASRPDMKFVPAKSLEQQGILALHSARSLLVKQQTMLANAMRSLATEFGLTVPKGLGRLEELAVLVDADEAFPAKARQAFTGLFDQCKALTESIMTFEAEIVAHARHDETARRLATIPGIGPITASLMAATVGDISMFKSARHFAAWLGLVPRQHSTGGKARLGRITKTGNREIRKLLVLGATSMVYRAPQWNSAAGLWLRGILERRPARLATVALANKMARIAWALMTRKEVYQAKGRVAAVADAVA

SEQ ID NO: 396148 - protein, 378 aa, unidentified
MHKDSVYLCILRENGEKIERVYGVLTPQLDSMRDFMAENEVSEVAMESTSVYWIPIWRVLVDSFELKLVNPYFIKQLPGRKSDVKDAQWIAECVMKELIRGSFIPPPLIQQLRLYDRRIFELNAELVRKYSKIDAILQRCNIRLSNYVSNTDCKSYKNVVKRISEGVTSPQELLMLVHKRIINKHGEDTILAALTGVVSEAEIDMLAQYVAESALLEDNKNKCIEKMREICNREFEEQMKNLQTIPGVSERSALTVLAEIGPDVNAFPSAKHLVSWCGFNPRNDESNKKIKSNKITHGNRFIRIASVQCAWAASRTKDCYFSKFYAFHTQVRKKFKLKVVVAVARKILVCIWHILKFNVSYKDFEPQKSVDKDCTQLA

SEQ ID NO: 396149 - protein, 367 aa, unidentified
MKKVSTTAAKQIRNFSQQKLTIGLDLGDRSSWYCVLNEAGEVLLEQRLATTPKAMQEVFGGMPRCRIALETGMHSPWVSRVLSELGHEVIVAHARNVRLIGESRKKDDRLDARTLARLARIDPQLLSPVKHRSAKAQAHLTVIRARAGLVRSRTALINTARGVTKSYGERLRGCNPRNMNPEKAEGLSPELQAALAPLLAAIEALSERIHEYNQQIEKIARESYPRVARLEQVKGVGTLIALTYMLTLEDPHRFRKSRDVGCYVGLQPGRRNSGQSEPQLHISKEGDPYLRTLLVQGAHHILGPFGADSDLRRWGLKLAERGGKNGKKRAVIATARKLAVLLHRLWVSGKAYEPLWNSSPVRMTVAA

SEQ ID NO: 396150 - protein, 394 aa, unidentified
MTATYTHSIPAGTLVLHVAFELGANQWKLGFSTGLGVAVRLRTIGAGNLAVLRREIELAKKKFWLTDDVPVCSCYEAGRDGFWLHRWLVEQGIGNIIVDAASIEVNRRYRRRKTDSLDAAKLVAMLIRHHAGEKLWSVVRVPSRKDEERRHLHRDLEEMKAETTQHRNRIRGLLAGVGARVAEINSNFLEMLPTLQTADGREIPGELRARLLREFERLQFVEQQIRSLERQRNQKLRDGDDQEYVVKARKLMGLRAIGPHSAWVFVLELFGWRRVNNRRQLASLVGLTPTPYDSGEDEREQGISKAGNRRLRTLLVEIGWCWLQYQKSSALSQWYQKRFAGGSKRQKKIGIVALARKLLIALWKYLQHDEVPEGAVLGNWRSKLIGLGAQSLPN

SEQ ID NO: 396151 - protein, 396 aa, unidentified
MVWEDGRLRHAGRVDMTRTALEGFGKSLKATDEIVVEATGNTMALVRVLSPFVARVVIANPLQVKAIAHAHVKTDKIDAGVLASLHAAGFLPEVWTPPAETERMRRLVARRNQVVRHRTRIKNEVHAILHAHLIPCCPHADMFSQIGRAWLKRQPFPDDEMMAIERHLRELDRLGEDLELLDREVAKNALDNPAVKRLLTITGVNVTVAAGLLAAIGDIRRFPSPQKLVSYVGLNPRVRQSGLGFAQHGRISKIGRSHARAMLVEAAWAAAKAPGPLHAFFVRIRARKGHQVAAVAVARKLAVLCWHLLTKDVDYLWARPALVAKKVRGMEIKSGQPVKKGNKPGRAHDYYVKTLRDREKTIAENAERAYEHFVRQWQPRRPENAVRGHLKTARRE

SEQ ID NO: 396152 - protein, 353 aa, unidentified
MPVYVAVDFHAREQTISWCDTADGEVHRTKLRHQHDDVRQFYEQFSGEVIVAFEASGYSAWFEQMLAELGHTVWLGNAAEIRRKAPRKQKNDRRDADLMLELMLKSDFPRVHTFSAESRTVLRQLRYRHKLVKVRTIAKNSVHAIGLNAGLPLRGRLLTQTGLEQLQALPLSPVLSQQRDEWLALIRLMNKQIGAVEESLAQRAKDDEAVELLRTHPGIGLLTALALRYTLDPIARFTSTRCVVGYAGLDCVEEQSSERRRMGSISKQGSRLLRFLLNEAGQTAARKDPQLKQFYRRLLRRRDKPKAKVAVARKLLVRSFIMLRDQIDYAEFVRRGVAARVARETHSPKVTDL

SEQ ID NO: 396153 - protein, 326 aa, unidentified
MAVIGIDISKQKFDCLWLRDVRSLKVKTKVFANRPTGFAELIDWCCAQTGETVEQLQVFLEATGVYHEPLALYLHDRGVQVFVLNPARVREYARSLGIQGKTDKQDSLVLARYGATQPVRLWTPERREVRELKALIARHEALQEDLQREHNRREKAEVSGSPAVLASIDNLIQALQQEAERVRQDIDDHIDRHDDLKRDRALLQSIDGIGEVLSRHLLSLLHSRDFSSARQCTAFVGLVPRPWQSGKTMDAPTRLSKAGPPRIRAKLYMGAVVAKGCNPDVNALYERLLARGKPRMSALGAAMRKLLQIAYGVLKTQRPYQPRQAL

SEQ ID NO: 396154 - protein, 355 aa, unidentified
MSQEKYIGMDVHQATISVAVMDAGGKLIMECLLETKASTIVEFIQGLQGTLSLTFEEGTSAAWLHDLLKPHVSRLVVCDPRKAALLKEGNKSDRIDARKLAELLRTNQLKPVYHEEHGIRALRELGRSYLTITKDVTRVMNRIKALYRSWGIPCSGTNVYAPRHRAKWLAKIVEPGVRVRGEHLYQQLDSLQPLRLQARRELLRESYQHPAVKLLRQIPSIGPIRAALLVALLQTPHRFRTKRQLWAYSGFAVETHDSGEYRYVRGKLQRNRERITVRGLNDNHNKDVKNLFKSAAISASTRPGPLHDFYVARVEKGMRPTMARLTLARKIATITLTIWKKGVSFDPQNLHRQAA

SEQ ID NO: 396155 - protein, 317 aa, unidentified
MNTKNNQNEINVGVDTGKTQLDIYIRPLDIYFTVENNQSGIKHAIQILKKHPVTRVTIEATGRLEQPFIIACAEANIPFVVANPVNIKRFAGAIGQKAKTDKLDAQLIAHFGEAIKPPLSSLKPEQMRLMSDLLSRRRQLMDMQTMEKNRSQIMPKTLSSLIKPILTALKNQIDKVDLKLQKLIEECDEYKAKNAIIQSVPGVGNVVAFNLLSDMPELGYVNNKEAASLVGVAPFNRESGVYQGKRMIRGGRPKIRTAMYMAMMSAIQCNSKFKDLYQRMVKAGKPKKVAIIACIRKLVVIINSMVRDGVMWDSKMV

SEQ ID NO: 396156 - protein, 356 aa, unidentified
MNNISKLDFTGQHLYIGMDVHKKSWSICILTDHFEHKTFTQPPDVGVLVNYLQRNFPGASYRAVYEAGFSGFWTHDRLREQGVDCIIANPADVPTKDKERAGKTDRVDCRKLARSLRNGELEGIYVPSRTAVEDRSLLRTRRNMVKKQTRCKNQIKSLLAFYGVHIPEELAQSRWSKKFINWIDEIRMEKASGNYSLKAYLDELSQIRRILADLNRHILALSRTEDYRTNVLLLRTVPGISTLTAMILLTELNSINRFPSLDKLSSYVGLIPNTNSSGEKDIVTGITNRRNPALRGILIESAWVAVRKDPALMMAFDRLCTHMTKTKAIVHITRKLLNRIRCVLKNRKEYVPAVVQ

SEQ ID NO: 396157 - protein, 362 aa, unidentified
MAQVRSWAGLDVHASKVLAATMDSESGELVVRRLPGTTRELVEFLVGLPGPTRVAYEAGPTGFGLARALQSAGVGCVIAAPGKIERPATDRVKTDRRDAERLLRLLMIGGLHAVRVPSIEEEALRDLVRAREDVRGDLMRARHRLSKLLLRHDVRFDGPGNAWTAHHRRWLGGVDLGPRGAQVTLLDYLGAIDALIMRRDTLEATIGELVPGSPWATTVARLRCLRGIDTLSAVGLCAEVGTFARFQRAGHLMSFLGLVPSEHSSGQTRRQGAITKSGSGHGRRLLVEAAWHYRRAPAKGQALKRRQAGQPPQLLAISWQAQQRLHHTWQRLDHQRGKRRTVVAVAVARELAGFCWAIASTD

SEQ ID NO: 396158 - protein, 342 aa, unidentified
MNEYDGRQFVGIDLHRRRSVIVRQSESGEQLSAVRIINDPVALGLEIERAGPNPEVVLEATYGWYWAVDTLQAAGARVHLAHPLGVKGFRYRRVKNDVRDAADLADLLRMNRLPEAWIAPPATRELRELVRYRAKIVAVRSGLKAQVHAVLAKAGVVIPVSDLFGVGGRQRLAKVPLGAAYVQRVISLLELIDALDAHETRFSIMVADKLGGHAGYQAIQQLPGVGPILGAVFVAEIGDEHRFADPAHLCSWAGLTPRHHESDTVVRRGHITKQGSKLVRWAAVEAIQRHPATSKIALDRTRIQSRRGKNIAKIAAARKLLTLVYYGLRDGHIRALAPRRAA

SEQ ID NO: 396159 - protein, 433 aa, unidentified
MLKLNYMSTLFVGIDVSSKTNAVYAMDFEENKYISSSFGNNQPGADKLVNMIAECMHKHKNLNTILIVLESTSVYSVHISNFLSTSEVLMPYKPYVFCVNPKATSNYRKSYIGMEKTDSTDAYLIADFGRVGRTKKLEPWRGGQFIALKRLTRHRMHLSECITREKTYMVSNLYLKFSELQLLEGDDKPFGSLYGATSSAVLTEFLSPQEIIDMPEEELLTFLAGKSRNRISDLSKTSELLRKAARDSYRLDKCMYEPLNISLASSFNCIHAYQKEIKLIEQAIEKCINGMNPNALLILQSIPGIGPIWASGILSEIGDITVFHSSDALAKYAGLYWPKGDSGDFTSEDNKMSKAGNPYLRCYLGEAANSVRKHIPEYADFYARKYAEVTKHQHKRALALTSRKLVRLVFGLLVKNQLYTGEKLDTEYNIESN

SEQ ID NO: 396160 - protein, 358 aa, unidentified
MSDGSKGRPKITAGVDLGDKYSYLCLIDTQSGEVVEEGRLRTTPEAFGRRFASERPMRIAIEAGTHSPWVSRVLEECAHEVLVANSRKTRLIYSNKRKTDEVDAENLARLARVDPKLLYPLKHRNEDSQAHMALIRSREALVSCRTQLVNHVRGAVKSFGARLPKCPARSFHKKAPEHIPEALRPALGPILEQIGSLTESIRQYDRKVETACEELYPETELLRQVEGIGPLTALTFVLTLEDPYRFQKSRSVGAYLGLVPARDQSGDRDPQRGISKEGDELLRKLLVSCAHYILGPFGSDSDLRRHGQKIASRGAKNAKKRAVVAVARKLAVVLHSLWVSGEIYEPLRNTHRSRDQAA

SEQ ID NO: 396161 - protein, 400 aa, unidentified
MECVFGIDVSKENANVAVLVDNVVIKQFKIGLDRLGFSLLSDELNSFNAPLIIYEATAMYSRRLRAFLQRDGWKYTELNPLAAKKVMEEFRHTKTDALDAVGLARAMIKNHFRPTYQESPVYTELHDLERTYQQFNKDIVTNKNRLHRALQLTFPEIEHFMSSTDGVLYWHIVQRFPHPAIVLSHEENELTEIILTETSKKIGLKRAMKLANHLLALAQNSAPAKEPQSHAVRAVIALAKEVERINQLKAQIIVEMTTLGENLSEVPLLVSIPGIGIKTALCLIAELGDVRRFHSANAINAYIGIDLIRYESGQYEAKMHIRKRGNPYARKILYRAILNIISVSQYQPTLISANYKRKKQSAQSHGTKKIAIAAMSQFNRLMQHLILNNELYDSTTFMPE

SEQ ID NO: 396162 - protein, 403 aa, unidentified
MNSVGIDISKGRSTIAVMRPFGEVVISTFEVCHTDSELSALARRLKSLNGETRVVMEATGNYHAPVAKLLHDAGLYVSVVNAKLVHGYGNNDLRRVKTDRKDAVKLANYGLDRWLTLPRYVPEEDTRLLLKNCYRQYRQYSKVQTVLKNNLISLLDTVFPNANRLFSSPIRGDGSEKWVDFVAEFWHCRCVSEKSEKAFTNKYQRWCKKHGYNFSEAKAHAIYEEASRHIGVMPKSETTRLLVEQAVSQLRATSAALAALKQEMQSLASTLPEYPVVMDMFGVGPSLGPQLIAEIGDVRRFYSKKALVAFAGIDAPPNDSGDVTGRHKSMSKVGASSLRRTRFLVMSVYLQRAPLDEPGYQFMDKNRAEGKPYRVYMMASANKFLRIYYATVKAYLESLQHTA

SEQ ID NO: 396163 - protein, 372 aa, unidentified
MGHHTEAFVGIDTSKSSDAIAIADGGRGGEVRYLGDFPATEAAIRKLVAKLAAKYRDLMFCYEAGPTGYGLYRLLKGLGHECLVVAPSLVPKKAGDRVKTNRRDAVSLAKLLRAGELTAVWVPDERHEAMRDLSRARQAVKKDLQGKRQQISSLMLRLGRIYPGKTTWGPAHMKWLMAQKLEHREQRITFEELLDGIRQESERVERLEKAIREAVPEWSLAEVVAALQAMRGIDLIAAVGVLAEIGDLSRFQNPRELMGYLGLVPSESSTGDKVKRGGITKAGNGRARRILVEAAWSYRYPPRVSREKQPKVEAAPRRVREIAWKAQTRLCGRFRSLERKGKRRTVIATAVARELSAFIWAINCELMAHRQA

SEQ ID NO: 396164 - protein, 350 aa, unidentified
MVVIGVDAHKRTHTMVAVDELGRTLGERTVAATSDGHLQAVQWAARWPGARFALEDCRHLTRRLEGDLLRAGFAVVRVHTRLMAAARRGGRQRGKSDPIDALAVAHAALREPDLPVACLDGPARTVKLLSDHRQDLVAERTRLCNRLRWHLHELDPGLDVPSRGLRRYHVLDGLAARLAVMDGVVARIAAGLVARCRELTSQVNALERELGTLVRQLAPALLAIPGCGVLSAAVIIGETATASRFRSRDAYARFTGTAPIPVWSGNTVRVRLNRGGNRAVNCALHMIAVTQARGVGPGKAYVENLRARGKTRTAALRLLRRRLSDAVFTALRIDEKRSAVNTTEVVIAAA

SEQ ID NO: 396165 - protein, 371 aa, unidentified
MNSILYIGMDVHKENYTLCCYSFDKDELQYKQTIVPDYKMILKYLEQIRKRYPDEVEFVCGYEAGCLGYTLYHQLTDHGVKCVILAPSTMAITNNNRVKTDKRDAGNIARCLAFHTYSEVHVPTAEDEAVKEFIRMRDDQKKALKIIKQQILALMLRQCYRFEEGKNYWTVKHVTWLKSLDLGGVLQESLAEYLITYDYFTDKIERLDKRIEELADGERYQEKVKKLSCLIGVKAHTALSAVVEIGDFNRFARAENLAAFLGLVPGENSSGEKQSRGSITKAGNSHVRSLLVESAQSYTRGAIGHKSKELKRRQDGNTPEIIAYADKANERLRRKFYRMTLKNGAKRNVAATAIARELACFMWGLMTGNIA

SEQ ID NO: 396166 - protein, 346 aa, unidentified
MEQIIRIGMDTSKHFFQLHGVNAAEQPVLRRKLRRKEVVAFFAKLAPTVVGLEACGAAHHWARVLRELGHEARLMAPQHVKPYVKRGKNDAADAAAICEAMSRPTMRFVPVKTAEQQAALMLMGLRERLIARRTQLCNAIRGYAAEFGVTAAKGTDKIEALLARIAADESLPALARELFAIQGRDYAELEVELEEIEAKLAAWHRHDACSRRLAQIPGLGPIGATLLVMKTPDPRAFPSGRHFAAWLGLTPQDHSTGGRTRLGVITRAGDEALRSLLVVGATAVIQQVRRGRGRPSPWLVALLRRKPPKLAAVALANKTARIAWKLMATGETYAAGRTAAALAQAA

SEQ ID NO: 396167 - protein, 346 aa, unidentified
MSYSTTVGVDLAKNVIQISVVSSRGKELSNRSLTRKKFAEFLGKQKRSLVAFESCASAHYWARAAQRHGHEARIIPAKAVAPFRQGHKTDSNDALAVAEAARRPNIKEAPMKTVEQQGLQAIHRSRELLIQECTALSNHLRGLLMEFGIVIPKGFASLLKAVPEILEDGDNELPDLYRPTLHRMYSRLLELREDIEAMTKEVDRLAKAHPICSKLMALEGVGPIGALLLYATMGSGAAFSGSREFAAYLGLAPKQYSSGGKTNIVGLSKKIGNSRLRSVLILGARAYTYRLEEPKSSKDKWLKANIERNGECRAAIALANKNVRTAWAMVTQGTEYQRRVQLEMAA

SEQ ID NO: 396168 - protein, 355 aa, unidentified
MDSVRYIGLDVHRDTVSAAVLDKEGKLMMQSVLATRAATILDFLGGIQGTLHVTFEEGTHSAWLYDLLIRRVARLVVCNPRKNALLKSGNKGDLIDARKLAELLRNNSLSAVYHGENSALEMQYRTRSYATLTEDTTRVMSRLKALFRSRAIHCPGKKVFRTENRESYLTQLGSEGLRLRAECLYLELDALHPLRLRAKREMVAECRKHPATKWLQSVPFLGKVRTAVLIGRVQTPHRFRTKRQFWAYCGLALETRDSAEYRLVHGQVQRKSKPVLIRGLNWNHNHDLKNLFKSTATMASVREGIFREFYLGLLEKGMQPEMARLTLARKIAAITLKIWKEGETFNAEHVKPQAA

SEQ ID NO: 396169 - protein, 375 aa, unidentified
MTTIARLGIDTSKSLFQLHGVDEREGAVLRKQVRRGQFLAFVAKLAPTEIGLEACGASHHWARQLQALGHEVRLLPPQHVKPYVGLNKNDKIDAAAICEAMSRPKIRERFVAVKSAEQSAAQMLLGTRDSLLQRRTQLSNTIRGHAAEFGLVTPKGLAHIRPLLERIAADETVPALAKELFATLGEEFAELAPRIAQLDKKLKAFQRSDELCRRLVEIPTIGPVIASSMVIKIGNPAAFPSGRRCAAWLGLTPKDHSTAGKMRHGGITRAGDEALRAALVSGATAYIQQVKRGRTKPSPWLADLLKRKPEKLAAVALANKTARIAWKLMTSGERYDRGRAEAREGLGATQRGGSAPSPSLHHRIAAHGTTAMTTA

SEQ ID NO: 396170 - protein, 408 aa, unidentified
MNPSKSDRQHPSLFVGIDVSKLKHDIVILAEDKKPVAKLLVIKDDRAGYQQLLSLLQTLADQFQTKEFYIGLEATADYWKNVYFFLKKQADTARLTVINPVQTRAFAKTELRRAKTDPVNARDIALFMAEKRPRPSVDRPRVFDNLKDIDKRIYQINKQKTMLTNKLRLELTKVAPEIEKATRRIQGCQVLALLANYPTAEAIDNASITELAQIKYGRRLWSLPLPFIEQTKSLAQNSIAYKSGPGAGVVVRSVVHSILAAQKEIESLQQQSLELYKTARPEDSLLATIPGIRLHTAITLEAYIGDVHRFTRAKQFIAYFGMNPTVNQSGKSKRASYLQKKGNPIVRHKLFMAVLCMISCQKEPIYSYYNRMVAAGKPKLVAICAAMRKLLNIIFSMLKNQQPFNDQL

SEQ ID NO: 396171 - protein, 318 aa, unidentified
MNSNHKKEWTEPVRYVGLDVSKARLDYAMEAGKPLAVPNTGAGLKTLIGQLQQLPGVRVVCEASGGYEEPLLRALAEAKVPACRVPPGRVRHFARAEGTLAKTDRIDVQLLCRYAQAMHPRETKPLRLECGQLRELLEYRRQLSEQLTLTRNRLEHAGATLRGLLTAQQEHLSGQLDQADHAIAAHLKSHEELQRKAARLQQLQGVGPVLAASLLAYLPELGEENDKRIAALVGVAPHPDDSGLSSRPRHTQGGRAELRTVLYMAAVTAAHHNPVLSGFYQRLRTAGKPPKVCLVAVMRKMIVVLNRMLHDPHFTLVS

SEQ ID NO: 396172 - protein, 344 aa, unidentified
MNQIIRIGMDTSKHIFQLHGVDATEQVVLRRKLRRNQVLEFFAKLPPTVIGIEACGAAHYWARELRKLGHEVKLMAPQHVKAYVKRNKNDGRDAEGLCEAMSRPTMQFVPVKTEEQQAVLMLAGVRQQLIARRTQLGNAIRGYAAEFGLTAAKGLDKIEPLLAQIAQDETLPEMARELLALQGRDYARLQIELKAIEAKLMAWHRANPDSRRLAQIPGVGPIGATALVMKAPDPRLFPSGRHFAAWIGLTPKDHSTAGKTRLGKITRAGDEMLRSVLVAGATAVIKQAKHGRGSPWLLALLKRKSPKLAAVALANKIARIAWKLMVTGESYDGARMLGASAFAA

SEQ ID NO: 396173 - protein, 394 aa, unidentified
MILVGIDIGKNQHTFSIVDMNTGEILSNPSLFNNNQEGFLFLIKKLNMYSKSDLLIGMEDTGHYHFALLKYLLDIRYTVALINPTTTDLTRKLQGGITKNDPLDSLTICDVIGSNQRKKPYRVTKVNRFDLYEQKQLTRHHHNLKEELNTYKNRLQKCIDIVFPEFNSLFRSKYGIVYMNVLKIFASAQKIANSDIRNIRKCFEYDGRGKRITLSADQLKAAAKTSIGIPSVAEEIQIRHLVCQIEMIEEQLSEIDKKIEEFSLQNNSPILSIPGISHFSGTSILAELGNICNYTKASQIIKFAGVAPYHYESSQFTAQHTAITKKGSRYLRKTLYQIILPVINHNTVFTAYYNKKLAEGKGHRCAQGHCIRKLLRIIYHLLSTEQTFDPALLI

SEQ ID NO: 396174 - protein, 368 aa, unidentified
MNSIKFIGMDVHKKSITIAIADLGSRGPARSYGTINNDLSALDKFCRKMVSTASQLHFVYEAGPCGYGIYRHLSEKGFECMVAAPSLIPKKSGDRIKNDRRDAKMLARLHRAGDLTTVYVPDCQDEAMRDLSRAREDAVIATRKAKQRLKAFLLRNGIAYSGKSRWSNAYFNWLSDIAMAHPAQQVALQEYIDTVHESVERVKRLTDQILQLVPDWRLGPVATALQAARGASLIVAVTFLSEIGDLSRFENPPQLMAYLGLVPSEHSSGDRIKRGGITKTGNGHARKVLVQAAWAYRMKPRISRILLKRQQQVSKEVCQISWKAQLRLCTRFRRLAAMGKPKQVVVTAIARELSAFLWAIAKQMQPVV

SEQ ID NO: 396175 - protein, 357 aa, unidentified
MKTTAKISFAKVHFFIGLDTHLKNWKVTIRLDGMELKTFSMNPSPLELIAYLQKHYPDGIYHIVYEAGFCGFWALRIFRQHNVDCIIVNPADVPTTNKEKVNKSDPIDSRKLSREHENKSLHGIYVPDIFHEELRMLMRLRYRIIQSQTRTKNRIKGLLYCQGIVIPPQFSGKARWSGAFIGWLQTINLNTDAGNFTLQNLILQLKEIRTHNKNILKQLRKEAKKETIAPIMKALQGVPGVAFITAMYLYTEIMDMKRFSDEEHLVSYVGIVPSTQTSDDNVYSNGISFRQNSFLRSMMIEAAWTAVREDPAMTLKYRELTKRMNSQNAIIRIAKKLLKRIRHVWMQQDQYVYALAA

SEQ ID NO: 396176 - protein, 340 aa, unidentified
MSLYGGIDLHANNSVVVLLNEQDQVMYQQRLSNHLPTILEQLAPYQAEIKGVVVESTYNGYWLVDGLMDADYRVHLANPVAMKQYSGLKYTNDHSDARWLAHMLRLGVLPEGYIYPKAKRAVRDLLRKRSHLVNQQTSNVLSVQNILVRNSGKRFTVKQIYNLNKKDLEGLLPDSHQVLAVMSSLKLLECLRQQINTLEESVRKHLKHTPAYEQLLSVNGIGEILAQTIVLETGPLGRFPGVGNYASYCRCVRSTKLSNGKRKGQGNVKNGHPYLEWAYMEAAQFAIRFSPKIERFYQRKLSKNHVMVARKSVAHTLARACFYIMRDLVPFDVERAFGCG

SEQ ID NO: 396177 - protein, 409 aa, unidentified
MSYFVGLDWAQDEHAVWILDDRGGTVGKFTVAHTAAGLTELAARLAKIAPTSDMRLAIERPTGLLVDTLVEQGFTVVPIHPNAVKASRPRYSAAQGKTDLGDAYMLADVLRTDGHRFRALTPLSDETKALRGLVRVREDLVAQRVALSNQLRCLLEQFWPGASALFADIESSIALDFLERYPTPSSAAALGVKRMAAFLARNGYSGRRSAAELVERLRAAPPAIAGDAEAEAKGECVRALVAVIRPLVAQVATLTAAVEHAVEAHPDGKIVTSLFRSGRVCAAQLLAEIGDDRARFVSADHLAAEGGVAPVTRESGKHRAVTFRWACNTRLRTALATLADTSRHTSPWARALYQGARDRGCEHAHAIRILARAWCRVLWSCWQERVAYDPAKHAAARAFTIRTVEPEAA

SEQ ID NO: 396178 - protein, 343 aa, unidentified
MSRHKLEGGDHAELLALIARARARAAEKLGSVPEVVSCYEAGYDGFWLHRLLEAAGIKNFVFDAASIAVEQRARRAKTDRIDGELLLRTLMAYLRGEPRVVRIVRVPSLEAEDARRASRERDRLITEQTAHTNRIKALLRLCGMAVGNPRRRDWLAWLARQRDWQGQPVPPQLLAEVTREHARLMLMRDQLAALEEAQATQAAPVPAPTAERQKLLLRLKALGPAFTATLVNELFYKNFRNRREVASYCGLTPSPWKSGSTDREQGISKAGNRRARHKAIELAWLWLRHQPDSALSRWFRTRTATAGKRTKRVAIVALARKLIVALWRYLTTGLVPEQAIMKT

SEQ ID NO: 396179 - protein, 386 aa, unidentified
MAHSTNILPRSFDYDQTLVLAIELSNKSWVIAAQVPGLSQTKAKRTIEPDKNDLLAAIDAYRIRAAAAGRSVKRVITSYEAGWCGFWLARWLMAHGIEVHVVQPSSVPVDRRMRRGKSDGIDAELLLRTLLAWLRGEPRVCSMVPIPDEADEDARRCVRERSELVSERVGLVNRIGAVLATLGTDDYNPLLQSRRRRLTELRTGLGDPIPPNALAKIERLLTRLELVLTQIAELELERDAVARTDAPDQAGKMIQQLISLRGIGVQSATVLVREAFVRRFANGKALGSYAGLTSTPYSSGGIDREQGIGKAGNRRLRTVMVELAWLWQRYQPGTAQVVWFRERVGSTGRRLRKVMVVALARKLLIALWRFVIDGLMPEGAVTKPSI

SEQ ID NO: 396180 - protein, 394 aa, unidentified
MKLVGIDVGKNSHHFCVMDKETGEFNVTPTSFSNNKEGFDFLINSLKPYSKKSILIGMEDTGHYHVALLKFLLSNGYTVASINPKTTDLTRKMEGGITKNDKLDTITICDVLDTPERKKQYRITKVDRFDLYEQRQLTRHHHNLKEELNVYCNRLQKSIDLVFPEFNTLFSSKYSIVYMNLLKTFGSAEAIASTDIRTIRKCFEIKGRGNRISLTPEKLKECAKNSIGISSEVETIQIKHLVSQITLIKEQIAEIDKKIEEFSITNNSPILSIPGISHFSGTSILAELGDIGNYSKPSQIIKFAGVAPYHYESSQYNAQHTGITKKGSKYLRKTLYQIILTVINNNPVFKKYYRLKISQGKGHRCAQGHCIRKLLRIIYHLLETGQSFDPALLR

SEQ ID NO: 396181 - protein, 345 aa, unidentified
MNYVGIDWAYGRAAFCSMNETGSIEAEGMIAASEDGLARLVLKVGTEVKACVEMMSGAVWVRDQLALAGWEVQVAHARKVRDIAPLACKTDKVDARVLAELCRRDLVPELWVPPPEDRALRERLRRRMHLVKTRTAARNRIFGLLTQFGLKISLRRLQEDDGLELLERRGVPGSWRASIAELLEVIAEMDARAKVIEAELRPVSAADRRAELLMTMPGIGPLLGLTIAAEIGEVSRFSSPAKLVGYAGLAPRISQSGDRSATGALSKAGSRTLRWAAVEAANQAWRPSNPWHGHYRRISERHGKNPAKSAVARKILIASWHMLARGEPFRPHQPAPANSSRFLVA

SEQ ID NO: 396182 - protein, 412 aa, unidentified
MRRVIGIDIHRTFGEVVIWENGVLRHAGRVDMTRSSLEGLGSRLDVTDEVVIEATGNSMAVSRVLSRFVARVIIANPLQVKAIAHAHVKTDKVDAGTLANLHAAGYLPEIWTPDAVTERKRRLAARRYQVVRHRTRLKNEVHAILHAHLIPKCPHADLFNARGRTWLARQPLPDDERSAIDRHVRELDRLAEDLNILDREIAQGALDDPAIKRLMTITGVNLTVAAGVMAAIGDIGRFKSPGKLVSYFGLNPRVRQSGLGAAHHGRISKIGRSHARAMLVEAAWAAARAAGPLHAFFVRIRARRGHQIAAVAVARKLAVLCWHLLTKDEDYLWARPALVANKTRAMELQAGKPQKKGNRRGPAYAYNVKALRDQEMQIAQQAERNYARFVARWKTRPSGEGVRERLNPAGQK

SEQ ID NO: 396183 - protein, 344 aa, unidentified
MLYVGIDVSCKEFVVYAVNERKQKVFDNKIEPTREGLRKLVKDLGEGPKLMVFEAGNQMKWIAMTLKKMKDVYIHVVHPNEVKWISQSNGKTDKVDAKKLAELARSDMLPRAVHIVDGEIRELRELVSARGRLQSKRVALTNTIRAMMLQEGVRLPVKFFQGMEWREKIEKLTIGGVQRLIVESYMKSVDQLLISEEEITARMLEMKDRRIELLESVPCIGKISSRVLVSAIDNVERFDNKKCVANYGGLTPTIRQSGEVKVMGRINRDGRREVRKVSLQCSHALSRTKSIGAKPLKIFYERIERRRGKKKAIVALARKLLTTAYGVLKNNEYYDPQKLTANAV

SEQ ID NO: 396184 - protein, 339 aa, unidentified
MKLNVVGVDIAKRVFQLHWVEADTGEMVSVQLKRERFLEHFANRAACLIGMEACGGSQHWARELVKLGHEVKLLSARWVKPFVGGNKNDAADARAIWTAVQQPGIKKVAVKSEAQQAVLALHRMRQQLVKSRTAQINGLRGLLTEYGEVMPQGKAGVVRQLPAALGRLAQRLPALLIDTLREQFARIGKLDAQILQIEQPLRQWHREDTASQRIAAIPGVGLLTATAAVATMGDAKAFKSGREFAAWLGLVPRQSGTGGRVRLLGISKRGDRYLRTLLIHGARAVLTHSKAPPEWVTNLAQRRPKNVAVVAMANKMARTIWALLAHERTFQTGYVSQPA

SEQ ID NO: 396185 - protein, 360 aa, unidentified
MESMRLVGLDVHAAQTHAAVLDRVTGEVQVSKLRVDPGEVVGFLADLGPVRAVYEAGPTGFGLARAARERGIDVRVIAPGSIPRSSGDRVKTDRRDAIRLARLLAAGELSFAFVPTVADERFRDLIRAIEDARGDLMRARHRLGKLLLRHGQRYPGPGGAWTQKHMAWLHAQRFEDPCSQATFLDYLSGVEMLLGRRAALHAALEQAIPDSSHASTIAVLRCFRGIDTLSAAGLCAEVGDWHRFPKPAKLSGFLGIVPSEHTSDVKRRQGAITKAGPTHARRLLVEAAHHYRHKPAIGASVTRRQHGQDPRVIEISWRAQRRLHAQWQRLAHQRRKPSGVVAIACARELAAFCWEAATIS

SEQ ID NO: 396186 - protein, 366 aa, unidentified
MEYCGIDAHSKSSTVCVLDAKGKKLMMKKTESSREGIAAAIGQFDTDMPVVVEACSASRPVIAHLRGIGFKNVIVVNPAATAQMRARGKKTDSVDAQGLAELARLGLTEAWRVHIPSEWAQNMRDLLYSREFAIKQRVMVVNRVKAIFRREGKPSPSLKGKSGWEDIEKSLPKYLDEFSYCRKIREESVAYELGRTRRIKEELKKHPQHELVMSVPNVGPLTAAVLLACIDDISRFGSYRAACAYFGVVPRVFQSGDTERTGSITKRGNRLARKFLAQAAHHARYASSPFNAVYREMCKKKNNPLAIIAIAKKIVTCVYAVMKHNKPFDPVKMGLEKVDEEIKFVRAYKKARRREGTIPCGTVASA

SEQ ID NO: 396187 - protein, 363 aa, unidentified
MVSPILAQWTTLSEDFVLLGAIMDTVSLIGIDLGKHCFHLHAQDGSGRMVLRKKLTRNQMFTLLSNFPSCTVVMEACAGAHWIARRLQTLGHEAKLISPQFVKPFRQGNKNDFADAQAICEAASRPSMRFVSPRNEAQQVVSALHRVREALVRNRTGTINQIHAFLLEFGISLPRGMAVMRRLPAVLEAEALPPRLVAVLERLQAHFKYLDEQIGQVEHELLTQLHEDERSERLLEIPGIGPITASVLMSELGDARQYGSARQFAASIGLVPRQYSTGGKPTLLGISKRGDKGLRRLLVQCARVIMLRIERRTDSLGVWVRSLLARRHSNVVACALANKLARIAWAILAKGTHYRSAPAALPA

SEQ ID NO: 396188 - protein, 327 aa, unidentified
MEPAYIGIDLHKAFFQACALNGIGERQWDQRWPTTESGIVGLLTRCDEASRIAVEASSPTWAFVDRIVDHVGSVTVVDTRKTRLKAGYAAKTDRLDAQRLADALRRDSVVGIYYPSPAIRDLRELTRYRCHLARLQASVKQRLHALLLRSGVETPRALFTQRGTAWLDALALPGWAGRQVQGLRQVLSDVRTQLAPVMRAIRDVAVTDPIAQRLDQRPGFGPVFSVTIRAEVGVITRFPDGPHLASYAGLVPRVARSGARHWSGRITKTGSAWLRWSLIEAAIHQFRRQDELGRWARRLAGRIGILKARVAVARALCTEVFDVWPRG

SEQ ID NO: 396189 - protein, 354 aa, unidentified
MSNKYIGMDVHQASTVIVVLNEAGKTIMETILETKTGTLLDFIQGLRGRLQVTFEEGTYAAWLYDVLTPYVERVVVCDPRKNKLLPSGHKSDKVDARKLAEWLRQGQLVAVYHGNRTLRGLKELVRSYLCLVQDVTRVMNRLKALYRGRGISCGGRAVYRLRQRDSWLALLSEPGVQQRAALLYQQLDVLQALRQTARQALLTESRKQAAFPILRQIPGLGPIRAGVVLALVQTPHRFRTKRQFWAYLGLAVVTSSSAEYRIVQGRVQKSGKPVSTRGLNPNYNRALKDVFKAAATGVSQREGPFKTLYARWLDRGLAPELARLSLARKLAALTLTLWKKGARYHPEQVTQQAA

SEQ ID NO: 396190 - protein, 314 aa, unidentified
MDAVIVGIDVAKDKLDVAVRPSGERFVVSRTEAGLEELKDRLRQLGAAIVGLEATGGYETVVAASLSAAGLPVVVVNPAQVRAFANALGKRAKTDPIDAAVIAHFIEATKPQVRPLPDEATRQLNDLVSRRSQIQAMIVAEQQRKKHRPNERMLASIERLLAALQRELSDLDGQIREAIKASPVWREKDELLESVTGVGPAISSRVLAGLPELGSLDRRQIAALVGLAPWTRQSGRWKGKSFIGGGRAGVRSALFMGALVAVRHNPTLKAFYERLIAAGKEKMVALIAVARKLLTILNAIVRDGKPWRETEAHA

SEQ ID NO: 396191 - protein, 335 aa, unidentified
MSKITLIGIDTAKSVFHMVGIDRHGKYVWRKKVARRKFVSTLAQLEPCKVVLEACGASHHWARQIKACGHDVRLIAPQHVKPFRRGQKNDYRDAEAVISASLSPGIHFVGIKTTSQQAEQALHRVRSRLLSHRNAAANELRGLLGEYGCAFTLGHKALRAGAVTFIDSGQAQTLGLVELITDVLEEMKHLEQRLQHYERQIEQRVKADTVSTRLREELSGVGVLSASALRVKVADARDFGNGRNFAAYLGMAPGHRGTGGKVKIGKIRRNHDRYLRQLLIHGARSVLRHLGDKQDAQSRWLRALVERRGYNIACVALAHKNARQAWAILAREQVA

SEQ ID NO: 396192 - protein, 311 aa, unidentified
MTLPQDVIGVDIAKDWIDVFFLSTGRAERVPMATAELRAFAARARGALVVFEASGGYEHPLAEALDAADVTYARVNPRQAREFARATGRLAKTDRVDARVLAEMGRALALRPTPPADPGRARLAGLMGRRDDLGAMLRAEMARLRQARDASVRRDIGSMITLLRRRIGKLEAEIAAVIGADEALSDRSRLLRTMPGVGPLLAASLLARLPELGRLDRRAIASLAGLAPHACDSGRFRGKRRIWGGRAEVRRTLYLAGFIASRYDPALRAFRRKLQEAGKPVKLAIVACARKLLTVLNAMLRDQREHRPAAG

SEQ ID NO: 396193 - protein, 383 aa, unidentified
MNYKQNEKINQVKESTLVVGIDIGSTTQYARAFDWRGIELGKVFTFSNSREGFEAFKAWMQHLQDKYRKSDVIVGIEPTGHYWFDLGAYLEDEGILLVMVNPYAVKQTKELDDNSQSKNDRKDPKVIAKLVTEGRYSAPYTPDGVYADLRIMVANRKRLIREMTQIKNRFARWFAIYFPEYTDVFGDYEAQSSMLLLKKVCTPEAIVELGAEKINQIWRDAKLRAVGMKRATTLCETAKRSIGLKKGSSAARYEMKLLLEDYEYKKAQLDAVMEEIEKLCRKIPESEQMLAIKGIGVITVAGFLAEVGDVRRFESPRQIQKLAGLSLRENSSGKHKGQTTISKRGRSKLRAVLFNAAIPLIAKNPEFKSYIFSFSFSTRCISR

SEQ ID NO: 396194 - protein, 349 aa, unidentified
MQKYKLFIGIDISKKWIDVCLTLDGNKKQMPHIQVENTPKGFLQMIKWIREQLKSLKKTTKLLTHIPPTKEWLFCMEHTGIYTFPITQFLEKKNLDYVMVNPLHLKHSLGLRRVKNDKADAADIAKYILLHHQDHSLSNIPSDNLLKIKHLLGLRGRLIKSQKALTTSSNELKKHSPAVHHKEVVEHSKSHLKHLKKTIGLIEKQMLQAIEQDDELKRVYELVTSVKGAGLIIGASLLVYTVGFTAFENSRQFATYIGIAPFARQSGSSLNSPAKVSHLAHKKLKGVISCGAASAMRYDKQLKAYAQRKIEEGKNKFAVQNAVRNKFLHRIFAVVKRGTPYVELHLHSS

SEQ ID NO: 396195 - protein, 330 aa, unidentified
MKDWNVILGVDVSKLTLDISCASRGLHLKIENQSKGFSLFKKWCKTNTIDLKQTLVVMEFTGGYEYRFIQFCESHFIAYTRVPGLEIKNSMGMVRGKNDKDDSFRIGQYGEDKIKRLKPSRPLNANMLSLRQLLSFRKRIVREKAGLDSTLKERRHMYSVEKTDVITKIIKTKIKANQKHQLEIEKEIQVLISMDKEMLQNYCIITSIKGIGKVNAWMTIAYTENFTSFPDARKYAVYVGVIPFSNTSGTSIKGKPKVSHLAHKELKQELNQAAKTAMRHDPELAAYAERKQQTKCYNLVLNNVKFKLILRMFSLVKRGEMYIENYQRAA

SEQ ID NO: 396196 - protein, 387 aa, unidentified
MTVRTVNNLPASAHAETVRCLFAIELSKQSWVIGFTTPLSAKISRRILSGGDWKGLLELIEEVRARVSREIGRPVEVMSCYEAGYDGFWLHRQLEAHGVRNYVIDPASLQVDRRMRRAKTDRIDTERLLRSLMAYLRGEPKVWSVVQVPSVAAEDARRLHRERDRLISERVQHVNRIKGLCALQGIYDYHPLHPQAMARLEQLRTAQGIALPPRLKSEIKRELHRLTLVVEMIATLEAERDAIVENEASTHVNAEKIQALHKLKAIGSEFATVLVGEIFHRDFNNRRQLASYVGYAPSPFQSGNVTHDQGISKAGNRKGRTTGIELAWLWLRYQPDSDLSAWFRARVGAVKGRIRRIAIVALARKLLVALWRYLETGLVPRGAVFKA

SEQ ID NO: 396197 - protein, 354 aa, unidentified
MKRTTKYVAFDVHQATTVASVREESGRVIARSVLPTDSGALTEFVRGMRGARHVTFEEGTQAQWLYELLAPLVDRVIVCDRRGAPRQGNKGDQVDADQLSELLRRGALRAVYHGSADRATLKELTRTYRNLVEDATRVMLRLKALFRARAIPTRGTTVYQARARGQWLAQLADRGARFRAEALYAELDVLRKLRPKAKAAMVTEARRDPAWPVLRTIPFLGPVRVALLLATMQTPWRFRTKRHLWAYAGLAVVTRSSADYTLLAGAPVRRRRAPMTRGLNRNHNRVLKDVFKGAATAATVRPGPLQDFYHRVMARGTREELARLTLTRKLAALTLRLWKKGERYDSTKLTTPAR

SEQ ID NO: 396198 - protein, 312 aa, unidentified
MAQSVVNAGVDVSKPWLDVALWPKRETIRVSRDAAGLKELAAWFTLHEVGRIGIEASGGYEREVIDTLQDLGFEILLLNPLRVRRFAQAKGRLAKNDRADARTIAQFVSVMIDAPQPARRRELDPLVEHLTVRRQLLDWITSCANQLEHLTEARLRKTIEVQKANFERTVATLDAKLAQLIAEHDDWHALSRRLRTVPGVGPVLAHTLIALLPELGTLSGRAIASLVGLAPFDHDSGKYAGERHIKGGRAAVRNVLYMAVLSARWCNPAIAAFAARLVGKKFKVIMVACMRKLLVMLNAMLRDGADWQASAA

SEQ ID NO: 396199 - protein, 321 aa, unidentified
MGESGVFVGIDVARERLDVAIRPSGEAWYVTNDLAGVQELVQRLQGLGPTLIVLEATGGLEYLVVGELALVGLPLAVMNPRLIRRFAQATGRLAKTDKLDAQVLAHFAEVVRPEPRPLPDVATRELAALVTRRRQLIEMRSAELQRLRTAAPRVRPQIQEHVATLTRYLASLDHELRDRIEGSPLWRDKDDLLLSAKGVGPVLSATLLSQLPELGRLDHRKLAALVGVAPLNQDSGQWRGKRRCWGGRGEVRAVLAMATRAAIRSNPAIRGFYQRLIAAGKVDKVALTACMHKFLCILNAMVRHGVPWQRTYLAIDNKHSC

SEQ ID NO: 396200 - protein, 349 aa, unidentified
MAMTIVEAPVGITGGVDTHLDTHVAAALDPLGRLVGTESFDADAAGYKALLSWLETFGQVDKIGVEGTGSYGVGLARFLRRKGVEVIEVNRPNRQARRNHGKSDPLDAVEAARAVISGRALGTGKTKDGPVEAIRVLVVAKRSARQARVKAIVQMRHLVITAPDQLHSRLKGLTVTALVAESAKLRATRAADPVTAATKASLCSLAHRIQALEAELEELNEQIEALLLATAPELMARFGVGPDTAASLLVAAGDNPERLHSEAAWAHLCGVSPVPADSGKNAGHLRRHCGGDRQANSALWRIAMVRIAHDPETRMYFDRRVKEGRTKRDIIRILQRYIAREVYRYLPRG

SEQ ID NO: 396201 - protein, 453 aa, unidentified
MARKHKKDSKANNAMLPVMRPDAGGIDIGATEIFVAVPADRAAENVRSFPTFTQDLYALADWLKQCGVKTVAMESTGVYWIPLFQILEDRGLEVCLVNARHVKNVPGRRTDVCDCQWLQFLHSVGLLRASYRPEQEVCAIRSLLRHRESLVQMAATHVHHMQKALDQMNLQLHHVISDVTGQTGLAIVEAILAGERNPYVLAKLRNDRIKASEAVIAKSLVGDYRPEHLFTLRQSLVAYHHYGKLIDGCDREIRRCLEEFKPPHLLDAAEGGNQKSQSMTASPDGVLRSELNRVFGIDLTQIPGIRVGIAQTLFGEIGPDFTKFRSASAFASWMGLCPDNEISGGKVLWVGTRKVKCRAATALRLAAQSLHHSKSALGDFYRRMRAKLGAPKAITAAAHKLARIIFHLVTTGQEFNDSRFAADQLRYQKRQEAKLRAKAKALGFQLIPIEQTG

SEQ ID NO: 396202 - protein, 313 aa, unidentified
MTTHPVVTFIGIDVAKLSLQASDAAGQHTLAVNNDACGHRKLIAWLKTFPAPVRIVCEASGGYEKSLIQALLRANLDICRVHPGRVRHFARALGRLAKTDPIDAALLAAYGQMLDPRLLEPARPDQEHLRALFDRRQQLVDQRTAERNRAQTADPVLHALIQKMIGFLDEQITAIERLLDQHLEANAPLKAKALRLEQVQGVGRVTSTVLLAHLPELGTLDRRQAAALAGVAPFNRDSGPVQAKRSIAGGRALVRKILYMAATTAAQHNPILRAFYQRLLAHGKKPKVALVAVMRKLIVLLNHLLKNPHFSLA

SEQ ID NO: 396203 - protein, 363 aa, unidentified
MFTERTSVGLDVHARSVAAAAIDGVTGELVQAKLTPSHEHIRSWVQALPGPVAVTYEAGPTGFDLYRALTGAGIRCAVAAPSKLQKPSGDRVKTDAKDAVHLARLLRLDEITEVAIPSVDQEAARDLVRAREDCRGDLMRARHRVSKLLLRHGIVYYGGQGWTGKHDAWLRHEAQPQLTNRATRLAFDSDHETVLAVKARRDRFDAAIDEMAAKSEFTPLVHRLGCLRGVSTLTGFALAVEIGDWHRFTGNTIGSFVGLVPSEYSSGSSRVQGSITKAGNTHVRRLLVEAAWHHRSRYTVGKTMRDRWELAPAAARVRGDEGNRRLHQRWVKFIDRRKKNTIANVAIARELAGWCWSLAVMEE

SEQ ID NO: 396204 - protein, 403 aa, unidentified
MMQYNDGDVVGGVDTHLKVHVAAVVDHIGRILATESFPSTTAGYRQLLMWLHRHGRLVRVGVEGTGAYGAGLARFLNGHRVEVVEVNRPDRQRRRLRGKSDSVDAEAAARAALNGDATAIPKTGDGEIEGLRALRMARKSAIKARTQATLQIRDLILTAPDDLRARLEPLPAVERAHVCARFRPGDPSNPAQSIKLALRHLARRYQTLTQEIGELDKVIAASCARINPALLGAKGIGPEVAATLLVVAGGNPERMHSEAAFAALCGASPIEASSGRITRHRLNRGGNRQGNNALWRIAMVRMATDPRTKTYVANRTADGKTKREIIRCLQRYIAREIHALLTQEHATITGTDLRNQRHNTRRNLRDAANALNTWPIELSREASPTTPTSQPATNTGFNKPLDD

SEQ ID NO: 396205 - protein, 317 aa, unidentified
MNRELKVVGIDVSKARLDVCVLPEGAASSQANDEAGIVGLVEALKRLRPDLVVMEATGGYETEAAMAISAAGLRLAVVNPRQVRDFAKASGFLAKTDAIDARVIAQFGVAIDPQVTAVPGEDAQELQAMMVRRGQLIAMRTQEKNRLALAFGTMRKPIKEHIAWLDRAIEGLDIDLTHKLRTSPAWKAKEDLLRSFKGIGPVSARTMLADLPELGSLNRKKIAALVGVAPFNCDSGTFRGQRHIWGGRARVRTALYMAAVSAIRSNPAIRAFYEHLTASGKPRKVAIVACMRKMLTILNAMAKTQTRWQPPAALQPA

SEQ ID NO: 396206 - protein, 459 aa, unidentified
MAQKVRQTPVQSNRISRRSAAALSIAHPNAAGIDIGGAAHYVAVPPNRDPTPVRQFGSFTADLQQLADWLLECRVDIVAMESTGVYWIPVFEILDARGIQVLLVNARHVKGVSGRKSDVLDCQWLQQLMSYGLLRGAFRPQEQICVLRSYSRQRQQLLRGQAKQVQLMQKALVQMNIQLTNVLSDVVGLTGQAILRAIVNGERDGRKLAKLRHWRVQAQEAEIAKSLAGNWREEHLFSLKQALAMFDAYAERLAECDAQIEHTLSNLQRHTAQLPPSQRTQHAKNSPKFDVRERVFRVLGVDITAIAGIDIGTALIVAAEVGSDFSRFPTVKHFTSWLGLCPGTKITGGKVISGRTLQSANRLAQALRVAAVSLRSSKSSLGAYYRRLAGRMEKSKAIGAVAHKLARLIYMMITKGREYVEQGLERYEARQRELAMKNVAKRAAALGLRVVPATVTCHL

SEQ ID NO: 396207 - protein, 334 aa, unidentified
MNTITLIGIDLGKHTFHIHCQDKSGKALLRKKFTRNKLMAFLAGCPSATVVMEACAGAHFMARWIADLGHEAKLISPQFVRPFVKSNKNDFVDAEAICEAASRPSMRFVPPRTEAQQAMRALHRVRESLVRDKIKTTNQIHDFLLEFGISLPRGDAIIKRLSFVLAEHELPDYLVRLLMQLHAYYHYVVEQIVELESELKHTIATDDTAQRLMTIPGVGLITASLLSSQLGEGRQYAKSRNFAASTGLVPRQYSTGGKNTLLGISKRGNKNLRRLLVQCARVFMQRLDNYSGKLADWVRQQLERKHASVVTCALANKFARIAWVITTQHTVFDA

SEQ ID NO: 396208 - protein, 461 aa, unidentified
MKIRLGVDVACRAAHQVSCADEHGVMLWVGHRFRTDPDELEALWRKLPPDAAEVMVVMEPTRNAWVALAAWFRRHGATVVMIPPEQSADLRAYYAKHAKTDRLDSKTLARLPLLHPEGLHREDTLGPGEMLKRAVKVRSGLVHRRTTSMARLDALLEILGPAWVAAIGSDMSLTALRFLARYGDPRTVKRLGPARLAEFFRRSSRGAWHHERADAVIEAAETTLRLWGADGLDFDALAADIAVEARLALAVSEEIKELDKRIAHAYERVDPDGIVRSAPGVGRIGAPQIAGRLGEATRFANLPAVRSFAGLVPRQDSSGIAARAGGPTKAGDACLREALFIAADHARKIDPTLAARYHRLITEGGKHHNSAVCTVAAVLLTRIAACLRAGRPYQLRDTDGTLITEQRGRQIVTDRYTIPAAVRASRRHLTSTTRTSRRNERAQEGVARRSEAPPVPEPACT

SEQ ID NO: 396209 - protein, 345 aa, unidentified
MEPMYYIGLDVHKRKISYCVKDSGGKVYAEGSLPATRADLDLWIKTLPQPWSAAMEATMFTGWIYDHLKPHAAALKVAHPLMLRAIAAAKKKNDRIDAGKICDCLRCDFLPECYMASTAIRERRRTLRYRNLLVRQMVQMKIKISSLLMEAGVSYNKQRLHKAGYFRELLATNPDIDEGLRALLRLCRETVVRLQKTESAMVRSLERDSLLIDRVERLMTIPAVGPITALTWALEVGDVQRFSSIKKAISYCGLCGAEKSSGNTVQRTPLSKQRNKHLQTTLIEAAKMAPRNSADLAMLYDKEKQKGNANRATLAVARKLVAYLVAVDRRQKEFLTVERENRTAA

SEQ ID NO: 396210 - protein, 391 aa, unidentified
MHSDGSKHSSFSVPNNRNGAKLIVDRVTSVLLLQEIPQVVIGMEATSVYGDNLMRFLRESGSLGRFERSLHMLNPKQVKKFRDAYSDLPKNDFVDSFIIADHLRFGRINKEVYMDDYKYQALKMYTRARHQLVQELTREKQRFLNIVFICFSGLTQEKIFSDKFGATSMALIEEFSSLDELAYMNIDELADFIRKHGKNHFENPEEIAEAVQRAAKNSYRPPQVIAEAAKQMIAISMNTIRLLQKQIKEYDKAIEKMLETIPQTLTSVKGIGNVYAAGIIAEIGDINRFPSQASLAKYAGLVWTQHQSSDFEAEDKRMIQGGNHHLKYYMCEAANALRRCDPEVKRFYALKYKETNKHNHKRALALTARKLVRLVYTLLKTNRLYIPPEEY

SEQ ID NO: 396211 - protein, 358 aa, unidentified
MQNYKDFFKDETVYIGIDVHLKQWHVCIRTNHLSPKPFSQPASADALRNYLDAHFPGGDYYAAHEIGFSGFSIHYELERLGIHSIVFNPADISDTQKERSRKTDAVDCRKICRNLMNGELTPIYVPTQEELSDRGFLRAYDNSVKLKRLSKQRIKSLLYRNGVAYAEEFKSGKGHWSGRFMQWLAVVEQSLGGGEGYRLHELIEDHNYAHSQFLRAGRAVCGVIREKHREKDCLLRSVPGIGRVTSSRLCLELPDVRLFKNSDHLAGYVGLVPDVHSSDDRIYVRGVTHRGKPHLRSSLIESAWRAIVVDPALGAAYTRYIKRGLKPNNAIVRIARKLLNRIHFVLREGKMYEKGRER

SEQ ID NO: 396212 - protein, 322 aa, unidentified
MQVNAILGVDISKKKFDVCLLMDNKKRHKVFQNNQDGFAKLVVWCNGHGANLIHLCLEATSWYGEDLATFMHDLGHNVSIVNPAQIKAFGKSELLRNKTDKSDAAMIARFCIANKPALWKPIAPEMRHLRDLYRCLQSLKDDMLQQTNRLENENMHSSCKEAISKVILAIEEQIIVLETEINEHINHYPHLKNMVENLKTIKGIGHLTAVAVIAEMPAVDNFDNAKQFTAFAGLNPGHYESGSSVSKRSCICKIGSERVRKALYMTAIVVKNHNNHFQKFCQRLASKGKCPKVIVLALMRKLMHVFFGILKNNQPFNCNLVG

SEQ ID NO: 396213 - protein, 350 aa, unidentified
MLIIGCDFHSRFQQIAMLDPQTGEVIERRLEHENGEARKFYAALTTPARVGMEATGYAQWFERMLAEQGHQLWVGDAAEIRAAMVRKQKSDSRDACHILDLLLRDKFPRIWIPSTEERDVRQLLRHRYKLVCLRTSLKNQLHAMAMGQGICRKKKLWTAVGRKELQGLSLGPWASRRRQHLLNLLDQLEPVLDELDRAVIQEVEKRPAAVRLMTQPGVGPVTALAFVLTIGPVSRFQRSKQVVSYFGLNPSEESSGGRQRLGSISKQGNSMLRFLLVEAAQTASIYDPELRRDYQRLKFRRGRGVAKVAIARKLAVRLYRKLREAAQPVPPAPMQGSPAHSVVGESLSSY

SEQ ID NO: 396214 - protein, 372 aa, unidentified
MSQSSTLYVGMDVHKESIAVAYVAQAHGAEVISLGTIGTRQCAIDKLIRQLRSKSKQLVFVYEAGPCGYWLYRYLMKQGYVCWVVAPSLIPKKSGDRVKTDRRDAMPLARLMRSGALTPVSVPAVDDEAIRDLSRAREETLRDLKAAKLRLKAFLLRHDIRSTGRANWSPAHLRWLSEVVCPTPAQQMVFQEYVQTVTAQTERRGRLELALHEQVQTWRLAPVVEALQALRGVQFTVAVTTVAALGDLTRFENPRQLMHYLGLTPSEYSSGGRRQPGSITKTGNTHARRALVEGAWAYRYPAKVSRHLQLRLEKLPKVIQAISWKAQVRLCKRYRQLMAKGKNANQVVVAIARALSAFMWAMAQQVTVPPKA

SEQ ID NO: 396215 - protein, 346 aa, unidentified
MILIGCDFHPSWQQVCWLDSETGETGEQKLVHRLGETEKFYRRFAAPARIGIESTGNCQWFVELVTGLGHEVWIGDAAKIRASEVRQQKHDRRDAALLLRLLAEGRFPRIWVPTAQERDLRQLLIHRHKLVRLRAQVKNGLQHLALNRGVQKKRKLWSQAGQKALLAIALPPWASQRREDLLKLLDTLDEQIAGLDQAASEAAKKNEKAQLLMTQPGVGPITSLAFVLTMGDVSRFPRGKQVASYLGLIPREYSSGGKQRFGSISKQGNRFMRMLLVEAAQVAVRCDPQMRKEYLHRCHEKAKGIAKVAAARKLAIRLYWMLRTQTRYPEIVHVESSSRVPVASAS

SEQ ID NO: 396216 - protein, 349 aa, unidentified
MNYYAGLDVSLEETAICVVDGSGLIVKEVRAASEPEALIAALKSIDVPLERIGLEACSLTAWLHDGLWGAGLPAICIETRQANAAMKTMPNKTDRNDARALAQIMRTGWFRAVHVKSRQSRLWRSLLVARRTLVNERRAIENVVRAVLREAGLKLGRPSCAAFAGRVRELAGDDPTVRPIVEPLLAVLATMLEQLARLTKQALAITRREEVCRRLMSVPGVGPITALAFRATIDRPERFRRSRDVGAHLGLTPTRYQSGETDIVGRISRCGDELTRTALYEAAHSLLVRSRKWSALRAWGMKIAKARGMARARVAVARKLAVILHGMWSDRTAFRFGREPAAVAVLAVA

SEQ ID NO: 396217 - protein, 375 aa, unidentified
MNDHSEAFVAFDTSKLRNAVAIADAGRTGEIRYLGEIENTGAATAKVVRKLAAKHRQLTFCYEAGPTGYGLYWQIKSLGHECMVVAPSLIPKKPGDRVKTNRRDALSLVKLLRAGELTAVWVPDRHHEAIRDLTRARGTAALDLRRKRQQMSAFLLRQGLHYPENRHTWTKAHMSWLASQKLAHAEQRLVFEEMMLAMRQAQERIERLEQAIRAAVPDWSLAEVVTALMAMRGMDLVSATTFLAEIGDLSRFQTPRELMAYLGLVPSEDSTGDRIKRGPITKAGNGRARRMLVECAWSYQHPPRVGKDKQEKVAAAPRAVREIAWKAQCRLNRRYRALVRRGKLKTVAITAVAREFAGFIWAVARAANAACAEAK

SEQ ID NO: 396218 - protein, 416 aa, unidentified
MAAVMIGAGPHKASHTAAAIGPAEEPLGGIQVRAVASQAEQLLAQAAAWPERTWAAGGATGLGNLLAQQLVMAGEVVLDVQPKMAARVRLLASGNTNNNDPGDARSVAVAALRSRAPRRVTAEDHTAVLKVWPGRYRDLGRARTQVACRLHAVLADLVPGGFSREITAGQGASMRKRIRPSGPAARARRELAAEFPGLRRLDAQIRDTRTKLAAAVQASGTTLTGIFGVGPVIAAAILGDVGDASRFGDRDRFAAYHGTAPVEVSSGGRKIHRLSLRGNRRPGHAIHMAAVTQIRYAHSPGRAYFDRKIAEGKTGKEALRCLKRQISDAIYTRLVADAAPRGTPAREGNRGTALSPARPARTPGAGSSDQPLPDRNPAYDRPPRPGGPCQRRRSRTHAEPLDNKDPDGHLRSAPGG

SEQ ID NO: 396219 - protein, 368 aa, unidentified
MKKNSTRHQNPSRGEQVRQSITIGMDLGDRTSRYCALDGRGEVREGSVATTPRAMRQKFGSRARCRIAMEVGAHSRWVSRLLRELGHEVFVANARQVRLITHSTRKDDRLDAQTLARLARVDPQLLRPIRHRGEEAQADLTVIRMRAGLLDARTKLVNLVRGTVKGFGERLAKCDADRLGGEHGQALPEPLRETLKPVLEQIESLTERIRQYDVKLEQIARTKYPETELLRQVSGVGILIALTFVLTLEDAARFSRSREVGCYVGLRPKRSESGQRQPQLGISKEGDRYLRKLLVQGAHLIVQRRAPDTDLKRWGLKLAERGGRNAKKRAIVAVARKLAVLLHRLWATAEVYEPLRNSRARERLRTAA

SEQ ID NO: 396220 - protein, 349 aa, unidentified
MNHIIRVGMDTSKHVFQLHGVNAAETVILRKKLRRKNMIAFFEKLAPTTIAIEACGGSHHWARLLSSFGHEVKLIAPQLAKPYVKRGKNDAADAEALCEAMGRPTMRFVPVKTAEQQAALMLVGLRDRLVRNRTCNRTQLSNAIRGYAAEFGLTAAKGEAHLNPLLVRIQADESLPALARELFAIQAEEYQQLRPQIDDVDARLMAWHRADECSRRLAKIPGVGPIGAALLIMKTPAPELFRSGRQFAAWIGLTPKNHSTAGKIKLGVITRAGDEILRSVLVVGATAVIQQVQRGGRGSPWLVDLLKRKPAKLAAVALANKMARVAWKLMVTGNNYAARSAPAALASAA

SEQ ID NO: 396221 - protein, 428 aa, unidentified
MHKRKTKPMNNWKDLTHYAGFDWAKDHHAVVIVNAEGHIVADFEFAHSLEGWKIFAEKASAWPNLAVAIETSQGAAVDQLLQRKYNVYPVQPVAAQSYRQRKAPSGTKTDRLDAWGLADALRVDGQGWKQLQPMDPITQQLRLLCRDEVSLIEQRTALVNQLQQALAEYYPAALEAFDDWTDAFSWEFVLAFPTPQLLVTAGKRRWEKFLHTHKLWRPQTAEKRLKLFAQADQFKASEPIVRAKSQLAVSLCKLLCTLAQQLKLYRKNIEALFQEHPDHGLFGSLPGAKKVLAPRLLGAVGNDPDRYGSQQMLQCIAGTAPVSYQSGKINKVCIRWSCDKFLRHTVHLWSDCFRKASPWGQTYYQKKRDEGMSHACALRCLGQRLLKILFRMLKDRTPYDAELHARNQKKHGSWVIKLLNEPAAKSCE

SEQ ID NO: 396222 - protein, 421 aa, unidentified
MRGLRARRVRMVKEGTLIATVDIGVATNTGYCTTLDGRGTKSFRFDNTKEGFEKFWCMTIASKNRFGCDEVLVGYESTGPYAEPLVHYLANKQVKIVQVNPLHTKKMKEVNDNSPLKTDDKDPRVIADIIRLGHALTVVVPEGDAAYLRRLNNVRERHVGEQTALLNQLQQLVFLIFPEFKTVLKNMKGKTAQYILKRYSTPERIGTLSKEALGEEMRKRSMGKFGIKDAESLIGLARETVGIKEGIAGIFMDIRHILMQLEAEGRFISEIEAEMRTTLERIPCSARLLSIKGLGTVSVAGLIGEVGDFSKFSTQSEIMKLAGLDLYEISSGKRKGQRRISKRGRSLLRKILFYAAIQMIRKNGIMYDYYARLTGRGMERMRALIAVSRKLLRIIHAIVRDNRDYVRQYQTPERRVIKMAA

SEQ ID NO: 396223 - protein, 349 aa, unidentified
MEYIAFDCHKRYTFAVVEDERGMVKLEGKIPHERGALKKFLSRCEPDSPVAVETVGNWYWIVDEIERAGFKPRLVHAGKAKLMLGMVNKTDKLDARGLNRLQRAGTLPEVWIPPGELRDKRELPRARMVLVRERTRLKQRVHATLAKYGLTVVGISDLFGVKGRAVLAKLLAQLPPQARYVTEGLCSQIDALEEEIGAIEGRMREVLSPTREVELLQTLPGVGFILATVIALEVGDVGRFPGPGHLASYAGMTPRVHSSGGKVRYGRTRQDVNRYLKWAYSEAGNVVARFHKVHPYWHVSQLYRRVRGKKGHQVAVGAVGRHLAEATYWVLNRSEPYRDPACKFREARA

SEQ ID NO: 396224 - protein, 365 aa, unidentified
MEKDSKKTAEKTRRYVGIDLGDKKSRVCIVDEQGKIVSQEWVVTSPEAFLKRFGGEAPMLMAMEVGTHSRWASELLRRCGHDVRVADARQLALITNSDAKCDKRDARTLALLVRADPRLLSPIEHRAETLQQDLTAIRMRDNLIETRTRLVSSVRGVVKATGARLPHCETACFPTEVADGIPEPLRPALAPVLEVIDQLNEEVYEYDCRLEHWARTRYPDSTRLTQVKGVGTLTALTFMLTVGDKERFSRSRSIGGYLGLRPRLGDSGDRHPQLRITKAGDGLLRKTLVECAQYIVGPFGQDSDLRRWGLKVIEEGNGSKRARQRAVVGVARRLAVLLMSLWKSGQTYEPLRHSRARESNQEVAA

SEQ ID NO: 396225 - protein, 475 aa, unidentified
MNVKGTKKKNQVAAVNIFEQQELLKKAEVIGANLTASTWHELETGGKFGKNEKLSFISDDMLIVGCDVGSEIHYARAIDSRGRELGKSVFSFDNDSEGFQSTKEWAVQIAAEHGKGQIVLGLEPTGHYWFCLATWMVSNGVSVVQVNPYAVKQTKEVEDNSQLKDDRKDPKLIANLVKDGNFGMPYLPEGIYAELRGLCMLRDQLNEDRTRTVNRLHREMKIYFPEYKDALGKVDGAFSLALLKQAPFPGDLTVLGEDGIRQVWHDSKLRGRGYSRAAEIIRHAKASVGIRDGAAAGRTAVKWFVQKITELDAELAVLGDRINQKCGEIPYAGNLLEIPGIGGNILSGILAQIGDISRFDDVKEIQKLSGLGLVSCSSGKHKGETKISRRGRKRLRYWLLQAAKSAVAHAGEFKEIHIYYTTRADNPLKKMQSLVVVACKLLRVIFTILKKGTAYDPKKMLADIRRREKKEAAAA

SEQ ID NO: 396226 - protein, 352 aa, unidentified
MEMIALDCHKHYSVASVQSPEGHCLAERRIEHRRGSIRAFLAPYSDGCPVAVETIGNWYWIVDEIEQAGKVPRLVHARKAKLMLGSINKTDKLDVRGLNRLQQTGTLPTVWIPPASLRDQRELPRTRMVFATARTRLKNRIHSVLDKYGFQDQFTGVSDIFGVGVRPRLEGCIQQLPPQAAYTSDLLLEQLEAVQETIEALEQRMAEVFKPTTELELLDTLPGVGLILGVVLVLEIGDIRRFRCAERLASYAGTVPRVHASGGKTYYGRTRPDVNHYLKWAYTEAANAVAVHRKSLAHRHVSQLYSRIRSRRGHASAVGAVARHLAEATYWMLTKKEPYHERGITEVSPQGV

SEQ ID NO: 396227 - protein, 348 aa, unidentified
MLHAGLDLSRNRLDVCLLSDQGELVEEFAVPSDHDGVRGLARRVLGYGAPVRGVIESMTGARFVHDALERHGWDVLIADAQKVKGLAPLACKTDKIDARVLAVLSERDLVPAIWLPDPAVRREREQARFRLHLVKHRSMLKHRIHSTLISFGKPCPVTDLFGVAGRELLDRLEIPQPWRGTVDASIALIDDLERQIDRINGELRAGGADHPYVPLLLTVPGIGWVLAFTIAAEIGDITRFASPKKLCGYTGLCPRVNQSGDKDRRGPLTKHGPKYLRWAMLEATMHALKHPVYHERYQRNKKRLGRQRGAKVAQIDIARKLTEAIWHMLTNNQPFVPASGGATLRLAA

SEQ ID NO: 396228 - protein, 352 aa, unidentified
MNEITTVGVDLAKDLIVACAADAAGRTQFYKRFGLPGFAAWAANLPPCTIAMEACSSAHYWARTLSALGHQVKLLAPDLVKPFRKSQAAKNDRNDAQAILITALQPDMRFVSVKSLEQQSILAVHRMREGWKSERTALINRVRGLLAEFGFWLGRSPQTLARRLPQLMQEEELPARVRALLAQAHGQLLQLEALMQQCELDIQAHARHSEAAQRLSALNGIGPITASAIVATVSNAADFRNGRQMAAWCGLVPKQSSSGGKERLGKITKRGDPYLRGLLTQGARSTLNAALARPLDQRSPLEHWIVALRQRVGYHKSLVAIANKHARICWALLARAERYDPHAASRHMRAAA

SEQ ID NO: 396229 - protein, 471 aa, unidentified
MPRRKPALSRPDPAAAALLQTLHPHAAGIDIGATELWVCVPPSAVVAPSAPSAPTVLPPHVRRFGAFTADLHAIATWLRQCQVTTVAMESTGVYWLPLYDLLEAEGFAVLLVDPRQVQRAPNRPKTDVHDCQWIQRLHSLGLLTAAFRPEEPIRVWRSYQRHRASLIEDAGRHLQRIEKALEQMNVKLPAVVSDITGVTGMGIIRAIVRGERDPQALAKLRDRRCKESAATIARALQGTWQPEPLFALQQSLALYDYYHEQIRACDLVIEDHLQGMALPEVSPLEPTRRVRRRKDNEVTFDARQRLHHMAGVDLTAIEGIEESTALVVLSEIGTDMSRWPSEKHFGSWLGLAPNPKKSGGKVKSSATRPGVNRAAQALRLAAKNLQRSQSALGAFFRRIAARRGLAKAITATAYKLARIIYALLKHGTVYVTQGLAAYEMAYRERMVRQIKRKAAELGLVIVEQEAVAQPA

SEQ ID NO: 396230 - protein, 315 aa, unidentified
MSGKMFIGMDVSAEWIDIAVRGGGAVERIVNEAKAIAAWLVRLEPAEVALVAFEPTGGYERTLRRELVLARLPFARVHPNELAAFRGRRGVKAKTDPLDARLLADFAALELADRGLAPLVEGDEVLREMTARRRQLADLLHAERCRADRAQTRAVRSGLDDVIAVLKETLDNLEQVIEAYIAEQPALAATARHLRSLTGVGPITVQTLMGELPELGRLSGKEIAALVGLAPRTNKSGKLTRRATIGHGRPGVRRVLFNAARSAIRWNPVMKAFYAKLVHTNGRPGKVALTAVMRKMLITLNAIARDQQPWKAANA

SEQ ID NO: 396231 - protein, 356 aa, unidentified
MQIIGVDLHTRQQTVAMLNVETGEIVEKTLRHEGDAVREFYSTLAGPIRVGIEATGSMQWFLELMEELEIDCQVGHPAKIRAAEPRKQKHDRRDASLVLQLLVENRFPSIWMPSREQRDVRSLILYRHQWVRIRTRVQNALQAIALSHGLRRGSSLWTEAGQQAIASLSLTRYTAERRTALQSLYGHLEKRIDDLDRKVEELAWQRPQARRLMTHPGVGPITALATETFLGEPKRFVDGKAVASYVGLIPSEHSSGGRQRLGGLSKQGNPLLRFLWCEAVGHAVRKDAELQRFYQHKLVQKGLGKAKVAAARKLGIRLWILLRDQIDYQEFCRRGQLRQKHGGAHAGMPACEHDPA

SEQ ID NO: 396232 - protein, 505 aa, unidentified
MTAPRTRHQSAASSPPSGQQAQAQAQRKAYDRRKTRAKAKSEVVRQQEAAQVQALPVLRPHAAGIDIGSRSHWVCVGFTTEADSCLTQEFPAHTDGLKAIAAFLHEHQVKTVAMESTGIYWIPLYELLQAEGFEVLLVDPSYSHQLRGRPKTDRRDCQWIYRLHSVGLLAAAFRPDEQTCRLRAYLRQRANLIRSASRQVQHMQKALEQMNLKLTEILSDITGVTGRSILRAILRGTRAPEKLAKYRDKQCKASEAEIAQALTGSYREEHLFELKLAYEAWQFTLGQVEKVDGQIALQLGRMKCDRALPPLKPKARPKRRVNSPGFDVRTALYYVVGLDLTEIEGISDLTALTLISEIGPGVSQFATVKKFCSWLGLCPNWKKTGGRVKSSRTRRGVNRAAQALRLSAQSLHHSQGALGGFLRRMKGRLGAQAAVTATAHKLARIVYLALKHGMTYVRQSQEEYEAQMKEKQIKALKRKARQLGLEIIEKTSGVAPTAAAAAVQG

SEQ ID NO: 396233 - protein, 339 aa, unidentified
MQVSTLGIDLAKNVFVLHGVDHTGQTVLKKKLSRAKFAEFVIRLEPCLIGMEACSSSHHFARMFIRHGHQVRLMPPQYVKPYVKTNKTDATDAEAICEAVTRPNMRFVQVKTVDQQAVLALHTERNIIIRERVACTNSLRAMLSEFGFVMATGRKALKQGVPEILEDGENELSPFVRASALRQMAHIDALDDHLELIEQQLKSWAETQAACKRMTKVPCVGLLTATYLVASVGDGKQFSCAKQFSAWMGLTPREHSSGGKQRLGRISKRGDGYFRYLLVHGARAVASVIERHREDMRWLDGLLKRKNYNVAVVAQASKTARILWSMLVHETEYRSPAGA

SEQ ID NO: 396234 - protein, 303 aa, unidentified
MFLGIDVSKNTLDVALLGESAKPRHKVFANDVVGHAELLAWLKEQQACIVHACLEATGTWADAVSAALHQAGHKVSLVNPAQIHAFGRSGLKRTKTDKADAVLIARFCQMHQPPAWTPLSPQLQQLQGLVRRLEHLEEMSLMEENRLASGGVCGAVKDSLEDHIAYLDEQIKQTRRQIKGHIDQNPDLKDKARLLESIPGIGAATAALLLAELGDVSQFDSARQVAAFAGLVPRIRESGTSVRGRSRLSKVGSSRLRKSLYFPAITALRFNPIIKSFGLRLSAGGKSKMLIIGAAMRKLLHLA

SEQ ID NO: 396235 - protein, 355 aa, unidentified
MESVKYLGFDVHQSTISVAVVNADGKLVMQSVIATHAATILDFIHGLRGTLHLTFEEGTHSAWLYDLLARRVARVVVCNPRQNALLKAGNKSDTSDARKLAELLRAGLLAPVYHGEGSTRTLQELVRSYAALTEDTTRVMGRVKALYRSQAIACAGKKPYGRRHRREWLSKLSEAGLHRRAERLYEELDALQGLRRAAKRELGLESRKHAAAKLLRTVPLLGAIRAALLIGRVQTPHRFRSKRQFWAYCGLALETRSSADYRFEDGQLVRAKKPVFIRGLNRNHNHDLKNLFKSAATTASVLHGPFREFYEGLLAKGMQPAMARLTLARKIAAITLSVWKKGESFDAEQLKPQAA

SEQ ID NO: 396236 - protein, 352 aa, unidentified
MALKIVYKICCGIDVHKNFVVACIAKTDKQGVTTYERHHFSTYTKGLKQLLKWLLDRNCKDVCMESTGKYWIPVYNVLEHDCSIVLAHPKYVKAIRGKKTDKKDAKWIADLFKHDLVAGSFMPPADIRQLRDLMRYRFKLTCFKSSEKNRYQNCLTVSNIQLGNVVSDTFGKSSQKIIAKILENPDDTSFDIGSLIHGSMKDKLPELELAIDGYITPEQAAKLKIIKEHFDNLEARKAELEELILALANPYQQEISIILTAPGFKNTFTAIGIISEIGTNMEAFPSAKHLCSWAGLTPTNNESAGKKKSVRVSKAGCYIKPLLVQCANAAIKSKKHPEIRDRYLRIKKRRYR

SEQ ID NO: 396237 - protein, 350 aa, unidentified
MTSVTQLFVGIDYHQDNVQVCVLDKNEHQILNRSLDNDAGVIRRAICGHGRVAGVAIEACCGAANLADELHNQTNWPVQLAHPGYVARLKQSPDKTDFSDARLLADLERVGYVPKVWLARERIRQLRRLIRHRQQLVNSRRSVKLRLRALLRENRIKAPAGCNAWTKAWLSWVANQAVLSEDDRWLMDQHLAELQHLTTQVKAVEQRLAERVQDDPVVEKLLTFPGVGFVTAVTLRAGAPPVGWSGYFDRFQTGKQLSRFCGLSPRNASSGHRQADAGLIKAGNPGLRTVLIELGHRLIRQRNSHWSKLGYKMLLRGKPRNVVVAAVANRWVRWLYHQMQPDQLFVPTSA

SEQ ID NO: 396238 - protein, 410 aa, unidentified
MLCVGDDWAEDHHDVELMDETGRVLAKARLPEGAVGLARLHAMIGAQRGEDAHEAEVLVGIETDRGPWVAALVAAGYTVYAANPLQAARYRQRHAVSGAKSDTADAHTLADMVRTDAHQLRPVAADSPEAEAVKVVARAHKTLIWERTRHTQRLRHGLREYFPAALEAFDDLDAPDALELLGKAPDPASAAKLNRSQIQAALKHARRRDILTKADHIQSALRSEQLGRDQVITNAYAATTRSIVAVLGVLNEQVKILQGQVEQHFGRHPAAEIILSQPGMGTILGARVLAEFGDAPRRYADAKARKNYAGTSPITRASGKKKVVLARFVHNDRLIDALMSQAQSALQASPGARAYYDKQKDRGLDHQPALRQLANRLVGILHGCLKTRTLYDEATAWSHYNQDRDQQPAA

SEQ ID NO: 396239 - protein, 343 aa, unidentified
MEKIITVGLDLAKSIFQVHGIAENGEVLVRRTLRRSQVLPFFRGLPACLVGMEACASAHHWAREIAALGHSVCMMPPAYVKPYVKRNKTDMADAEAICEAVTRPTMRFVPVKTAEQQAASMILRTRELLMRQRSQTANALRAHMAELGIIAGTRMASIAKLLVLLRDEKDNRIPGAARFALILFAEQIELLTTRIEKLDREILVAVRKDPDARRLMSIPGVGPLIAATVRTSLVDARDFATARDFAAWTGLTPRAQSSGGKERLGAISKRGNRQLRTLLIVGATSIIKLAKRGLKVPLWIRTMLQRRPVKVVSVALANKIARTIWALLVRGGIYQAPAAMLKT

SEQ ID NO: 396240 - protein, 400 aa, unidentified
MRVVLGIDVSKVSSEVAILVNGEKVHGYTVANDAIGFSRLLGDLKTVHKPEIIFEATGVYSRRLQAFLDEHGYAYIRLNPLEAKKQLDSLRVRKTDQIDAEKLAQSQFVLNRKPTYVQEEVYQDLRDLSRFYQNLTEDIVRAKNRLHKVLQVTFPELETILSTPTGEQYWNLVTAFPCKDLVLELSKDELSKSIRLSTSKRISDKRVAYLAEKLTALANQSYCAVKKTSPIMEEVRYYAKELLRLSEQRQTVLDKMVTLAKPLPEYDILLSIPGIAETTATSIIGELGDIRRFQSANQINAFIGIDLRHYESGNFIAKEHITKRGNPYARKILFKCIHNIASASHTNPCHIADFYEKRKRQSQTTSTKPHTIASIHRLIRTMYYLITHNKLYDYTLTQNQ

SEQ ID NO: 396241 - protein, 400 aa, unidentified
MLSIGIDVSKGKSTVCGMKPGGEIVYTPFEVQHTREGMSELVSLLRSSGEEVRVVLESTGSYHCPVVATLLENGIFVSVVNSLRMKRFCSQSIRKVKTDRIDAMQIALYGLAYWQELQPARLPEDTYRELQLLARQYYQMTSLLIKAKVDFNAICDQVLPGMQELMNDHAGRHKLSDFVLRYHHATHILEMGETRFQKDYCKWAEKKGYRNCERMAVLIFATAQNGIPVLPNAPSTQIVITEAIRVLHTVEASRDAILTQMQALAKTLPEYSLVREMPCIGDTLAPRLIAENGDVRRFHSKRALIAYAGIDAPPYQSGKFCANNRHISKRGNRYLRKTGYEVMQSYVMHKPANDPIFTFIEKKRGEGKSGKLAMVAGLNKFLRVYYGKVTELYRSLPTIE

SEQ ID NO: 396242 - protein, 377 aa, unidentified
MNAVGIDVSKGKSMVAALRPMGEVALLPQEFLHTEVGLEQMAYAIIALGEDTRVIMEATGRYHEPVAAALHEYGIYVCVLNPLFIKQSGGGSIRKVKTDKADAMKIAKYGLDNWVDLREYTPMDTVRQQLKLCSRQYNLYMKTVVSLQNNLISLTDKTFPGVNELFSSPERADGHQKWVDFVMTFYHCDCICRVSENAFAERYQKWCKRKGYHFSAEKAQDVYLGSCGHFTTLPKNDNTKLLITTAAQQLLAGKMTLAALRTEMTRLAKQLPEYDIVRAMYGVGETTAVQLMAEIGDVRRFPRRSSIVGFAGVDPAVDQSGKHSAKSVPTTKRGSPHLRKTLYQIVCTYLKKSPVDELLSCPFSAVQILRDFFHFSY

SEQ ID NO: 396243 - protein, 348 aa, unidentified
MSLALQSLLPYPNSCEGASPHQQGRDTKMLSFCGIDVSKDRLDVMVLPDEYSSSVPNDPAGWAILVEQLRGFSITAIGIEASGGYERGAVRSLQAAGMPVRQVNPFKLRQFAKASGVLAKNDPLDARMIASFVGIMPTRPAQRTTPAAEQLVEMLAVRRQLSAEKTAAENASRLLEDLMLQRLSRRRIARLAADIELLDKRLVEIVATDATLAHRYRLLTSMPGVGPVLACTLIALLPELGGMSRKQVAALVGVAPYAFESGTLKGRRCIWGGRANVRQVLYMAAMSASNWNPALKLFHDRLKGAGKLPKVVIVAVMRKMITTLNAMVRDDIAWADRLSGRHSVTTAR

SEQ ID NO: 396244 - protein, 321 aa, unidentified
MKSTQQPLNIGADIAKDEIVVACAEQSFTPRKIANSRSALLAWLNKLPQGSRIAMESTGSHHERLAELAHKLGLTVYVLNAKDVRHYAKGVGLRGKTDRIDAQLIARYLAKEHAELHPFVPPSAQQRELERLLRRRTKLVRIRAAVKQSLNSMRGFAVELKCLLARLDALIKRIDIKMRASIEACPHSQEACARLQRIPGVGPVVGGGLLNTLQRVAFGSAAAFVAFCGWDPRPSDSGRKSGRRRLSKRGPSLLRYLLYNAAMAASRTKAWRPLYQRSLAKGLSRTEALVILARHIARTAWSIYTHKTLFDAQRISQQVLT

SEQ ID NO: 396245 - protein, 322 aa, unidentified
MCSHAQLQAAFKKPTDPDMIHRALIGNLQHIRCVVLETGRMANWLYSELSQRGLPMVCIDARQAHAVLSQMHNKTDENDAAMLAELARTGFYKRIEVKSRVAQERRALLRAREVAIKSRMNMENTIRGLLATFGICLPKHLKTYDQRVRKALEVQPDLLRIILPLLHLRTEALRQAAALTKDMVRQARADGACRRLMTIPGVGAVSAVTYVATIDTPDRFVRSRSVGAYIGLTSRRYQSGDGDYGGRISRRGDRMLRTILYEAANSLLCRVKSGSGQHLKNWANGIKKRTSHKKAVVALARKLAVIMHAIWRDGTEFEPKEA

SEQ ID NO: 396246 - protein, 337 aa, unidentified
MKYSGIDLHSNNSVVTVTDEEDRVIAEKRLPNDLAKIVGFLEPWRDDLAGVVVESTYNWYWLVDGLQAAGFVVHLANTGAIKKYDGLKHSGDKADARQLAHLLRLGILPTGTILAPEQRATRDLARKRMQLVRSRTSHILAIENIVARQLGAKIDSNQIKRLNNDAVEHMGLTADVALAIQSNLAVVTTLSAQIDLLEKPLQERVGERPEYGLLTSVPGIGRILATIILLETGTVDRFAAVGNFASNARCVDSQHMSNGKKKGEGNARNGNKYLAWAFVEAANFALRFCPEAKRFYERKKAKTNTVVAIKALAHKLARACFHILKERKPFDVTRCFA

SEQ ID NO: 396247 - protein, 310 aa, unidentified
MDCYIGIDVAKATLDIAALPSGETWTVTNDETGLHELLPRLLVLAPTLVVLEATGGFESAAVATLAKAGVPVVVANPRQVRDFAKALGRLAKTDALDAAVLAEFAQRVRPEPRALPDETAQLLDSLLTRRRQLIEMLTAERNRLGFARAAVKRDLLQHIRWLEKRLGDIDRDLHDVLRTSPLYQAKLTLLQSVPGVGPITALTLVAALPELGRLSRREIAALVGVAPLNRDSGTSRGKRMIWGGRAPVRAALYMAAFAGVRWNPVLRQFYTRLRAAGKPFKVAVTACMHKLLTILNAMMHAQQPWDAEHA

SEQ ID NO: 396248 - protein, 373 aa, unidentified
MNYNTVYVGMDVHKESFTLRYYTFDMDEPSAAVKTQADYKQVLKYLDSIRRILGEECRFLCGYEAGCLGYTLYHQLQSHDIECVILAPTTIPETRGKKKVKNDKRDAGNIATCLANRSYRPVHIPSEQDEEIKEYIRMRSDHKTALKKVKQQILSFCLRHGYRYTDTKKTWTQAHVKWLKNLPAEGVYKEVMEEYMGTFTYLTDKIERLDRQIEEYAQKEEYQEPVKKLCCFMGIKTMTALTTLVEVGDFKRFPSPANFASYLGLMPGEDSSGPSEKRLGITKAGNAHVRRLLVEAAQSYGRGTAGDKSQALKKRQQGNPPAVIAYADRANERMRRKYYHMVLGNGKKPNVAKTAIARELSCFIWGMMTEHTD

SEQ ID NO: 396249 - protein, 359 aa, unidentified
MQRNKISFKGQKIYIGIDVHAKTWEVCVLTESGYKERHPQQASAKTLFDFLKKHFPDGEYHAVYESGFSGFSTYYALKEYGIDCVVTHAADVPTTQYEEVMKTDKVDAAKLARSLRAGDICPIYIREKENIDDRSVIRIRKTIQKQLSGYKARVKHLLHCNGVEIPDRFVRPGTHWSRAFIKWLKEDVVLLSSSRLSLDLIVKQVETIRQILLDATKSIRRLAQTDRYRNNYELLMSIPGIGVSVAMCILTEIYDVKRFRNENQFASYLGLIPTCHNSGEKTASGEKTFRGNKHLGPMIIEAAWIAIYRDYGLGMAYARYKQSMKPQEAIVKIARKMSNIIFSVLKNSRKYEPYRWDKE

SEQ ID NO: 396250 - protein, 370 aa, unidentified
MLDTTTFIGLDVHARSIKAVSLDVMTGEVRAATFGYDAGAVAEWVRSVDPKARCVYESGVTGFDLQKRLSGLGVDCVVGAVSKMIKPSADRRRKNDRNDAEFLARMLSVGNVVEVWVPDDECEAARDLTRALEDARDDLSRSKQRLSKFLLRHGLVFDERTPTGRRKGNWTRAHWSWIESIRFAERADNDVLAYYVDAVRRAAEEKARLEGLVEAEARKPRWRKRVDSLRCLKGVDTASAADLVFEAGEFSRFRNARSFAAWVGLTPSEHSSGESDRRGSITKAGNKHLRKTLVEAAWHYLTCSGRPKDLARGQAPDRGARRHAAKGVRRLVERREALLARGVHGNKANVATARELACWVWAVGLMAEEA

SEQ ID NO: 396251 - protein, 461 aa, unidentified
MLLLGCPVDPRLGWQTAKRAKARIGVYHSQPYTCPGGQCQGNPRPNLQTQGESSMNEDGNTRGTRRYVALDIHKHYCVVAGVDREGRVVLQPVRVEHADLEGWLKKNLRESDHVVIESTTNAWHVYDLLSPLVERVVVANPIKVKQIAQARVKTDIRDTLILARLLAANLVPDVWVPPAHVRELRQLLSQRRQLVETHTQIVNRMHSVAHRHHLKHERGKRFNQKNTGWQKDRRLSKVEQFQEKQISRIGKEVAKMSHQKPWAESMTYLMQLPGFGVITAMTVLAAIGEIQRFESARHLASYSGLTPGLEQSGTKNRGKGMTKEGRKELRWAMVEVAQRAVKSDPLWTRKFQEMEKRMHRNQAIVAVARRLLELVWYVLTRRQPYRHFSQERIAYKYLTWAWQMDDEARDGLTRQQFTRYYLMRLGIAQALTRIALDPKHPRKIASEAELLALRPELKQLE

SEQ ID NO: 396252 - protein, 367 aa, unidentified
MFERTSVGLDVHARSVAGCALDTETGEILHRKLTPDRTEILNWIGSLPGPVRVVYEAGPTGFGLARDLNTAGFETLVAAPSKLQRPAGDRVKTDTRDALHLARLLKLGEITGVTVPSIDQEAARDLVRAREDCRADLMRSRHRISKLLLRQGIVYSGGQAWTGRHEIWLNQQRFAEPARELTYRSCLAGMRAIDERRHDLDAAITSMALDSEFTAVVQCLGCLRGVSTLTAFGLAVEIGGWDRFTGSSIGAYLGLVPSEHSSGASRSRGSITKTGNTHARRLLVEAAWHHRRPYLNPSRLMRARWELAPEAARCRGHAGNRRLHQRWLTYLEHHKRPVIATVAVARELAGWCWSLARIAEEGKAHMT

SEQ ID NO: 396253 - protein, 260 aa, unidentified
MDNFYFIGVDVSKKKLDFCVLFEGKVLREEQVSNHQQAVARLIGELKNDLEMDNEQFLICAEHTGQYTFPLVCACKSVECKLWLENPSQIKYSSGMQRGKNDKVDAKRIAIYASRFGDKVKYYDRPTEEIERLKQLERERALYVTDLAKYKGQMYDQKDFMPAALYRKKTKRMKGLIQELQAAIDAITAEMEKIIGSTEVLARQMELLMSIDGVGKVVALNVIIETEAFSRFDNPRKFCCHAGVAPFSYTSGSSQHSKKQ

SEQ ID NO: 396254 - protein, 399 aa, unidentified
MPYHIAGIDVHKKMLAVAVADVAVEGDFQFERLKVGTSPVQLRALADWLVEREVDEVVMESTAQYWRPVWEALERYWRPTRRTHPAASPVSGTLHLAQAQSNRAAGGRKRDFPDAERLVKRLVAQELTLSFVPDAEQRLWRTVMRRKYQITRNRVQLHNRLESLLEEAHIKISSVVSDLLGTSARRMLHAVGEGETDPRALAALADSRLRATSDQLRDAFGACADLHPVYRRLVKLTLDEFRLIEDQLAQLDQQMAQLLAHQQDAVHRLAEVPGLGVDSAQQIIAEVGASAAAFPSAKQLASWMGACPGNEESAGVNYSHRCPKGNRQMRRVLNQAANAAVKAKGTIFAVVYRRLVPRLGHAQAIGAIAHRLCRLIWKILHQGIRYEERGPAVSVEAKN

SEQ ID NO: 396255 - protein, 344 aa, unidentified
MKHNNVISIDLAKNIFQVCVMTQFNKIKSNRSLSRSKLIAWLPQQSRSLVVMESCGGASYWARLAKSLGHDVMVIPARQVKAFRTGQKTDANDAVAIAVASQSPNIHPARYLSAEEQGIQAVEQMRKMLSKQKTQLSNQLRGLLLEFGLVINKGSAAFKSRIPEILEDAENELSLPMRQSLCQLWEFYFVLENEYQQIDQRLRELIKQSEECQRLMKLEGVGPIGAVKLKLRLAQDHFDTGRQASACIGVTPQHHSSGGKVRLGSVNKVVYDKSLRSVLFLGARAMVSKLKKRTARTEKEVWIKALLERRGINCAAMALANKNIRTAHALLKNKTDYVTVPLVA

SEQ ID NO: 396256 - protein, 317 aa, unidentified
MNLEAFASFCGVDVSERQLDVHLLPEGAGASFAHTVAGIGRLVAWLASRERPLVVVEATGGLERALVAALGRAGIAVAVVNPRQIRDFARAAGLLAKTDRLDARVLALFAQRMRPQPRLPGSEADALLVGLVLRRRQLVVLRDAERSRRRRIAEPGLRRSLDDHLAWLTAEIETIEAAMAARLEALAACRERAALLISVPGIGTLTAASLLALLPELGRLDGKAVASLAGVAPFARDSGLMRGRRTIWGGRKPVRAALYMATLVATRHNPTIRAFHERLRAGGKAKKLAITACMRKLLVILNAMLKDRTPWRTALHA

SEQ ID NO: 396257 - protein, 340 aa, unidentified
MEKAIMIGLDIAKNVFEVHGRNAAGEVVLRRSLRRGQVEKFFAKLPKAVIGMEACGSAHHWARVLGKLGHEVRLMPLAYVKPYVKRNKSDTIDAAACWEAVGRPDMRFVPVKTVGQQAALSLHRSRDLLVSQRTQLGNALRALLSEFGIVAGKGKAGLTHLVAELRAGTLDLPADAVVAAMALADQRAALDAAADALERRITAQAKADKKAVMLKTAPGVGPLSAHAALATLPDPSLFKSGRDFAAWLGLTPRLNGSGGKTRTGRITKQGNQPLRRLLVLGATAWLRQVRARPEKASPWLRGMLARRPSKVVAVAQAARTARILWAMLSHNQPYRAPAIG

SEQ ID NO: 396258 - protein, 345 aa, unidentified
MDHFAGLDVSVKETSVCIVDDTGKIIREVKVASEPEALLAVLKNPAYHFKRIGLEAGPLSQWLFSALAEAGLPVVCVETRHMQAVLKAQINKTDRNDARGIAQMMRVGIYRPVHVKTLRSQKLRMLLTHRKLLQSKAIAIENDLRGTLRNFGLKVGIVGRVRFEARIKELVENLPDLAVLVEPLLLVRRTLREQTIILHRRLLAVVRDDEVCRRLMTIPGVGPVVALTYRATVDVPARFRKSKAVGAVFGLTCSKYQSGEIDMSGRISRCGDEMMRVMLYEAAQSMLRSKKWSWLKAWAMQIARRRGMKKAIVALARRLAVIMHRIWVDGSEFRWTREQAAAAAA

SEQ ID NO: 396259 - protein, 341 aa, unidentified
MKNLFIGIDFSKEKIDATIITAQGLEELSARMSETFPTTTSGYNKLVRWVEKNSLGIGREAWLFCGENTGDYSKPLCNYLYGKGLDMWIENAKCIKDSSGLRRLKSDRADSVMIAEYAMRNYDRAEIYKPLSESLSQLRELFLYRQQLVRHKCGFQVRRGEKKLTMEKSSIKTAISQSGRRMVNVLDKEIEKIEKKIEELIKSDDELKSTYELITTMPGIGMQNALCLLIFTNNFKRFNLNPRKIACYYGIAPFGRDSGTSVHSSPHVHYMANKMLKAMLTQAALASIRFCPLFTNYYNRLISKGKKKQVALNNVKNKLIHIITSMVKKSQPFNPEYISIA

SEQ ID NO: 396260 - protein, 346 aa, unidentified
MRFYNGQHRYYCGVDLHTKRMYLCILDHEGNTLLHRNIRAKPREFLSAIDGFRDDLVVGAECMFTWYWLADLCLDERIKFILGHALYMKAIHGGKKKDDKLDSEKIARLMRGGTFPLSYVYPREMRATRDLVRRRMFLVRRRSELLAHVQMTNQQYNHDPFEKMLQYASNRDILDRFEEQSVRLSVEADLKTVGHYDQLLKQLEADLVRQATLHDPRACRLLRTIPGIGKILSLVLLYEIHTIDRFPSIGDFLSYARLVTPKQTSDGKVTGHSGAKIGNVHLKWAFSEAVLWMLRNSDDAKAFLKRKEKKYGKCRAMMMLARKIARAVYQMLKRNESFDAVKFFAS

SEQ ID NO: 396261 - protein, 387 aa, unidentified
MTVLAVNNLPAATHGETVRCLFAIELSKMSWVIAFNTPLSEKISRRTLTGCKWKRLLELIEEVRARVSRETGRVVEVVSCYEAGYDGFWLHRQLEANGIRNYVIDPASLQVDRRARRVKTDRIDTERLLRSLMAYLRGEPKVWSVVRVPSVAEEDARRLHRERDRLVSERVQHVNRIKGLCALQGIYDYNPLRPQAMARLEQLRTTQGGALPPRLKSEIKRELQRLELVVEMIATLEAERDAIVGDEASTHVNAKKIQNLHKLKAIGPEFAAVLVGEIFHRDFNNRRQLASYVGFAPSPFQSGSVAHDQGISKAGNRKGRTTGIELAWLWLRYQPDSDLSVWFQTRVGTTKGRIRRIAIVALARKLLVALWRYLETGVVPRGAVLKG

SEQ ID NO: 396262 - protein, 571 aa, unidentified
MSNATPLDRIGVGIDTARYGHRVSFLRPDRQPAAKPLTVLESRAGYTALHQRLQQLHQQHPQAHFHVRIDAAGQYAANLEHFLRGLALPITLSIGEPKRNKDYQKAHFPKRTSDDTESQAMARFAVVELPKATTPVAPAMTMLREVAGRLQAKVKQSTQAINRLHNLLARVFPELANLTDDLNCSWVLHLLDNYPTAQRIAQARLSTLQKIPYLAPELAEQLHWLAQQSVACLSGKVAETLLRDLVAQVRHTQHAESQLRRLLHDAYATLPPSPHQHVQTIPGIGVATAAVLIAQALDINRFATPERFVGYFGVFPEENTSGVDKFGKPLPPGSMHMSRKGNDLVRHYLWNAARSALVHNTAIRALYSRLKAQGKRGDVALGHCMRKLLHLVYAVWKSNRPFDDNHVAGPRPGSAAQDAAEADSNETAVGHKRDVPAEEVVTTANATVAPPPPPVKASTANRPARAKVDFAFLRQHVSMEQVLRHLGLYDQLRGRGQQRRGPCPIHAQPHDRQPTFSAHLGKHLFQCFHTSCGAPGNVLDLWAALHKLPLYEVAPHLAETFHLPRNREEKL

SEQ ID NO: 396263 - protein, 445 aa, unidentified
MPFAGLDLHKQVIEAAIVDDAGKLVHKSRFPATREALVAFAQRWLNPETSVAVEATTNTWPVVDVLEPLVGEVVVSNPMRTRAIASAKIMTDAISAPTLAQLLRLNYLPRVWQPDAKTRHQRELVTERTTLTADRTRIKNRIHSVLHQRMIPAPEGDLFCERNLAWLRALPVSDEGLNENGRRVLDRYLTQLEAIGKEAAELDALIAKHAYGESRVRLLMTLPGVDMAVALGLMAALGEPSRFASAGQAAAYFGLVPSTKQSGRHCYHGRITKQGNSHARWLLVQAAQSVAAHEGPLGVFFRRLAQRKNRNVAVVAVARKLVTIAWHMLRRNEPYRYADPARTAVKLARVRIVATGKRRRGGFPKGTPRPASYGTGKQLRRTPSLDAVYAKEGLPPRQKPGQGEAHMLGQHGLEEFLGRIAEQQAAPKAPPSGKRRGPYHVRPIG

SEQ ID NO: 396264 - protein, 328 aa, unidentified
MIGLDEQGTIVLREKLARGRIARRLANASPCLIGIEAGMATHYVALELLALGHDVRQVPPAYAKPFRQGHKNDFRDAYAIAEAVLRPSTRCVPVKTDDQLDLQALHRVRSRLVGQRTAVINQIRSFLLERGIAVRQGPRFLRQRLPEILAKRIDVLSPRMIAIIEDLSGDWRRLDERVERVTEEIEQLAHGSESCRQLMTVPGIGPLIASAMVAAIANGAAFAKGRDFAAWLGLVPKQMSTGDRTILGHISKRGNRYLRTLFMQGARVILLRPANWARHSFGPWLTAAAKRLHHNVLATALANKLARIAWTVLAQRRNYETRVVTQAA

SEQ ID NO: 396265 - protein, 366 aa, unidentified
MKKISTVVVEGMQIFKENQLTIGLDLGDRISRYCILDEAGQIILEQELPTTAKGIEQVFSKIPRSRIALETGTHSPWLSRQLGQYGHEVIVAHARNVRLISESSRKDDRLDARTLGRLARIDPALLSPVRHRSAKAQMHLTIIRARAVLVSARTALVNAARGLTKSNGQRLPQCGTEQIHREIAKGLSQELRDALDPLRREIESLNERIAEYDTRIEQIAREMYPEVARLRQVKGVGPLIALTYVLTLDDPFRFRSSRDVGCFLGLRPGRRNSGRSEPQLHISKEGDRYLRTLLVQGAHYVMGPFGQDSDLRRWGLKLAERGGKNAKKRAVVAVARKLAVLLHKLWVSKEVYEPLRNNRKGMAQVA

SEQ ID NO: 396266 - protein, 390 aa, unidentified
MFFLGIDIAKHNHVASLIDDNGNSIFKACSFSNSSNGADSLIDKLKKYSTDDIIIGMEATGHYWLALYSYLSEKDFNIIVINPIQTDAWHHATEIRKRKTDSSDSVLIADFIRFGNFQTSSIADEKYLNFRNMTRFRHSLIKQIGDLKRKIIANLDLVFPEYSSYFSDIFGQTSKEILLNFNTAEDFKNLKTRDFEKVLRNITLKKSATIKLNSLKQMSQSSFGVKFALSSYSIQIKCLIEQIKVIEDQAKLIENEIESIVKDLNTPIFTIPGIGYVTGAVILAELGDINKFSSDKKIVAYAGLDATVNQSGQSDGQHGHLSKRGSTHLRKALFQAAFVASTNDTIFKDFYDKKRKEGKHHLVAVNAVARKMCHVIYAVLKKNEPYVEQK

SEQ ID NO: 396267 - protein, 410 aa, unidentified
MSLYCGIDWASDHHDVAVIDDDGRVVARGRVGNDAAGFTRLLTLLAEAGDSPEHPIPVGIETDHGLWVAALRETGRVIYPINPLAASRYRTRYAVSGAKSDATDAVLLANIVRTDAGAHRPLPADTELAQTIRVLARAQQDAVWARQQIGNQIRDLLNDFYPAAIIAFAKLPSGGLARPDARAILAAAPTPGAAAKLTPARLRRLLVKAGRRRDLDRDVERLRAVFADTYLHQPPMVENAMGIQLSALLRQFEAACAAAEELAEAAIAHFEHHPDAEIITSCPGLGNLAGARVLAEIGDDRSRFADARGLKAFAGSAPITRASGKKTIVLHRHIKNRRLAAVGPIWALSALRHSPGARRHYDARRAAGDWNHQAQRHLFNRLLGQLHHCLQTGQLYDEHKAFPPLLPRAA

SEQ ID NO: 396268 - protein, 387 aa, unidentified
MPQPNDLSRSLVALDQNTTIIAVVELSQSSWLIGGVVPGIERQPHKKLEPSPERLLAVLHRWRDEAVRAGRKITRIALAFEAGRDGFWLARWLRARGVEAHVIHPSSVAVSREHRRAKTDRLDTELLKRGFLGWLRGERGHCTMARVPTSAEEDAKRPHRERECLVRERTRIVNRMKGTLARLGIRNFKPTLRKAAERLATLHTPEGSVLPPNVSAELQRDMARLGFVVSQIKEIEGARQKRLEQEPETEPHAMVRHLARVVGVGVETADILVNEVLSRPMRDRRAVARYAGLTGSPDESGAKRREQGLARAGNARVRRGMIQLAWRFLRFQKESALARWYRARTADSRIGTRKTMIVALARKLVIALWRFVTTGETLEGVILRPAG

SEQ ID NO: 396269 - protein, 352 aa, unidentified
MIAVAREGRQAAETWKTIPHDGVRLRKALTLLVHEGERVRVCYEAGPTGFGLCRSLRKVDIDCVVVAPSLVPGKPGDRVKTDRRDARKLAHFLRSGDLTEVHVPEEAVEAIRDLERARDDAKRAERVARHQLSKFLLRQGRVWEGGSWTRKHRDWIRTQQFAYPAQQRVLEDYLKTVEDLAERVARLTGLLEELVQDTVLAPLVRALQAFRGISAVSAATIAAEVSDLRRFASAGQFMSYVGLVPSEDSTGQRRRQGRITRCGNGHLRRILVETAWHYRHVPRLSQELRRRSQGVADGVRRLAWEAQQRLHKRLYHLLHAGKSPQKAIIAVARELAGFIWAVGQEETLLAPA

SEQ ID NO: 396270 - protein, 519 aa, unidentified
MCSKVIQPGARRGIEHSPQPTVNNFAAQTSRKSFSKPLRPGKVPLGRIAPRRSRSDVPKPVRLQLRTPAGAAARSQTSERTEPCEGPYTRTTRGQPTMRRKERMKTYSELSHFGGLDWAKHQHHVCILDNTGQILERFCIEHSGPGWEKFREQIQKYPALGIAIETSQGAVVEQLLGSGVTVYPVHPKAAKEYRQRQAPSGSKDDELDSWSLADALRMDGGHWRALSPQDPMIEELRLLCRDEEELIEQRTALVNQLQAALGEYYPAALEAFADWTAPSTWEFIACFPTPQQLAGATVHRQRVFLHTHKLWRPGTADKRLEIFARADQFCGGEAVTRAKSRLALSLVKLLQALERQLDSYRAAIEQLFAEHPDHDVFGSLPGVGQKLGPRLLGSIGADRGQYPDVQGLQCVAGSAPVSFQSGQMRRVKIRWHCDRFLRHTVHLWAGCSLKTCTWAAAYYKVKREAGKSHACALRCLAQRWLKILWKMWQTHTPYDPEYHARNQQRHGSWVLQLNPKRLN

SEQ ID NO: 396271 - protein, 479 aa, unidentified
MIRSVGIDLSRTGSHQVRCLDEQARPCDSFSFDSTLEGLEKFEERIFSDGGTPTIVFEPTGLAWIPMAVYLRARHPECRLVKARLQKVAALRRYLRNRAKSDRVDGVTLAKMPFIDAEQLDEAYLPPAKYHALQRLTRQRERLMKSITIRKNRIGSIINGYLPGLRKAFTDEWSDRARLFYRQRLNPFTVVRDSKDALEALFVSAKARGAVTDSNRVYQTCQKLVELYDKSRAAGMINEDFFDDLQDEISCELRLMETEEAEVERVSGRIEELYQHLHPSDHLRTIPGIGVRTAQVFLAVIGDPNRFRNQSAFANWTGVVPGARQSADSEGKGLRMTKAGPAMMKRALYQAGDIARRYDPQLAALYHREMVHHGKTHLQAVGAVMSHLAARILAVLQENRPYELRDNQDRPISKMEAIGLIQQFRVPEGTRQARRRRKANEGRPTGRRTLEAARAPQSGLLIPPLRTVYRAEELESIAD

SEQ ID NO: 396272 - protein, 334 aa, unidentified
MKIFVGIDIAKLNHFAAAISSDGEILIEPFKFTNDADGFQLLVSKLESFDKNSIIIGLESTAHYGDNLVRYLVAEFYQVCVLNPIKTCQMRKNNVRKTKTDKVDTFVIAKTLMMQDDLRFITFFDLDMMDLKALGRFRQKTIKQRTRLKIQLTTYVDQVFPEIQYFFKSGLHQNAVYALLKEAPSPKEIASMHMTHLANLLKVNSHGHFTKEQAKELRVLAQKSVGANDSAISIQITQTIQQIELLDSQLEKIEVEMTDIMKFNDSVIMTIPGIGYINGGMILGEIGDIHRFSNPNKLLAFAGLDPSVYQSGNFQAKTTRMLSLIHISEPTRPY

SEQ ID NO: 396273 - protein, 421 aa, unidentified
MSYKIAGIDIHKRVLMVVVASVADAVADATGAAMEFECRRFGTGASERQHLVAWLQEHQVREVVMESTAQYWKPVWLDLEPHFEKLHLAQAQSNRAPKGRKNDFRDAKRLARRLLAGELMLSFVPEPEQRTWRLMTRGRLQLVRERVRLQNQVESLLEEARIKLSSVISDLLGVSGRRILEALSKGETDAVKLAELGDDRLKCTKEQLADALRGAPEPAHLQLLKLHLERLQLLDEQIEQLSRMSASALTNYQDAVVRLAAVPGFGAESSQQMVAEVGVDAEAFPSAGEFASWVGVCPGSNVTAEENQSSHCPKGNRYVRRILSEAAHAAVKKQGSHFQNIFRRFLPKLGYNGAIWVVAHRLARLTWKILHDGVSYIEQGEETNPRAKKRRAQKLAQALRRLGYSVTLTEINPSPMAQAST

SEQ ID NO: 396274 - protein, 344 aa, unidentified
MKISVYAVDLAKGKFQVHGFDSRGERRLAKTLSRAGMQRLFAAREERGEVVMEACGSAHYWGRYLEDLGYRVRLIAAQHVKPFVVGNKTDANDADAIYEASRRAGIRSVPIKSIAQQDALLVHAQRERLVKARTALANQLRGELAERGVVFGKKIGILHRGVVAFLEQAVGGDVTDYLQRWARERLDEWRVLDERIKDCEREMQHAYRTNPACVLIGAVEGIGVITATATVASVGDARQYASGRHFSAWLGLTPKERSSGQMRHLGGITKRGNSYLRKLFVHGARAAVRVAQRKTDVRSRWINALVERRGHNKAVVALANKNARIVWALLSSGECYRTPVAETA

SEQ ID NO: 396275 - protein, 419 aa, unidentified
MSFKIIKNNCCGLDVHKTWIFACIGITDSNNRTEYKQARFSSFTKGLNELCDWLAKYNCKDVCMESTGKYWIPVFNILEQRSLWVTLSHPKYTKPMKGNKTDRKDAKWICDLYMCGMVKPSFIPPADIRELRDLVRYRFKLTCMITGEKNRAQNCLTVSNLKLDDVFSDVFGKSSRSITEQILQHPGETFDVAPFVNSRCKTPIVEIQAAIDGAISKEQAVKLRQCLDHIDELNKHISEVEQEILRLSDKYEVALNLIRTVPGFDKNPLTAIQVLSEIGGDMSVFPTAKHLVSWAGCCPRNDQSNQKIKSTRISRAGSYFKPVLVQVANALIKSKKHSEFTNRYKRIKARRGHKKAIIAICRMILTAIWHILSDLKPYTPEGFLESRPVKEEKVLSTSQALNLLKQRGYIIKDKPLAVF

SEQ ID NO: 396276 - protein, 346 aa, unidentified
MKLYAGLDVSLKEISICVVDEEGKTVARGNCPADPEGILGWFRNRSLAPEKIVHESGMLSIWLQRGMARLGLPATCIDARKAHKSLSARLNKSDAGDAEGLAQLARTGWFTPVHVRSEGADRLRALVGARERLIRLRKDLEGHVRGVLKTFGIRMTGSSQGRQRQAFRDQLAAAGETDPLLHAIADGFIATHAVLCQAAADLDIAVKKEARDHSVARRLMTIPGVGAVVSLNFIALVDEPTRFGKTSDVGAYLGLTPKRHQSGEVDWSGRVSKCGDGVMRSLLFEAATTLITRVQKFSALKSWAIRLAGRRGFAKAAVAVSRKLAVLMLAIWKKETEFTWTKEAVA

SEQ ID NO: 396277 - protein, 387 aa, unidentified
MPQLNDLSRSLVALDQDSTIIAVVELSQSSWLVAGVLPGIERQPQKKLEPSAERLLGLLHRWRDEAVRAGKKITRIALAFEAGRDGFWLARWLNARGVEAHVIHPSSVAVSREHRRAKTDRLDTEMLKRGFLGWLRGERGHCTMARVPTIAEEDAKRPNRERECLVGERTRIVNRIKATLARMGIRNFKPTLRKAAERLATVRTPEGMPLPPNTLAELQRDMARLGFVVSQIREIEQARQKRLEQETETGPHAMVRQVARVIGIGIETADMLVHEVLSRPMRDRKAVARYAGLTGSPDESGARRREQGLARAGNARVRRGMIQLAWRFLRFQNQSALAQWYRARTADSRLGTRKTMIVALARKLLIALWRFVTTGETLDGVILRPAG

SEQ ID NO: 396278 - protein, 424 aa, unidentified
MKVTFQTCCGVDVHKSFLVATIIKTTGGIEPSYQKRRFSTFNNSIFEFKKWLLENECLYVCMESTGKYWIPVFNLLEDEINVTIANPKWVKAVKGNKDDTKDSKWIGDLFRLGLVRGSYIPCKKIRILREFTRYRYKLVSCRSSEKDRYQNALTVCNVALDSVVSDVFGKSSTSIIDYLLEQSGTSIDHEVIASKLLKRLKTKEDAVIESIEGYQMTDSPKYRMHLVRAHMDYITAAINDVDSEIESLISSDPDYQNAAELLCTIPGVKHDSAITIISEIGIDMSQFCTSKRLCCWAGLTPGSNESAGKKKSVRITRAGVYLKPALVQCAHAAVKSNKSPYYKKKYESLVKRHGKKRAIIAIARMILTAIFQMLTTGETWNPCNLYKIDMPEALLEKQKQKAIKQAQKLLIREGLLPPTELIAS

SEQ ID NO: 396279 - protein, 417 aa, unidentified
MNTMTMHPYAAFVGIDWADTKHDVCIQSADSLRREFAVIPHKVEEIDEWARSLHRRFSGLIAIALELSKGPLVYALQKYDYFVIFPINPSTLAKYREAFQPSRAKDDPTDAELALDLILRHPERFEPLQPQSIELRKLAALVEQRRRLVSDQVRLTNRLRNTLKQYYPQTLEWFDRINTKLFCDFIERWPTLTQVKRARTTTLMTFFRAGHTRNPALLEMRLASIKSSQHLTLDEAVIAPNKLHALMLVGMLQVILDAIKTYDQTIAELAPKHDDYELFSSLPGAGPSLAPRLLVAFGEQRNRFKNAAELQKYSGIAPVTERSGTKHWVHWRWRCPNFVRQTFVEWAAQTINKSYWAGEYYRQQREKGSAHQSALRALAFKWIRILYCCWQTKTQYDEAKYLKALQRRGSPLVAKAV

SEQ ID NO: 396280 - protein, 381 aa, unidentified
MTTAVTHKTNVHTTEATLFVAFELSEKIWQLGFTMGHGQKPRERNVTARHQERVLDEISLAKHRLGLPETAPVVSCYEAGREGFWLHRFLLAHGITNHVVDSSAIEVSRRQRRAKSDGLDVRKLLSMLIRYEQGEHQVWQVVKVPSVEAEDQRHLHRDLETLKRERASTTTRIQGLLSSQGIQVSTLAKLPEQLDTLRLWDGTPIPPGLRRRVLRVYAHHTFLTEQIAAIEAERRAQLQTSSEASIDRIRQLMMLKGIGINGSWLLVMEFFGWRAFKNRREVGGLAGLTPTPYQSGESAREQGITKSGNPHVRWMITELAWSWLRFQPESALSVWFRERFGDGGKRLRRIGIVAVSRKLLIALWRFLETGVLPEGAVLKEG

SEQ ID NO: 396281 - protein, 430 aa, unidentified
MHNKNYISVGIDVGSAFSFMTILAPDETVILKPFKITHNNKDSLERAVSEIKKAEELYSLESRTFLESTGIYHFPLFCYLVDCGFNASIINPIITHSTKNGNIRKVKNDKIDSKGIAKLGLSKDVPVSQFPEKLVLELRSLTRKYYDLTDERSAHINKLKGDLHTVFPQYLDIFCDVTGKTSTMILRQYGTPDKILRGHKKTMIEKISKASRKGLAKASERYEKLCAAANAAKTFGCQIDSIYFNISLTLDLVEKLDSALDSILNRIRQLITFNKNEKFIQQIKLLNTIPGVGFLTAVTIMCEIGDFSAFRNPKQLFAYFGLDPEVNESGKFVGTQLHMSKRGSRIARRAIFTVALASIRTKRNGEGINPYLRKYYELKSGQKPKMVAIGAVMHKVCNVVFAVLRDEKAFELRSPEEHCKQYQRPALAAA

SEQ ID NO: 396282 - protein, 400 aa, unidentified
MDKDRIVAGLDVHKDTIYLCVMDNTEAVIFVKVYGTLTPDLELMCSEMVSHGVTEAAMESTSTYWVPVWNALCESMSLKLVNPYFIKQLPGRKSDVKDAQWIAECLLKNLIRGSFVPDKTVQDMRKYNRRIFDLNEDLTYNSNKQDAALQRCGFRLSNYVSRVNGKSYQKCVRAIITGITDPEELVKLIHGKTLRKYGRNIIKDAVTGDFHQADICLLKQYAELIGVIERQIEECRNALIAMCQEHFPKQFKRLQSIPGVKERAASAIIAETGADMKPFEKATNLAGWCGLKPRNDISNNKVKSNRTTHGNRFLRQILIEISWVASRTRNCFFSNFSYVQCTQRHKNKMKIQVAIARKLLVAVWHMLTKDEDFIDVYLKRLEKQAEWQNDIQALESLLVG

SEQ ID NO: 396283 - protein, 355 aa, unidentified
MCAKKTGSIEDLAVVGIDIGKDTFHLVGFDRSGQVVLRKQIKRLALDATFEKLPRCVVGMEACLSAHFVSRTLRGMGFDTRIIPAVCVKPCNKGQKNDYNDAEAIAEAALRPNLRTVTEKSQDQLDFQALHRVRARLVSRRTATINQIRAFLIEQGIAVRSGLRALRNSFETILEQRRDEISARMRSILIGLYGDWLWLDDRIAAVSKEIEEISQTEESCANIMSIPGIGPMISTAIVAAVGQGEAFDRGRDFAAWVGLVPRQFSTGGRTILGRITKRGSRYLRMLFVQAAKVIMMRPHRWQAFSFGAWLERAVSRMPRNKAAIALANKLARTAWSILRHGTRFDTPRDLTMEAI

SEQ ID NO: 396284 - protein, 371 aa, unidentified
MKEYSTFIGMDVHKNSIDIAIADEGRKGQLRHYGKIDGTLTDLDKVVRKLVSKGNRLHFVYEAGPCGYQIYRHLTAQGFDCDVVAPSRIPKESGNKIKNDRRDALMLARLHRSGDLTPVYVPMAEDEAVRDLTRAREDAKSDEKRSKQRLQSFLLRSGIRYTGKTTWSKAHIRWLSDIKMPHQSQQVVLQEYIGTLNQCKERVQRLTEQIQQLLPEWQLFPIVQALQSMRGVSTIVAATTVAELGDLKRFRTPSELMSYLGLVPSEHSSGPKIKRGPITKAGNGHVRRVLTEAAWSYRMPARVSRVLLKRQEGLPESVCDIAWKAQVRLCSRYRRLWHKGKAKQVIVTAIARELCAFMWAIANEIDVPANA

SEQ ID NO: 396285 - protein, 376 aa, unidentified
MREKLRFLGLDVHAETIAVAVCESNGELRSLGTIANREDSIRKFIRKLGSPEQLRACYEAGPTGFVLYWQLTQLGVECAVIAPSLVPKKPGDRVKTDRRDALKLARCHRNGDLTAVWVPNEASEALRDLVRQREAAKQDQLRARHRLTKLLLRTGQRPPLGLKSWTERYMRWLAQVRYTQPAQEVTRLDCMNEVEHMTARVKRLEEAILEVVKQAPQAMQELIRGLQALRGIAHISAVTIAAELGNISSRFESARKLMGYSGSFPDENSSGKRIRKGGITKTGNAHLRRIVVESAWCYRHLPRVGEKLRRRHEGLPPEIIEIAWKAQTRLHKRYMKLTMAGKDQRKVITAVGRELLGFIWAIGVKAEQACQRSLAA

SEQ ID NO: 396286 - protein, 345 aa, unidentified
MQSGYTYVGLDVHKKTITWCAKKIDGTRVGHGTIAANRAGLSQWLEQLPRPWIGVMEATLFTGWIYDYLKPHAEELKVAHPLMMRAIAASKKKNDKIDAQKLADALRADLVPECYMAPEQVREMRRMLRFRNLLVRQSTRMKNKCGGLLMELGVEYNKKRLHQKQYFSELVGGFDPEIVPTSVISLLGMSRNHVELFRVGQKHLIKQLNNDPRLKERVARLQTIPGVGEITALTWALEIADPARFPSIARAVSYCGLTSAQIESAGKMQRAPLSKQRNKHLQTMLIEAAKLAPRHSEQLRALHERELKRGNRNRATLTVARKMVAHLLAVDKSGKDFEDKTVKEA

SEQ ID NO: 396287 - protein, 310 aa, unidentified
MEQVFVGIDVAKDRLDVHVLPGGKVFTVGRDSDGLASLVERLGAVRPYLIALEATGGFETVVAAALAAERLPLAVVNPRLIREFARAAGQLAKTDVLDARIIALFAERMRPEPRPLPDEQTQALAELVARRRQIVEMMTAERNRRRHLTNRRLLKSIDRLLKVLQQELSDLEQDLDDTIRGTPAWRETEDLLTSVPGVGDKLARALIADLPELGHLDRKKIAALVGVAPYNRDSGTLRGRRTIWAGRAKVRATLYMAALVAAHHNPVLASFYQRLLAAGKAKKLALVAVMRKLLIILNAILRDQRPWQNA

SEQ ID NO: 396288 - protein, 410 aa, unidentified
MEVVHARCAGLDISKRDAKVCVRIAGTGRRKTTETVTTWGSMTNQVLALREHLVAARVTCAVMEATGDYWKPFYYLLEDAGFELMLVNARHVKNLPGRKSDVSDATWLAQLGAHGLVRASFVPPEPVRQLRELTRARTAITRERGREVQRLEKLLEDAGIKLSSVASDITGVSGRAMLRALVEGQRDPAVLADLARRRMRSKIPALTEALTGRFTEHHAFLAGVHLDLIDRHTAAIEEITARIEVVIEPFQPFRELICTIPGIDTRTADVVIAETGADMSRFPTAGHLASWAGTTPGRNESAGRIKSTTTRPGNPYLQGALGAAAMTCARTDTYLGARYRRIASRRGPQKANVATQHKMLITIWHMGTTGTLYDDPGADYFTRAHPERAKNRAIHQLEAMGYRVTLDQAS

SEQ ID NO: 396289 - protein, 463 aa, unidentified
MNKTTGKGKKRKGRTPKQGLRVIRANVAGIDLGSLEHFVCCPPTPQGEINVQTFGTTTPELYRLADWLKEQKVESVAMESTGVYWIPIYEILERRGFEVLLVNARALSSVPGRKTDWIDSQWIQILHSCGLLKGSFRPGDDICALRSLVREKTTMEDQRSDWLRRIQKSLDQMNVCVHHAVSDISGTTGMAIIRAIVAGERNPAELAKLRDPRCRKSEKQIVEELTGNWRAEHLFSLKQALQMYDHICAIIAQYETEIHCMLKALQPPEHRDTEVPEVASKTKRKNFRHRGQEPMREALFRLIGADMTAIDGIGVNTAEIILSELGTDLSCFPSENHFASYLKLVPKLAISGGKPIPGKRYGTTTTRLGAVFRMAALTLRNSKTALGAEYRRIARRKGASVAVFVLARRLAILVYRLLRYGQAYVDEGMQAYEARFKAARLRTCKEIAKELGLTVLDPKEAVA

SEQ ID NO: 396290 - protein, 419 aa, unidentified
MSKSNIARQLAQVQPGTLHAGVDLALEQNVVVVINEKAERLDHFSFPQDRGGYDYFLRRLEGLRQKYQASGVVVVMEPSNYFWKLLARELEEKQITYHLVNAYTVKKHREGDQLDRSKDDRRDAGQIAELSRNGNYTETHLQKGAYEELRQYATLHDQSVQGIQRERQVLWGLVGQVFPELSRVFKNPVGETSRALLVTCASAAIIRQLSIEDFIAQVRAAYAGKRLLVSKLRLAHQLAATSIGVTEGLEAIQLAIQVHLAELQTFQKQLKRVTTAMATCLATLPEAPYLLSVKSLQAVSAAIFLAEVGDPKRYQAAAQWVKLAGIQPAPNNSGKKQRSQTPMSHQGRTRLRTMLFFTCLRMVRVDNHFAQIYAHLQRRQNNPLTKMQALGVLMNKLLHILWALIHNQTFYNSSFGQSI

SEQ ID NO: 396291 - protein, 334 aa, unidentified
MQNITLIGIDLGKHSFHIHCQDKSGKVLLRKKFTRTKLIEFLAGCASSTVMMEACAGAHFMARRIADLGHEAKLISPQFVRPFVKSNKNDFVDAEAICEAASRPSMRFVQPRTEAQQAMRALHRVRESLVSDKVKTTNQMHAFLLEFGISMPTGVAVVKRLSTVLAENELPPYLAQLLMRLHAHYIYLVGQITELEIALEQELSRDETGQRLQTIPGIGPITASVLSSQLGDGKQYSCSRDFAASTGLVPRQYSTGGKNTLLGISKRGDKNLRRLLVQCARSFIQRIENQSGRLADWVRALLARKHSSVVCCALANKLARIAWAITTQQTVFER

SEQ ID NO: 396292 - protein, 417 aa, unidentified
MKAFPETIPIERYVAIDSHKHYVMVGGMNKQREWTLRPRQVQMHRFRAWAAQNLKAGDAVVLETTANVWDIYDIVAPLVSKTVVANAYKVRQIAEARVKTDKEDVKRLITLLIADIVPEVWVPPMHVRELRSLISFRWRLNKQITMSKNRLHSVVQRFNLTPPEGNLLAEKNQGWWTEQEFSELTGFQVKHDLRIVEQLETHKAEIDQKLAELSNTAPWADDMVYLMQIPGFGLLTSMILLAAVGDIERFSRPKKLVGYAGLGAGVHSSGQKHQEKSITKQGRKELRWVLVQAAWAAVRSDPYWKAQYQRLTKVKHPNKAIVAIARRLLVSAWHILIKRETYHHCDNETIAYKMMIWSQRMDEKALRGLTRQQFIKYGLLRLGVGQDLTRIVRKGVPRRIAPTGEVLKLRPDLKPPG

SEQ ID NO: 396293 - protein, 448 aa, unidentified
MEIVYERCAGLDVHKKNVKACFTGPGRAGRRTKETRTYLTMTEDLLQLRDWLKEQGCTHIALEATGVYWRPIYNLLEGDFEVLVVNAHHIKVVPGRKTDVKDAEWIADLLSHGLLSASFIPTAPQRELRELTRYRTSLVEERAREVNRLQKTLEDTNLKLGDVVSDVLGKASRLILRAIVEGETDARQLASLAVGRVRADQQTLERALTGKVTAHHRFMLSQHLTLIENLDAAIRRVEEEIARRFTPPEPPTGAEDQSAPEPVAEAESASSEPSSEPLSWQEAVQLIEQVTGISERVAQGLLAEIGVQMSQFPSAKHLASWAGICPGNHESAGKRLSGKTRKGNPYARRLLIQAAHAAAHSKNTYLSAQYRRIAARRGPKRAAVAVGHSILVIIYHLLRDRTPYQDLGGNYFDEHDRQMVQKHLVRRLERLGYQVELQPRAQTEEFLA

SEQ ID NO: 396294 - protein, 405 aa, unidentified
MRQVFVGLDWAEDHHDVFVEDDTGKRLGGGRLPEGVEGVARFHELVAGHVDDPADVIVATETDRGLFIGALVAAGYTVLAVNPMSTSRYRERHSTSGAKSDPGDAKVLADLARTDAHNHQPVAGDSELAEAVKVLARAHQTMIWSRQRHTNQLRSTLREFYPAALEAFDDLAGRDALAVLAIAPTPTAGKLLSRSKIAAALRRGGRQRRIDERTVEIQTALRGPQLEASALVADAMGASVTALVAVIAEMQIQVDRLEAELADRFEQHPDAKVIRSLPGLGMTLGARVLAEFGDDPNRYADAKSRKNYSGMSPITRASGKHHVVLARYARNRRLADACYQWAFATLTASPGARLFYDQRRAAGDTHHRALRALANRLVGILHGCLRHHTIYDERTAWAHRLNLAA

SEQ ID NO: 396295 - protein, 295 aa, unidentified
MKVLIGVDPHKASVAVAAVDEAKGELLERAAFPQDRVGLRALERWARRFPERRWAMENARGLGRHLAGRLAASGESVVDVPPKLSARVRVLSSFAGSARKNDGLDALATALAASSNERLAAMDLEADSEVLRLLSERREDLVAERTRALNRLHGLLRALLPGGVAGKLSADRAARILRGMRPQGSASDRLRRRLASEVLRDVRALDRKIADLNTRVEAEVEISGSTLTEIFGVGPILAATILGTVGDVGRFPSKAHFASYSGTAPVETSSGQVVRHRLSLGGNRKLNYALHMVAS

SEQ ID NO: 396296 - protein, 324 aa, unidentified
MAKRTMICAGIDTGKHKLDVAIDGSSEQLQVDNAPEGYKVLSDWLRQHRVKRVGIEASGGYEQAVVAELRRKRFVVVVFQPAQVRAYARFKGQRAKNDKIDAALIAACTAAVKTVHDAPDPRLLPFAEQLTMIDQIGEDIARLNNRLESCRNVRIQQVWKEDLARLEKRKRAELKALVAAIREHRDLAERLELIYSVSGAGMPTAVAILVRMPEIGKITREQAAALAGLAPYDDDSGQRVGGRHIQGGRNRLRRALYTAALPASMRWNPQLKELYKRLIAAGKLHKHALVACARKLLIFVNTVVARGIAWQKQPPQRNEVPATA

SEQ ID NO: 396297 - protein, 412 aa, unidentified
MNVRVEKACGIDVHKSLLVATILNSEGIKETKEFSTGIEDLINLREWIMARHCQRVAMESTGIYWTPLYTCLEGKVETIVANPRHIKNIPGRKTDDLDSEWIAELCLNGQIKPSFIPSKGIRELRDLTRTRTKTIQTMTAFKNRVHKVLEKANIRISGVLSEIFGIAGLQILNGILSNKNIDDVLKDVKRIGKKKAAIKEAVRGELSQTDIWLIRECLETIDFLKKKINLLDSMINQQIKKEQKQNQLEILMTIPGISYTSASAILAEIGDINVFPCPKSLVGWSGLAPSLNESAGKSSNGHITKKGSKYLRRMLVQCAHVIARCRPNKLRFFFQGILMRKGKKIAVVALARKLLSIIHHLLKNNENYTEDEQKPKKIRLPKFQSISELSLDEMIDIISKAGYAVEEISSNG

SEQ ID NO: 396298 - protein, 312 aa, unidentified
METIVGIDVGKRELFIHWNKKTVLILNTYKTINHWLKQNKKQLCSVSLFAFEATGGYEANLKKALHKNKLPYRMVHANHVRNFAKANGILAKTDHIDAKVIAEYASTMKVVPKEVSEEYKELKAVLDRRDQLVGIRTQEKNRLEKPIGKLMQKSTKKHIAWLSKEIKQLEDEIKKQLKENIKLNKLSNLYQSIPGIGLLTSLRLITDLPELKSSSAKSLSSLVGVAPFNRDSGKMRGKRRIRGGRGRVRSYLYLSVLSAIRYNSLIKGFYLKLRQKGKPGKVALVASMRKLIHIVKSITDRQTPWVETIKSA

SEQ ID NO: 396299 - protein, 319 aa, unidentified
MTAEIFIGIDVARDSLEVAVRPTGEQWSVGNQSVGIAELLVRLRALRPTLIVLEATGGLELPALGVLGSAGLPVVAVNPRQVRDFAKATGKLAKTDAIDAQVLAHFADAVRPAVRPLPDAATRALSALVARRRQLVEMLTAEENRRASAAATIRPDIQEHIGWLRKRLRGIDQELSQALRTSPLWRAQEDLLRSVPGIGPVVAATLLADLPELGVLSRKPLGALVGVAPLNRDSGTLRGKRTVWGGRSTVRAALYMAALVGTRHNPVLRALYLRLLAAGKTKKVALTACMHKLLTIINALLKHGTPWATPASLGAANSG

SEQ ID NO: 396300 - protein, 339 aa, unidentified
MLIIGCDYHPSFQQIAFVDRETGECGERKLTHKEEAESFYRDLNGRSVRVGMEATGHARWFERLLAEQNFELWIGDPAEIRAKRVRKQKNDRQDAEHLLQLLVEDRFPQIWVPSPENRDLRQLLWHRHRLVQMRTRVKNQVQAIALNEGIRRKKGLWSKLGRVQLESLSLAPWSARRRQDLLELLDRLNPKIDELSTAIQQAAEQRPEVRRLMTHPGVGPITALAFVLILGVPERFQCGKQVGSYLGLIPCEESTGGRQRLGHISKQGNTLLRFLLIESAHAVVRYDPDWRRRFLHLAMRRGRPIAKVAMARRLAVRLYWMWRKAWDYQQTLKFGSHVG

SEQ ID NO: 396301 - protein, 323 aa, unidentified
MNIKRIGLDLAKNVFQIHAVDHHEHVVVRKSLRRTHMHAYFSQLAPCTIGVEACASSHYWARELTRMGHTVRIIPPKFVKPYLKGNRNDANDAEAICEAISRPAMRFVAVKTQRQQTLQAEHRVRARVIKSRTALCNEIRGFLGEFGVVLPVGISQLRKALPEILSQQEQWDDRFMRLLCELAEELRMLDDRVAGHDRRLAEAAREDIRIQRLMKIEGIGLITASAMVALLGDATQFKNGREMAAYVGLVPRQHSSGGKQQPGHISKRGDSYLRTLVIHGARSVLKTCAGKEDRRSQWLQSVAERRNRNIATVALANKNVRIA

SEQ ID NO: 396302 - protein, 375 aa, unidentified
MTAKTRPELSVNEPTLYVAFELGKKDWKLAMTSGFGIQPWVRTVASRDWPAVERTIAQGRARWGLSGATRVVSCYEAGRDGFWIHRALTALGIVNRVVDSASIEVSRRARRAKTDRLDALKLVTMLVRVWAGERRVWSEVRVPSVADEAARQVSRERTALTQDHTRLVNQMRGWLATWGATLPARRRGAWWTALRDWAGAALPTSVQARLARAERRRAGLEAQIAELEAQQQGAVTTAAPSAALPQLVQLKGVATTSAAVLLDEGLVWRAFRNRRQIGGLLGFAPTPYDSGESTREQGISRAGNARLQAISIQLAWNWVRWQPQSALTQWYRTNFGHGKRARRIGIVAVARKLVIALWRYVTTGVVPAGAIVKGA

SEQ ID NO: 396303 - protein, 343 aa, unidentified
MQSITTIGLDIAKSVFQVHGVGADGRVVVRRQLKRRYVLAFFQKLPPCLVGIEACASSHHWSRELQTLGHTVRLMPPAYVKPYVKRHKNDAVDAEAICEAVTRPNMRFVATKTPEQQSGLVLHRTRHLFIRQQTAVINAIRTHLAEFGIVAPVGRHGVEELLNVVADPNDKRVPAIARACLMAFGAQLRRLKEQILEFDRMIRAWQRSSEMSMRLDDCPGVGPALATALVATVADPKAFRSGRNFSAWIGLVPKQHSSGGKDRLGSISKRGDRYLRGLFVAGALAVIRYAKIHGTKHRPWLTALLARRPTKVAAIALANKIARMAWAMMAKGERYKEPVALAA

SEQ ID NO: 396304 - protein, 341 aa, unidentified
MPVVTVGIDLAKSVFAVHGVDEAGKAVLIKPRVSRDQLLALIAQLPPCLIGMEACSGAHHWARMFQQYGHTVKLMAPKLVAPYRMSGKRGKNDAADAAALCEAVTRPSMRFVPLKDEHQQATLCLHRTRQGFIEERTAIYNRIRGLLSEFGVVLPQSPERLRRDIPVHLDALPGWARRCISDLLEHVGNIEARLAEYDRAISEITRDDERSRRLMHLRGIGPTTASALLASIGAGRDFRNGRQVAAWIGLTPSQYSSGGKERLGAITKTGDAYLRNLLILGARSVMASLGDKQDRFSRWVRSLIERRGYWRTAVAIAAKNARMAWATLKYGEAFKHEPAIA

SEQ ID NO: 396305 - protein, 348 aa, unidentified
MFIGVDVHKNTHTAVAISPFGEKLFEITVGNYQKDFEVLTEKVETMKGSLSPYFGLEDCHGYGERLAGYLVETYPVIHVPSIMVDRLRQNATHPEKSDSLDALGVAKVMIQSIDTLPVYTISEESKRAKQIKELSMDRAYVVEERTRLKNQVHTLLYRIYNTAYATRYKDSFSLKALRYWSMARPVCDPFLLKTMKRKVRRLLAIHTEVADLAKDMQTLLNEGGYTINTASGCGVVIASAIVGEIGDIARFRSPGALAKYAGCAPRECSSGKTSRHRKTRSGNRRLNCAFHRMALSQISRMGNEKAKTYFKRKVSEGKSKPQALVCLRRQMVNIIWCMMKNKTVYRMA

SEQ ID NO: 396306 - protein, 349 aa, unidentified
MDTHGQTNHAAALDQLGRQLGDQEFPTTPDGYRALLRWLRGHGQLELVGVEGTGAYGAALARYLRAQGASVVEVDRPDRRARRARGKSDPLDAYAAARAALAGTATGTPKSRDGRVEAIRMLRVARSGAVKARSQAINQLKALLITAPAALREQLRHLSTTTLLATCAQLRPTVELADPEQAAKTALRRLARRHQHLSEEIADADAQLKTLVTAAAPQLLALSGVGVEVAGQLLVSAGDNPERLHSEAAFAHFCGVAPVPASSGRTHRHRLNRGGDRAANNALYIVVLGRLRYDPRTRVYTDRRTKQGLSKPEIIRCLKRYVAREMFTALTARAVDSPPATTSTLSTAA

SEQ ID NO: 396307 - protein, 340 aa, unidentified
MELYGGIDLHSNNNVLALMNAAGQRVDRRRLPNDLQAVKAALAPYRQHLRGIVVESTFNWYWLVDGLMEAGYRVHLANTTAIQQYNGLKYSDDDSDALFLAQLLRLGILPEGYIYPRAERGIRDLARKRAHLVRQRTANILSIQNIIQRSAAKRLKGDKVKRLTIIDVEPLVGCAEVALAVDTTVQVSQCVEQQIARLEQAIVQRIKLRKEFAVLQSIPGVGTILALTIMLEAGPIARFAHVGNFSSYCRCVGSTRLSNGKQKGKGNVKNGNRYLAWAFVEAANFAVRYSAPIRRFYERKSAQTNSIVATKAVAHKLARAAYHMLRQQKKFEVSMAFGTE

SEQ ID NO: 396308 - protein, 338 aa, unidentified
MTNFVGVDLHRNNFTYCIRVNGEERKIGKCEITELKGFAAMLGPNTAMAVEATGNTFMFCSSLRAYVGRLVVVNPSQFKVISMSTKKTDKHDAKVLAEFLEKDMLPEVRMKDDLQAKISSLTQTREKLVQLRTVLKNKVNNLLAANFIVLKREELSTEKGLVKALSYRIDPITDTEMLVVVEQIRSLNKSIEKLDKAIEDHGSKMDGFSNLKSIKGIGTKGAAILLATIGNIHDFRSSKHLAAYIGIVPRVSNSNDTVCHGRITKNGSKTARTALVQCALIAKRYSPYLNAFHESVKSRRGGAKANIALARKFLDIVYKTLKNNWMFEDFSQFKLVKN

SEQ ID NO: 396309 - protein, 415 aa, unidentified
MMEQRNKVCGVDIHKRFLIATILSRDGTKIQKRYSTDIDDLFGFRDWVLENNCDCVAIESTGVYWYPVNAVLENKIELILANARQIKHTPGRKTDSIDSEWIAEVALNNLIYPSRIFPKEERDLRRLTRTRESLVKMRSQIKNQVHQGLESCSIKLSSVLSDNFGKSGRHILDGLIKGENIDRIIEEIPSKRVKNNEDKIRAAIRTGLDETQIFLIQSHLNTIDSLTKKLDEIDSEIKDKISGRKKDLQIAMSVPGIGFTAAATILAEIGNYRDFSTSDKLASWCGIVPNVYQSADKLITGSITKQGSKHIRWMLVQVAQAALKKRESRFRRFFLRIKARKGHNVAVVALARKILCILYHLLMNQEMYQEDGVTKSRQSKIDWSSARIDKMSLQTMIEIIAKAGYEVKKIEVSGG

SEQ ID NO: 396310 - protein, 356 aa, unidentified
MTIVAHAHPFVVGVDTHARNHALTVLAAATGEVVAAEQFPATSAGMARAVAWAARRTGADLATLWVIEGVATYGARLARTAAGAGYQVVEAARMNARAHHAVGKSDPLDAHRIAAAVLPLDVDELRRPRRDEGVRAALRVLVAARDHMTAERTATVNALIALVRVVDLGIDARRPLTGKQIAEVSRWRTRDEEIGLTTARAEAVRLAKRVADLDDDIAANTTTMAELVRQSPAAVLLEKTGIGPVTAAIVLTAWSHPGRVRSEAAFACLAGVNPIPASSGNTVRHRLNRGGDRRLNRALHIATITRMTHDPDTRAYVERRRAEGRTTKEIRRCLKRYLARQIYRTLNAADTEPSPA

SEQ ID NO: 396311 - protein, 429 aa, unidentified
MNYTQNAKIEQVTDATMVVGVDIGSQLHYARAFDNRGRELTKKVFSFQNDIDGFNSFNAWMEKLMSGNGKTDVLIGCEPTGHYWFALARYVEDHQKKLVMVNPFSVKKIKELDDNSPKKTDAKDPKTIAKLVVDGRYSIPYMPEGIYAEIRDLVYSRDRIMKQHNIAANRIQRWLAIHFPEYLGIYNKFDATSGLTVLEKAPMPKDVIALGVDGIRKIWHEKKLRGRGVTEGRAKTLVEAAHNSVGIDGGYGTKSELFMLLEEHRLWTSQLIAVNKVLDDMIRKVQHVEKLLAIKGVGLVTIAGFIAEIGDIRRFKSPKQIQKYAGLELVENSSGKHKGRSRISKRGRRKLRKILYQVMIPLLARNAEFRDIYDYYVTRVKNPLKRRQAMIAVSCKLIRVFYAVLTKGLDYDRMKMKSDIHRDSDLIAA

SEQ ID NO: 396312 - protein, 347 aa, unidentified
MKQVITIGLDLAKHVFPVHGADAEGSPVFSRKLRRSEVLRFFEKLPPCLVGMEACGSSHYWAREIAAFGHEVRLIPPAYVKPFVKRGKTDAADAEAISEAVTRKTMRFVPIQTVEQQAAAMVLKTRALLVRQRTQAVNALRAHLAELGIIATAGLARIEALVAIVRDETDARLPAAARFALMAIADKIEASGDQIDRLERAIVMEAKRDEDMRRLTTIHGVGAITAATIKALVPDPGGFKSARHFAAWLGLTPRSHSSGGKERLGRISKMGNPELRVLLVVGATAVLRVARNDARTRPWLKALLARRPFKVAAVAQANKTARIIWALLNRGGTYRRPDPLVITAVAV

SEQ ID NO: 396313 - protein, 430 aa, unidentified
MKSNTQNAKIEAITEKTLVLGIDVGSEMHYARAFDYRGIEYSKKPFKFSNTEAGFVTFKEWILDLKERHEKDKVIPGMEPTGHYWFNLGKFLQDNEMKPVLVNPHHVKKSKELDDNNPTKNDRKDPKVIAGLVREGRYMIPYLPDGVYADLRTASNIRFQLQAELTRIQNRISRWFNIYFPEYKTVYGKPDAKSGMLILKAAPLPEDILMLGIDGVNQIWRDAKLRAVGKARAKTLIEAAEHSVGNKEGAVSARMEIRMLLEDYESRNTRLQEVMVLIEELVRKISMAEKLLEIKGVGIRTVSGFLAEVGDISRFNNPKELQKLAGLALVENSSGKHKGETTISRRGRKRLRYLLFEVAMSLVSKNQEFRELHNYYTTRRLNPLKKMQSLMAIAAKLIRVFYAMLTKGVDYNPKKMVSDIKRPAVYLQAA

SEQ ID NO: 396314 - protein, 385 aa, unidentified
MILVGIDIGKNKHTFSIIDKNSGEILLSPSDFSNNLKGFLFLIQKLSSYTKSELLIGMEDTGHYHFALLKYLLDRRYTVALINPTTTDLTRKLQGGITKNDPLDSLTICDVISSNHRNKPYRVTTLNRFDLYEQKQLTRHHHNLKEELNTYKNRLQKCIDIVFPEFNSLFHSKYGIVYMNILKAFSSAKAIANADIRSIRKCFEFKGQGKRISLSAEQLKLTAKSSIGIPSVAEEIQIRHLVSQIELLEKQLSEIDKRIEEFSLKNNSPILTIPGISHFSGTSIISELGDICNYTKASQIIKFAGVAPYHYESSQFISRTRFYGTSVVDTAITKKGSKYLRKTLYQIILPVISNNEVFYAYYTKKLNEGKGHRCAQGHCIRKLIS

SEQ ID NO: 396315 - protein, 391 aa, unidentified
MKGVSMVIIGVDPHKRLHVASVVEPATNGQVAVLQVEASLAGYRRLLKWGGGFGERRWAVENARGLGRHLAQWLLARGEVVVDVPSTATARVRELSRGGRRKNDVIDAAAAASVAALQGEANPVLAEDLSTVLALLDERRNNLSTQRTRLVNQLHAMFRDLVPGGAPTDLTATIASGLLTRVRPAGPVEAARKQLARDLVAEIRDADQRLKALTVQIADTVAATGSRLTEVDGVGPVVAARLLARTRRASRFPTAAAFASYAGVAPVEVSSAERVRHRLPRGGDRQLNFALHIVALTQVRMRSSSGRAYYDTKIAAGKTHNEAMRCLKRRLADHLWRLMIHDQGSRAAGPGGHQGATLQSSAAGSTPTASSSEKSLPEPATPDSTTGRSAA

SEQ ID NO: 396316 - protein, 356 aa, unidentified
MKTLKSIENFITNKTVFCGIDVHKSHSNLCYFCEGTVIEKMQIPSESEALLNHTARCYQSAAGVRFVYEAGFSGFHLYRRLNAAGYNCIVTPPSRIPSLHDKIKTDKLDAQKLAQFLAGGLLKSVFVPPLSIEADRQLLRLRASSQKKLTRVKNQIKSHLYLQGLRLPQTMGNRWSRKSMAWLENLEFEQPGFRLVLDEYLVEYRFYRNTIAELTRKVRALSRIEAYQAHFQRLVSCRGVGLITAMTYLLELHDVSRFPSGKKLGGYIGITPSQHSSGEHVRLGHITREGNAHVRRVLVESAWTVIRHDPFLREKYNRIRAKGTNGKIAIVAVARSLAVRLRRCLLDDVPYQIGIC

SEQ ID NO: 396317 - protein, 416 aa, unidentified
MKIYPRTRPIQRYIALDIHKEYVVAGGMSARQEWVLPPHRIEMSKFGEWAKKNLCEADAVVIETTTNVWDIYDIVQPLVGHAVVAHAGAVRQIAEARVKTDKEDVKRLIRLLIADILPEVWVPSTPVRELRGLISYRQRLVKTGSMIRNRLQSLLHRHNLLLPEEGLADGDWWEQQEKIPAVEKLQIRQELAMLERIEKYKVEVDQELGRQSLGEMWGQQALRLMQLPGIGVVIAMTILSAIGDIHRFADARHLVGYSGLGAGVHDSGKEHIEKRITKSGRRELRWALVEAAWRAVRMSPYWKEQYEKFLKRMRRPNQAIVVVARKLLVAVWHVLSNEETDERASEEDLAYKMLLWSWSLSAEARQGLTHKQFAKYALMRLGVQTDLTRFVRGKVPRRIASREEVLVRMAELGLNG

SEQ ID NO: 396318 - protein, 320 aa, unidentified
MDADTGEIVNKQLKRAVFLEHFANREPCLIGMEACGGAQHWARRLIEMGHQVKLMPAKFVKAFVIGNKNDPADARAIWMATQMPSKAVAVKTESQQAVLALHRLRQQKIKMRTMQMNSLRGLLSEYGEVMAKSRGALDKAIPGVLARLAERLPAMLIESLRDLWNDLDRLDKQIAEIERRLQTWMKEDKACKAIAAIPGVGLLTATATVASMGDAKAFKSGREFAAWLGLVPKQTGTGGKVQLLGISRRGDTYVRTLLIHGARSVLFHAKHAGTWAEQMQKRRPANVVTVALANKMARTIWAILAHDRPYKQDHVSTRPT

SEQ ID NO: 396319 - protein, 328 aa, unidentified
MENISFFIGIDVSKAKLDVTILRPDGRFRDKKFDNSARGHEALVAWLRQHEVSSAHICMEATSIYAEDAALHLTFSGYTVSVINPALAKAFAQSEGIRVKTDAVDARLLARFCQEKRPPQWEISGPIERRLRALVLRHQTLTDMHSQELNRRETARDVQLESIEAHLAWLEEEQKLIEKKIKDLTDNDPDMKSRKRLLDSIPGIGPKTSAVLLAFVGEKLRFGQARQFAAFAGLTPRHHESGSSVRRASRMSKAGNVSLRRALYMPAMVALYKTDWGKAFRARLAEKGKAPKLIIGAMMRKLAQVAYGVLKSGRPFDATLHTGNACMA

SEQ ID NO: 396320 - protein, 369 aa, unidentified
MADRITYVGLDVHKDSIVVAVAAGGLRGEVREYGRIANTPTALDRLLRKLGGDGIRLRFCYEAGPCGYGIQRRLSARGHECLVIAPSLIPKRAGDRVKTDRRDAASLAKLHRAGELTAVWVPDARHEAMRDLVRARLDAVHSLRRARQQLSGFLLRQGCHYGRPAWTRLHRRWLAGLKFEQAVHHIVLEDYIAAVEAAEARRNRLTAQIEAMLPDWTLAPVVAALQTMRGMALVNAASLIAELGDLSRFANPRQLMAYLGLVPSEHSSGASVKRGGITKAGNAAARRLLIEAAWSYRFPARLSRELLLRQERQPRLIREIAWKGQLRLCARYRRLARSGKPANIVTTAIARELSGFVWAIARQVAVTTD

SEQ ID NO: 396321 - protein, 450 aa, unidentified
MGNGSGVSRGDRNRNARLARLRVLVPATNAIVGIDLADKKQMVVVTDHDSKVLARKTFRCRAWNLGAALDWAAERAAAKGWAGVTVACEPTGHRWRVLGQLAADRAMPFVCVQPMLTSWARRSEDLTSDKTDEKDAVLIARLTAQLRCYVPAPVDVTWGRLRHLGARREQLVIEMVSQVQQIRALLECVWPAALDTAKQPFRSRTWAAAMTVICGRDGGDLARTRRLGAARFEQAVRREITRRGGCKPSLRILRHLFTALTDPTGVTAHRPGALERVAFLLQDWQAAADRLADTETRMTDVLDELKLTELVTSIPGLSAVGAAAILAETGDPNRFATVRALVKHAGLAPREKLSGTFVGRTKLTGQGRPALRLAAWRAVWGAQRGNAVYAARYHHLTTRETNRLTATQAQTVIAAAILRQLHALITTGQAWDPHIATHGANGRRQLALAA

SEQ ID NO: 396322 - protein, 358 aa, unidentified
MPSLAELVDAVIGVDTHRDTHEAEIADATGTPIATLKIRNDSAGFAAMFAWIAEHAPGPRIAVSLEGTRSYGVGLARALTAAGVMVLECEQPNRKQRRGKGKSDPIDAHLAVLAALRLDADRLPSVRTDGDREALRILLGARQDVSTATTAQTNRLRALLLSGEDVDRQSARGALTDAALAALARRRLPSGASRQHTVRHAEIRRLALALREAGQQLKQNRKELQAIVDDLAPGLTDRYGVGPVSAAQAVVSFSHPGRCRNEAAFAALAGTSPLPASSGRTVRHRLNRGGDRGLNRAIHTIALTRMRSCPQTRAYVERRTAEGKSSREIRRCLKRYIARELYRTLTLAMTPLTQQSAA

SEQ ID NO: 396323 - protein, 356 aa, unidentified
METAYDGRQVVGMDLHRRRSVLVRMTEDGQRLGTVRIVNTPQALRRELARAGKSPKVVLEATYGWYWAADTLAAAGAEVHLAHPLGVKAFAYRRVKNDARDAADLADLLRMGRLPEAWIAPAEVRELRELTRYRQKLVHLQTSCKDQVHAVLAKLGVPVTCTDIFGTAGSAWLDALALPQPYAGKVTSLRQVAGALTAEITMLSEVIADLVAGDRGYQVIRQLPGIGPVLAAVIVAEIGDVTRFGNAGQLCSWAGLTPRHRESDVKVTRGHVTKQGSRILRWALIEAIQHQPAGSRPREAKDAIIARRGTQARNIAKVAAARQLLTLVFYGLRDGQIRCLSPRSGQPATTGAEPTA

SEQ ID NO: 396324 - protein, 420 aa, unidentified
MEEMPERELFVERIAALDIGKRELEVCVRLPSDRPGRRRQEIRTYGATTRSLLTLAGWLAEHGVTLVVMEATSDYWKPPFYLLEAEGFECWLLNAAQVKNTPGRPKTDRQDAIWLAKVAERGMARPSFIPPKPIRRLRDLTRYRRALTHDRTREKQRLEKILEDAQIKLSAVARDILGVSSRAMIEALIAGQRDPKVLAQLAKGRMRIKISALQEALTGHFDDHHAFMCQIMLDNIDRLCAQIDNLTTRIEELIAPFQHQVDQLDEIPGVGRIGAQDILAEIGVDMTMFPTDAHLVSWAKFAPQIKESAGKRKGSSTTGQGNPWLGGALGEAATGAARSPTFLAARYKRIAKRRGTRRALVAVGHSILTIAWHLLSDHDAHFVDLGADWHTSRINPEQQTRNLVRQLQRLGHTVTLEPAA

SEQ ID NO: 396325 - protein, 369 aa, unidentified
MKKSIKYVGMDVHKKTIDVAIAEGDRDGEVRHYGTINHDPDSMAKLLRKLASTGGELRFVYEAGPCGYQLYRHLTGNGLRCTVVAPSLIPRKSGNRIKNDRRDAIALARLHRAGELTAVQVPAPEDEAMRDLTRAREDVKIAERKAKQLVSGFLLRHDFVFSGRTPWSNAYWRWIAEIKMGHPAQQIALQEYVHAVKACGEQGDRLTAQVHELLLQWRWAPVVKAFQAMRGVSVIVAVTAIAELGDLGRFETPSKLMAYLGLVPSEHSSGESRKRGGITKTGNGHVRRVLVEAAQAYRLPARISRTLLVRQQGVPPEVRKIAWEAQLRLCSRYQRLVGRGKPANLVVTAIARELAGFMWAIAREVPAVA

SEQ ID NO: 396326 - protein, 339 aa, unidentified
MVELYAGLDISDKMTHVCVVDGAGAIKWRGVCATEPEVITKTLGRHARGLCRVVLETGSLSAFLYHGLAERGVPVTCICARHAKGVLSTRVNKSDPHDAEGLAQMARTGWFKSVLIKQEATHIDRAQLKIREQLIKSRNAIANQMRGLLKLFGLRMGKITTPGKRAERLVTLFAQKPELKPVMQPLVDSLDALEVQIRRATKLLAASAAADPVAARLMSVPGVGPITALTYKSSIEDPNRFARGEDAGAFAGLAPRRSQSGERDHMGRISKAGDPMLRSALYEAANNLLVRVKRSCALQEWGKRIAATKGGKRARVAVARKLAVLLHRLWQSETEFSWA

SEQ ID NO: 396327 - protein, 406 aa, unidentified
MEVLYPRCAGLDVHAETVVACVRTAAGSTVHREHLTVATTTRGLLTLAEWLTEHQVTHVAMEATGVYWKPVWHVLEGQFTLELANATHIRNIPGRKSDFNDATWIADLLALGLIRGSFVPPAPIQELRDLTRTRTQLVREIRRHTQRLQKILEDANLKLTEVISDILGTSGRAMLQALIAGQTDPEQLAALAHPRIRASRAELAEALQGRVTQHHRFMLRLHLDQITRLEQTVAAVEARIEEYLEPFREAVDLLLTIPGVRVTAAAVIVAEIGTDMARFPTAGHLVSWAGLCPRLDESAGKRRSTRTRRGRWLKTLLVQVAWSAARTKDSYFHAQFLRLKSRRGPKKAILAVAASILADIYVMLRDRVCFNDLGAQYFAQRDKTKLTNRLLKRLRDLGVDVEVKAA

SEQ ID NO: 396328 - protein, 313 aa, unidentified
MEILHDCCAGLDVHKKTVVACVRRVGPGGTVSSEVRTFGTMTAELVALSDRLQAQGVRHVARESTGVYWKPVFNLPEGDFKVILVNAQRLTTVPGRKTDVKDAEWIAQLLQYGLRSPSFIPPPEIRQLRDLTRQRTQLIRDRAAVANRIQKVLEDANIKLGDVASDVLGASGRAMIQAIIAGEDDPGHLAELAKRRLRGKIPALRQALHGRVTEHHRFLLQALLDQIASLEGLIARFDPRIEEAMAPFAAAAERLRGIPGVGQQAAEVITAELGTDMAQFPTAGHLASWAGLCPGNNESAGKRRSGKTTKGSQ

SEQ ID NO: 396329 - protein, 331 aa, unidentified
MPTSSTLLRAYLGIDVAKLKLDVVLLLEDRHVHHIFANSEEGFAALHTWIQEHGTFELSICLESTGSYSDAIVRFLQTHGYVVSLLNPAVLVSYRKTKNMRRKTDKVDAYLLALYGKDEQPSAWIPISDEVMRLRSLLAYRDDLVRTSVQERNRLKAGRLDASLIKLITDHVNWLSERQKGVEQTIKQLLENSDELKTPWLRLQTIPGFGGYAAASFIAHVGAIERFPKVGAVVSLAGLSVTQFSSGSSVYHKGHIDRHGRQPLRSLLYLCTLAALRSDAALRAWAERLQQRGKPKKIVLVAAMRKLLHIAYGVWKNDKDYNPTVAFALAV

SEQ ID NO: 396330 - protein, 355 aa, unidentified
MNGLRYIGLDVHQDTVSAAVLDGTGKLLMQSVFATRAVAILDFLHGIKGTLHVTFEEGVHSAWLYDLLQRRVARVVVCDPRKNKLLKSGNKGDLIDARKLAELLRNNSLSPVYHGGMSALEVQHRTRSYTMLTEDTTRVMNRLRAVFRSQAIRVHGRKLFRSDLRESHLAQLATPGLRQRAESLYRELDALHPLRLQAKREMLVECRKHPAMKWLRSVPFLGKVRTAVLIGRVQTPHRFRTKRQFWSYCGLALETHDSAEYRVVHGQVQRKSRPAQVRGLNWNHNHELKGLFKSAATMAAFRKGIFREFYSGLLAKGIRPEMARLTLARKIAAITLKIWKEGETFNAEHIKPQAA

SEQ ID NO: 396331 - protein, 428 aa, unidentified
MADQIYVTPKTNWVAIDVAKEWNAVLIETNEGHRHRFKMLNNAADHDRLVAFLRGLSGDCRIALEPTGVYHRPLAYRLKTEGFEVLGISSVAQARYREAQFGTWDKNDPKDAQVILSMLKQGLVQVYHDPLIAGNHDLQELSGLYFQVTLARTRVQHSLLTHYLPLYFPEMHKYWNTTRADWFIRLLWRFPTPAHVRALPREAFVVEAGSLIGRRVRKRAKLDDIYDMAHASVGLPVATDSIAVETFRLQLQRYQDLNAQRTTLDQRAQQLLAGHPQYARLISLPGIGAILALTILAEAGDLRRFKHYRQFLKYCGLDLAKSQSGATRGKERLSKRGNARLRMAFWLAGLRAVHMTENAFRDKYERYLRGHPNDADTKRKALTAVAAKMARVAYAVIKKDQPYRRFFEQSLPSGSIPLTRAVEAMSTS

SEQ ID NO: 396332 - protein, 385 aa, unidentified
MQRATNTATVSANTLHCALELSKKTWLLAIQFPDREQPSVYTIKGGDAAALLAKLIAARNRWAKVSGSPPSIVICYEVGYDAFWLARFLKAHGIECLVIDPGSLEVKRRPRRVKTDRVDLKKLLRTLTAWCRGERHVCSIVRIPTIDEEDLRRSHRERSRLIGERTAHINRIKGLLFGQGIRVGTISSKTLALDKFVTGDGRRLPPRVVAEIAREMKRLATVEEQIEEVERERDTAPTACKETEKKRHLLLQLKSIGSTNAALLSREVYYRHFDNQRQVGSFLGLTPSPYDSGEEERCQGISRCGSGRVRAIMIEAAWLWIQYQPKSSLTRWFMKRTAGQSKRVRKIMIVALARKLAIALWRFVELGLVPEGAILHPPRMTAKAQ

SEQ ID NO: 396333 - protein, 362 aa, unidentified
MLKSTTIIAFDQHAATTMAAVLLPAHRTPALHPLKSDPPTILRFVARLQRQGAVTCCYEAGPCGFELQRALTAKGISCDVIAPALIPRRPGDRIKTDRRDAGQLAVLYRAGALTAIHIPTEQEEAARDLLRCREDIRADLLRARHRLSKFLLRHGRRFTATKKAWSKRHDAWLRAHTWPLPALDQTHRAYLRAVDEVLARLRDVETDLQALLALEPLRPRVQRLRCFRGIDDLTALTIAAELGDPHRFATAPSTMAFVGLVPSEHSSGSKRAQGGITKTGNAHLRRVLVEAAWHYRHHPFVSATLRARQRGAPAQVIARAWTAQQRLHRRYQRLAARGKPKQHVVTAVARELTGFVWAALTQ

SEQ ID NO: 396334 - protein, 314 aa, unidentified
MFIGIDVSKARLDVAIRPSAEKLSVSNDEAGIQALVTRLSEIKPALIVLEATGGLERSVSGTLGSAQLPVVVVNPRQVRDFAKALGQLAKTDRIDAEVLARFAEAIRPPLRPLPDKVSLELRSLIARRRQLIEMMVAEKNRLSAASKAVRKRIEAHIRWLETELDRADKDLDHSIRQSPIWCENEDLLRSVPSVGPVVSRTLLAELPELGRLNRKQIAALVGIAPLNCDSGTFRGRRAIWGGRATVRAVLYMAALVASRRNSVIRNFYKRLRDKGKAPKVALVACMHKLLTILNAMIKHKTRWSEIIPQTSLDF

SEQ ID NO: 396335 - protein, 339 aa, unidentified
MKYYAGLDVSMKETFICILDERGKIVYEDQVYTDPHKISQSLEKSCFPLETIGFESGSLSGYLTRTLKELGYPVICIDSRKMAAILSVTINKTDKNDARGIADAVRCQHYKVVHPKTEEEESLGVLLKSRHCLVNQRKDLKNTIRGFLKTSGIRLGSVSPLRFSALVRSHFENLLTETVQGLGALLTCFDQLTEQIKTLEKELKKIARQDNQIQNLMTVPGVGLIVSLSFKASLGDPSRFSKSISVGAYYGMTPRQYASGETMKQGSISKCGSSQMRYLLTEAAVVLLTRIKSRSHLKTWGLKLKAKYGLKKAATAVARKLSVLMHRMLITGESFKYGS

SEQ ID NO: 396336 - protein, 395 aa, unidentified
MDVMHPVCCGIDVHQKSIVCCILDGPLTSNEPKKYQTTFGTTTKELNAALDWLLEHQVTHVFFESTGQYWIPLFNIFSDSNLELILANPQHIKNVPGRKTDVKDAEWIAQLGRCGLINQSYIPSQEVLQLRYLTRYRLSVKQRLTQIKNHIHVILQRGNIKITSYLSDIFSKTGQALLTLFINGEVINEDNVESCIHGRIKASTRQLIEAMEGKLSTVDRFLIKECMEEYQLQKKISEELNIEINEYILDHFPEEYQLLLTIPGISDNCCATILAEIGPNVEAFKTDKNLASWAGMCPGSNESAGVKKSSHTTQGNKYLKQALVMSVLSVQRAKEETFSLFYQRISSRGSKMKAIIACGHKMLRIIYKILQSHQPYNSQKALGLRQQTNALSLTI

SEQ ID NO: 396337 - protein, 376 aa, unidentified
MVKGYIGLDVHKEQIVTGVAKTAGDAFNHGKCSSDIQVFMKSLRKLLKKYGWTKEEVSICYEAGPCGFPLARHLLRMGYAVDVIAPSLIPTKSGDRVKTDKRDAKKLARLLRSGDLTAIHIPDVADEVLRDLCRARTDAVDDRTRMKQRLSAFLLRNGHHYTGRSNWTEAHHRYLRELVLVDPIQKLILEEYMQGLDATINRVTSVEDHMSIRLEDWWRRDFVEALQGLKGFQMVASMVVASELGDLTRFSHPRKLMDFLGLVSSENSSGDRRRQGGITKCGNSHVRWMLVEVAHSYRLPPKISKGLSKRQEGLNGAIKTVSWKAQKRLHKRYLRLKMRGLHENKIMVALARELAAFVWEIAQIVQKPDSITKATA

SEQ ID NO: 396338 - protein, 392 aa, unidentified
MIYIGIDIAKNKHDCCIIDSDGVVYNDSLRISNSRQGFELLYSSILSILPDKDISNVKIGLESTGHYSTNLQNFLYAKGFKLSILNPLATNLFRKAQSLRKTKTDKTDALVIAKMLFSDDTKSYSPVSYQIQELKSLTRHRYRLIGYRSKLKTSVNRLVDIMFPELPDLFWSIHQSSSYALLSILPSPKDIAACHLTKLTNILNTASKGKYGKDKAISLKESAANSIGTNSRSLSFELKQTIRLIQSVQHEIDSLELLIKEIVVEINSPLISIPGISYTLAAIILAEIGDIKRFTTPCKLLAFAGLDPSTYQSGKYTASHTPMVKRGSAYLRWAILMAGRTVSMRDATFSAYLSKKQSEGKHYYVAMSHVAKKLIRVIFHLLKTNATFAPQI

SEQ ID NO: 396339 - protein, 338 aa, unidentified
MSKITTIGLDLAKDVFHAVCCDARGKIVRKRMLKRGQVLEYFGNLERCLVGLEACASAHYWGRELEALGHEVKLIPAQYVKAFVRGNKNDYNDALAIAEAVVRPEMRFVTIKTPEQQDIQALHRLRRGCVGMRTGLCNQIRGLVGEYGLVAPKGVAALRRRIPEWLEDGDNGLSDLFRRLLSESYLRLQELDTHIVFYTKEVERQSKQDEACQRLQTIPGFGPIVSSVFHSQIGEGEAYRRGRDVSAAVGLVPRQHRSAGKDTLLGISKRGDGYLRSLLVHGARAVVSQAEHKDDRLSLWINKIRAKRGFNKAVVALANKMARMGWAVLANKTVYQAA

SEQ ID NO: 396340 - protein, 403 aa, unidentified
MEGPLISLDVSKGKSNYRFFENETDRKGKKGVIRHDIQGFDSIRDEAEKMEKRLRIKPSVIFESTGVYSDVVEKYFTDKGFDVYVISPLLSASMRKEGVRPAKNDSLDTLSIAKVFYSKDDLRKCSEKDKKVERLREMSYELDMMNRRIRPMKCQFLRLLDKVWPCLDEVSDYSSRFMLDFIIAFGHPENIKTVKGVLSVIRKSEMGTAGRKDKIAQDLFDYCHTHLSAVSKDSSYVELLKRMAIELKAMAKKKSELIDRMAEEARSKDEFARLLTIPAVAKTTALKIMARVGDISRFRNAEALVAYCGLDPRVYQSGKMTGEHRTITKKGDCILRSTLFLAVKLMVMLYPDTKVARFVAAKAKNGLSYKQAVVAGSAKLARIIYSMLTHHENYVEFNADIVA

SEQ ID NO: 396341 - protein, 359 aa, unidentified
MSYHNSLMEMEWIKMKITTIGLDIAKNVFHMAEISRSGRVLNRKMLRRAQLLAFFANHDACVVVMETCSGANHWARQFTSMGHQVKLISPKYVKPFLRGNKNDFNDAEAIAEASQRDNMRFAPVKTVEQEDIQALHRQRERMKKSRLALSNQIRGLLAEYGIVMNRGIATARRLLPEILEDAQNGLSAMSRDMFAELRDELLDLDQRMTRCERVIKAVNKSNPHCQRLDAIVGIGELTATATYAAIGDGREFKNGRHFSAWLGVVPAQHSSGGKTQLLGISKRGNTYLRTCFIHGARSVLLASAGKTDALSVWAQSVKARRGHNKACVALANKLARIAWVVASGKEYRAAVGVETKAAA

SEQ ID NO: 396342 - protein, 395 aa, unidentified
MLYLGIDIGKNNHEAGLVDEDGAHRGKSLRFSNDQKGFSSLLRFLEQKVGENEDLCVGMEATGHYWLSLYSFLHGQGFRLHVINPLQSDSFRNFHIRQVKTDSVDCFLIADVIRFGKFSETRLADEDVLVLRNLARFRESLKDSCSDYKRQVVTVLDQVFPEYDSLFSNVFGEGSKAFLKTCGTPEQALDLDTKSLAALLRKASRGRHGAEKADEIKSLAGRSVGMTLCKDAFAFQLKILIEQIEFTERQIGEIDKRLAAQLKKLNSVILSIPGVGPATGAIILGEIGDINRFENPKKLVAFAGIDPTVSQSGNFCGTHNRFSKRGSPHLRRALWMSAVVAARFDPVFKAFYEKKRSEGKAYGTAIGAVARKLTYAIFAILKTNRPYEVRMNPEA

SEQ ID NO: 396343 - protein, 451 aa, unidentified
MKKETVKKGIVKMGTGLPVFNPHAAGIDIGDTLHCVAINDGNGGHEVKTTSAFTCDLQEIVDYLKNNGITTVAMESTGIYWLALYIMLEEEGIEPYLVNAKHVKNVTGRKKDDTDSIWLQKLHTCGLLQKAFQPDNEFRTLRSYIRQRANIISLCSDAVRRMQKALELMNIKIHTVISDLLGKTGMRMVKAILEGERDPKILSTLCDPRIKASKEEIIKSLEGIWKEEYLFMLEQAYEHYEFHQKQLKDCEEKIKQQLLKQVAIVQDGDITSFEVHTQKKTKAKKNQFNFEVSPYLIVLTGVDLCKIPGISDVTALELIAEIGNDTSKWKSAKHFAAWLNLAPNTKITGGKIISSKLQKKKNKAGQCLRQAASTLSNSKKPIGDYYRRMRGKLGGKGATVVTAHKLARTVYIMINKKTEYDEFLLIQNQENYKKEKIKKLEKQLFRLKQAS

SEQ ID NO: 396344 - protein, 392 aa, unidentified
MYIVGIDIGKNHHEASIVSPEGKQIGRSLRFATTHKGADSLMSFIFKNIGNSPCVFGMEATGHYWYPIYSFLKAKGYTIYVINPIQSDSLRKMYIRQTKNESIESFLIAEVIRFGQFGTTSMADENILAMRQLCRYRDSVISSRTEIKLRIGTIMEQIFPEYEKQFSSLWVSTSMGILEKYLTPENIENAPIDELFEIKKDKSHNRLTKAKAISIKEAAADTFGIKIAQDAFSFQLKQLIDRMNFLDKQIEALDCQILEYYEKFDCYLHTIPGIGMIAAATILAEIGDINRFKSSSALVAFAGIDPTVRQSGEFSSTHNHMSKRGSPYLRHAIFLAATTCSFHNSPLNAYYKKKRDQGKHHLTATGAVARKLTSVIYAVLRDSKPYEPKSFC

SEQ ID NO: 396345 - protein, 313 aa, unidentified
MTSLSKMKTIHYIGIDVSKKTLQIDAAKLAPTCPNQAKALHLWLRQLPARSHLVLEASGGYEKLLTTMAHRAGVPVSIINPVRVRAFAKARGQRAKTDRIDAALITDYARCLQPAPTPSVSAAHARALELLRGRQALVEQRITWINLLEHATDAGLIKLYKKHLRQTDASIAALEKEITTAVTDDAVLAARYQRLLAQFGVGAITAATLVLELPELGYLNRKQIAALCGLAPFAKDSGEKRGVRFVHGGRNQLRRALYMATLSAIRQKASPLQDFYLRLRTKGKPGKVALIACARKLLTYLNSQLKKPELSPK

SEQ ID NO: 396346 - protein, 415 aa, unidentified
MPPASTTGIEQLLVATIIKTTSGVQPSYQKKRFPTFNNSILEFKQWLLDNSCRNVCMESTGKYWVPVFNLLEDELSVTIANPKWVKAVKGNKDDTKDSKWIGDLFRLGLVPGSYIPCRPIRILREFTRYRYKLTSCRSSEKNRFQNALTVCNVALDSVVSDIFGKSATSVIDYLLQQSDNSINHEEISSRLLRSLKKKSESVIESIEGYQMTESQKYRMRLVHAHMDYITSTISDIDSMINSLVEPYENAVQLLCTIPGVDRNSAITIISEIGTDMTQFSNSKRLCCWAGLTPSNNESAGKKKSVRITRAGVYLKPALVQVAHAAVKSNKSPYYKAKYERIMKRRGKKRAIIAVARMILTAIYHMLSTGESWNPTDLYKIDMPEPLKNKQKEKAVKQAMKLLIAEGLIKESQLTS

SEQ ID NO: 396347 - protein, 423 aa, unidentified
MMKLKYSICCGLDVHKNVIVATIVATNKDGISEYLQKSFSTINSDIQRFHNWLIENNCYHVCMESTGKYWIPIFNYLENDIDVCLTHPKYVKAIKGKKTDKKDSKWIADLYKFDLVRCSFIPPKDFRQLRELSRYRFKLVCMKSSEKNRIQNCMTISNVGIASVLSDPFGKTATEIISYLLEHTADSMDEKAVRKLIKKGAKSKSDEIIEAIKGYTIETDQAKKLELARGHLEYLDDMITQTEVELYVRIKPYYEFVEFVSTMPGMTELSSTIVLAETGVDMDIFDDAKHLCSWCGLSPANNESAGKKKSVRIAKAGDYLKPMMVQCALAAIKSKKQPYFAIKYGRIKKRRGHKKAIIAIARMMMVCIYHMVSEKKPFTPTDYEELMDPQNHVESVVLNENNVFAYLESLGYDSSKLVKRNDN

SEQ ID NO: 396348 - protein, 414 aa, unidentified
MPTWNEITHYAGFDWAKDHHDVIIVDRGGQIVADFQIAHTAPGWQQWREQLAAFGAGVAATVETSQGVVVEQLLQSGVTVYPVSPASAKRYRERKIPSGNKTDRVDAWSLADALRVDGHGWKALAPEDPLVAELRLLCRDEVALIEERTALLNQLQSALHEYYPAALEAFSDWTLPSAWAFVKRFPTPQRLQAAGKRQWEKFLHTHRLARPQTYQTRLEIFARAGEFVSGEALTRTKSRLALARARMLRTLQSQLDAYRAEIEKLFAEHPDHDLFGSLPGAGPKIAPRLLGEIGSDRSRFADPAGLQCLAGTAPVSYQSGQIHKVHLRRHCNKPLRHAVHLWANLSRPSCAWASVYYDQLRERGKSHACALRCLGQRWLKILWKMWQTGTAYDAELHARNQLKHGSWVLKIQST

SEQ ID NO: 396349 - protein, 405 aa, unidentified
MKEAFPMNAVGIDVSKGKSTVAIMRPFGEIVAVPFEVNHSETELKQLANRIKKLPGESRVIMEYTGNYFQPIANYLHHEGIFVSVINAILIHDYSHSSIRRVKTDKKDAIKIANYGLDRWIDLPGYIPEGELRQILKTYNRQFSQYTKLKVVLTNSLITHLDQTFPNINTLFGNTPRQDGHQKWIDFSMTFWHCNCVSSQSQKSFVNKYEKWCHKAGYHYQPQKASEIYESASKSVNTLPKSPNTKFLIQESIQELNSLIDSLNRLRKEMNRIASLLPEYPVVMGMYGVGITLGPQLIAEIGDVQRFYNRKALIAYAGIDSCPYQSGTIDIKGRGISKRGSALLRKTLFQVMDCILRQKPGNDPVYLFLDKKRSEGKHYYVYMMAGANKFLRIYYARVNEYLNTL

SEQ ID NO: 396350 - protein, 365 aa, unidentified
MNAIHYIGFDVHKKTISFCVKTADGQIVEEGSLQAERTVLRRWAAGRKQVWHGAMEATLFSAWIYDTLKPYAQQLSMGHPAKMKAITAGKNKSDQVDARTIADLLRCNLLPASYVLPPQLRDLRRLLRYRNLVVQQSVRMQNKVAGLLMESGTAFNKQKLHQKKYFADLMKSLEEVPESVKDLLRMSRGSMEMFQSTQKQLVKRLLSEPALEQRVERLMSIRAVGPITALTWALEIADPQRFASIADAVSYCGLSAAFRSSAGKQQRGPISKQRNAWLQPVLIEAAKLAPLWNPQLAAVHARALERGHANRATLQVARKLVAYLLDVDKSGQPFQVHTPPPPAATTAKKKPARKSKKAVALAPAA

SEQ ID NO: 396351 - protein, 334 aa, unidentified
MDTLVERCAGLDVHKDSVTACVRVPDGHGGRQVETRRFTTTTAGLGLLAEWLASFGVTRVGMESTGCYWKPVWQLLEGQVECWLLNAAHLHNVPGRKTDVADAAWIAQLVEHGLVRPSFVPPRPVRELRELTRYRKTQIQERSREVQRLDKVLQDAGIKLSSVATDVLGVSGRAMLEALVAGTHDPQVLAGLAKGRLRAKLPALREALAGRFRTDHHGLLVGQILAHIDYLDEAIALLSERIEQVIAPFAEQVALLDTIPGIDRRAAEVIVAEIGPDMGQFPTAAHLASWAGVCPGNNESAGKHRSGRTRKGSKWLGGCLSEVAKAASRTKAPT

SEQ ID NO: 396352 - protein, 464 aa, unidentified
MKKEAIEAEFGAWVGIDWADEKHAVCLRPEGSEEIEYFELKQEPEAIVDWIHGLRSRFGGRKIAIALEQSRGALIYMLMNFDFLTFFPINPKTMKMYREALRSSGAKDDPSDAELLLDFLQTHRKHLRVWKPEEPQTRKLRMLVEGRRKLVNNSSSVCLRIEQLLKYYYPQALNWVGDLKSPLACDFLMKWPSLETVKKAKPVQLRKFYWKHNCRNNELIEQRISEVSRAIPLTEDEAIVSSSVLMLQALIPVIRELTAAIERFERQIQECFQEYPDRFLYESLPGAGAALQPRLAVAMGMDRDRFQSSVELQQFSGIAPVTVKSGKNSWVHWRWACPKFVRQSFHEFAGCSLVKSSWAKAYYDQMRAKNKGHHAALRAVAFKWQRIIFRCWKDGKPYDENQYLKVLQRRGSPFMCLVHLTKPASLSQSSWKGAGSIIAQLVQSSSGKQCGKIENAKTQSRKTT

SEQ ID NO: 396353 - protein, 312 aa, unidentified
MTRIICGVDVSSQKLDARIGREGRFASFKNNPEGIKALAGFCREHGVALVVMEATGGYEKQAFALLWGHGLEVAIVNPRNVRDFAKAMGRLEKTDRIDAGMIAWFAEIKNVKPTPPKSETQGHLAALVTRLSQLTVLRTSQSNQKKLITDPAVVKCFSELLALIARQMRALEREIAGLIDSDPLWSELDKAFRSVKGVADRTVARLMAQMPEIGLISGKAITKLTGLAPIAKDSGKTQGKRPVRGGRSGVRATLFVVAEIVSRYDRDFAAFRDRLAAAGKAKKVIRVALAHKLLVRLNAKAREVRAKFALAA

SEQ ID NO: 396354 - protein, 414 aa, unidentified
MALVRWVGRAIGLDVHRDFCVVAICEDGKVRSGGRVPSTPEGLAMLAESLLGTDRVALEVTGSCWEVARILEPHVQRVVVVSPDDTGISSARAKTDKLDARALATLLWRGELEAVWMPDERCRVLRRRLARRQQLVWSRTRAKNEIHAVLQRRLQGKPPCSDLFGVKGRDWLASLELPLEERESVDAGIRQIEFLNSEIAGVERLIAGQALSWPEIRRLMTVPGVNLICAASFIAAIGQPSRFLSSRKLVAYLGLDPKVRQSGETPARSGRISKRGSASARWALVEAAWSVVKQPGPLRAFYERLRARRGHGKAIVATARKLTVLFWCMLTRSEDYAHQRPALTNKKQRQLELTAGAPARTKAAAGIWSTNRAILHAERALAEQAEVSYKRMVTDQQAGRPSRKAGASATPERA

SEQ ID NO: 396355 - protein, 397 aa, unidentified
MYIVGIDIAKRKHEAAVIDGEGDVIIKPFSFTNNCSGYNRLLAMLTKAKLPLDEVSFAMEATGHYWLALFTRLQKEGFRVQVINPVQTNSIRSFYIRQAKTDPRDALLIAEVIRFGHFSESALHPENIYELRELCRGRHAIVSMQADVKRKVVALLDQVFPEYETAFTNLFGDTSMAILQTCPTPKELSEMPLEELCHLIEVSSHKRFRMAKAQELQALARNSFGFAMAGDVFSTMIRLYAKHLDFLKQQVREMDRKIAEIMETLDTPITTITGIGPTLGAYILSEIGDINRFSSAAKLAAYAGIDPTMRQSGEYNGVRNRMSKRGSPYLRHAIWLAASSAVLHDPALKLYFQKKRDEGKPYMASVGHACRKMVSIIYAVMRDSKAYTPYIPNEIST

SEQ ID NO: 396356 - protein, 336 aa, unidentified
MKYIGLDVHKKNTFACVMNVSGKEIHSMEVSSKQNGLEKIVEYMEDEEYAVLMESSTYSIKVHRFFQDRGVLTYTAHAKYLSMITRSDRKTDKIDASHLARYLRLHMNGELPLSMSYIPDRQAEALRALCRLREDLTKDIGDSIRKIKSHMSSVGIDIPYLVSSAKTKKFSDYLRTWHSKDLTLMNRLDMLDSLLKKAKDIEKEMEINGRYDDNVRLLLTVPGIGMQSAVQIMSMIIDIKRFPDEEKLCSYFGMAPRVRDSGGKEHHGRMTKNGDPMMRAVLDRVTYVHVCNCDSSITEFYNRKSNENKKKALTSASRKMLCMIYAILSRRTGFAA

SEQ ID NO: 396357 - protein, 454 aa, unidentified
MSKVRKAATAQSNVQLPMLHPHAAGIDVGATQLQVAVPCDADPQPVRTFTTFTDDLLKLRDWLKACRVRTVAMESTGVYWIPLYQILEAAGIEVCLVNARHCKNLPGRKTDVSDCQWLQYLHSVGLLRASFRPPEQICVVRSFLRQRANLVRYASQQVMQLHKALTQMNVQIHNVISDIVGVTGLAILDAVLAGERDGQKLAKLKDHRIKASGDVIARSLVGDWRAEHLFALRQALATWRHYQTLLTECDAATAQALAGFASRVDVSANPPPPSTLRHKKPYANEPRFEARTELYRITGVELTQVPGLQVGTALVLFGELGPDFVQRFSTAKCFASWLGLCPDNRITGGRVISVKTRDVKSRAAEALRLAAQSLWQSKTYLGESFRRWKARLGTPKAITAMAHKLARILWHLLKYREAYDPKVWEAAEEKMRAKKLKRLHQNATALGYKLVTVS

SEQ ID NO: 396358 - protein, 346 aa, unidentified
MNQRDDCGVEVSAEQLLVGLQREGAARARREFPNTPEGHEALVRWLAAPGRTVRVVMEATGLYGLDLALRLDAAPGIEVMVANPRAVRHFAIALMKRSKNDPIDTDVLVEFAQRMPFQRWVRPSPAALALHALARRLESLTEMHAAEKNRLHAARLSPALPVAVARDLQRSLRSLERARARLTRQAVEVIGQDPDLNLRYQLLLSACGIGPTSAVQILAQLAVLSADLDVRQWVAQAGLDPRQYSSGSSVHKKTRISKTGNRHLRRALYMPALVAIRHEPHLRAFYRHLVARGKAKMQALVAVMRKLLHAIFGMFKHQQPFDGTKLYPLPEEPSLRPPTFSTAEAA

SEQ ID NO: 396359 - protein, 370 aa, unidentified
MGWTPPDGIEVPEWRCLNTTAKEASVGEVITVGLDLAKSVFQAHGADASGEVVFRKKLRREQVVPFFATQPRCLVAMEACASAHHWAREIGSLGHETRLIAPAYVKPFVKRQKNDAADAEAICEAAQRPTMRFVTPKSAEAQGAAVVFRTRDLLVRQRTQLISALRGHLAEFGHIARKGPGHVVGLIELVRDPEAGLPDEARSVLLVATEMLEALQARIAVLDRQVLARVKASPLARRLMTIPGVGPVMATAMVALAPTPSTFRRGRDFAAWVGLTPRQHSSGGKEKLGRTTKMGERSLRRLLILGASSAARMAARKGTSDPWLARMLARKPRMLVTVALANKMARIVWALMAKGGSYRAPIAMAASAAA

SEQ ID NO: 396360 - protein, 340 aa, unidentified
MKQVIAIDLAKRVFQIHIPTNANRPALNKVLTRNKLLAFIAKQPESIIVMEACGTANYWCNQFAQLGHEVRQISPQYVARFRIGNKNDKNDAIAISEAFSRPDMRFVPIKKIEQQDRQCLHRVRQRLVKNRTAIINQIHGLAAEYGVALSEGKHKMLSEIHDELEDGSNGLSPIFRELLQELYLEFKDIDLKVKKLSSQITQLNSISETAQKLLTIPGVGPLSASVLGIELGDGTCFKNGRHFSSYLGLVPKERSSGGKVRLLGITKRGDSYLRGLLIHGARAVVYSVSKIPLEQCNRLQSWLKKLITQNGVNKAIVALANKNARMAWAIVKTGEAYKAV

SEQ ID NO: 396361 - protein, 341 aa, unidentified
MPHYVGLDASKATTNICILDDNGETVREGVVETEPGAIVQYLRGDRLRYRRVGIESMSFTPWLYEGMAKAGLPVICIEARHSSSVLKRRLNKTDRNDARGIAEIMRAGVYKAVHVKTVESRQAKLVLTARRHLSQKCRDIDNLIRATLLQAGFKIAAGRVYSFDQRADAMIRSEGVLRDVMDALLAARRAIASQVEALSQRVSDLAAQDTVCRNFMTVPGVGPITALAFRAAVDVPQRFARSRDVGVHLGLTPRSYRSGRIDRKGRISRCGDAQARAALYMAARSIMQARTRTTSLKTWGSGVIAARGYSKGVIAVARKLAVVLHRMWIAGEAFRSEPNAA

SEQ ID NO: 396362 - protein, 315 aa, unidentified
MEVRCYVGIDVAKDRLDVHVRPIARTFAVANSASGLAELANILAPLNIGKVILEASGGYEKLAFMTLVEAGHVVSIVNPRQVRDFAKGAGRMAKTDAIDAATLAHFAEVFQPRETTPLTPLESQIAEYVAYRRYLVREMIGIRNQLRCLSIPPLRRVLEKRLLAVKKESLAVEAQMGVLIRASEKRRLFELLTSVPGVGDVFACTLICSLPELGTLTRREIASLVGVAPMNNDRGRRRGHRFVIGGRAAIRTVLYMATLTATRFNAPIKQFYRRLRDAGKPTKVALTACMRKLLTILNAIVRKKLASGRNHDARL

SEQ ID NO: 396363 - protein, 343 aa, unidentified
MKTTTVGIDLAKNVFQVCALNRANKVISNRAVKRAALVETVAQLQPTLIAMESCAGAHHWGRTFRALGHEVILVPPQHVKPFVRGGKSDPRDALAICEAASRPGLHPVPIKALTQQDLQSLHRVRQQQVHHSTGIANQIRGIAHEYGVCFPVGLKRLYREVPYALEDAENGLSGAARELLARRFADLLAVREEIKRTSQRIVALAEGLPPWPRLLELHGFGIMVTSSYLASIGDGRQFKRGRQVAAWLGLVPRQHGSGGKVRLYGMTKSGDRYLRTMMLHGARAAIRWSRDRDTPLARWINPLIERRGYNKAVVALANKNARIAWNIVANDAHYDPGKAFGSA

SEQ ID NO: 396364 - protein, 340 aa, unidentified
MTSITHEKVFAGIDVGAAELVLVLRTGEKSSPSQSFPNTPAHHRRLLQTLAACPDCTVCLEATGVYSMDVAIALHDAAIPLMVINPQRSHNFAKVLGKHSKTDNVDADTLAQFAQRMPFQAWVRPTEAALALRAFSRRIHALTDLKTIAKNQSHALSFIASTPKVVLQDVALSVAQLEKRLATLTAATLELIQATPELLAPFTLLLGVKGIANTSAIALLGELLLLPAGLSHAQWVKFAGLDPKHFRSGTSVDKKARISKAGNHYIRAALYMPALSAKAHDPYVKAYFNHLTGMGKTPMQSVCAVMRKLLHALHGMLTNNQPFDNTRFYAVPAQITPSST

SEQ ID NO: 396365 - protein, 367 aa, unidentified
MRNSTPTIWVGMDTSAEKIHVAIFRGSEAKPAEEFEVGTDAKGIGRLKKRLEKETGPVKCAYEAGPTGYGLYRDLKNSGFECEVIAPSLIPKKPGERVKTNRLDARRLASYYRSGDLTAIHVPDAKQESLRDLVRARDDFRRDLQRSRQRLSGCLLRHGYHYNQPSLWTRKHWAWIKAIKVEDENLRKVIDEYITAIEVRAEQLQRFDDQIEQLAQQPEYKSKVAAYSVLKGIRTLSAMTILSEGGDLRRYGTARQFMGSTGAVPSEHSTGPHQRRGPITKTGNVYLRRILIEAAWAYQRRVHGVTAERRRQDQPEQLVAIARKADHRLHGKFSKLRFRYNKKGSVAAVAVARELAGFVWAIGQTLD

SEQ ID NO: 396366 - protein, 340 aa, unidentified
MSKLFKNFVGIDISKTWFDAALIKADNASSSVIHQQFSQKPEGFKKMEAWLQQHDVQLDEQTLFCMEYTGLYNTGLVHHLVKNKAQLWVEMPLRIKKAGGFERGTDDKSAAVKISWYALRYQDQVKLWQPLDSNIESIKNLIAQRDRIIISINLLSVPVNELKEGGCTDEAKTMEKLQKPVLTALQKSKLAIEALITKTVQQDQQLNIKVKRVESIKGIGPVTAIALMVYTKGFTAFKNGKQLACYCGVVPFNKSSGTSVRYKSSVSPFANKKLKKLLHLCALSAIQNDTEMKAYFERRVSEGKNKMSIINAVRNKLVHRVFAVIRDERDFEDNYTRICV

SEQ ID NO: 396367 - protein, 342 aa, unidentified
MKSTTIAVDVAKEVLEVAVSVQPGQVSEQRRLSRAAFMKFCTDQPPSTVLLEACGSAHYWGRRLQSLGHRVVLLPPHATRPYVFRNKTDRTDTRGLLEAYRNEDIHPVPVKSVSQQALTALHRLRSTWLAARTARLNTVRGLLREFGCIIPVGAHRVLPRAWELLADPDSGLPDALRPALAEACTEIRQLEDRVRLIENQLEALADQTPAVARLRSIPGVGLITATALVAFVGDVQRFPSGRHFASYLGLTPREHSSGLIRRLGSISKRGDVYLRMLLTHGARAVLWKATSRTDPDRLRAWALQVQRLRGHNKAAIALANKLARIVWAVWKHDVDFREVTAA

SEQ ID NO: 396368 - protein, 320 aa, unidentified
MMAQNSRVVVGIDVAKDKVDGCIRSLSQRRTFPSSAEGRRKLIAWLRKHKVDRAVMEASGGYEQDWAKALREACFEVWIVDPKRVRNFARSAGRLAKNDVIDAEMIAWFAETFEDAPSQTHDAAREELAALVKARKAVIDLKTRLQSQNEHAVPGAVQKAHARVLKGLDAEIAKLEDAIVVTVKATPAFAARTEIIESVPGLAETASAVLIAGLPELGTVREEIAAALLGAAPYDDDSGKRRGERHIKGGRRWVRNALYMPCLGAATQNNPVLKAFYQRLIARGKEPKVALIACMRKLIVILNTMIARGEKWDPSRYALR

SEQ ID NO: 396369 - protein, 359 aa, unidentified
MLYLGCDVHKNYTTVSFVGEDGNVKGTKSFFNNIDELKHLLSSFPEEEFSAVLEAGLNWGVIYDMLDSLSEVKNVSLAHPPKVKAIASAKIKTDKIDSKILGQLLRTDLIPEVWIPCKETRILKDIVRSRAFIVKIKTMIKNRIHDILRKSHVNPPEVKDIFGKYGRMWLEEIELSDKRADKLLRYHLQLKGVFEEMEIELKKWINKEMKTNEDLKLVKTVPGIREVFGPIIVLEIDDINRFPDPAHLHSYSGLVPSTHVSGNTSYHGRLIRGNRWLRWAFIEGAHTSVRISPYFREYYGRIKRKAGTQAASVASGRKLATIVYKVLKEKRPYIEEYKIKNNKGRLPSVRYSGGISSRS

SEQ ID NO: 396370 - protein, 311 aa, unidentified
MYYIGIDVSKKDLAVFNGKDLKFANKEGLKSFKKYLKKKYHLSEIVILFEPTGIYSFYLKEFCAENRIKAYIVNPKKSHNFARALGKRSKNDKIDARTLYQFHKLIDLKDIKVPKIDQQAKTLASYLVSYEFALKQRVSLSNHLESLRDKRLITLMKKDLKMAKKLEDKLFHDIKEYVSKNQNLREDYQRLLTISGVGDKTAIALLTLFKTYQGTNRAQITALAGLDPIKRESGTSVKGKVKISKNGKGIYRKIFYLPTICATVHNQKIRVFYQRLLANHKIKKLAIIASMRKLLLIAHAMYRDKTEYVAA

SEQ ID NO: 396371 - protein, 389 aa, unidentified
MKIYVGIDIAKLNHFAAAISSDGEILLEPFKFTNDADGFQLLVSKLESFDKNSIIIGLESTAHYGDNLVRYLVAEFYQVCVLNPIKTCQMRKNNVRKTKTDKVDTFVIAKTLMMQDDLRFITFFDLDMMDLKALGRFRQKTIKQRTRLKIQLTTYVDQVFPEIQYFFKSGLHQHAVYALLKEAPSPKEIASMHMTHLANLLKVNSHGHFTKELAKELRVLAQKSVGANDSAISIQITQTIQQIELLDSQLEKTEAEMTDIMKFNDSVIMTIPGIGYINGGMILGEIGDIHRFSNPNKLLAFAGLDPSVYQSGNFQAKTTRMSKRGSRVLRYALVNAAWNVVRNNATFKAYYDAKRAEGRSHYNALGHCAGKLVRVIWKMLTDEVEFNLE

SEQ ID NO: 396372 - protein, 346 aa, unidentified
MGKSITDLSLVTTVGLDLAKHVFQVHGIDASGRVVVAKAIRRNKLLEFFASLAPCLVGLEASGSAHHWARELITLGHEARMMPPAYVKPYIRRQKNDASDASAICEAVTRPSMRFVGVRSLMNQAALMRHKAREMLVTQRTQLLNGLRGHLTEVGVIAPQGLRCARELAELIEACDETIPFEVCEALAPLVVQLRNLDEAIAQLDRIIAKLAQKDETARRLMSVPGFGPITASAMAATIQDTSSFAGPREFAAYLGLTPKQNSSGGKPKLGRISKMGNRYLRKLLVVGAHAVLFHRKPHTDPLRMWAKKLIEKKPFKLVAVALANKMARIAFAILRGKTVYREIPA

SEQ ID NO: 396373 - protein, 351 aa, unidentified
MLIIGCDFHPGFQQVAMFDNRTGEVEEKRLQHREEAERFYRGLSGPVRVGMEACGHYPWFERLLAELGWELWFGDAAQVRASVVRRQKTDRRDAEHLLQLLREERFPRIWVPSLEERDVRQLLVHRHKQVQARTRTKNQLQAMALSHGVQKKWKLWSRAGRVQLEQLPLLPYAAQRRQQLLQALDGLDADLLELNCRVEEEVRKRPAARLLSTHPGVGPVTALAMVLTLGPAQRFASGKDVGSYFGLIPREDSSGGHQRLGKISKQGSSFLRFLLVEAGQTAARYDPLLKRFYLRLARRKNRGVAKVAVARKLATRLYLMLREDWNYAQLCQAVMRVSPSHSVVGERKPSA

SEQ ID NO: 396374 - protein, 430 aa, unidentified
MNFFSNYISVGVDVAADFSWFCILTPDGKEFRKPFKVEHDNADSLKNAVLTIKKAEEQYSIKSRTFLESTGIYHFPLFCHLKELCFEVFVINPLITNSNKNVGIRKVKNDKYDAKRIAGLGYSPDLKVSVMPAELIMNLRCLCREYYSLVDYRSAYVNKLKAQLRIVFPGFCKVFSDVTGATSIAVMKNFSTPEDILNAQPNEVIDLIAFSSRKGLKYAKDKYEKLITAAKNALNFRYNLSTVYDVLDIHIHFVEEFDKKIDLVLAKIKAFVDKNKSESFVQQIEYLDSINGVGFLSAVTLMCEIGDFTAFSKPKQLFAYFGVDPSVNESGKFKGTENKMSKRGTRIGRRVLYAIALASVRVKRNGVAINPVLHEYYQKKKESKPKKVALGAIMHKVSNIIFAVLRDSKTYELKTPEEQRKQYLNTKKAA

SEQ ID NO: 396375 - protein, 387 aa, unidentified
MAKKRGRVVGLDVHPDSFAGAVVEGSDPASAQVLSTSTQVELKQLEQWALRHTRTEDTLVLEASGNAFAVAARLRAIGRAVEILDSHRAGKVGKVYCANDRIDAVKIARIYLSALSPIVWQPDAKTLERREIFSAYQAVVKESTRAKQQLRSMLNEHCVRLEKGFRLCHPHAITRLLKLREWTPARRMLLQQLHGSLVAARARRTCLRRHMAQEIVAEEALLRLTRLCGINLITLYGVIAAVGDVRRFAHSKKLVAYLGLNPSVSQSGNFEGGGALKRHGRGALRALLIQSGKKLLEVNNPLQKWGLAVAARRGRNKAAVAVARKLCVAFWHVLMGHAIGALERLDTLQTKLSKFATEIGPVALSAFGYNNKADFVEKKLYVLRTYP

SEQ ID NO: 396376 - protein, 373 aa, unidentified
MPEQHAAVEWPDGILGLPLARARIVRLVESAAREDRMELTILGIDVGKGDFHCALNREGQIRNKRFVNSKTGFAELRRWLRDRHVDRVHACLEATGGWSEELAADLYAHGHTVSLVNPLAIKAFGQSELSRTKTDKADAELIARFCVAMRPDPWQPPSPAQRRLRQLARRRMALDDIRTQEKNRSEGPGVSEVLDSIEATLAFLDEQIDDIDAQMRDLIERDPTLRGRRELLESIPGIGERAAVTILGEMPNISEFHSSKAVAAYAGLCPHEHRSGTSVSASWLSRRGNVRLRRILFMPAVVAMGCNPIIEAFVRRLRRSGKVGKQIIAAVMRRLLVLAYGVLKSGRPFDSRIGCGRRHRRVLTKSHRKAAVA

SEQ ID NO: 396377 - protein, 428 aa, unidentified
MDFTQNQRLAQMNDRTLIIGVDVAKHKHVARVVDDRGRDLAKRLVFANTMPGFSELLSWARDLSEDHDRPDIVIGMEPTGHYWLNLAYHLKTRGIYTVVVNPMKVKRFKEMDDDSPTKNDTKDAKVIAQIVRDGRFHEPTLPKDVYAELREGMKVYDIMQEDLSSIKAQMQNALDRYFPEFLQVFKDWTGKAALHLLEKGFLPEDIRQASEEALLAEVKTAARRATGIKRIQALKQVAETSVGLTVGLRMAREEFRYLIDQYKRIEERLVALEAQLEELVLHVPGADQMTAIKGVSALTVAGFFAEVGNLANYRDPRQIIKLAGLNLKLNQSGTFKGQTTITKRGRKRLRSLLFQVARPLALHNEAFRKLHEHYRYRATNPLTGKQSFVALSRKLVKIFYVLGTRKCAFSETRMIRDIPGISGLQESV

SEQ ID NO: 396378 - protein, 418 aa, unidentified
MRVDTDEPEIIERVAALDVAKAEVVCCVRVPGRGRQRMQEVRTVSTMTAALLGLGDWLAELGVTRVVMEATSDYWRAPFYLLEDRFETWLVNAHDVKHLPSRPKTDRLDAVWLCKVAERQMLRPSFVPPPAIRNLRDLTRYRVDLLAARTAEKQRVEKLLEDALIKLSVVVSDPFGVSGRAIMAALIAGERDPSTLAELARGRLRSKTDRLTEALTGRFTDHHAFLLSQMLHRVDAVSADIATVQARIDKQMGELAPAVAKLDAIPGVGPVAAQMILAEIGTDMSRFPTPAHLTSWARFAPGVNESAGRPTGKAASGKGNRYLARVLGEAAVSAARTDTFLGERYRRIARRRGKKRAIVAIGRSILVIIWALLSDEQAQFIDLGPDYYASRNNPERKARHHIRELQALGYSVTLNPAA

SEQ ID NO: 396379 - protein, 435 aa, unidentified
MKLTQIREHTAGIDIGSEHIFIGLDDDSVHQFGTFTCDFRAAIELLTAHGVQSIAMESTGVYGVILHEMLQEAGFDVWLVNPAHLRYVPGRKSDVADCQWLQQLHSFGLLANSFLPDPAIKALRSYLRLRERYISESAKAVLHMQKALTLMNIRLHQVISQIHGASGMRVLRAILDGERDPHQLVALCDKRIQDNKHDQVVASLEGHYRPEYLYELADAIECYEFFQGKLNECDRKIDRELSQLADQQPVPKEYGKAKSIRHNKPAIDQLHQKVVRATGGVNANELPGLTDYSALRLMGEVGMDLTPFPSEGHFTSWLKLAPGKKQSGKSIRKHKYKSAPRASEIFKQAAQSLLESKTHALGAFGRRVRARRGPGIAIKAVARKLAILYYRAMTQGMDYVEQGVEAYEKQYQLRRLHMLHKQASRLGYALVELNE

SEQ ID NO: 396380 - protein, 357 aa, unidentified
MDIMHYVGLDIHKKTISFCVKLADGTIVSEGVVKATRKDLNRWMATLPRPWMAAMEATIFTSWVYDHLLPHGAAVKVAHPLMLRAITAAKRKNDRIDAGKIADLLRVNLLPECYMAPQELRDLRRRLRYRNLLVRQSTQMKNKVSGLLMESGIEYSKQKLHQKRYFSELLKRQGEEQLPPSLTPLLELSRTTIETTQKMERQIVRGLEQDPLLAERIERLLTIPGVGPITGLTWALETGEPGRFNSVKQAVSYCGLCGSEDSSAGKQKRTPISKQRNKHLQSVLIEAAKLAPCYNPELARVYKREKDKGNHNRATLAVARKIVAYLLAVDRRKTGFVSPPAEKAAPAEKVAPAEKVA

SEQ ID NO: 396381 - protein, 324 aa, unidentified
MTDTILGIDVSKETLDASCARGQRRQSRTFANSPEGWKMMLAWLKAMGSKQAHACMEATGRHSLGLALALHDAGHVVSVVNPAQIRDFGRTKLGRNKTDKVDAALIREYAELLKPGPWTPPSPAMRTLNELQTVRAGIVGSRTEWKNRIGSGLGDSTATKLAAATIEHFTIQLQAIDKAISETINGNAELRGRCDLLLSVVGVGETLAAVLLAEMPEPGVLRRSGELVAYAGLNPSHHRSGTSIDRPTRISKIGNTALRSSLYMPALSAMRYNPAIAALVARLKSAGRLKPKQIVVAAMRKLLVICFGVLKTGQRFDPALAMPA

SEQ ID NO: 396382 - protein, 435 aa, unidentified
MNFIGVDLHKKSITICVMDEKRKILARKTVACTQTDEILEFFRQFRPFKVVVEATASYVWFVELVEPLAEKVVLANPKKLRVIAESTKKTDRLDAQVLTEFLVLDMIPESYQATPRLRQHRALVRHRQYLQGRITSVRSKIRHILSNYNADRKDLFSSNCGLAYLKEVRLNDVDRFVMKQLWAEWQDHLAQRLAVSKKLKAFVAKAPQREAEAREILKTAPQVGSVTAEVILSELGDISRFRNAKTVCAYAGLVPVVRQSGERKSKDMKITKEGSGLLRWALVEAAWRLVGKSPKWAALFSRLRHRSGKKRAIVAVARKLLCVLYAMLRTSTPYKIVTTQTTAARTTGKESVRTSTPDQTTPTETTAPRTTGKKLVRTSTPEQTTPTETTAPRTTGKKLVRTSTPEQTTPTETTAPRTTGKKLVRTSTPDQTITT

SEQ ID NO: 396383 - protein, 342 aa, unidentified
MNIVYVGVDLGSSNFHQVAVNEAGVRKVNREFATSEANLIKAFADQRGEIHVHLEAGELAPWAISIIRPLVSRVVCSHPQSNAWIAKDADKSDRIDAFKLADLLRLNRFKEVHYPQQQSRRDFKTLVQHYDELTQQQARLKTKIKARLRMQGVIVRGEQPFSATGRKVVLAAVKSVAVRTAIKQLYAVLDQSIESQTEARLLMRRAAQAFPEIRILQTAPGVGPIGACRFSAYIHTPSRFSSTRKLWKYCRLSVSHRSSNGKPLRRPRLDRNGCGRLKDVTRKAFEAALRTQRDNGFQRAYRRALETTHDRTHARLTVQRKIASTLRAMWINQTPYRDELMR

SEQ ID NO: 396384 - protein, 330 aa, unidentified
MKKYNYFFGVDISKKTVDITCIINQKMAYRQFTNDPEGLQLLLHWLKELNIAFDQTLFCMEATGLYCFPLTEFLTSNEIDTWIEHAVQIKKATALNRGKNDKVDSKRIAVYATKNLDRLRLWKPMPTTLQKIKHLASLRERLVDTKKRLITPINEFEDIGNKEMAKLLSKTIKNSLAALDKDLKNTEAKIIEIINEDDNLKQLYKLITSVVGIGFVTAINLLVYTNGFTVMKDARKLACYCGVAPFEYSSGTSIRGRTKVHFMANKKLKCNLHMASLTAVKLDSDLKAYYERKVAEGKSKLSVLNAVKNKLLARVIAVVNKQELYVKKVA

SEQ ID NO: 396385 - protein, 347 aa, unidentified
MNGDYAGRQVVGMDLHRRRSVLVRMSEDGRKLGTARISNSPAALRAELARAGKNPRVVLEATYGWYWAADTLAAAGAEVHLAHPLGVKAYGYQRVKTDARDAANLADLLRMGRLPEAWITPREVRDLRELTRYRQKLVGLRSSCKDQVHAVLAKLGLQVTCSDLFGAWGRSWMDGLALPQPYAGKVTSLRQLIGELNTEITMLSEVIADLLAGHAGYRVIQRLPGIGPVLAAVIIAEIGDVTRFRTAAQLASWAGLTPKHRESDTSVTRGHVTKQGSRLLRWALIEAIQRARAGSWPGDVKDAIIARRGRRARNIAKVAAARRLLTLVYYGLRDGQIRCLPEPAVAA

SEQ ID NO: 396386 - protein, 389 aa, unidentified
MKIFVGIDIAKLNHFAAAISSDGEILLEPFKFTNDADGFQLLVSKLESFDKNSIIIGLESTAHYGDNLVRYLVAEFYQVCVLNPIKTCQMRKNNVRKTKTDKVDTFVIAKTLMMQDDLRFITFFDLDMMDLKALGRFRQKTIKQRTRLKIQLTTYVDQVFPEIQYFFKSGLHQHAVYALLKEAPSPNEIASMHMTHLANLLKVNSHGHFTKELAKELRVLAQKSVGANDSAISIQITQTIQQIELLDSQLEKIEAEMTDIMKYNDSVIMTIPGIGYINGGMILGEIGDIHRFSNPNKLLAFAGLDPSVYQSGNFQAKTTRMSKRGSRVLRYALVNAAWNVVRNNATFKAYYDAKRAEGRSHYNALGHCAGKLVRVIWKMLTDEVEFNLE

SEQ ID NO: 396387 - protein, 341 aa, unidentified
MKCSVISIDLAKNIFQICVLDENRKVLFNKKVKRSELLHELRQFEPTLVVMEACYSSNPWGRRIEKLGHTVRLIPPFVVKPFVIGNKNDANDALAIAEASLRPTVRFVAVKSTEQQDIQSLQRIAERLVKTRTGDVNQLRGLLSEYGVVVGTGITTLMNAVPDIVEDANNELTSIARSFILRIYRNIQRISVQIEAVKIELIDLIKDKDEYALLQSIPGIGPIISAALMASVGDAGAFKNGRQLAAWIGLTPTQYASGETNRMGKISKRGNSSLRKYLIHGARTVLNWCEKKGDVLSCWLKKLKERMHGCKAVVALANKLARIIWSVLTTKQPFDVTKACA

SEQ ID NO: 396388 - protein, 410 aa, unidentified
MEVLHQRCAGLDVHKETVVACVRLASEGKVVTEVKTFATTTRGLLALSDWLSENGCTHAAMEATGVYWKPVWHVLSDGEIELVLANAAHVKNVPGRKTDVSDAAWLAELMAHGLIRASFVPDGQTQELRALLRTRKQLVRERTRHVQRIHKTLEDANIKLDAELSDVLGKSGRAMLNAMVAGETDPVRLAALAHPNVKCSQASLREALRGRVTRHHRFLLQLHLGQIDGLDAGIATIDREVEASLTPFRSAVELVSTIPGVSTLSAEIIVSEIGLDMSRFPTVGHLLSWAGLCPRNNESAGKRRSSRLRKGAQWLKTTLVQCGWAAKNKKESYLRAQFLRLKSRRGPQKAVCAVAASILTAVYHMLKDGTVYQDLGAEHFNRRSKTTQTQRLVRRLEHLGYAVDIKPLAA

SEQ ID NO: 396389 - protein, 390 aa, unidentified
MDVLYQSCAGIDVHQATVVVCILHGPLTSTRPKREMAQFDTTTKGLKACHDFLSQFHVEAVGMESTGVYWRPVWHELCDDFELILAQPAHMKAIPGQKTDKKDAHWIAQLTRIGLLPRSFVPDETIQELRELTRQRKHYVESRNRETNRIHKILQSGGIKLTTYIEDIMGASGRNLLQLLIDETPITPRMIHQSVYTSLKRKVPQLLEALDGYFSAHHRFMLGQSLEIYDFYQKQIDCLEERMNGYLNLYERPVEILDSIPGIDLITASVIIAEIGVDMSQFPTAGHLASWAGLCPGNNESAGKKRSTKIRHGNSYLKRCLCQTVFAAKRQKGSPLAERYYQIQSRRGPQKATIALAHQLLKIAYILLKENLTYQEFVLQKKATRDEPVA

SEQ ID NO: 396390 - protein, 321 aa, unidentified
MMARQIVGIDISKATFDAAWRIGDASGWHQFHGQQEPDAYTSLLEAAPPGAVFVMEATGVYALRLAHWLYAHGQKVMVVNPLVIKRFTQMRLIRAKTDRVDAQQIARYGGQTQGPLWRPREAIFTELNQLDSWLDDLLRQRTRVANQGEALRHCPDASPLALQQQQALIDYLSQQIATVEMAMQALVESCAGELYQRLLSIPGVGPKTAIRLIGVTEGFTRFTTVKQLVSYVGLSPHPYESGTSIKGKGHLAKYGMGRMRQLLYLCSWTARRSNPGCAVLYKRLKAQGKPERVIKCAVAHKLVRQAYAIATRGGMFDPEKA

SEQ ID NO: 396391 - protein, 334 aa, unidentified
MKSDVVHIGVDVSKEKLDVFVPARREGMRPTMREVGNCVAGFREIRDFARKAEATVCVEPTGGYELELIAFLHKFEVPVAYADAMRVRQFARAEGCLSKNDTIDAALISRFADKIGVRVLEAQEVEAVELKRKAKFRQAMMDSRTAMANRLETEIDPEMRALLKEQVKHMDKVIDKAERLCLEAVENDKRMNTLRERFTRVGGVGDLTAIAILAGLPEIGTLPDAKLNRLVGIAPEERQSGTKEWQRRIWGGRGDVRNALYMASVASIIWNSTLGTYYRKKRAEGHPHKWAIVPTMRKLLSLLNRIARDPDFTPRPEPASTKLNARVGRKKIVA

SEQ ID NO: 396392 - protein, 607 aa, unidentified
MSTIASLDRIGVGIDTARYGHRVSFLRPDRKPAAKPLTVMENRAGYQTLQDRLNQLHEQHPTAHFHVRIDAAGQYAVNLELFLRDLKLPMTISVGEPKRNKDYQKAHFPKRTTDDTESQAMARFAVIELPNATPAPSTPMILLREVAGRLQSKVKQTTQAINRLHNLLARVFPELATLTEDMSVGWVLKLLDKYPTAERIAQAQIASLEKIPYLSVEQAHAVHQAAKQSVASLRGELAEALVRDHVNQLRLCQKAEQHLHQLLLEAFADLPASPHLQVLTITGIGDATAAALVAKIVDINRFATPNHLVSYFGVFPEESSSGVDKRGRPLPPGTLIMSPKGNDLVRFYLWNAARNAIQHNPAIRALYRRLRAKGKRGDVAFGHCMRKLLHLVYAVWKTDRPFDKEHFPWEGSSDTQPSATTPPSADAGTTPSGNEKAVGHKRDLPAEAVVTTADSTLEPASPAVKPASQSAAPRPKVDFACVREHVTMEQVLQHLGYFASLRGRGRQRRGPCPVHSQPTAPERTFSVHLGKNAFQCFHAECAVKGNVLDLWAAIHRLPLYEAALDLAETFQVPRNREEEPVKGTSSPRTATAKTSAPAAATATDGAK

SEQ ID NO: 396393 - protein, 336 aa, unidentified
MQYVGMDVHWRQTTICILDENGRRVKMMNVRGPWQKVLEELGRIEGCWQVCFEASCGYGWLYERLKRMAQKVVVAHPGQLRLIFRSKRKNDRVDAEKLAKLLYLDEVPPVYVPSVQVRSWRGMIEHRQKLLQEQVRTKNQLRSLLRTHGIVAPRGLWTKRGLAWIEAQEMPTSMDRLQRDILLERLGSLRGLIERVEEALGEIAQSHAGMKLLREIPGVGIRTAEAVMAYVDDPQRFTSIKAIGSYFGLVPCQDQSAGKNRLGHLTRQGPATVRKLLTEASWQAIRRSQEIRAYFERIRQGNPERKRIALVATAHYLLRVMLAMLRTGEVWRAEAA

SEQ ID NO: 396394 - protein, 415 aa, unidentified
MEKVYDICCGIDVHKKIMVACLKKGSKQEIRQTGATTRELLELADWLKASNCQMVAMESTGSYWKPLYNILEMNEIPAMVVNAQHMKAVPGRKTDVTDSEWIADLARHGLLRASYIPGKDQRELRELVRYRKSLVEDRTRELNRLQKMLEGANIKLSGTIKDINGMSARNILNYLVTGAVIDEAKFDEMYAQNKIAHNLKAPKAQIIDDLNGVMSPLQRRVMKELLAHLDELNEHIKNLNDEIDNFMKPEEQAAATKIQDVPGIGTASAQAIISVIGTDMSRFPTDRHISSWAGVCPGNNESAQKRSSGRTRKGNALLRSTLTVCAHSAVKVKSSYFYAQYTRICAHRGKKRAILAVAHSILIAIYHILKENVPYQDLGADYYNRFNRESKINAYLKKLKALGWEAPTAPATLPA

SEQ ID NO: 396395 - protein, 422 aa, unidentified
MDVLVERCAGLDVHQAVIVACALVSADKGRVRKETREFASTVKGLAALVGWLRELGVSHVGMESTGVYWMPVFAALEAAGGFDLIVANAQHVKAVPGRKTDVRDAEWLAQLVRHGLMRNSFIPAQPFRDLRDLMRYRRTLVETQASERRRLIKQLEQVNVKLAGVLSDVFGVSGRAILRALIANDRTPEEMAGLARGVARRKWAVLRDALEGSLKDHHRAILATQLARVEACEADIAALDRLIREHLAPYAPEIELLTTIPGIDWLSAAIILAEIGTDLSAFPSAGHLAAWSGTSPGNNQSAGKNKPAAARKGNPHLKTALCNAAVAAAHKKGSYLKAKYYKLKSRIGAGKAIMAIAHKLVVAIFHVLTQATAFKELGETYLDTRDVKRSAQKHIRKLRSLGYEVALIPQTEQAEKAMPLKV

SEQ ID NO: 396396 - protein, 371 aa, unidentified
MLVERTSVGLDVHARSVAAAAIDGVTGELVQAKLTPSHDHIRSWIAELAGPVAVAYEAGPTGFGLYRSLTAAGIRCVVAAPSKLQRPAGDRVKTDAKDAVHLVRLLRLGEITPVAVPTAEQEAAWDLVRAREDARGDLMRARHRLSKLLLRQGIVYNGGKAWTDMHNLWLRQQRFDSMATHLAFVRGPFTWPLTAFESDYDTVLAVTARRRRLDTAIDELAADSEFTPLVHRLGCLRGVATLTAFSLTVEIGDWTRFTGNTIGAFVGLVPSEHSSGVSRVQGSITKTGNTHARRLLVEAAWHHRPSYVPSITMRNRWELASPAARARGDAGNRRLHDRWIAFNTRRKRSVIAGVAVARELAGWCWSLTVMD

SEQ ID NO: 396397 - protein, 360 aa, unidentified
MSHRTWKLGNVKSASASEGDRMTVGLDVHKATACAAVRKNGQEIATWVMPMDNQTIVASLKRFGPALKKVVYEAGPTGYGLARALKKAGLPVEVIAPGKVPQAPNADSKTDRLDARKLAEEAEKGSLQKAVIAIPTEQEEADRQLARLRDQLIGKQRRVKQQIKSLLLQHGLPEPAGLAHWSAEGLAALKAMRLRHQLQLSLEVLVGELEHLVVLRKRVERHEVWLMKQRRHRRGARLLQTHPGVGVVTATAFRLEVYQPERFATPEQLAKYVGLAPRVRQTGTKRRGGPLIPAGRGSLRSLLIEASWRWIRDDAAAAKTYRRLVRNTGSGQKAVVAMARRMAVHLWCMLCRGQEYRPAA

SEQ ID NO: 396398 - protein, 317 aa, unidentified
MESKSETDRFVGIDVSKSWVDVHVRPDRSAFRCGTDGDGLAELTRRLCPLSPRLIVMEASGGYESIVAVTLAEAGLPVAVVNPRQVRKFAEALGQLAKTDAIDARVIAHFAEAIRPPPRAMPDGTMTRLKELLARRRQLVVMVNAEKQRLAKAESPITQRSCKALLKSLEAERGRIDRAIDKLVQQSPIWCAKLDLLTSVPGVGDIVARTLIAELPELGSIDRHQIAALAGVAPFSRDSGRRKGKRFVRAGRVQVRAPLYMACLVAIRHNPPLKTFYRRLRDLGKPPRLALVAVMRKLLTILNAILRNNKPWATAHS

SEQ ID NO: 396399 - protein, 342 aa, unidentified
MSVYVGIDVHRKRSQVAVIDAKGKVIANRNVPNGVEPILKVIGGLPPGTPAAFEAAFGTSWLVWLLEDYGFAPHLVHPSRCKAIASARLKNDKVDAAILAQLLRADLLPEAWIAPPPVRQLRALLRHRVALVRLRTLLRNRIHAIVADYGHDRPAGGYWTGPGRAWLASLALPAVSRELVEDDLGLIDALQGRIDRLDWEIRQRARSDPRVKVLTQLPGVGPFTALVILAEVGDVSRFGSARKLASWAGLTPTVRGSDRVAHYGHISKEGSVWLRWVLCEAAQTAKRSPQFAASFQAIAKRRGKKIATTAVARKLLTRAWHLLTDAEAAASPQPAAPPTTAR

SEQ ID NO: 396400 - protein, 520 aa, unidentified
MATVRNRKRPSSRRAAPSLGKPRGVLHPRVQQVGPEHFGILCFDCAKARSKFLLADFYGRLLIPPTTVAHNRPDLEAAVAQVRQAFIDHQLHDGLVAIERTGRYHRLVQRTFAAAGFETRILHPFVTKQYRQPVDPGNKTDDTDLAAIHRATVTGCALLEATRDEAWTTLLLLIRQRRDLVRKGAALNCQIRDHLEAAVPGFAACFDKLWESPIPWHLLQHFPTAEQLRQAGVTTLCHSLRQAGIRFQQRTVQTVLDWADQAAPGDVAADQHRRIALAYYRDRQQKSQEIHALERDIAGRLVQTPYILLLSFPGINVVSAADFAGEMGPIEHYLNAKAITGRAGLRPSRYQSDQVDKANGPLVRNCNRSLRAAILGIADNLIVCNHHFQVLATQWAAQGKDPRHTRVKVALRFCRIAFQMVAGRQVFRHPSIQGRHYILDKLNAFHRDHDTGMAEVLRDLQAAVGQVPAHEHAAEAKPLAEELRKIQEGHRRGPQLLGDILPMVLERLGVGVVESAESGE

SEQ ID NO: 396401 - protein, 423 aa, unidentified
MMKLKYSICCGLDVHKNVIVATIVITNKDGISEYKQKSFSTINSDIQKFHNWLIENNCYHVCMESTGKYWIPIFNYLESDIDVCLTHPKYVKAINGKKTDKKDSKWIADLYKFDLVRCSFIPPKDFRQLRELARYRFKLVCMKSSEKNRIQNCMTVSNVGIASVLSDPFGKTATDIMSYLLEHTADSMDEKAVRKLIKKGAKAKSDEIIEAIRGYNIETDQAKKLELARGHLEYLDDMITQTEVELYVRIKPYYEFVEFVSTMPGMTELSSTIVLAETGVDMNIFDDAKHLCSWCGLSPASNESAGKKKSVRIGKAGDYLKPMMIQCALAAVKNKKQPYFAIKYGRIKKRRGHKKAIIAIARMMMVCIYHMVSEKKSFNPTDYEELMDPRNHVERVVLNETNVFAYLESLGYDSSKLVKRNDS

SEQ ID NO: 396402 - protein, 412 aa, unidentified
MNLVYERCAGLDVHKRNVVVCAIIPDVKGQRQKELRTFSSMTPDLLRMRAWLKDLRITHVAMESTASYWKPIFNVLEGHLEVLVVNAQHLKAVPGRKTDSKDAEWIADLLQHGLLRPSFVPPAPQREVRELTRYRISLTEERSRLINRLQKTLEDANIKLASVASDVMGRSARDMLTALLAGEADPALLAELARGRMRAKRDLLAQALQGDLKSHHRFLIAEQLADIDALDEAIGHMSLEIAERLRPYEHQLRRLETIPGIKRRLAEVILAEIGPDMSRFPDARHLASWAGMCPGNNESGGKRLSGRTRKGSPWLRSALVEAAHAAIHCKDSYLSAHYQRLVIRRGGKKATIAVGHTLLVIIYHILSEDKDYEELGGNYFDEWDRQAVQKRLVRRLEKLGYEVKLEPTSPAA

SEQ ID NO: 396403 - protein, 387 aa, unidentified
MAIDHVKKTNQASDRSATVGLVTLNRRLVTAATEVYSRKQLEETQMRFIGVDLHSNSLTVCYLDEQQHEELRTFALQELERFQATLSLHDQVAVEATSNTRHFREAIKNLVRKVVVVNPSQFEVIRKSVKKTDRHDARMLALFLSKDMLPEARLKEPTEAQLHSLAHTRDKLVKLRTTLINKIHALHVAVGLKSKKSSFSSRRGLQAALQRSWDELTRVELEVVVSQINSLNEGIKRLDQQLSHQGRRLVGHRNLTSIKGIGDKSAAILLSVIGEVSDFASEDKLASYFGLVPRVANSNETINHGHITKRGSKLARTTLVQCTLTAVRYSPYLKTFYERIKQKKGAGKAIIATARKFLGIIYRTLKYNWVFADFPNFVLAEETSTSE

SEQ ID NO: 396404 - protein, 400 aa, unidentified
MISVGIDVSKGKSTVCMMKPGGEVLSAPFEVVHTKTELLNLVRIIKSQNEEVRVIMEDTGHYHLPVATLLVDNGIFVCSVNALRMKKYCSQSIRRAKTDKIDSIHIASYGITYWNELNLIPCTDDTYKELQLLARQYYQSVSLLVKAKVNFSNLLDRVTPDIQSVLKDNASNSKLTDFVQRYYHFSHILDMGEKRFTSDYCKWAKKKGYRLCERNAKEIFALAQNGIPVLPDTQSTKIVVTEAVRVIHELELSRNTILAQMQSFAKTLPEYSVVRNMPCIGDTLAPRIIAEIGDVRRFKNKHSLIAYAGIDAPPYQSGSFNASERHISKRGNPYLRKTGYEIMQSLIKHKPENDAVYDFIVKKRCEGKCGKEAMIAGLNKFLRVYFGKVTELYSNLNFMI

SEQ ID NO: 396405 - protein, 397 aa, unidentified
MYIVGIDIAKRKHEAAVIDGEGTVIIKPFSFTNNCSGYNRLLAMLTKAKLPLDEVSFAMEATGHYWLALFTRLQKEGFRVQVINPVQTNSIRSFYIRQAKTDPRDALLIAEVIRFGHFSESTLHPENIYELRELCRGRHAIVSMQADVKRKVVALLDQVFPEYETAFTNLFGDTSMAILQTCPTPKELSEMPLEELCHLIEVSSHKRFRMAKARELQELARNSFGFAMAGDVFSTMIRLYAKHLDFLKQQVREMDRKIAEIMETLDTPITTITGIGPTLGAYILSEIGDINRFSSAARLAAYAGIDPTMRQSGEYNGVRNRMSKRGSPYLRHAIWLAASSAVLHDPALKFYFQKKRDEGKPYMASVGHACRKMVSIIYAVMRDNKAYTPCIPNEISA

SEQ ID NO: 396406 - protein, 473 aa, unidentified
MARKKGKDPAGIGGPGLTGEPAGVSDEPAEVIARAAAIDVAKGSGMVCTRVPHESGPRRRVQRIWQVSARYSEIAALMAELAKLGIQRLVLESTSDYWRIWYYLAEAAGLEVWLVNARDAKHLPGRPKTDKLDCVWLCKLNERGMLRRSFVPPEAVRDLRALTRLRSRLAQDQARHQSRIEKILEDALLKISSVISDLMGASGRRFLAALVAGERAPDKLAALGDRRLKASPAQLEEALAGRFRDIHALEIGMLLELIDDITAKMARLDAEITARLARIPGLAPACAGCGEIGGGHAPSCPQAGAPVLSVIERLDELTGIGIDAAQVIVAELGTDKTTFPTPGHAAAWAKLASRTIQSGSTSKDGRTGKGNPYLRAVLGRAAMTAAKTDTYLGERYRRIARRRGKQKAIVAVSRTICEIAWMIITDPSVRFSELGPDYYARLDAGRQTRNKIRELERLNPGMKVTLTPAATAA

SEQ ID NO: 396407 - protein, 455 aa, unidentified
MYFEKRDLPQYNSIVLVRARKAQIPIGECLYMKRTQNEKILQIKNETLIVGVDIAKKIHHARAFDNRGVELGKLVKFENSAQGFAAFDAWLAKIQQKHGMTEAVVGFGPTGHYWFNLGDHLAECGHKLAILNPYHVKCARELDDNSPSKSDQKDPKTIAMLVKDGRYRDVYIPDGDYQELREMVRERERLQERLGSLSSQIIRWLDIYFPEFVTVFKDWRGKAAWIALRRFSTPKRMAEVGAQEILLAWREEMKRPSLKKAEALCSTAEQSIGRTQGSGAAVRSLQNIMTEYELLTMQMEQLEEEMQECLFRIPHAAELLAIKGVGMVAVAVFVSEIGDIRRFTDPRQLIKYAGLNLRTNSSGEFKGKTKISKRGRRRLRHALYKAMIPILATNEEFRSLHQRNLTRTQNPLTKMQSIIALCGKLLRVIFALLTKGVEYEPSKIKVVTTDVAQAA

SEQ ID NO: 396408 - protein, 371 aa, unidentified
MSECIMVGCDLHQKTLVLRYALDRGSIEARTFANDRPGRRVMIDWLNQMRRQRGAGRVLFAYEASSEGFGLYDELRAAAVECHVLAPTRIARSSKHARGKNDGRDAVQLLELLRAHVLAGNALPTVWVPDLQTRDDRELVRLRLDVADKRIVTKNQVQSLLKRNEVRRPAGTGKSWTNTYWAWLKGLASGRVEGLGSGGRVALSSLLRQMGAIEDEIARLDKQVSVLSRSSRYRDAVKRLLTIKGVATLSAMVFLTELGDVRRFSNRRQLAAYLGLVPTSNETGERHDCKGHITRQGPSRVRKVLCQSTWALIRTDPQFAAAYAGIVRRNPKHRKIAVVAIMRRLAIVMWHRAVDDGPPSEAREQSPGVAA

SEQ ID NO: 396409 - protein, 345 aa, unidentified
MQSMYYIGLDVHKKTISYCVKDGSGMVHAEGAIPATRWDLDRWMKMLPQPWTAAMEATIFTGWIYDHLKPHAAALKVAHPLMLRAIAAAKKKNDRIDAYKIADCLRCDFLPECYMASTEIRERRRTLRYRNLLVHQVVQLKNKISGLLMEAGVSYNKQKLHKVGYFKELLATNPDINEGLRPLLRLCRETLVRLQKTESALVRSLQRDSLLAERVRRLMTIPAVGPITALTWVLEVGDVKRFSSIKKAISYCGLCGAEKSSADTVKRTPISKQRNKHLQSVLVEAAKMAPRLSPELALIYDREKQKGNANRATLAVARKLVAYLVAIDRCQRDFLVVEKENCAAA

SEQ ID NO: 396410 - protein, 408 aa, unidentified
MQVTFGIDVSKSTSTVCELIGESKNELTITNNRPGFIQLLHELTAFSKHPQIIFEATGVYSRRLQAFLEDYGYEYVVINPLKAKKEMNMGLRYNKTDKTDAYHLALIQRLYRHPVNQSESQTYKQLNALSRFYDQLTSDLVIAKNRLHQALQSTFPEIENLFSSAKGKNYWQIVVRYPHCDLVRREDKKQLINWLMSLKGIAFKHALRTADKLIELAYQAYPVVSCSSIEVEQVQYYAHRLLNLSDQRENLIARMVKLAKSLPNHDLENLESIPGFAQTTAVRVLAELGDLRRFSNPNKINAFIGIDPGRYQSGEMDSNLSITKHGNAVARKLLYRAIGQIDNAAKTNPCHIADYYESKKLSSQTKGFKKIAIASIHKLIRTIYALIINDQLYDYNVATHNQKDFSRN

SEQ ID NO: 396411 - protein, 751 aa, unidentified
MCTICAAIRPFDPSCALSGLTGTGIESLRAVIRETSDAAPRPGTVYRMGVGDSFLGTIGWSGDEDWVGIRLEAGRSYVFELRGAGGAALFDPLLELYSPQGGFLARNDDFGGSLNSRMVFTATQSGTYFLSANGFLNSTGSYQLTAEIVQPLRPGSMDAMATYLTRGYWADQGQPARAYDVRADNIITVDLSGLGQAGQVMARAALQAWSAVADLQFRETTTRADIRFTENDRGAYASSTLTADGRVVSSVVNIDRGWLQTEGSRVGTYTFQTYMHEIGHALGLGHMGPYNGSGTFPGDARFANDSWQASVMSYFSQTENPNIHASYAFAATLMPADIIAIQRLYGAAGAGTLTAGNTVYGLGHTLGDSWLGRIFSAQNGAQLPGIEDARDVAMTWGDNGSSPSLHRMVHVDLSQWRVEWTSRRLSQDQDGKRLFQGAVASDPDALTRIIQEKAPNCQRVGMETGATMPWLWRALRARGLPVICMDARHANRALSMRRNKTDKNDARGLAELMRIGWFKEANVRSPQTQYVRSLLSARYQLRLSRKDVLNQMRGVVKSFGLFTGSTATRTFPAIVREIIQENPQFGPLLTLLLAVHDALVAQITAYEDALKNIAASDPDARRIMTVPGIGYLVALTFMTAVDDPTRFSSSNKLGPYLGLSPRVRQSGEASWSAGIGHAPDRMMRSYLYQAATVVLTKTASWSALKAWGLRLYKRSGFKRAAVAVARKLAIIMHAIWVGGTEFKYGQKERTA

SEQ ID NO: 396412 - protein, 356 aa, unidentified
MNQITTVGVDLAKAVIVVCAADVEGRVLFFRQLSFNGFSQWAATLPPCMFGMEACGSAHHWGRRLTTYGHTVRLIAAEFVKPFRKSQGAKNDRNDAQAILTAVRQPDMRFVSVKSVDQQAVLAWHCMRKGWSDDRTALISRMRGLLAEFGVWLALSPEALKRALPRLIEDERLPARMRALLSAAMEELQRLEERIERCEMEIRTHAQQSEDAQRIEAIIGVGAITSSAVAATVTRARDFKNGRQMAAWLGLVPKQFSSGGKTMLGKITKRGDTYLRGLLTGGARSALRSAMRATPEKRTRLQCWIMEARVRLGYQKTLVAIANKHARMIWAILAKGEQYDTEAWRRYVPPTMQGGG

SEQ ID NO: 396413 - protein, 329 aa, unidentified
MNYLGIDVSKTKIDCCLFINEISGKKKTKVFSNNEIGFNNLINWFTLLKISHNDLLITLEATGIYHENLCYFLHDAGCTLALSNPFRARRFAQSMSILNKTDKADSEVLAKYGAFAHLKIWKPDSENIKFLKHLIARRDAVYSDLLRENNRLEKSTFNHTSIQVINMIKNSIDSLQSSLLSIDEMISDLIEQDRDLKSDLDLLQSIPAIGKRTGLLMLNLFHSHQFDTASQAAAYVGLVPLQRQSGTSVRGASRLSKTGSTKIRSSLYMAAVVAIRHNPHVKVMYDRLLKNGKAKMAALCAAMRKLIHICYGVLKNKTPYHADFLQENS

SEQ ID NO: 396414 - protein, 400 aa, unidentified
MPYTVGLDWGGTTHAVCVLDAAGAVAQQFEIPHTADGLAALRRKLAAFGPPAELPVAIERPSGLLVDALIEAGHPLVPIHPNVVKASRPRYRSSGAKNDRGDARLLADLLRTDGHRFAPLKPQSDAIRALRALVRGRDDLVAARVALANQLRATLEASWPGAVAIFADIDSPIGLAFAARYPTAESAVRLGEKRLAGFLAQHRYCGRRTPAELLARLRAAPTGRCADAEAEARGEIVRALAATLARLVEQIALVTARIQHAVAELPEGRLVMSFPRAGQVCAAQIAAELGDVRERFPSADALAMEAGCAPVTRQSGKSRAVVFRWACNRRLRAAVTCFADNSRHSSAWAAAAYRRARDRGCNHPHAIRVLARAWLRVLWRVWQDGKPYDPIIHKAVTSAA

SEQ ID NO: 396415 - protein, 408 aa, unidentified
MSPEKPPPMRFIGLDIHKHYLIAVGVDADLNPLLGPQRVQLSNLEGWTQKTLTPQDAVVIEMTTNTWQIYDELLPHVHSVTVVHPPHIALITRSQVMTDKIAASHLARLHAKGLLVGIWVPPQEVRDRRALSAQRRKMSRLSTQAKNRLHAVLHRHHLPPPAGKPFSPDKRVWWLSLPLTPLEKAMLLSDLDTLTFAQSQIASLEQAMLSLAAQDERIPLLIQMPGISLVNAMTILAAIGDITRFPDAKNLVGYAGLGARIHDSGLTSRTGKITKAGRKDLRATMVEAAQTAANTHPHWQAELKRLEPRLGRNKAIVAIARKLLVAVWHVLAFQIADRFAVPELVAKKLKNFSDRLRLERRSPGQSTAAYVRSQLDRLGIGAQVSHLYRGKLKSPLRLPPSALRPTGD

SEQ ID NO: 396416 - protein, 391 aa, unidentified
MVCVGIDVAKDKHDCCILDSDGTIRADCITIPNNMDGFKQLLQTIRDCTKKSDKIKVGLEATGHYSYNILGFLLDNDLAVYVMNPLHTNLYRKSLSLRKTKTDRVDARTIATMLLSDVDLKSYTDIAYHNEELKSLTRYRFDKVQECAKLKQSVSRLATILFPELEGLVSSIHGTSIYALLSEYPGAKQISEVHLTKLTNLLTTASKGRYGKEKAIQIREAARASIGSVMPAKSLELKHTIKLIQELASEIDEIEDSIQKIIDELNPPILSIPGMGVNSAAVILAEIGDFSNFSSPDKILAYAGCSPSTYQSGKLTNCYAHMEKRGSRYLRHALYNATKYVCYWNPVFAEYLAKKRAEGKHYNVALSHAMKKLVRLIYALQKSGKTYLTAA

SEQ ID NO: 396417 - protein, 395 aa, unidentified
MLAANERPEAPTAIRIDLGAIFVSLELSRSKWLITSLSPGGGEKMSKHAVAADDIAGLLALFAELKRKAQARTGRCFPIIVIQEAGLDGFWIHRVLQAEGIESHVVDPASIATSRRRRRAKTDKIDGETLVRALLAYKRGEPRVCAMLRVPTPEEEDRRRISRERKALTNERVRHVNRIKGLLFSQGVSGYQPLRRDRRTRLEELRTGDGRPLPAHLKMQISRELDRLELLIGQIKAVEAERDAMLAVAPVGSAHFADCEQPAPAMLLALKGIGPEFAVVLWSEGLSRHFDNRRQVAAYAGLAPTPWQSGSVDHDQGVSKAGNPRLRTTLIQVAWLWLRHQPHSALSLWFKQRVKQNDGRLKKKTIVALARKLLVALWKYVNAGVVVEGAVMRTA

SEQ ID NO: 396418 - protein, 415 aa, unidentified
MKQTPNARPIQRYVALDIHKEYVAVGGMNGAQEWVLQPRRVEMSRFRAWAQDNLREGDAVVIEATTNVWDIYDIVSPLVSRTVVAHAAKVRQIAEARVKTDKKDIERLLCLLIADVVPEVWVPPAEVRELRGMISYRHRLVKTSTMIRNRLQSLIHRHNLILPKNCLTDKAWWDGQKVSALEKMQIRQELAMLEEMEKHKAEVDAELARQSLGERWGKQAMRLLQLPGFGVVLTMTVLSAIGDVTRFEHAKRLVGYAGLGAGVHDSGTEHHQKPITKEGRKELRWAMVEAAWRAIRISPYWKEQYEKYLKRMRKPNQAIVVIARKLLVTIWYVLSGHKPYRYSSEEELAYKMLIWSWSMGEEARQGMTRQQFAKYGLLRLGLGRDLTRIVRDGYPRRLAPTEEVLALRPELRPPE

SEQ ID NO: 396419 - protein, 349 aa, unidentified
MKQFNAEVRTLAIDLAKNVFQLAGADQLGEVIYEERLKSREALRELFAQLPESVEVLMETGPGAQAWARTLRARGIAVRILPAQRVAEHRSGAKNDRNDVLAILRAGRDTAIHAVPVKSVELLTMQALHRLRSGYVSRRTTISNQVRGLLLECGIAIKAGEPALEACLDRSLCDASLPIPDRLRDAIADLWAEHQGLGIKVAELDRELAQVAKRDPVTERLMTIPGVGPTTATALVCKDINPQRFANARQFAAYFGLVPDQHSSGNKVRLKGMSKRGDSYIRSCLINGAHAVVRRVTPDSDDPRRRHIQRWIQRLGSKGAAVRLANHNLRVIYALMKTGGVYRDAMAKA

SEQ ID NO: 396420 - protein, 340 aa, unidentified
MSVYVGIDVHRKRSQVAVINEGGEVLANRNVPNGTQPVLGVIGGLPPGTPVAFEAAFGWGWLVELLEDYGFAPHLVHPLQCKAIASARLKNDKAGAAILAQLLRADLLPEAWIAPPPVRQLRAMLRHRAQLVRLRTLLHNRIHAILADHGHGRPEGCWSGPGRAWLASLPLAAVSREVIDDDLALIDALQVPIDRLDWEVHQQARRDPRVKVLTQLPGAGPYTALVLLAEIGEVSRFGSARKLASWAGLTFNVRGSDRVAHYGHISKQGSAWLRWILCEAAQTAKRHPDFAAGYQAIARRRGKKIATTAVARKLLTRAYHLLAAARGGTPASPEGPPSPG

SEQ ID NO: 396421 - protein, 412 aa, unidentified
MENPFSFFVGIDWATENHQVCVVDRDGKTIAERQVAHSGTGLQQFLTWLQQIPVPAERVAVAIEMPAGAIIETLVEHNYRAFSLNPKQLDRFRDRHTVAGAKDDSRDAFVLADSLRTDQPCFHPVYLDDPEIIRVRTLSRFEDSLVQDWSRLTSQLREQIHRYFPQLLQFSPAADEAWIWDVLEAAPLPVLASQLKPQQVQKILSHRRIRRLSAEEVLQQLRTPPLPVAPGTAEAASEACLLLIVRLRLLMQQKKEVERRIQEQLTRFCADEERMEHRDVQLILSIPGIGRVITATMLAEASQPLAQRDYHALRAYCGAAPVTHQSGKRKRQVIMRYSCNQRLRNAFYHWARISVQQDSRSRAHYHRLRSQGHSHGRALRSVLDRLLAMLISILRHQTEFDPALRKSIPVAI

SEQ ID NO: 396422 - protein, 376 aa, unidentified
MDKDSGEVLLQPSSFSNTKDGFDSLIQKLSSYSKDSILIGMEDTGHYHFALLKYLLEKNFTVALINPKTTDYTRKIQNGITKNDKLDTLTICDVLDTPVRKKQYRITKVNSFDLYEQKQLTRHHHNLKEELNVYTNRLQKCIDIVFPEFNSLFSSKYGIIYMNVLKTFGSAENIASTDIRTIRKCFEIKGRGNRISLTAQQLNSAKSSIGISSAAEVIKIKHLISQIELINEQLAETDKKIEEFSIQNNSPILSIPGISHFFGTSILAELGEISNYSKPSKIIKAAGVAPYHYESSQYNAQHTAITKKGSPYLRKTLYQIILPVINNNPVFKQYYDLKISQGKGHRCACGHCVRKLLRIIYHLSSTNQQFDDALLR

SEQ ID NO: 396423 - protein, 413 aa, unidentified
MLKIVYPICCGMDIHKSFLVACIATTNEHGVTSYKSKRFSTFTGDLRRLAAWLSENNCNDVCMESTGKYWIPVYNILESSCQIVLAHPKYVKAIRGKKTDKKDAKWIADIFKHDLVSGSFIPPADIRQLRDLVRYRWKLTSFTTGEKNRAQNCLTVSNIKLDDVFSDVFGKAASAITTRLLESNEPFDVTPYLTKGIKASVEDIQNAVDGKMCAEQAEKLRIIRSHMDNLELCKMNLESLILFVVEKYLPQLNLVLTVPGIQTFSSIAVIGEIGVDMSVFPTSKHLCSWAGLTPQNNESAGKKKTTRVSRAGAYIKPLLVQCANAAVKSNKHPEIKNRYLSLKKRRGHKKAILAIARMLLTAIYNILKKSEPYNPALYRKANLPPAHREVSVDQAIFILQRQGYLITHPALSA

SEQ ID NO: 396424 - protein, 369 aa, unidentified
MTKVRTWVGLDVHAAKTVACVVDGQTGEMTVHRLPGATEAMVAFCVGLPAPARVAYEAGPTGFGLARALTTAAVGCVIAAPGKIERPSSDRVKTDQRDAERLVRLLMIDALHAVRVPTDSEEAIRDLVRAREDLRGDLMRARHRLSKLLLRHDVRYEDTTSAWNDRHRAWLGKVDLAQRGAQATLLDYIGAVDALVLRRDALERTIGEVIPGSPLESTVARLRCLRGIDTLSAVGLAAEIGDFTRFERPAQLMSYMGLVPSEHTTGESRRQGAITKTGSRHARRLLVEAAWHYRRAPRHGTTLARRQGGQPQVAVAISWKAQQRLHQLWRRLDTQRGKRRTLVAVAVARHLAGFCWAIVTTNTEQHTTN

SEQ ID NO: 396425 - protein, 388 aa, unidentified
MQKLNDLSRSLAVLEPDVTLIAVIEMSLSSWLVAGIVPGVERQPLKKLAVDESALLKLLHRWREEAEKAGRRIKRIVVAFEAGRDGFWLARWLKACGIEAYVIHASSIAVSREHRRAKTDRLDTELLKRAVLGWLRGERDHCKMVAIPTIKDEDAKRPNRERDSLVGERSRIVNRMKAALVRLGIRGFNPKLKRAAERLDGLRTPEGEPIPPNTMAELRRDMERRRLVNNQIRQIEEARLERLEQTPSDSDGPHAMVRLLARVIGVGIETADMLVHEVLTRNMRDRRAVARYGGLTGSPDESGRRRREKGLARSGNARVRRGMIQLAWRFLLHQKNSALAQWYRARTENARGTRKPMIVALARKLLIALWRLVRQGVVPDGVVLRLAQ

SEQ ID NO: 396426 - protein, 344 aa, unidentified
MQIRSVGIDLGKTTFHLVALGASGKVLVKKKFSQKQLLAFTANMQTSLIGLEACSGAHFLGRALRQQGHDVRLIAAQFVKPFVKSNKNDFVDAEAIAEAVERKNMRFVPIKTDDQLDLQAMHRVRDRLVSRRTAVINQIRAFLLERGMVFAQKPTKLKAAMADVLENADNALTPMMRNMISILWDEWKTVEQQINELTDRLEQIAESDAGCRRIRQIPGIGPIVATAIVAAIGNGAAFRKGRDFAAWLGLVPRQYSTGGNAKLLGISKRGNIYLRKVLIHGARAAAMRIKRDRFPIGAWMDALEARAPRNVLVVAMANKLARIAWAVLSTGEEYRPGAIAVIAT

SEQ ID NO: 396427 - protein, 355 aa, unidentified
MPENIHKIIIGVDTHKDFHHVAVITSLGAVVADRQFPATQAGYGEVLDWVAGHGQVLRAGVEGTGSYGAGLTKRFRVAGIEVIDVIAPDKQERRLRGKTDKIDAYSAARAVLAQRATTVPKTREGHVEAIRVLHTTKRLVIKQSTETMNQLKGLLVSAPETLREKLAALTGKPLSRACTGLRALKTDDLVTRHTKTALKALGNRHLALQAEAAALLKDYQALVKDYAPELLAVHGVGPDVAAALLTVTGENVDRITSESALAHLCGAAPIPASSGKTNRNRLNRGGNRQGNAALHRIIVSRLKGHQATKDYMTKSLARGKSKREAMRLLKRYVCREIHPILIKIQQRHQTLQQAA

SEQ ID NO: 396428 - protein, 348 aa, unidentified
MEQVSRIGLDLAKQVFQVHAVNADEKVVVCRQLRRAEVLKFFAKVPPCFIGMEACGSAHFWARQLTDLGHTVRLIPAGDVKAYVKRGKKNDAVDAAAICEAVGRPRQQFVPVKTPEQQAALMLHRTREMLVGQRTQLINAVRAHLAELGIVAALGWNAFNGLVEVLKDGSRIEVPELARTALNLLIDQVHALGLQIKALDKQILAWHNKSEESRRLATIPGVGPHTASAIVATVGDVKRFPSGRRFASWLGLVPRQNSTGGKTSLGSITKAGDRYLRTLLVIGATGTIRFARKDVPGGNAWAAQLLAKKGKQQGRLVSVALANKTARIVWALLARGGEYKAPTAATVS

SEQ ID NO: 396429 - protein, 508 aa, unidentified
MIQIPAVRERCAAIDVGKRELAIALITGPADEDGKMQTRISGTTVPALEGLKVWLIQEGCTSVAMESTGSYWIPVKNVLEGSMEIILVNARTHQPKKGDKTDLRDAAHAAHLHRHGLLKGSYLPERGIVELRDLTRRRKKLLGNLGAEKNRIQKVLEVANVKMGNVVSDVFGVSGQEIVSALLQGKTLPASAIADIARARLRKRIPELVETLQGHQMNEHHRWLIQQSVDHSVLLDEQLEQLEERIAIKVQPYARQEQLIRTIPGFKGEHNAPSLLAEIGPNMNQFPSAGSLCKWAGVCPGNNRTAGKKKHSHIRKANKFLMATLVQAAWGAIRTKDSIFQRKYRRWRNRMGECCALIAVCHALLKVVYHVLQADRPYAEADAARLAEREKDKRIHHHANALRKLGADEATIQQLIAQMTEVPKPALEAVAASSGPEAIRTPETKPGACRKTSKRPIQSPVTRRGALGFRARQTKMQTRSTFQKPMEGYPLRESSDEKAKDVGAKNQP

SEQ ID NO: 396430 - protein, 456 aa, unidentified
MQNYYLGADVSKGYADFVILDAHKQTVEPNFQLDDTFDGHCKLYEILSRFLQEHPDGMLFAAVESIGGYENNWLHTLMRFQATLNMKSARLNPFGVNANSKASLRRVITDKISARDVAEYMISHPEKVSYQQEDYWGSLRKLWGFFNMLTKQKTQLFNQLESLLYSANPEIMAYCKKKSPLWLLEVLRRYPTAQKLSEAIPESLALIPHVSAVRAQELIDKAKRSVASRSDGITEELIVETVEQIIHLKTVIQVQEKKMGDLCSLPEIALLMTFKGIGITSAIGLMIEIQALERFASVKKLASFFGLHPVFKISGDNIGGYHMSKQGRKNPRRILFMVTMASLSNNPHIRGIYEEHTQKGMKGMAAVGLCMHKILRIIYGMLKHNQPYDPEIDVNNREKMVQKQIAIVKDKNRRYQSFDDKAPVSRRQYKKRTERKVSHSDNFTNCGIIVSAPSRN

SEQ ID NO: 396431 - protein, 438 aa, unidentified
MNKLISKKTVIESSQYVKRNNMEQKFGSYLYCLMKYCVESPIVSIDVSNGNSHYMCFIKNNKRFDKVKKIDHDIEGFKRLLEDIQKLEAETNEKVCAVFEATGVYTKPLERFLSKNSIKTYIINPLESARKRKEEIHNKKTDKLDPISISKVYYDKEEMMELKKKDETYNWLRKKNRLYEDQLNHLRKYKVTFQNQLSICFPGYLDLFKDGYSDIPMTILKKYPHPDLLKNKKAETVARYLEKNTCHTHKVSLEYALKIIEFAKKTYPGCEKDDVEVEIFKILLDKVIETQRECEKTLNEMITVASTLEEYRYISSIDGIGPNLAARIIAEIGDIEEFKSREALVAYAGLDPHIYQSGDQDGKHLKISKKGNKYLRCLLFLAVGCSIRGAKDNPVNRFYQKKKQQSNPLNSKAAKTACTAKLLKIIYGICKNKTTYER

SEQ ID NO: 396432 - protein, 313 aa, unidentified
MSGEFIGIDVSKDWLDIHVLPSGDAWRTSSEPLALATCASGLAERRPALVVLEASGGYEVAVVAALGVHGVPLAVVNPRQVRDLARATGRLAKTDRLDAHVLADFARLVQPQPRALTDVAQQELGALVARRRQVLEMLTAEKNRRRLTGGRVGQQIQAHIHWLQSQLDELDRDLRDRVRSSPLWRERDDLLRGIPGVGPILSSTLLAELPELGALNRRQIAALVGVAPLNDDSGRRSGRRLIWGGRAAVRAVLYMGALAAVRHNPVLRQVYERLVRAGKAKKVALIACMRKLLVICNAILSHHTSWRTEVSPS

SEQ ID NO: 396433 - protein, 381 aa, unidentified
MSATASGVAQTAIDVTLAAIFVSPELSRDRWMITSLSPGKGEKMSKHSVDSCDVTGLLSHFKTLRAKAQARTGKSVPIVVIYEAGLDGFWIHRVLEREGIESHVVDAASVLTSRRRRKAKTDRIDGEALLRMLLAYKRGEPRVCAMVRPPSPEDEDRRRLCRERKTLVAERVAHVNRVKGLLFAQGISDYEPCRRDRRERLEQLATGDGRPLAAHLKAQLSRELDRLELTLQQLKAVEAERDALLAPKGEAAPAPVAALAGLRGIGPEFAAVLWLECFFRSFGNRRQVAAYAGLAPTPWQSGSVRHEQGVAQSGNPTLRSTMVQLAWLWLQHQPTSALSRWFKERVKQNGGRGQKAAIVALARKLLVTSWTMLRRSRLGWC

SEQ ID NO: 396434 - protein, 322 aa, unidentified
MSGSILGVDIAKKKFDVALLINGKPKHKVFPNNEEGFELLMAWLQKQNVDHVHVCLEASSTYGDELATSMHDAGHTVSIVNPARIKGFARSELLRTKNDKVDAGLIARFCHAMHPEPWTPLPPEIKTLQALVRRVDALLVMRTQELNRIETTHETVTCSIREHIAYLDQEIRKLKKQIAGHIKNDPHLRTKRDLLRSIPGIGEVTIAAILGELALFENCDRVQKVVAYIGLAPKEFMSGSSIKGKPRICKMGNARMRKALYMPSLVAMQYNPVIISFSQRLKERGKNGKVIVCAIMRKLVHLIFGILKSGKPFDPNFKPHYA

SEQ ID NO: 396435 - protein, 438 aa, unidentified
MQIIYEYCAGIDIHKKMVVVCLIMLNAAGQRVKEIRSFRTTTAGVLELRDWLQTAGCTHVAMEATGVYWRPIWNLLEGAFELLLVNAQHIKAVPGRKTDVRDAEWIADLLQHGLLTGSFIPPPEQRELREFTRYRASLVEDRTRVVNRLQKVLEDTNIKLGDVATDITGQSARAMLKALLAGQTDPVKLANLAKGKMRAKLAALEEALVGVIMPHQQFLLTELLGQLDHLDAVITRVGNEIATWMDRETPVEPEQSQLASELPELDESKQVLTWTQAVALLCTIPGISQRSAQGILAEIGIDMSRFPTAGHLASWSGMCPGNHESAGKRLSGKTRKGSPYLRQLLVEAANAAARTKNTYLSVHYHRIKARRGRKRALIAVGHTILVIIYHLLSQQTSYEELGSNYFDERDRQNMEKRLVRRLEKLGYQVELQLVAQVA

SEQ ID NO: 396436 - protein, 345 aa, unidentified
MALNHRWCVGVDLHKDTLTACVFCGCCGEVSFQKIACRCRRQIAEYFAALPRPHAVAIESVGFYRWLWEMLEPIVEELVLADATQARALAGRRLKTDREDALNIAELLASGRLPTSYAPPIEVQILRDLTRHRNSFSRQHARILHRVKSIMNANNRPGPARMQSDGLIRYLKAQGEKLPARRVEMLWQCLDALALTERQIAQVERTIGQVVRRDSFREVYGILTSFPGVALVTAATVIAEVGDFKRFPDTKAIGRYAGLNPRVYASGGKQRMGHIAKTGPSDLRWVLQQAAWTAIRYDEHVKRIFLRIAKRAGRKAAAVAVARKLLTWMHSAVNKGEPYRTRVAA

SEQ ID NO: 396437 - protein, 423 aa, unidentified
MPGTVNTMETEREVVCGADIHKQFLLATILTKDGQKFQDRFDSNFEGLLNFRQWLLDHDCQRLAVESTANYWQPIYFVVGKDVEFVLANAYQIKHIPGRKTDVLDSEWIAELCLKDLISPSRIFSEDDRDLRSMTRTRENYVKMRSQIKNRIHQELESACIKLSSVLSDIFGKSGIHIIRGILNGLSIDDILDRIPSKKLKAKRGEIQDAIQANISPVQIDLISLLLDSVDFLNREIESIDKQIQSLISTRQEDLKIAMSIPGMGFTSASTILAEIGNFRDFNSGEKLAAYCGLVPSVYQSAGKLITGHITKHGSPHVRRMLIEVAHAISRTKADSKLKRFYFRIKSRHGAKVAVVALARKVLCILHHLIVNREMFEDGISSKSKREKTSRSSISTEMIIEDAIQILVRAGYLVQKRSEKGGG

SEQ ID NO: 396438 - protein, 319 aa, unidentified
MFNLGIDVAKAKLDCALRLPNGKHRNKVVENNHKGFIALSEWLLKQDASSPRVCMEATGTYWEKVAEYLAGCGMLVSVINPAQIKAFGASRLVRTKTDKVDAQLIADFAHERQPEPWLAPSPAEQALRAMVLRLEALQTMRQQESNRLDVAREAVRQGIVDHITWLDGQIKELIRAIKRHIDDDPDLRGKRELLDTIPGLGERTIPVLLSYYANPERFDSAKQAVAFAGLDPRQHESGSSVRGKPRMSKVGHSFLRKALYMPAMVTVYRTAWGKRFGQRLRAAGKAKKLIIGAMMRKLVHVAFGVLRSGKKFDPTLHAA

SEQ ID NO: 396439 - protein, 345 aa, unidentified
MKLHTIGIDLGKTVFHLVGLNLRGEVVVRKKFSRKQLLHYTANLHVELIGMEACGGAHFLGRALREQGHEVRLMPAQYVKPYVKTNKSDFIDAEAIAEAVARPTMRFVPIKTDDQLDMQSLHRVRERWVMRRTAIVNQIRGLLLERGITLRKGRRCVDAALPGILEDATATLSYALRTLLAQLKLELDQMAARIDEADVVLNKTARENAACQRLLAIPGIGPVTSTALIAAIGNGAAFHKGREFAAWMGIVPREHSTGGKQKLLGISKRGNTYLRTLFIHGARAVLQQRAKQTSGLRAWLEQLSARTHPNVAAVALANKLARIAWAVLANNEVYRPLVLIGPATA

SEQ ID NO: 396440 - protein, 357 aa, unidentified
MKKGSTAAQKLTIGLDLGDRSSWCCVLEESGQIRQEQRVATTAKRLREAFGALPQSRIALETGMHSPWVSRLLSALGHEVIVAHARQVRLIGESRKKDDRLDAQTLARLARIDPGLLCPVQHRSAKAQANLTIIRARAGLVRARTALVNTARGLAKSYGERLRGCNVRNMNPEKAEGLSPELQAALQPLLAGIESLSEQIRESNQRIERLAEESYPQVALLKQVKGVGTLIALTFLLTLEDAHRFRKSRDVGCYLGLQPGRRNSGQREPQLHISKEGDPYLRTLLVQGAQHILGPFGPDCDLRRWGLKLAERGGKNGKKRAIIATARKLAVLLHHLWVSGEVYAPLHNSKPMMASAA

SEQ ID NO: 396441 - protein, 317 aa, unidentified
MADVRFPQLIQRACGIDVHLKVVVATIDGVGIPRETRSFATFTSSLTELKEWLLSKGVTHVAMESTGVYWKPVYKVLEDSIPHVWIVNARHIKNVPGHKTDKMDSEWICKLLLAGLLKPSYIPAKEQRQLRDLTRYRNKLIQQIASEKNRMMRILEDCHIKLSSVVSDTSGVTATALIDMLCEGRKLTLEDIACVYHKKLAASPQELLEACTGFVEDHHVYLLQIIRKDISQTQLLANELSERIKSILSQYDNVLELLKEIPGFSTKVVEDLVAEIGLDMSHFPSEKHLASWAGMCPGNNESAGKKKAEESLTETNK

SEQ ID NO: 396442 - protein, 339 aa, unidentified
MFYVGLDVSVARTAVCIMDAAGQVILERSVESTPETITATIRASGKDVERVGLEAGINSAWIARGLGEAKLPVIVIDATHAAAALKTGFRNKTDKNDARGIADLMRVNKFRAVSVKSVAAQRDRALLTVREQLRRQSLDARNIIWSILQVEGLKPPKLASPAFQVLLRQSLDDEALAPLLRPLADVVEHIDTRVASLDKEIAARAKASKACKRLMTVPGVGPLVALTYAAGVDDPARFSDSRTVGAHFGLTPRRFQSGEMDWSGGISRAGDAGVRRALYQAANVLIHHSRGWCALKSWAVRLAKRRGLGKAKVALARKLAVVLHKMWTTGEDYRLKAAV

SEQ ID NO: 396443 - protein, 334 aa, unidentified
MQKITTVGIDLAKSVFSLHGVDGAGRVVLRRTVRRDQLLGVVAGLSPCLIGMEACSGAHEWGRRFQELGHTVRLMAPKFVAPYRKSGKNDGNDAEAICEAVTRPSMRFVPVKSAEQQALLAMHRVRQGFVVERTATINRLRGLLAEFGVVLPLRSVTVRRQAAQAAENLPDLARRAIGDLLEQLRSLDERIGGYDREIEAQAKLCEPAQRLMKIRGIGPTTALAIVATVGNAREFKNGRQFAAWIGLTPSQYSTGGKPRLGHISKRGDAYLRNLLVQGARSVLNSAGMHQDRMSRWILELQPRRGYYRTLVAIANKNARIAWALLAKNETLRPA

SEQ ID NO: 396444 - protein, 355 aa, unidentified
MDSTKYVGMDVHKDTISIAVMNSAGKVVMESVLETKAVTLLQFIQGLRGNLLVTLEEGTWAAWLYDLLKPHVTKVTVCNPRKNALLKSGNKSARIDAQKLAERLRHGSLCAVYHGENGLRMLKELARSYLTVSKDLTRVMNRLKALFHSWGIACAGTQVYAPRHRLEWLSKITEEAVRGRAEFTYQQLDGLQALRQAVRRDFLAESRKHPAIKRLREIPGMGPIRAALWVALLQTPDRFRTKRQLWAYSGLAIETHGSGQYCYLEGQLRRVKKPVALRGLNRNHHHDVKWIFKSAAVKASSPTGPLHEFHEVLLAKGIKPSLARLTLARKIAAITLTVWKKGVRFDAEHLKPQAA

SEQ ID NO: 396445 - protein, 397 aa, unidentified
MELRAIYKRVIGLDIHQGQITACAMTEQESGSIQVEHRQFGTFKRDRRALAEWAQSITPDEVVMESTGIYWKSPYAALEHVGIYAKVVNARHVKNVPGRKTDIGDAQWLAMLSRAGLLRGSFVPPEKMRQLRLVSRQRQKLVGTLASEKNRLHKVLTDGGIRLGVVVSDVHGQSARAMVKSLIAGKQPHEVLQFASKRLKASREEIFDALQGDLSDSHTFVLAELMQHIEELESRIVRFDQYLLASLDDEYNVLQLLLTIPGIDRIGAAMLLVEIGTDMAVFGSADRLASWVGLCPGNNESAGKRKSGRTRKGNPYVRRLLCECAHAASRTACVFQSKYTSLAIRRGHKRAIVALAHKLLRTCYFMISRGEHYRDSTVDYEAMAVKRKRQSNLIYRL

SEQ ID NO: 396446 - protein, 389 aa, unidentified
MSQAFDASRSLTALEQHNTIITVIEMGQSKWLVAAVVPGIKRQPLKKLDADEASLLKLLHRWRKEADQTGHPIKRLVVAYEAGRDGFWLARWLRMHDVEAYVIHPTSIAVSREHRRAKTDRLDTELLLRALLGWLRGEKRHCSMVAIPTAEEEDAKRPNRERDSLVTEQTRIVNQIKAILIRFGIRSFRPKLRKAEQLLKDLRTAEGSPLPDNTRAEMYRHLVRLRMVREQIRAVETERLQKLKAEHGRKKGPHAMVRLIARVVGIGVETADMLVNEVFSRRFRDRRAVARYAGLTGSPDESGKRRREKGLARAGNARVRTGMIQLAWRFLRFQKDSALAQWFQTRAADGRGSTRKTMIVALARKLLIALWRLVTTGELSDGIVLRPAS

SEQ ID NO: 396447 - protein, 366 aa, unidentified
MKKISTVRVNGNMIFKGHKLTIGVDLGDRWSCYCVLDEAGEILLEQKVATTPEAMKQIFEKIPRGLIAMETGTHSPWVSRLLKELGHAVLVAHAQKVQLITKSNRKDDRHDARTLARLARIDPELLGPVRHRSAKAQIHLTVIRARAELVSARTGLVNAARGLAKSYGERLRKCGTQQVSRELAAELSVELREVLEPLLKEIESLNERIKEYDVRMEQIARESYPQVELLKQVKGVGTQIALTYVLTLDDPQRFPKSREVGCFLGLRPGRRDSGESHPQMHISKEGDPYLRTMLVQGAHYILGPFGEDSDLRRWGLKLAARGGKSAKKRAVVAVARKLAVLLHRLWVSGEVYEPLRNSQKAMRAAA

SEQ ID NO: 396448 - protein, 345 aa, unidentified
MSELYSGRQFVGIDLHRRRSVIVRMTAEGDPLECVRISNDVEMLSTVMARAGESPEVVLEATYGWYWAVDALQDLGAQVHLAHPLGVKAFEYRRVKNDERDARDLADLLRMGRLPEAWIAPPATRELRELVRHRAKLVGIRSNCKAQIHAVLAKCGIQVSMTDLFGLAGTELLDRLELPRPYAARIASLRRIIGALDFEIDAFAGQVRGRLARDPGFLAVQAIPGVGPILGAVFVAEVGDVHRFARAEELTCWAGLTPKHHESDTHVHRGHITKQGSRLVRWAAIESVQILPKHTLVGRIRDRVGDRRGRNIGVVAAARRQLEFVFYALRDHRVRALQGTRPVAA

SEQ ID NO: 396449 - protein, 338 aa, unidentified
MLHIGLDLHKRFSTIATMDDDGNVQLEDKLYHDDRTRLTEFFSEVAGKAVVTVEATRNWYWLYELLEELGVTVKLANARKVRLIAEAWLKNDKVDPKSLAQLERTGFLPEAYIPPRTIRDNREYLRYRLTLVRLRTGLKNKVHALLDKLGIDHPFADLFCPAGRRFLSQLQLRPVYQEELTNYLALMDDIERRIVAATKEITRQLKPDPRAKLLMTIPGIGHLTAYLLLNEIGDIKRFPSPGKLCAYGGIVPIVKQSADHSWQGHITREGNRYIRWALTESACLAPSKDYALGSFHRRLKARRGNLKARVAVARKLLVAVWYVLTYGEPYKTTAFPTV

SEQ ID NO: 396450 - protein, 397 aa, unidentified
MFYLGIDIAKHKHYASIIDQTGKPITKPFPFQNHKEGGQTLLNQIYQYIESPTEILIGMEATGHYWLAVYSFLLDHGFSVIVLNPIQTNAWRKGTEIRKRKTDAIDATMIADIIRFGRFVETPLVDEKMFALKQMSRFRNALVSNMSDLKRKALVVLDQTFPEYQSIFSDVFGKTSSQILLEYASPSDYEQISIDDLTQIIEQTSRNRLGKKTANKLMELASNSFGVTFCKNAFSFQLKMLIEQIRFIEDQIKECEDEMSQLLIDLDTPIMTVPGVGPILGATILSEIGDIHRFDKPSKLVAYAGIDASVSQSGQFESSGMSISKRGSSHLRRALFQAAITAHKHDPVLKAFYEKKRKQGKHYYVCIGAVARKLCYIIYAILKNNKPYEIPQYSKEV

SEQ ID NO: 396451 - protein, 340 aa, unidentified
MKNIKLLSIDVAKNVFQVAGILANQKVAFNRQIKRSDLMEFMVQQKKTEVVMEACYSSHYWARQFEAMGHTVRLLPAQYVSPFLVGNKSDKNDTIAIAEASRRPHINSVPIKTIERQDVQSLHRIRERYVSSRTALMNQIHGLTSEYGIAISRGHKSFRYFLNTLTESENQSLSTTLRHEIAHIADEYYWLTDRIDALNNQMKQIVKENELCQIIQSVPGIGPLNATALYSAIGNGSQFHKAREFSVWLGLTPKQSSSGEKSQTHGISKRGNPYLRKQIIHGARAVLTRCKDREDNLSRWAVQLIERRGFHKAAVALASKIARIVWRLLQKRELYVPQMS

SEQ ID NO: 396452 - protein, 413 aa, unidentified
MDVLHPKCCGLDVHKNSISACILVQVAGRVQKHQRRFGAMTQDLQELANWLRQFEVAQVAMESSGVYWKPVWNILEGQFTVVLANAQHIKNVPGRKTDQKDAEWIAQLLQHGLLRPSYVPCEVIRDLRDLTRMRASLSQEASRISSRVQKVLEDANVKLASVATNTLGKSGRAMLEEIIAGQNDPEYLASLALGHLRAKTSQLKLALEGKIRQHHRFLLRRLLDQLRFVEHEIVLLDERLEDIGRERPELSQAVARWDTIPGIDRVAGWTLLAEVGHTMAQFPTAEQLASWACLCPGNHESAGKRLGGTTRKGSPWLRRMACQCAWAAARTKNTYLSAQFRRVAARRGSKRAIIAVAHSLVIIGYYLQKSQRNYEDLGGDYFDRIDSDGLKRYFIRRLEKLGHKVTLVPIKAA

SEQ ID NO: 396453 - protein, 354 aa, unidentified
MVLLGVDPHKDTHTVVAVDQAGRQLDQTTVPARTLGHGELVGWARTRWPGPAQRTWAVEDCRHVTGRLERDLLAAGERVVRVPPRLMAGARQAVRTQGKSDPIDALAVTRAALREPNLPTAGHDQVSWEVKLLVDHREHLVAEPTRTINRLRWHLHQLDPDLEHTTRRLPGRGLRRITARLAQTAADAGSVVQVRICQAQVSAIQALSDQIGQLDRQLRQQVARLAPSLLSLPGCGPLTAAKLIAETAGVARFRSQACFAMHAGVAPVPVSSGRTDRHRLSRGGNRQLNAALHRIAITQLRLPGPGQAYYQRRRAQGDATGEAVRALKRRITRAVYQDLKQAEQRLRAASPAAA

SEQ ID NO: 396454 - protein, 344 aa, unidentified
MKHFAGLDVSLQETAICIVDEDGIVISEGKTASEPDELARWIATTGLTITRVGLEAGPLSPWLHTELRAAGLPAICIETRRMKGATAAMSVKTDRNDARAIAHAMRVGWFTIVHVKTAESQELRLLLSNRRTLLEKRIAIDNEIRGTLKAFGLKLGPVTVASFEARVLELLASRSRLLGMVKPMLTARTALRQQCDVLHRMVLKTVRANAVCRRLLSVPGVGPIVALTYATGVDDPARFAHARDLGPHFGLTPRKYASGEIDRNGSITKAGDGAVREALVQAALTLLTRVQRWSVLKAWGMAIAKRRGLRRAIVAVARKLAIVMHRIWVDGTTFIWSRETAASA

SEQ ID NO: 396455 - protein, 321 aa, unidentified
METEKEQITFEQVFDRGCGIDIHKKVLVATIRGKGIKEETRTFSSFTESIEELRDWLKANQITHVAMESTGVYWKPVFNILEEDFEIILVNASHLKNIPGDKTDKKDSKRIAKLLLAGLLKGSFIPCKSVRELRDLTRYKRKVIGQIASEKNRIHKFLEDANIKLSSVVSDLSGVVATKIIDAMIGGQEDVKELVKLRHGKMKATVEELAAALTGKLTDHHRFLLRMVKRSIGDKESLIEELDKKIDRLLIENEMVIDAELLSTIPGVDKDSAASILAEIGNKMEQFPNEQHLASWAGLSPGNNESAGKKKVPESPMATIG

SEQ ID NO: 396456 - protein, 349 aa, unidentified
MRHYIGLDAHSATCTLVVLTESGQLTQRAVVKTSEGNLLKFLSSLPPGEKILAVEESHVSQWVYVLLHEKVDKLIVCNPCRLTKHQGPKTDYRDALRIANELRGNFLHPVYHDESHWIQLRVLVSGYLDLVSEIIRTKNRLKAVFRSEILDTKAADFYTSKERAKELSHEHGRFVADSLFRQVESLEERKLEFRAVFTKNMKIYRQLRNLATIPGIDVVRANIIMAIVCMPNRFESKYKFWAYCMLVRYLQISDGKVYGSQKIRARFELKSLFMGAAENAIQGETCLRNLYDRKRASGVDHRGAKIAVARVIAAAALSILKNNGKFDENYFQAHTERTQLRKTLNEARV

SEQ ID NO: 396457 - protein, 415 aa, unidentified
MKFEKDRSGIERYVALDIHKEYVLVGGQNARQEWRLPPRRVGIEKFGEWAEANLRRGDAAIIETTTNVWEIYDIVARQVNYAVVAHAGGVREIAEARVKTDKKDVERLLKLLIADIVPEVWVPPVEVRELRGMISYRNRLVKTATMVRNRLQSLIHRHNLILPKGALTDPAWWEAQKMSALEKIQIRQELGMLEEIERHKAEVDAELGRQGLGEAWGKQAVRLLQLPGFGVVMTMIVLSAIGDIHRFESAKKLVGYSGLGAGVHDSGKEHIEKRITKSGRKELRWAMVEAAWQAIRISPYWKEQYEKYLRRMRLPNQAIVVVARKLLVAVWHVLTKEETDLHANEEDLAYKMLVLAWDLGEDERLGLTYKQFAKYAMMKLGVETDITRFVRKNIARRVAPREEVLARMEELGLTC

SEQ ID NO: 396458 - protein, 421 aa, unidentified
METTDNFIILYPHAAGIDCGSKEHVVAIGQHKERDVKRFGTFTENLIALCVWLKENHITHVAIESTGSYWQVLYFMLYDYDMTPFLVQPNHVKNPVNEKTDPKDARWLQKLMSCGLLNNSFQPDDETEELRTLMRERKSLVQQKTRCVQKMNKMLLLMNIRLDQVQCRNNNKGPMRIIEAICNGERNPNTLMQLFYRQGKAIATEEQKLMSLHGQWNDEYIFVMKEELNHHRFIEKQIASFDKRIVKMIETRMKEKMRQNPKLKNYHPVKKTNNTGNNDVPIAADKVVYTLSGGIDIGAIYGVGNNLLLTLLSEVGLDLKSKFKTEKQFVSWLHLCPNLKMSGGKILSGKTRHYHNALKTAFRDSANRMKNSANFLGVFFRRVQIRKGYKCAVTATARKLAIVVYRMLTRHEQFMPVTVVA

SEQ ID NO: 396459 - protein, 293 aa, unidentified
MKRRCIIGIDVSKYSLDCFYYPEETIHQEVNTNRGIDTLIRNLKNISPDIIIVEATGQYHRLLVEKLHHSLLPVKVVNQRQVRDFARSLNKLCKTDAIDAKILVEFALSRCIIPDTPKSEHGTKLSALLVRREQLQFLITQEKCHIESTEGQYAHYIEAILDTLKAQLKEIDASISQVVKKDEKFAQDNKIIQSIPGIGPIVSATILTECPEITRIGRKQLAFLVGVAPFNRDSGRFRGQRHIAAGRAKIRKVLYCAMRPCLRWNSTVRNWFEHFYPQGNLIKLLWLRACESY

SEQ ID NO: 396460 - protein, 421 aa, unidentified
MKTIMMLNDRTRAGQLETRWDIAVDVGQKALDWYGEAAGKAHQGHSANRSEAILACLELLKAEALRLGFSGVRIICEPTGGYERRLLRAARQLGCATALVNGEAVNKMQVVESNDTGKSDTKDPRTILLLAKWNKTLTDRPLADEWLLLRELNARYDRLERDSTRCKNRIHKILISVFPDLSFKKDWLFDSRAAEAVVELYGLNAAAMIADGRERCTSKLRRRHVGPKTIGRLWTDAQRTMLIPADPAWLELLADDVRALFAELAVLRTRRQATREHMIALVERLHARGATRLQAHADLISPFMLARVLAETGPLSDFADFRQLWRYGGLNLRPHQSGAMQGQPRQAKRGRARLRHVLAQAILKRVVHGQLYGEYYHRKRDAGMCGGKAMTAVARKFLKLLYGLEHSATAFDPQRVFQSAA

SEQ ID NO: 396461 - protein, 388 aa, unidentified
MIYIGIDVAKLNHYASALSSDGEVLFEPFKFTNDNDGFCLLSSHLDTLPDDSFIIGLESTAHYGDNLVRYLVNQGHKVCIINPIQTASLRKNNIRKTKTDKVDTFLIAKTLMLQESHRFITFEDINLIDLKALGRFRQKSLKQRTRLKIQLKAYVDETFPELQYFFKSGLHQKAVYALLKEAPTAHAVASMHLTHLVHLLDSASHGRFKKEAASQLRVLARKSVGASDSALSIQVVHTIEQIELLDSQIDHVEAEMTDIMKYLDSVIMTIPGIGYINGGMILGEIGDIHRFCEPKQLLAFAGLDPSVYQSGNFQAKKTRMSKRGSKVLRYALMNAAHNVVKNNATFKAYYDTKMAEGRTHYNALGHCAGKLVRIIHKILTDKVEFNLD

SEQ ID NO: 396462 - protein, 342 aa, unidentified
MYYIGLDVHKKTISYCVKDASGQVHREGTIGATRNELDCWVRTLPQPRIMAMEATIFTGWIYDHLLPHAEQVKVAHPLMLRAIAAAKKKNDRIDAGKIADCLRCDFLPECHMASTEIRDRRRTLRYRHLLVRQMVQMKNRISGLLMETGVSHNKQRLHKVGYFRELISNSAEIHESIRPLLRLRRETVVRCQKTEYALVSSLERDPLLAERLKRLRTVPGVGPITALTWALEMGDVSRFRSVKQAISYCGLCGEEKSSADKVLRTPLSKQRNKHIQHVLVEAAKLAPRQNHELAVVHEREKQKGNGNRATLAVARKMVAYLLAVDRREREFVPAEGRSTAAA

SEQ ID NO: 396463 - protein, 347 aa, unidentified
MNFYTQQHKHYCGIDLHARAMYVCILDQHGTKLVHKNLPTTPEAFLRIIAPYRDDVVVGVECIFTWYWLADLCAKEGIAFVLGHALYMKAIHGGKAKNDKIDAHKIAVLLRGGMLPQAYVYPAEMRATRDLLRRRCHLVRKRAELLAHIHNTNSQYNLPEIGKKLAYKANREGIEEHFPDPSVRKTIEVDVSLIDHYDKLLGEVELYITRSAKAHDVQTFARLQSVPGIGQILALVILYEIQDIARFPRVQDFVSYCRLVKCAKESGGKRLGTSGKKIGNVHLRWAFAEAAVLFLRHNQPGKEYFTKLEHNHGKAKALTVLAHKLGRAVYYMLTREQAFDLQRFVTA

SEQ ID NO: 396464 - protein, 337 aa, unidentified
MEYFAGLDVSMKETHICVVDREGNVVLEVTAASLPETIAGALGKAPDCQRVVLETGRMAPMLYHGLDALGVPVTCIESRQAYQALKSLATHKTDRNDARGLAHLARTGFFKPVHVKSLAAHAVRALIIARKKLVGQRVTLENQIRGLAVVFGIQLPRGLSPAFAAQVIDGSQGVAGLTTAIAGLLAARNAVLAAIIAIDRDMKRLARASGACRRLMTIPGVGQLTALAFVAAMDEPERFRRSRDVGAYLGLVPRRYQSGEIDYSGSISKCGDRRIRTLLYEAANVMLTRYRGKLALKDWALAIGRRSTMRKARIALARRLAIIMHAMLRHGTEFRAA

SEQ ID NO: 396465 - protein, 308 aa, unidentified
MIAQNYVGCDISKQWLDFFDETSGRLRRIDNQADAIAAYVASLEPSRDFVVMEATGVHDRLLRHALAKAGVPFSRHNPAHTHHYAKSTRRRAKTDPLDARMLSDYGRRYQPEAEPAPSEDVEQLQSLARHRDHLVEMRATAKKHLAEAFNEIVIADLEETIAGLDTRIKAFEGRIAEVIRQNQDTARDHALMVSVPGISKVGALSLLALLPELGKRSPKAIAALVGLAPFDNKSGKLNRRSQIQGGRSRVRRALYMAALTAIRTCDRFKTFYTALAARSASKKLAIIAVARKLLVVLNAIMRDKTAFA

SEQ ID NO: 396466 - protein, 356 aa, unidentified
MKNSKLDFRGQTISVGIDTHKKNMVITPRCQGMQLKTISMDPEPEQLVRYLHKNYPNASYESVYEAGFSGYWMDRKLREAGIKNIIVNPADVPTKQKEKRKKTDKIDSRKLARELSAGNLEGIYIPSEEHEAIRALSRLRKQITKDQTRQKCRIKSLLNFVGITLPENSELKHWSGRFIKYLSEIEFKHKAMKITLERLLESLINGRQILLGIVKNLREIVKEDTEMKKITGYLQSVPGIGFITATTLYTEIMEIKRFGKFDELSSYVGFSPSTDSSGEKDKVIGLSKQQNKYLRNMLIESSWLAIRKDPALLQAYGNLVRRMSKQKAIIRIAKKLLSRIMYVWRNEKHYVCAVVS

SEQ ID NO: 396467 - protein, 408 aa, unidentified
MGRAAEIVAPSSSLRTDGGFPVAQVNDLSRSLTAFDPISTLVVVVEMSKASWLVSGVVPGVERQPLKKLEPDATALLRLIERWRNEAVRAGRPISRIALAYEAGRDGFWLARWLIARGIEAHVIHSASVAVSRERKRAKTDRLDAAMLMRVFLGWLRGERGHCGMVAIPTMEEEDARRPSRERESLVDERSRITNRMKSALARLGIRGFKPHLRKAPERLAGLRTAEGTGLPANIIEEFRRDMARLALVREQISSIEKTRAERLERAPDTGPHAMVRLLARVIGIGIETADMLVREILSRKLRDRRAVARYAGLTGSPDESGLKRREKGLAKAGNARVRRGLIQLAWRFLMFQKDSALAQWYRTRTEGPSGARKTTMIVALARKLLIALWRLVTTGEVPDGVELRPAA

SEQ ID NO: 396468 - protein, 367 aa, unidentified
MNSSKYIAMDVHTATISVAVRDAAGKLIMESVIETKTSTILQFIQGLRGDLHVTFEEGTWAAWLYDLLKPYVTNVVVCNPRRNALLKEGSRNDRIDARKLAELLRTNLLRPVYHGEKGLRTLKELARAYLTISKDLTRVMNRVKAIYRSWGIPCGGQSVYNPRHRKEWLSKITQASVRRRAELYYEQLDALVLLRKQARQELLAEGKKHQAWKLLRSIPALGPIRAAVLMAIVQTPHRFRTKRLLWKYSGFGVVTHSSADHRYVKGQLERSKKPVSVRGLDRDHNHQLKDLFKGAAIQASTRKGPFREFYEALVAKGMRPEMARLTLARKIAVIALTVWKSMPTPRLCRLLTRDDGWKGLGLCLESA

SEQ ID NO: 396469 - protein, 343 aa, unidentified
MTIVADRYRFITGVDTHSKKHQYAVIDHTGRLLDERSFPADRAGITRAATWIEKVTGGAEFLASVDGAGSYGRQLSVAFAGSKVRVVEAPKTRYRPAGKDDRLDARAAAAAVLPLDEEALNDVKAGAERDAIQILLTARAEMTRERTKAVNRLIALVRRFDLGVTVGRSLTVAQTRQIAAWTPDAQDPVDIATARAEATRLATRILTLHDDAAANKKALLGLTRQVAPQLLAQPGVGPISAAQVFASWSHPGRVRSDAAFGRLSGTAPKPASSGDHTRHRLDRGGDRRLNAALHRVIITRWRSHPETIAYVERRRAQGRTDRDIRRILKRYLARDLYRLLEAG

SEQ ID NO: 396470 - protein, 349 aa, unidentified
MDRTTYGVDIAKSVMQVHWVDAETGEIGRKKLARTRLAEYFAQLQPVRVAMEACGSAHHWARELGALGHEVELLPAGQVRPFVRSNKDDAADARAIWLAAQQSDIRRVPIKSCEQQAVLALHRTRQHWVSVRTATVNALRGLLYEFGVVLRGGRRAGLKALAEQRAAIDERLPEVMRRLVNAQLHSVEQIDERVDQLERDLAALQRQMDQAVRVREVPGIGVLGATALAATLGDGAAWRSGREFSASIGLVPAHSGTGGRTRIGHISKRGDPYLRTLLIHGARALIQHGKFRPTWLVQMLARRPMNVVIVALANKMARMAWALVAHGRDYQRDWKSARTECSAASAAAA

SEQ ID NO: 396471 - protein, 575 aa, unidentified
MVRTHWVPTTHFMRLLSLPRFRASLGATTGLLGPQATPSPHTTKELGAGGVLSYPPGPRVEVTVSAVVPRARLLGWSREVATTALVTGDVLIPFGRLFSSSVPPAPAAMTCYTPMEETAMPPRKPKHSPLPPPPAEPLRVVNPDAAGIDVHSDQHWVAVPPDRDPEPVRRFGAFTCDLETLADWLQQCRVTTVVMESTGVYWIPLFELLERRGVRVLLIDPRQAQRANGRPKSDRYDCQWLQRLHAYGLLGGAFRPDDQVCVLRSFLRQRQMLITYAGQHIQHMQKALEQMNIKLAEVISDITGKTGMQILKAILGGQRDPHRLAQFRDRHCKHDEATIAKALQGNWREDHLFELRQALELYEFYHTKLAECDRQLEAHLGTFADQRDGPPLPAKPRQRSRRANEPHFDARDLLHRMSGVDLTVIEGIDGTTALTILSEIGLDLSRFPSIKHFCSWLGLCPPHKSSAGKIKSRHVRPGANRVAQALRLAARSLHHAKTALGGFFRRLKSRMGTAQAITATAHKLARLVYTLLKHGTDYVQQGLQAYEARYRDREVRNIARKARELGFDLVPATGN

SEQ ID NO: 396472 - protein, 386 aa, unidentified
MTSMPQTEMTPNLPVAVSSPVVLGGIDTHKDLHVAAVIDAGEKVLGTHSFSTTRAGYRALIRWLRSFGDVRRVGVEGTGSYGAGIARYLVDAGIEVVEVDRPDRSERRRKGKDDDLDAISAARAALHNRRTSTPKSKDGPVESLRVLRVTRATAIRARRNALQLLRMTIVAAPEELRDQVRNLTRMQLIRTCAAWRPDITNVTDPVSATRIALKSLARRILELGDEIAMLDELIKPIVTALAPQLLARPGIGVEIAGQLLVTAGDNTQRLRGEAGFAMLCGVAPLPASSGMTQRHRLNRGGDRQANSALHLAVISRLRIDERTQAYLARKTAEGHSKLEIIRCLKRYLAREVYYLLNPAASTSKGGGSRTGRAGPQPARNTLPQAG

SEQ ID NO: 396473 - protein, 409 aa, unidentified
METVFDRVAGLDVHKAQVTACVRVPLADGGREQQLAEFQTTARGLVALRDWLEAHLVTHVAMEATGVYWQPVWHVLEDAFELTLVNARHVKQVPGRKTDVSDAAWLCQLMEAGLLRGSFVPPKPQQALRMLTRYRKTQIQERQREANRLHKALEDTGIKLDCVASDILGASGRALLDALVAGTTDPLVLAELARGKLRKKLSALREALEGRFEAHHALVIGAILAHLDFLDEQIERLSDAIEEQLGPFAAGVHLASTITGVAARTAEVMVAEIGTDMSRFPSAGHLASWAGQCPGNHQSAGKRRSGRTRKGPKWLGIALEEAALAATRSKGSYLQAQYQRLRPRIGHGRALGAVKHSILVAYWHMFTSGETYRDLGGDYYQRRDPARQIRRLVDQLERLGQQVTLQPTA

SEQ ID NO: 396474 - protein, 371 aa, unidentified
MEHTRFIGLDIHKERISVAVAESGRSGAVEYLGEIANEPGAISKLCDRLRRPGKPLAFCYEAGPCGYGIHRQLTRLGHQCDVVAPSLIPTKAGDRVKTNRRDATMLARLHRAGELTPVWVPDADHEAMRDLIRLRSVIRQIVTRARQHLQGFLLRHGRKHGRGTAWRMAYRRWLSTLAFEHPAQQIALQDYVDAVMDAERRLKRVEEQVFGLLPDWNLRLVVDGLQAMRGIALINAVVLVTEVGDFTRFSNPRQLMAYFGLVPGERSSGETVRRGAITKTGNAHVRRALVEGAWAYRMKARIGRYKVDRIEALPKVVRDIGWKAQVRLCTRYRRLRARGKTANVVNVAIAREMVGFIWSIACTIQSAPRAA

SEQ ID NO: 396475 - protein, 346 aa, unidentified
MGKSIADLSAVTTVGLDLAKHVFQVHGVDALGRVVVAKAIRRNRLLEFFASLPRCLVGLEASGSAHHWARELITLGHETRMMPPSYVKPYIRRQKNDASDASAICEAATRPSMRFVGVRSLENQAALMRHKAREMLVSQRTQLLNALRGHLTEVGVIAPQGLRCARELAELIEACDETIPFEVCEALAELVRQLHRLDEAIVRLDRTIVKMAQKDETARRLMSIPGFGPITASAMAATIQDASSFAGPREFAAFLGLTPKQNSSGGKQKLGRISKMGNRNLRKLLVVGAHAVLFHRKPHTDPLRMWAKKLIERKPFKLVAVALANKMARIAFAILRSKTVYREIPA

SEQ ID NO: 396476 - protein, 428 aa, unidentified
MDQVNRNRLEEFRQLRQEVRHSEEYLIVGIDIAKDRHYAFFGTATGKTLLKRIVFSNDHEGFRKLLDHAEALRVQHGLKKVVYGMEPTGNYHKPLGEYLINLGRTVVLVAGVTVARNRESLDGRWDKHDGKDSANVADLISQGKCLYYEHPSAELRGLRGLLSLKKRLKKQEHGYRVRIRNHLLAQYFPEMDRDYEGLGAEGLSIVRWCLPASQITQLDVEPFIERVTSRRIRMEKRRRLEEVWEKAAESIGCEEVPGVDHEAKIMVEGLKQIRAMIKETEDQIKELCEQFPEYHYILTIPGFGPDVSSKVLGAVGDPDRFQNGKQVLKMGGLDLSADRSGKDSDKAIPQISKRGKADLRYALYQAALIASLKNRDVMIYYTNKIRGREREKGIQLKMRVKLAAKLLVIAWTLMKKKEKFDPAYLNVE

SEQ ID NO: 396477 - protein, 397 aa, unidentified
MYIVGIDIAKRKHEAAVIDGEGAVIIKPFSFTNNCSGYNRLLAMLTKAKLPLDEVSFAMEATGHYWLALFTRLQKEGFRVQVINPVQTNSIRSFYIRQAKTDPRDALLIAEVIRFGHFSESTLHPENIYELRELCRGRHAIVSMQADVKRKVVALLDQVFPEYETAFTNMFSDTSMAILQTCPTPKELSEMPLEELCHLIEVSSRKRFRMAKAQELQALARNSFGFAMAGNVFSTMIRLYAKHLDFLKQQVREMDRKIAEIMDTLDTPITTITGIGPTLGAYILSEIGDASRFSSAAKLAAYAGIDPTMRQSGECNGVRNRMSKRGSPYLRHAIWLAASSAVLHDPALKLYFQKKRDEGKPYMASVGHACRKMVSIIYAVMRDNKAYTPCIPNEISA

SEQ ID NO: 396478 - protein, 432 aa, unidentified
MKHKLKQKQNQRITRITDKTLVVGADIAKKIHVARAVDFRGIELGKDCVFHNDQEGLTKLTSWMKELGRIHEKTDIIFGIEPTGHYWFPLAAFLKEQGIQIVVVNPHHVNKSKELEDNSQTKSDYKDAKVIADLIRNGKYSEPNLPTKEYAELRILMNFREKIAVNLNQVKARITGWSDRYFPEYPRVFKDWEGKASLMTLRQFPTPEEIVTAGARGVLTHWKTEIKQGIGIKRAEQLHAAATTSIGLTEGVTAAKIELAALLEQYDLYCKQEENIMAGVLQIMEEIPGTKQMLSIPGVGVLTVAGFLAEVGDLSNYDHGQQIIRLAGLNLTENSSGKRKGKTEISKRGRSRLRGILFRAMLPMVAKNEEFKALHKYYTTRNQNPLKKKQSIIALCGKLVRVLYALGTKQKEYNAIDVLGPIKQAQLAKHAA

SEQ ID NO: 396479 - protein, 419 aa, unidentified
MSSLTQEFTAFIGIDWVDTKHDICLQPAHSQQREFDQLPHQIPAIEQWAYSLQKRFGGTIAVVLELSKGPIVYALQKYDFFVLFPVNPSTLAKYREAFKPSRAKDDPTDAELALDLLMCHGDRFKPIKPQSVEMRTLTYLVEQRRQLVGDKTRLVNRLCNTLKQYFPQTLDWFEHRDTVLFCDFMTRWPTLTQVKRARKASLETFFKTHNVRFDTVIATRISGIKAATPLTLDVAVLTAHQLQAMAQVNQLRITLQAIDQFDDAIARLAPTLPDYALFNALPGAGPHLAPRLLVAFGEQRERFTSAAQLQQYSGVAPVTERSGKKCWVHWRWQSPTFLRQTMVEWAAQTINKSFWAGAYYRQQRDKGCSHQTAVRALAFKWIRILYRCWQNRTPYDESKYLNALKRRDSPLLKQVATTS

SEQ ID NO: 396480 - protein, 512 aa, unidentified
MHHRGKQPSSSARIPKVVNNFAAAYSGLGEQLATAETRLEVPYPSRVIGRLPTPPTAPGPSAKRTPPLEGSYIRSRPFQVPAPLRAARTMNANWNEQPYFAALDWAKEHHDVIVVDRVGTIVADFRFAHTAPGWEEFDQKMQPFGQCPITIETSAGMAADQLLQRGYTLYPINPLSAKQYRQRKAPSGTKTDRHDAWSLADALRTDGQAWRPLLAQDEATMTLRLLCRDEIALIEHRTALVNQLQATLSDYYPLALESFQEWTKPFAWAFVRSFPTPAALAKAGKRRWETFLHVHKLWRGESSSARLEAWARGQQLNASPAVVNAKSLLALSLASVLETLQRQIQEYRSRITEAFARHPDHDTFGSLPGAKQTLGPRLLSLIGSVRAVYPDADSLLCQAGVSPVAYQTGKICKARLRFACDHFLRHTVHLWVDESRKTCDWAQAYYQAKRDHGHNHASALRCLGKRWLKLLWRMWQNHNAYDESRHLQALRQHGSFVSQILQNQPCPARRQR

SEQ ID NO: 396481 - protein, 330 aa, unidentified
MKSGSNCNTPADVFHVGIDVSKDTLAVNASEAFTKTIPNNRKSIHKMVRTVRKTVGRDRKILFVFEDTGHYSLPLLLELDKLGEQSHVANAARVRHFAQARGVGAKTDPVDAAVIRDYAETMRPEPTEIPSDSHLRLKELHRTRSLMVKISIMVSNLLTATTNRTCREVLRDTIRLIDKRIEKIDSEMETTISENVEMREMADELAKIEGVGKTTAAAVLAGVPEIGTMGKRRIVSILGLAPFVRQSGKWKGKSCTGGGRSEVRRCLYMPAMSAASNNPVLKVFYERLVAEGKPKQLALVATMRKLAIHMERVVHRVRQRHNAEGANSAV

SEQ ID NO: 396482 - protein, 344 aa, unidentified
MFYLGLDVHGKWTTVKGLNPSTGEIVQWLRVANSAEAFAQVLSELEGPFCGAMEAGTNSWAMYRVLLPLFKELVVVHPAQVHDRRDGKPKTDARDAMRLAEQLCWGQLRGIYIPDERIQDLRMLVRGKVRATRWVTKLTNEMGSLLRAWGYVGSRSLLSKRGVARLEEAELPPHSARVLALTRQLWELAQRIERELEQAVAEEAAADEQCQLLLSMPEVGPFTALLVRAEVGDIDRFQSGEQLASYAGLTPRVLQSGERCHYGKLTKRGNRWMRYALLLLANRIARGRGNSRLHRLYRRSCLRQHSNDAKVAVARKALILACHLLRRRERWEEHQKHVRAQQAA

SEQ ID NO: 396483 - protein, 353 aa, unidentified
MLIIGCDFHPGFQQVAIFDNQTGEEQERRLQHREEAEQFYRSLAGQEVRVGMEACGHYPWFERLLAELGFELWLGDAAAIRATVVRKQKTDRRDAEQVLTLMREDRFPRIWVPSLEERDVRQLLVHRHKQVQARTRVKNQLQAMALSQGVQKKRKLWTAAGRPELEKLELLPYAAERRKQLLQTLDGLEVEIEQLNRRVEEEAGKRPAAGKLQTHPGVGPVTALAMVLTLGPVERFASGKQVGSYFGLIPSEYSSGGQQKLGHISKQGSSFLRFLLVEAGQTAARYDAELGRFYRRLAVRKHRALAKVAVARKLAVRLYLMLREDWTYAQLCRAVVQASPSHPVVGRQNRALE

SEQ ID NO: 396484 - protein, 358 aa, unidentified
METRERRSTDYTNKKIYIGIDNHKKNWKVNILCETIDHKTFTMDPVPEILKKYLHKNFPNGNYFSAYEAGYCGFWAHEQLEQLGIKSIVVNPADVPTMDKERRTKNDKADCRKIARSLRSGELMSIYIPSREVQEDRTLLRLHVQLTKEQTRIKNQIKSILGFYGITIPEEKTNSNWSRAFIRWLETIEFKTESGRLALNIQIERLLSIRKTIASLLIQIRQLSKTDRYRESSELLMSISGIGILTAMHFLVEIVDINRFTNLDELSAYIGLSPREHSSGEKIITGKMTKRGKSHLRYLLIEASWIAIKKDPALMMAYTDYKKKMIAQKAIIKIARKLLNRIRFVLKNKQRYEISVTN

SEQ ID NO: 396485 - protein, 367 aa, unidentified
MKKVSTAAVREAKNFSEQKLTIGLDLGDRSSWYCVLDEAGVILLEQRLSTTPKAMGEVFDGMPRSRIALETGMHSPWVSRVLNELGHEVIVAHARNVRLIGESRKKDDRLDAQTLARLARIDPQLLCPVKHRSASAQADLTVIRARAGLVRARTALVNTARGLAKSYGERLRGCNVRNMNPEKAEGLSPELQTALEPLLAGIESLSERIRECNERIEKLAQESYPQVALLKQVKGVGTLIALTYLLTLEDPHRFRKSRDVGCYLGLQPGRRNSGQSEPQMHISKEGDPYLRTLLVQGAHHILGPFGADSDLRRWGLKLAERGGKNGKKRAVIATARKLAVLLHRLWVSGEVYEPLRNSNQRAMPAAA

SEQ ID NO: 396486 - protein, 425 aa, unidentified
MSCLLHPTRVIDLPESSRKAVPIMTAPARPAPVVVGGSDTHADTVHVAAISTLGREVADREFPTTAAGYRAAVAFLTSHGPVDQVGIEGTSSYGAGLARAVTNAGLQVIEVNRPSRADRRRQGKSDPLDASHAARAVLSGRATSDPKDQSTEAIRSLHNTRRSAVKARTAATNQITAMLITAQDGIRSKYRALQGQPLITALAKCRTAVVDSVDAAVLTALKALAHRHQFLTAQAEELSTLIDALVTTANPALRAAFGVGPDTAAQLLITAGANPDRLRSEASFAALCGVSPVPASSGKTTRHRLSRGGDRHANNALYRIALSRMAHEPRTKQYVARHVAAGRSTKEILRMLKRAIAREIHRLLTHKVALPEYADLRPARQAKNITVTAAANAFNIWPTVISRIERGLQRDDDLANRYRTWLQAA

SEQ ID NO: 396487 - protein, 337 aa, unidentified
MIVMGLDQHRGQISAEWIETETGEVSRARVAPAHREPVRRFVGRFAGRELEVALEATTGWRFVVEELRAIGAGVHLAEPAETAARRGNKKRAKSDRADARHLRELLMIARLPESWIPPDHLLDLRARVRLRHTLSDQRGEWQQRIQAVLYHHGCPRRRELMTRDGRAWLAEQALPATAREQITVAIAMIDALDRQLAPITKELRVYARRQVGCRALMAHYGIGALTAVTILAELGDCRRFSSSRHAVRYAGLDITVHQSDQRRAPGHLSRQGPPALRWALFEAAQVARRPASPDRDYYTQAADRLGANRACLAIARKLLKRSYHTLSELGEEALAPA

SEQ ID NO: 396488 - protein, 320 aa, unidentified
MMAQNGLVVVGIDVAKDKVDACIRELALRQTYPSTAQGHRKLVAWLRKHKVNRAVMEASGGYERDWGKVLRLAGIAVRIVDPKRVRSFAQSAGRLAKNDTIDAEMIAWFAETFSEAPGQVHDAAREELQALVKARLNLVDLKIRLEAQNEHAAPAQARKARTRILKSLLEEIAKLEVAISAQVRTTPHLAERAEIVESVPGFAETSSANLIAGMPELGQVSDEIAAALLGVAPYDDDSGKRRGERHIKGGRRWVRNALYMPCLGAATQNNPVFKAYYQRLLAKGKEPKVALVACMRKLIIILNTMIARRQKWDPSRHALN

SEQ ID NO: 396489 - protein, 333 aa, unidentified
MKNYIGMDLHCKSCTLVVMTEDGEITKEAKISTSELNLRNFLDEVKGPKFLMFEETGLAQWAWDVTREKVDKLVVCNPTYLPKNDYRDALHLCMQLKAGNFTEVHHEKSVLMDLRTVMRHYSNLVIRLVILKNSFKSVLRNEGIATQSKWVTSRNKDKCNEIKNPIKRKVAEDLFNEMNSLEMAKKKCETEFKQNFYSISIVQKLMSIPGIGPVRAHVIAAYVCSPHRFENKHKLWAYAKLVSHSDESDGKLISKRTPHGRSELKEAFMGAAIRVITYPGESSLKKYYNYLLEEKKLDRHKARNALARKIASICLGIMKTGEYFNESMISFKK

SEQ ID NO: 396490 - protein, 340 aa, unidentified
MQKTVSRQYVGIDLHRRRSVIVRMNDEGQVLGIDQVLNDPVELSLAVAKAGPGPEVALESTYGWYWAADLLQADGARVHLVHPLGLHWDTRRVKNDIRDSTELANRLRRGDLPESYIAPPEQRELRELVRYRAKLTALRTSAKAQVHAVMAKEGILPRLDDMFGPGGQALLDQMPFEGAYAMRVASLRKLLEAYSAELVVVEAELASRLAGHQGYHAVQSICGVGKIIAAIFVAEIGDVSRFPSARHLCSWAGLTPSHKEPGTKVQRGHITKQGNHLVRWAAIEAVAHYHGGEPITPTYMRVSRRRGKMIGRVAAARKLLTLVYYGLRDGEIRCLAERAG

SEQ ID NO: 396491 - protein, 320 aa, unidentified
MDQDHKRLFSRRLPNSLDKILMVLEPFKSDLKGVIVESTYNWYWLVDGLQEHGYRVHLANPSAIKQYEGIKHTDDKWDAFWLAHMKHLNILPEGYIYPKEHRAVRDLVRRRLLFVRHRTANILSLQSTITRNLGIKMSSNEIKRLDMDDACGLFDSANLVFMAQNNISTIKHLGGIIKGIEREVKSQVKLRKEFVMLTTTPGIGLILGLTIMLEVGDIGRFFKVGNYSSYCRCVGSKRLSDGKKKGENNKKNGNKYLAWAYVEAAHFAKMHIPKAQRFYQQKMAKANGFVATKALANKLSRASYFIMRDQVPFDEDMLFR

SEQ ID NO: 396492 - protein, 401 aa, unidentified
MNEVGIDVSKGKSMVCVMRPFGEVVLEPFEVLHTAQNLNDLAGKLKALDGETRVVLEATGNYHKAVAFVLHDAGLFVSVVNPVLIHDYDNNSLRRVKTDRKDAVKIANYTLDKWTRLRQYLPEDDTRLALKNCYRQYQQAVAIRTMLKNNLISSLDLTFPDANKLFASPPKSNGCEKWVDFIGDFWHSECVSSLSEEVFAKKYLKWCQKHGYIFTRSKSDEIYACALNSASLPKSPTSKLLIQQQVAQLKAVSQSVAAFQQEMLRLSQQLPEFDTVMEMYGVGPSLGPQLMAEIGDVRRFSSKKSLIAFAGIEPLPNDSGKVVGNDKGISKVGSAVLRRTLFLIMSVILQTQPQDEPVFQFMNKKRSEGKPYKVYMMASANKFLRIYYARVKSVMDSECSQ

SEQ ID NO: 396493 - protein, 418 aa, unidentified
MVITKKSDVKIYDKVTIATIDFAKDKNTLYCRRCITGPEMKIIPFRHTFKEYNRIYSRVINFARSNGCSEVIFGFESTGVYAIPFINYICHRPVKVVQVNPLHTKRAREITDNSPDKSDKKDPRVIADIIELRRFLSVVVPEGVVADLRNLSHARERSHKRLTALYNQLHDLVFMVFPEFLQVFKKLRTATARYMLNNHLMPIKIVALGLEELTILLRRISRGRYGRAQAEALFSAAHVSVGVRQGIRSVEQEIKMLLHLIQEITQQITTLESQLEERLQYITYSKLILSIPGIGPVSAAGLIGEIADLPSFESIDELMKLAGMNLYEISSGRFKGKRRISKRGRPLIRKLLYFLVLHMIRGGGIFHDEYHQYIERNMGHNQAMGALARKLLRIIFALVHNETEYSADYESLKNRKTA

SEQ ID NO: 396494 - protein, 340 aa, unidentified
MGEQYVGIDLHRRRSVIVRMTSGGEVLETVRVDNDPVALSLELAKAGPDPEVVLEATYGWYWAADLLQACGARVHLAHPLGVKMFGYQRVKTDARDSRNLAELLRMGRLPEAWLAPPQVRELRELVRYRAKLVALRSGLKAQVHAVLAKEGVRVPMSDLFGMGGTRLLDQVRLGRAYALRIASLRSLIAAYDQEITMLGGEIASALAGDVGYLALQAIPGVGPVLAAVFVAEIGDVHRFAGAPQLCSWAGLTPRHRESDTTVRRGPITKQGPRLVRWAAVEAVQRLPGGSKQAADFHRIADRRGTGIGRVAAARRLLTLVFYGLRDGQVRCLAPTQREAM

SEQ ID NO: 396495 - protein, 394 aa, unidentified
MKLIGIDIGKNKHFFCVIDQQTGEIISQPVSFSNDKEGFDFLVQKIKSYPKDSILIGMEDTGHYHFALLKYLLDLQYTVALINPKTTDFNRKMQGGITKNDKLDTINICDVLDTPERKKQYRITKVNSFDLYEQKQLTRHHHNLKEEENVYKNRLQKCIDIVFPEFNKLFNSKYGIVYMNILKMFGSAENIANTDIRTIRKCFEIEGRGNRISLTPERLKECAISSIGISSSAEVIQIKHLTAQIELIEEQLTEIDKKIEEFSIQNNSPILSIPGISHFSGTSILAELGDISNYSKPSQIIKFAGVAPLHYESSQFNAQHTAITKKGSKYLRKTLYQIILPVIRHNPVFNKYYQLKISQGKGHRCAQGHCVRKLLRIIYHLLKTNQQFDPQLLR

SEQ ID NO: 396496 - protein, 341 aa, unidentified
MSIATLGIDLGKTSMHVVGLDASGKPVHRKKLTRTALIRFLSNLAPCRVAMESCAGSHDIARKADAMGHDAVLLPAQFVRPYTKGQKNDNSDAEAIAEAATRPTMPTVSIKDATQQEIQFLHRTRQGWIKQRTETANRVRAMLLEFGITVPQRILNLRRALPGILEDAENDLTDGVRQLVADHWQQLQELDDRIADITQRIERIPVRDARAARLMSIPGIGPMIATAMVAAVGDGTQFTQGRGLSAWLGLVPQQFTTGGKPRLLGISKRGNRYLRTLLIHGARAVLQQAHRGDDALRRWIQQVNGRVHRNKAAVALANKLARVAWAVLTRGETFRASAAAA

SEQ ID NO: 396497 - protein, 422 aa, unidentified
MSYCPVAGIDVSKRFSDMCILSPDNKIFAQEKIYHDETSINRANALLQKAERLFFSKPVIVMESTSHYHLILFQFFSEHGYDVIVVNPLQSNSMKDFSIRKRKTDRVDAFKLAMMYRTKTLRPSQIPQTATRALRQLCRHRAELLNDVSSYKNRLTALLDQTFPGYDKVFSDVGGVTSCAVLVRFPTPTILLVEEESELVEVIAAASKSGYSFAKKKARLLISAAQKAQTLGIHSCADETLIVCTIQMLRTLSESVLQIETAIDNLLAQIKEMRNNVSLLQSIPGIGSHSAALLLGEIGDISLFKKPKQLAAYFGLDPTERQSGSFRGTKNKLSKRGSSYARAALHMGIVNSICKRGKDSAANPVLLSYYEKKCKNKPAKVAQAASMHKLVFIIFAVLRDQKPFELKTPEQHAVEQGFVKAA

SEQ ID NO: 396498 - protein, 437 aa, unidentified
MDIVHPRVAGIDVHKKVIWVAVRLPGGAPGERTVVAKSFKTFWRSLQKMAAWLAELGVMDAAMESTGVYWWPVYHALAGAGIEVCVCNAAHMRNVPGRKTDLKDCQWIAELHEYGLLRPSFIPAAEVAALRQRTRYRKRLIESRTAEGQRLPEALEDAGVKIDSVASSLNTASARDMIEALIAGERDPAVLAQLARGVMRKKIPDLVMACDGRFTAAHAQMCRLHLDAWDHLTGQIAGLDVLVAEAAAPFERLIARLVTIPGIGQRTAEVIVAETGGDMSRFATSARLAAWAGLAPGDNESAGKRKKAATRQGSRHLRSAMAESAWSVSRTATRPGARFRRLARRFGRGNEKKAAVAVAHTLLCIAWAVMKHDGGYTEAGAGYYDHRDRRNHEHLVRHHQQALTRLGYQVTLAPPGDGRPPPDPGTPPATPAQDQAA

SEQ ID NO: 396499 - protein, 338 aa, unidentified
MRYYCGIDLHSTNSVVVVIDDEDRVLFRQRLANDLNAILGALSPFAAELVGVVVESTYNWYWLVDDLMAAGFELHLANPAAIIQYSGLKHRDDDDDAAWLGHLLRLGLLAEGYIYPREERGTRDLLRRRGQLVRQNTANLLSIQNQVTRATGLRISGNRVKQLQPDEVAALGMGADAALGIGANLAVMASLKAQIQGLERTVLGRLVADDMYRMLLTVGGIGKILGLTIRLETGDPERFASAGNYASYCRCVTSQRVSNGRNKGQGNRRNGNAHLAWAFVEAAHMAIRFDEGAKRFYQRKKAKTKMVVARKAVAHKLARACWHVMRDRVPFESKRCFG

SEQ ID NO: 396500 - protein, 339 aa, unidentified
MHVTTIGLDLAKNVFQVHGITLDDEVAFNRPLRRAQLLPFFSKLNPCLIGMEACSSAHHWARELTKFGHDVRLIPPIYVKPYVKRGKSDAIDAEAICEAVTRPTMRFVAIKTVEQQSLLSVHRARSLLVRQRTQLINGLRGMVAEFGVYIARGLARVIGFAENILTGEVLELPDIANEVIHNMCEHLMALHARVHWYEDRLKQVAKEDARVRLLRTIPGVGAVTASAIIASIGDGHQFSNGREFAAWLGLTPANKSSGGKEKLGRITKMGDQYLRSLLVVGMTSLVRQTKSHPERASKWLTSLLERKPARVATVAMANKTARIVWAVLTRNEPYTPHTA

SEQ ID NO: 396501 - protein, 344 aa, unidentified
MNHYAAIDVSLELSSVCIVDATGKVVKETKVATHPDALVKFFKGFGLPLTRIGLEAGPLSQWLYAGLTDAGFETILMETRHVRAALSAMTVKTDRRDARGMAQLLRMGWFQPVHAKSPGSQELRALLVARKLLQHKLRDIELSIRGILRGFGLKVGHVTDKTFEARIRKLVTAHAMLEQIAAAMLAARTTLLSQFKKLHKAVLDIVRHDEVCRRFMTTPSVGAIVAITYKSALDDPHRIKKSRNAGPLFGLTPKRYQSGETDVTGGITRVGDEMVRTTLYEAANVLLSRVTRFSALKRWGLEVAKRRGLKRAKVAVARKLAVILHRMWIDGTTFRWSKTEAAQA

SEQ ID NO: 396502 - protein, 464 aa, unidentified
MSNTSLLPAAAVADGSVTELFIALELSSKTWLVATHVRSSDKISQYRINGGDVDGLLSLIERLRMRTAGAGGTAVKIACCYEAGRDGFWLHRLLTQHGISNYVIDPASVHVSRRARRAKTDRLDAEALVRVLMAYARGERKVCSMVRVPTADEEDAKRQHRERERLIAARTAHVNRIKGLLATQGVMLTNPLRPDWPELLKKMHTGDGRPLPPRLMAELGREWQRLQLVIAMIGTVDSEREHAQADKENAAVVGKEIELLRKLRGVGPIFATVLAREVFYRDFTNRREVGSYVGLAPTPFNSGESRRDQGVNKAGNPRARTTAIELAWLWLRHQPESGLSRWFRERVGTLQGRIRKITIVAVARKLIVALWRYLQTGMIPAGAVSGFDRREIPDLRDGRVTGCSQGNMPPGRWVPPFLDLSLSCRGILVRLECEPTGCKLMRRAAWHVSRSMSWGTADGRPRTA

SEQ ID NO: 396503 - protein, 361 aa, unidentified
MTREYIGVDLHKRFFQACAIAMTGDRLWEQRFPRTADGVGRFSARVTGECAIAVEAMGPTWAFVDAVAPTGAAVCVVDPRKTKLKAGHAAKTDRLDARRLADALRRDSVVSIYIPPREIRALREVCRGRHQLVRLRTRLAQMIRALLLRCDAGEPPGTTLYAARALAWLTTVQLPAEAACQLHRLERLYRAVHADATAADADVKARAAADPIACALATMTGIGPILGLTLRAEIGDATRFSGGPALASYAGLVPRVDNSGARVYHGRITRQGSPWIRWALVEAARYAMRRPDARGRWARRLAVKKGLAKARVAMARCYAMRSSPPGARCLPRRGSLRDWGQAIGLQDPSNRGAAHSMSYVL

SEQ ID NO: 396504 - protein, 330 aa, unidentified
MIDEGWIPADEDGLALLVGRLGSEALACIEMMSGAAWVRERLQAAGWTVQIADARKAKAVGSLAAKTDKLDARVLVELARRDLVPQVHVPTFADRELKERLGRRMHLVRLRTSAMNRAHGVMSQFGVKLAFNRLRQPDRDGLLTERGVPDVWRRSIAEAVAVVSALDERLFPLEQELRPIARADPRVQLLVTIPGIGDLLALTIASAIGDVSRFSTARKLVGYSGLTARVYQSGEKSRTGKLSKTGSTMLRWAAIEAAQQAWRPSNPWHQLYGDVKERCGGKGNPAKAAVARKVLIASWHVLALQQPFNPSRPRGAAAPVPANSSCVLAA

SEQ ID NO: 396505 - protein, 399 aa, unidentified
MKKTSGLDVHKDTIFCSVYNGKTHNEVKEYSTLTDSIRRMGEDLHSAGVEEVAIESTGIYWIPVWNILEEMGFKLMLVNPYLIKQMPGRKSDVKDAQWIATLLHKGLLRGSLVPSKEIRELRSYSRRYMKLQHRQTSVLLDMDRILVMCSIRITSFIGNISAKSFLNVVEQVVQGITDPEVLIDSIHGRIVNKHKREKILQSLTGYINPHHQFLLEQSFEEYQMIIRQINSCLQMMQEICNHCFKKQHELLLTIPGVSNTAAMILIAETGADMIAFENSSKFSGWIGLRPRNDESAGKYKSTAITKGNKYLKSILVQTAWAASRTKGSYFKEKFTRLSIRKPRRKALIAIARKIAVLMWNILHYEQCYNPERLVIYEPGKVDAKMKYHQREIERLEKLL

SEQ ID NO: 396506 - protein, 363 aa, unidentified
MNSVYHTELSSHEGTRCQFNGTKADIKLGIDVHQDFYVVVMQEGGSNPKPPQRFSKEAFLHWAAKLVRCGVQVYAVYEACGFGFGLQRKLTALGIHCYVVCPQKLDEQNKRVKTDGLDARTLCLKLDRFVQGNRHALALVRVPTEEEERSRAIHRQREQLVKVRKVLEAQGRSLMVNHGIEPVQQWWKARAFAALDVPGWMKELLANSQPILLALQQKIDQLTLQLQSAAHCEPPRGLGKMTSVIIDREIGDWRRFNNRRQIASYTGLCPGEYSSGQKRLQGCVTKHGNPRLRAALVELAWRMVRFQPHYRAVRKWKERLAKGTLTTGAARKKAIVALARQLAVDLWRVRTGRLTPEQLGLAI

SEQ ID NO: 396507 - protein, 310 aa, unidentified
MDAIVVGIDVSKDRLDVAVRPTGETFAVERDAEGLSRLIARLAPLEPQAIAVEATGGYETVVAASLSAAGLPVVVVNPAQVRAFAKALGKRAKTDPIDAAVIAHFVEAAKPDIRPMPDEQTRLLADLVARRGQIVQMIVAERQRQKRLIEKRLQKSIARLLAALQKELSSLETDIDEAVRGSPAWREKEDRLASVPGVGPTIARTLIAELPELGRLDRRKIAALVGLAPWTRQSGQWKGKSFIGGGRTQVRAALFMGALVAARHNSALRGFHQRLLDAGKPKLVAIVAVARKLLTILNAIIREQKPWLPA

SEQ ID NO: 396508 - protein, 373 aa, unidentified
MPKYSTAFGMDVHLRSTTVCALDADTGEAVTRRFPGNPWGEIAGWMDGFPGPSLAAYESGYLGFAPQRELAGLGVECVVAAVSKIPRSAADSASKNDRNDAARMAKAILAHDISPVWVPSPEVEGIRDLAGAYGGATARLATAKQRLLAFLARRGFVYGGTTPAGNPRKYWTYDFLRWLDKVRPEDDGGVRALAALRNEVEAAAEARADLLSEYGAAVDASPIAAEVAALQSIKGCAFALAAAFSAEVGDFTRFRSGRQVTAYFGLAPSQRSSGDSVRLGGISGAGNALVRKLAVEGSWRYAAARHQPKLMPRDTGVPLEIRMHGRKGSERLLRRREEMLARGMPAAKANAATAAELVRWLWALGMMCREGAE

SEQ ID NO: 396509 - protein, 339 aa, unidentified
MGEISTVGLDLAKTVFQVHGVDANGAIVVRRTLRRSQALAWFSKLPRCVVGMEACATAHHWARELTKLGHEARLIPPAYAKAYVRRNKNDAADAAAICEATSRPSMRLVAVKSVEQQGAAGIHRVRDLLMKQHTMLRNQLRGLMAEFGVAAAKGKLGLKELLTVLADGEDGRIPALLRDGLRMIAETLREIDGKLAAIDRRLVAAGRENATYRRLITAPGYGPILSSAMTAMVVNPQAFRRAADFAASLGLTPRQEGTGGKVWLGPISKRGNGYLRRLLVNGTTALINSKRAKQDPWLARLLAAKPRKVAAVALANKLARIGWALMVRQEDFRARPVAA

SEQ ID NO: 396510 - protein, 376 aa, unidentified
MAAIWAGIDAGKAHHHCVAIDESGRRLLSRRVANDEPELLELLADILALGDEVTWGIDLADGGAALAIALLVNRDQPVHYISGRAIHRASESYRGEGKTDAKDAAVIADQVRVRRDLHPLRAGDDTVIDLKILTGRRMDLVADRTRTVNRLRAQFTGIFPGLERALDLTNTGPLTLLTGYQTPAAIRRIGVKRLETWLRNRHVVLPDRLAETAVQAAERQHTSLPGEKLAATLVHTLAKEVMSLNQQVAELDKAIEARFRDHHTFEVITSMPGLGVILGAEFLAATGGDMTVFGTADRLAGFGGVAPVPRDSGKLSGNLRRPQRYNRRLQRVSYTSALFSIRHCEESRRFYDRKRAEGKRHTQAVLALARRRVNVL

SEQ ID NO: 396511 - protein, 370 aa, unidentified
MRDGSTVFIGLDVHKNSIAVAYAATEGPTDPVHVGAIGTRQCDIDALVRKMHSKSALLVFIYEAGPCGYWLYRYLTRKGLTCVVVAPSLIPRKPGDRVKTDKRDAVTLARLARSGDLTAVYVPDVPDEAIRDLARAREDALHDLNAARFRLKALLLRNDIRYVGRANWGADHVRWLARLVLPTPAQQIVFQEYVRTITERTELLQRLEAELLEQAKPWRLYPVVEALQALRGVQFTVAITTIAELGDLTRFDNPRQLMSYLGLTPSEYSSGDRRRLGGITKAGNGHARRVLIEAAKAYRHRAKVSEHIQARQQHLPTSIRDIAWRAQVRLCGRYRKLLARGKHPNTIAAAVARELAAFMWAIARTQPASA

SEQ ID NO: 396512 - protein, 339 aa, unidentified
MNEVTVIGIDLGKHSFHLHAQDATGRMVFRKKLSRQQLLRTLANVPCCRVVMEACAGSHWLARQLAGMGHEPRLISPQFVRPFVVGNKNDFGDAQAICEAACRPSMRFVSPRNEAQQTVSAMHRLRERLVRERTATVNQIHGFLLEFGISLPRGAALMSRLPTVLDHETLPPRLVGLVVRLHAQVHYLEEQIRQVVQDLKASLREDDKGRRLLEIPGIGPITASALAVELGDARQFANARQFAASIGLVPRQYSTGGKPTLLGISKRGDRNLRRLLVQCARAVMQHTASRTDALSLWVKTLSTRRHSNVVACALANKLARIAWAVLARGTHYQARALTT

SEQ ID NO: 396513 - protein, 315 aa, unidentified
MSEPDLFVGIDVSKDQVDVAVGSADPVRSFSNDESGRANLVKLLQTRNASLIVLEATGGFELPVAAALATAHLPVAIVNPRQVREFARATGELAKTDRIDARIIALFAERIRPEARSLPDEKTRLLDALLTRRRQLIDMITAERNRLGFAPKSLHPGLHKHIRWLQRELEGVDRDLDKSIQASPLWRARDDLLQSVPSVGPVTSRTMIGAVPELGTLNRRAIAKLIGLAPFAHDSGRFRGKRRIRGGRADVRKVLYMSTLVATRHNPVIRAFYQRLLAAGKPKKVAITACMRKLLLIMNAIVRSESPWTNTGALT

SEQ ID NO: 396514 - protein, 399 aa, unidentified
MKMNLSLELRVSVDVGCHSHSVAIGLSTGEILDEFSIAHEPEGFRQFFSRIEKQERKFGYPVSVAMEGFNGYARPLDTLVRARDYRLFNINNLKLARFKEIFPGAAKTDPIDARKGLELFQLRDHLPMAKDVLQEVRKTPRENEILKRLSRRRRRLVNERVRVLNNLQADLQAVCPGLLKITADAGNLWFLRFVTSTDDFRKLARVREVTIRKIPGIGAKYAGLILSWQKQAQFGHDVEWVGEMVQEDAARVLELHDKIQTIEFRMEEVAQGSEIARTLLTIPGFGDICTAELAGEIGTIERFGSEASLALYLGMTNLDNSSGKQKGSKPPRQVNVRAKAAMMIAVDRHRKKVPQSQKYYEKKRTQGKKHNQALRALGRHLCRIIFKMLKENRGYLLPS

SEQ ID NO: 396515 - protein, 399 aa, unidentified
MTLYVGIDVAKSFHVAAVVDEEGLVLHTLRVDNNATGYQRLQQLLSQYGPAHLMVAIESTGHYGHALRDWLLRQGFELHVFNPLKTNRFRDFYVQWRKNDERDAIALAHLLRLGERQPYHPLPLNLRSLKQMVRHRGLLVQARARTKNQIRAILDEVFPEYQQQTLFSDPFGATSLTLLSRYPTPAHLAALEEAQLTAFLSQYSRGRFSADQAHRIQQAARHSVGSPEAGRAYTPILPAFIAGFQSLSAQVDQCTAHIETYLAETDQTLTTIPGIGSVLAATILSEVGDIHRFPSPDHLVSYCGLALSEDQSGQSRSRRFLSRRGSARLRTSFYQAALVAVKYDPHLRAYHQRRVSQGLPAKQSVLSVARKLVRISYALLKSGQPYQASRVAQADPDDS

SEQ ID NO: 396516 - protein, 275 aa, unidentified
MGLSATGSVVREGVVDSDPDVIAAFVRSKAPGAIRVGLETGPTSTWLWTELKQLDLPVICIDARHAKAVLKMQINKSDRNDAAGIARIMQTGWFKEVRVKDLDSHSVRALLAGRALLVKIKRDLENQIRGLLKNVGLVIGRAKFNVFAKRAEELIEDHPELIAVVGPLLKARQAIEQQTDDLDRKVLKLARNDAQVRRFMSVPGVGPITALCFKATIDDPTRFKRSRSVGAYVGLTTRRHVSGEIDWTGRISKCGDARPLPRREQWARQGLSRRA

SEQ ID NO: 396517 - protein, 352 aa, unidentified
MEHLAIDLGSRKSQVCVRAADGTLLEERKVVTGSLGSYLKRRPASRVIVETCAESFRIADLAVAAGHEVRVVPATLVRSLGVGSRRTKTDRRDARILSEVSCRIDLPSVHIPSFAAREHKTICGMRETLVSARTQVINCVRGWLRTQGIAVKGGANGFAVRVRQEHSCQRGAAPPAYVESLLVITEQLSSQIGEADRRLSELAKGDATCRRLMSVPGVGPVTSVRFVAALDEWSRFPNAHSVQSYLGLVPGERQSANRQERLSITKAGSTRLRWALVQAAWTARNSRPNDPMVRWSHEVEKRRGKRIAVVALARKLAGILYAIWRDETTYDQRRGAMRLDAHPSDLEEPAVL

SEQ ID NO: 396518 - protein, 415 aa, unidentified
MELVVERAAGLDVGKDEVVACIRVPAAGVGQGRGRRRQEVRTYPTFTSSLETLADWLQAEGVTQVVMEATGQYWKPIWYVLEERGFQLLLVNARHVKILPGRKTDVGDAAWLCELLECGLLRGSFVPPPAIRQLRDLVRYRKRLVQAHTAEVQRIQKTLEDAGIKLDSVATDVLGVSGRAILKALVAGERDPKTLAELAKGKLRKKLPQLRQALRGRFGDHHALLVGLALDHLEHLEAAIARLDARVDEVIAPFAVARDRLDTITGVGKRAAEAIIAEIGADMTVFPTAGHLASWAGRCPGNNVTGGKRRSGKPTRGNRWLADVLTECAWAAARSRDTYLAAQFWRLARRIGKKKAAVAVGHSILVIAWHLLTEDCNYHELGGDFFIRRDSDRARQRAVAQLQALGYQVTLQPAA

SEQ ID NO: 396519 - protein, 377 aa, unidentified
MSQYSTYVGMDVHARSITCQSYDVETGETKTKVFNNAPTPAEVASWLSNLAQPVYCAYESGCTAFELCRGLRELGMDCDVIAISTLAKSDKAKKGKCDKIDAKAILAAILNPMSGHSCVWCPDEGTEGARDLARMRDEAAQALKRARQRLLALLLRHGHVWNEKTATGKPKAKWGRDFMRWLDGIELADPCSQKALELYKRMVETGAELAKEAGEAARSPRWKPYVDALGALKGMSVPSAFLVAAEFGDFTRFESGRKVSCWLGTVPKNSSSGERESHGGITKAGNSRLRRTLVEGNAAIALRTAGKKALGKGQVASAAVKCMADKANARLAARYRHLTKDNGLRACKARIAVVNEQIRWCWAIGVAVHGELERSAR

SEQ ID NO: 396520 - protein, 346 aa, unidentified
MKYFAGLDVSLEETAICVVDEAGAMVREARIPSEPEALVAFFQGSGLVMERIGLEACSLSAWLHESLGAAGLPAVCIETRRAKAAMGAMPNKTDRNDARGLAQIIRTGWYRAVHVKSPACRSWRALLTARRLLLNKMRDLENGLRAVLREAGLKLGTPTRKEFAARVRELTAADPVLSVLAEPLLTIIAAMTRELAQLTKRVLEIVRDEPVCRRLMGVPGVGPLTALTFRATIDQPERFRHSRDVGAHLGLTPKRYQSGETDVQGAISRCGDELARTALYEAAHSLLVRSRRWSALRAWGMQVAKRRGMARARIAVARKLATILHRMWADGTEFRWGKEGTMPAAA

SEQ ID NO: 396521 - protein, 347 aa, unidentified
MRIVSHSCAVYGVDLGKTTFHIAGADQHGRPTLRIKLRRDALLQFFATASPALVGMEACPGSHWLARKLIAFGHDVKLIPAQFVKPYLKSNKNDTLDAEAIAEAVTRPTMRFVPVKRHEQLDMQALHRLRAQFVHQRTALVSQFRCFLLEYGIAIHAGIGMFRRDATRILSGDSNDLTPTMRQLLTDLWSDFLRIDERVAALSGQIEASAKHDDVVQRLTTIPGIGPLGASALCAAVGNGKQFRSGRDLAAWIGLVPRQHTTGGKPALLGISKRGNTYLRRLLVLGAQSCLMHLDRSRDRLGRWLDTLESRMHHNKVVIALANKLARVAWVVLTRPGALYEKMDPRF

SEQ ID NO: 396522 - protein, 349 aa, unidentified
MVRSLGTIANRAESIRKLVKKLGSVEQLRACYEAGPTGYVLYWQLAELGVKCEVIAPTLVPVKAGDRVKTDRRDAEKLARSYRSDDLTAVWVPDEGSEALRDLVRAREAAKQDQLRARHRLGKFLLRSGQRPAPGVKAWTQTHLTWVRQIRFSQMAQESTRLDYLHEVEHMGERVVRLEQAIAEAIKLASPQVQEVIRGLQALRGIAQISAVTIAAELGEVSRFEGARQLMAYSGTIPSENSSGKRTRRGSITKTGNAHLRRIIVEAAWCYRLRPGVGPALRKRQEGVSEGIKAIAWKAQHRLHKRYSRLAAAGKDSRKIVTAVGRELLGFIWAIGVKAEAATKKRIAA

SEQ ID NO: 396523 - protein, 410 aa, unidentified
MNAMDIVHHRSAGIDISKTDAKVAVRIVRAGRVRANVEVRTFGSSTPQVLTLRDWLIDQQVTCVVMEATSDYWRTFYYLLEDAGFELLLANPRDVRNRPGHKSDVADCRWLAELGAHGLVDGSFVPPPPIRELRALTRLRTRIARDRGIAAQRLEKVLEDAGIKLSSVTKLTNVSSRRMLSGLADGLPIDELVDMAYGMLRRKKTELADALTGQFRQHHALMMEILLNRIDSCNLDIAELTGLIDQLMQPYQQAHDLLVTIPGVSDTTADEIIAETGADMSVFPDAKHLASWAGVAPGSNQSGGRAKPAKTRPGDTYLQAALGTIAFCASKTNKTYFSAQYRRITARRGPMRAIVAVQNSAITAIWYMLTNNQEYVDPGADYFTRRRPTAAKNKAIQQLQDLGYQVLAVS

SEQ ID NO: 396524 - protein, 389 aa, unidentified
MSTCTATASTIQNTASARVLLLAFELGESGWLLGFSPGVGEKVVQRRIAARDTAALMREILRAKAHFQLGDEVAVRSCYEAGRDGFWLHRFLEVQGIDNVVIDSASIEVNRRKRRAKTDRLDVVGLLDLLARHWAGSHRPPFSVVSVPSPADEDLRHLGRELKLVKKDRTRISNRIKGLLANAGLVLDGRKDMKGQIERLRLWNGDPLAPLLRARLLRYAADFELHSARIRELEQERRALLRSQEAGTSMAKVWRMLELKGVGIETAWCYGMEFFGWRSFANRRQVGSLAGLTPTPHDSGTQEREKGIGKDGSRWVRGVAIEQAWAWLRFQPESALSQWYQSRFGGGSKRMRKIGIVALARKLLIALWRFVEFGELPEGAVRTPRVRLV

SEQ ID NO: 396525 - protein, 339 aa, unidentified
MKTYAGIDLHSSNNYTAVIDEHDRRLYRKRLPNRVDTVVSALDPFKATLEGVVVESTYNWYWLVDGLQEHGYKVHLANPSAIKQYEGLKHTDDQWDSFWLAHMLRLNILPEGYIYPKEDRPVRDLLRRRLLFVRHRTAHILSLQSMITRTLGTRISGNAIKRLDHGDAEILFDQPHLVLAATNNIAVIHFLKERISGIEREVKSVIKLRDQFTYLQRVPGIGDILALTIMCEVGDINRFPKVGNYSSYCRCVKAERLSNGNKKDTNNRKNGNKYLSWAYVEAANFAIRYCPYAQSFYQKKRAKTNGVVGIKALSNKLARASYYVMRDRVPYDPEKLFHA

SEQ ID NO: 396526 - protein, 344 aa, unidentified
MANLNQFCDFTKLIGIDIAKSVFQIYSCDTQTGEITNVQIKRDKVLESLANCGKCLIGMEACGSSQYWARKLQALGHTARLMDPKLVKPFVRHNKSDKADAEGVYHALVSGVRAVAVKTETERDIQTLLTMRALLVKQRAARINHVRGLLAEYGHVMPKSVDQFDKKVDECINSLEGDAVQLVIDTLRDTVKSIRDDQDRIKTLQREISRLANQTRNAKHFLTVPGVGETIMAYMCVLLADPTQFSSGRQFAAYLGLVPMHTGSGGKTVTTKIPGRCDKALRALLVQGAHAVARSKCRTDWVKNILAKKPKKVAMVAIANRMARQCWAVASKGQDWRRMPVTAA

SEQ ID NO: 396527 - protein, 279 aa, unidentified
MLYYTGIDVSLEASHLCVVDEAGVVVKEAKIASEPDALVAWFSTLGLAVKRIGLEAGPLSQWLYAGLRTAGLDVLLLETRHVRDAFRSMPVKTDRKDARGIAQLMRLGWYRQVHCKSEDAQDTRTLLAARKVLQSKWHALEMSLRGLLRGYGLKVGETTRKTFEPRVRGLAAGVPGLAEVADALLKARAVVFDQFRVLEARVILRARKDERAGLLMTVPGVGPVIALTFVSGIDDPGRFRSSRTVGAHFGLTQRKYQSGETDSERYEQPTLPLLIETAR

SEQ ID NO: 396528 - protein, 325 aa, unidentified
MSNKALEAYYTYIGVDVSKQHLDINRGGKASQITNDEKAVAAFVVSLKRSSASAGTPPPLVVLEASGSYERILTRALAKANIAFRLVNPRQVRDYAKSTGQLAKTDKIDAAVLVDFGLANGLKPRPDAPSSVKALRSLEHARAALVEDRKRWSNRLGQDLGDGIKHEATLMIRHLDKRITMVEKKIRQHVATDERLNTRLNILIEVKGIGRTTACTLMACMPELGSLNRRSAANLAGLAPHACDSGTLRGQRRCWGGRKQVRTALYMPTLTALRCNDVIRPIYLQLVNAGKPKKVAVTAVMRHLITHLNAILKDHQHHCYANPQT

SEQ ID NO: 396529 - protein, 322 aa, unidentified
MSASGVFVGIDVSKAHLDVAVRPTEDEWRSQNTETGVSEVVDRLKKLGPVLVVLEATGKFESAVASGLAVQGVPVVVVNPRQVRDFAKSTGRLAKTDVLDARVIAHFAEAVRPEPRPLPDEQAKLLSSLLSRRRQLSEMLTAEGNRLGSADRNMRRRLKAHIRWLRKELLEIDDDMDSAVRESPLWRVKDDILKSVPGIGTVVSITLLSELPELGLLNSKEIAALAGVAPLNRDSGTLAGRRTVWGGRARVRSALYMAALVASRHNPVIREFYLRLCEAGKPKKVALTACMRKLLLIVNSMIKNKKRWNPVTTEARSMPISA

SEQ ID NO: 396530 - protein, 387 aa, unidentified
MKRNDLSRSLVAFEQNSTLVAVVELSLKSWLVAGLVPGLNRQPLKKVDTRQEGLVALVHRWRDEAIRAGRAIERMVVAFEAGRDGLWLARWLRARGIEAYVIHPTSVPVSREHRRAKSDRLDTALLMRAVLGWLRGEPKHCSMVAIPTLAEEDARRPNREHEHLVGERTSIVNRLKATLVRLGIPGFNIKLRKAAETLKELRTPEGEALPPNTVAELLRDLARLQLVRTQIETIEKQRVERLRKAPQDGAHPMVLLLAKLLGVGIETADMLVHEALSRDLRDERAVGRYAGLTGSPDESGSKRREKGLAKAGNARVRRGMVQLAWRWLMFQKQSALAQWYRARIAGARKDVRKTLIVALARKLLIALWRYVTTGQAPIGAKLKPAAI

SEQ ID NO: 396531 - protein, 356 aa, unidentified
MNTRKVQDFVVKGKEVFVGLEDSKKTWKIAVRCDKMLIHRVSMPAKHQIVVQYLRNKFPECTIHLIYEAGFRGFNLFDRLTEEGIDCMVIPPHLVTEPKVSRVKTDKRDANRLAMIRENHDFKEPCCVPDKERREDRQISRTLWGMQKDIVRTRNRIRKFLDFNGIEVSFPERWGEEEFRALKELPLGDSLKKSLTALLTLLEQLWAHKESLQGALRALCSKERYKKAFHIVMSLPGIGWFTAIRLILELGEDLSRFTSGKKIASFVGLTCSEYSTGETERKGRITGMGSGLIRSALIENSWMAIRKDPVLLAKFTRIWKGKGSKKKAIVAVARMLIVRLRACVIAGTPYAIGTVK

SEQ ID NO: 396532 - protein, 358 aa, unidentified
MKHSSKYVGLDVHQATTVAVVQDDAGRVIARSVLPTEESALVEFVRGMRGAIQVAFEEGTQAQWLHDLLVPVVARVIVCDRRGEPRRGHKGDWHDAAELADSLRAGRLRAVYHGSPHRAALKELARAYRNLVEDSTRVMSRLKALFRARGIATAGRGVYDAARRAEWLGKLGDAGVRLRAATLYAELEVLHALRPTAKAALVAEARRDPGWAVLRTIPFLGPVRVALLLATLQTPWRFRTKRQLWKYAGLAVVTRTTAEYALDARGRPVQRRRPPMTRGLNQNHNHVVKEVFKGAATVAAVRAGEFRDLYRVLVARGMREELARLTLTRKLAALTLRLWKTGERYDAKKLTSYAVPAR

SEQ ID NO: 396533 - protein, 401 aa, unidentified
MSVHELRVALDIGSKKHRVGIATDDGKIVEEFDITHDKTGFELFFRRVEARRNDLPVVVAMEGLNGWARPLDRMIQKRDYELLNVNNVKLARFKEIFPGPAKTDKIDTRKTLELMHMRKVLPLAKTVLHRVGDTPVENEQLKRYTRRRRQLVDDKVRVLNRLQSDVQAVSPGLLEITGEAGNLWFLHLLTCREDLSKIAGMRRPSLLKIRGVGQTYATKIEAWQGTATFSDEVEWVGPMIIADAQRVLDLIRQVQAIEKQIATIGASSTIASRIETIPGFGALSAATLAGEIGNLERFEAETSLALYSGMTRLDNSSGQFTGSKNTRQVNTHAKAAMMVAVARHIDNVPESKVYYDKKKAEGKTHNQAVRALGRHLIRVIWSMLKNDRDYVPKSERLSKIA

SEQ ID NO: 396534 - protein, 408 aa, unidentified
MEVLYPRCAGLDVHKDSVVARVRCVSDPPHDEVRTFATTTSALLQLNEWLSRHEVTHVAMEATGVYWKPVWHLLEGDFELVLANAQHIRNVPGRKTDVSDAGWIADLLAHGLIRSSFVPPAPIQELRDLTRTRKQLVREISQHSSRIQKVLEDANLKLGSVLSDVLGKSGRAILQALIEGQSDPEKLADLAQGQARKKRTELVEALHGRIRNHHRGLLKVHLDLVTALQHGLAELDATVGKALASIQEGARLLSTIPGVSDITAHVIVAEIGLDMTRFASDAHLRSWAGLCPRNDQSARKRRSTRVRKGAPWLKTTLISAAWAAVRVKDSYLQAQFHRLRSRRGAKKAILAVAASMLTAAYHMLSNQVEYKDLGAGHFARRDRAKMIQRLVRRINDLGCEVQLSPLTA

SEQ ID NO: 396535 - protein, 387 aa, unidentified
MPQPNDLSRSLIALDQNSTIIAVVELSQSSWLVGGVVPGIERQPRKKLEPSPEQLLGLLHRWRDEAVRAGRPITRIALAFEAGRDGFWLARWLEARGVEAHVIHASSVAVSREHRRAKTDRLDTELLKRGFLGWLRGERGHCSMARVPTIAEEDAKRPNRERECLVGERTRIVNRIKSTLARLGIRHFKPTLRKAAERLASVYTPEGMPLPPNALAELQRDMTRLGFVVSQIKEIEDARQKRLEQQPETGPHAMVRLLAGIVGIGVETADMLVHEVLSRPMRDRRAVARYAGLTGAPDESGARRREQGLARAGNARVRRGMIQLAWRFLMFQKESALALWYRARTADSRSGTRKTMIVALARKLIIALWRFATTGEPLEGVVLRPTS

SEQ ID NO: 396536 - protein, 343 aa, unidentified
MQTVTTIGLDIAKSVFQVHGVDAEGNVLIRRQLKRRYVLAFFEKLPPCLVGIEACASSHHWSRQLKALGHTVRLMPPAYVKPYVKRQKNDATDAEAICEAVTRANMRFVETKTPEQQSCLMLHRTRHLFIRQQTSVINAIRAHMAEFGIVAPVGRKGVEQLLAIVTDASDPCVPEVARACLAALGAQLRMLKAQILEFDRRIMAWHRSNEISRRLDAIPGVGPALATALVASVANPKAFRSARDFSAWIGLVPKQHSSGGKNQLGSISKQGDRYLRSLFTAGALAVIRYAKIHGTQHRPWLTALLARRPTKVAAIALANKIARMAWAMMARGERYKEPVALAA

SEQ ID NO: 396537 - protein, 323 aa, unidentified
MSQPFLGIDVGKSTLHIALLMPNGKSKPKVIPNTPEGHQELLTWLNHHQVSPVRACLEATGVYGDAVAEVLYQANHTVSIVNPARVLGFAKSELRRTKNDKVDAALIARFCAALRPAPWTPAAPEVKHLQALVRRLEALNVMRQQEYNRLAVSTEQVATLIKEHINYLEQDIQKTKQLIRDHFDQHPGLKQQEDLLRSIPGIGEVTASVILAEVQSWDLFVDAKQLAAYMGLTPQEKTSGTSVRGRSQISRTGNSRLRKALYMPAMVSQRFNPLIKTFCERLLSKGKNKMQVIVAAMRKLAHLIFGVLKSGKPFDPNYLSITP

SEQ ID NO: 396538 - protein, 387 aa, unidentified
MYYIGIDISKFKHDCAVIDDVGDVVTPSWSFANDHEGFLQFKALLDSLGSETRIGLESTGHYGTNLKLFLESCSTTFMEFNPLLINRFIKSKSLRKTKTDSIDCEMIARYLMTVEYKPYPSSFYHTEKLKSLTRFRDNLVRQRSRQLVELTNILDKVFPEFKPFFKGKFSATAFHILINYSSPEKIANMNSKSYETLRKLSRGRFSLADFTTLKHLARNTVGHPDDFLLSEMAMVIDIFSQLDSKVDETEALIKECVLEINPPILTIPGIGVDSAAVILAEFGDFSKFQNPAQLLSFAGLEPGYFQSGTSESTGKMVKHGSSYLRYALMNCAQSVANYEPIFAEYYSKKRAEGKTYRVALSHVAKKLVRVIFTLQTKNLVYDPDAIR

SEQ ID NO: 396539 - protein, 317 aa, unidentified
MKIVPRSKVVIHYGVDVAKAELVIDCAGSIKRFGNHAKGIAGLLAAAGKSEGRPHLVCEATGGYEQAMAKAALRAGVRVSVVPPQRVRNFAKSLGRIAKSDPIDAKVITRFGQVTNPEPLQPKDSGCQKLDELMRARAELLDSQQRERNRLEHHTDPAIKRIFENLLARLDKQIAAIDERCTMLISTDPTLARADALLREVSCVGPQVSRSLLAFLPELGHAGRRAIAALAGLAPYDRDSGQMQGKRFIQGGRAQVRRVLYMAAVVAIRHNPILGDFYKRLRLAGKPGKVAVVAVARKLLVHLNTKMTGFLNNPVAV

SEQ ID NO: 396540 - protein, 376 aa, unidentified
MGHDSTVYVGLDVHKESITAAYAVGVGEVELLGKIGTLKTDIDRLCQRMQSKATHVRIVYEAGPCGYGLYRQLVQKGFDCMVCAPSLIPRKPGERVKTDRRDALKLVRSLRAGDLSSVYVPGVEDEAFRDLARAWATAKADLKHARQRVKSFLLSHGVRYTGSANWGPAHRRWISTFAFPNHWQQLAFDECRRAIEDRLAQCDRLEAALREAVVNWRFYPAVLGLQAMRGIQFTTAVGMLAELSDLSRFEHPRQLMAWLGVTPSEHSSGDRRRQGSITKNGNSYARKLLVEAAWSYRYPARVSPDIQRRHEGIPKPIIDCAWDAQLRLCRRYRKLAARGKNVNTSVVAVARELSGFIWDISRLAMSLAIPKDARPV

SEQ ID NO: 396541 - protein, 310 aa, unidentified
MEEKVFVGVDVSKDSLDVAIGPHKDIITFANDQKGVDSLVKKLKRIDAQLTVFESTGGYELLAASCLAEAGVAVVIVNPRQVRNFAKATGILAKTDAIDARVIARFAEAVKPEVRPLKDRQTSELAALVTRRRQIIEMIVAENNRLKLANKRNKKDIKDHIRWLKKRLDKIETDIGKMIQSSPIWRCKDDILQSVPGIGPVTSARLICDLPELGVLSSKKIAMLVGLAPLNCDSGKYKGRRRIWGGRAAVRSGLYMATMAAIRCNPAIKEFYQRLTAAGKCHKVAATACMRKLLIIVNAMLRDQTRWQQN

SEQ ID NO: 396542 - protein, 341 aa, unidentified
MDISVLGVDLGKNSCSVVGLDKTGRVVIRRRMRRETVISFAAGLPPCVVAMEACCGAHHMGRALAAQGHSIRLMSPEYVRPYVKAQKNDDRDAEAIAEAATRPTMRFVELKTEEQLDMQTLHRIRDQLVGDRTSLMNQIRSLLLERGHIVPQGRAKLLARLEELIDDDEPVLGHRIHRLVADMRERWRMLDERIADLDAEFIDGARSDVRTRRLLTIPGIGALNATALVAAVGDARTFGRGRDLAAWLGLVPRQATTGGKPRLLGITKRGSRYLRKILIQGARSSLPTISKSDTRLGAWIRGLLSRAHPNTVVVALAAKMARIVWALLRHERDYEATMLPA

SEQ ID NO: 396543 - protein, 434 aa, unidentified
MICAAVERCAGIDVGKQWLSVCIMIGPLNGEPRTERRRFGVNVAELEKLRNWLVSEGVTHVVMESTGSYWKPIFNVLEDSVKVYLANPYEVKNRKGHKTDDKDGWWLAHLLRHAMIYPSFIPPRRIRELRDLTRRRTRLNGVGTAEKNRVQKMLEDANVKLGNVLSDVFGASGQCMLEALLKGEAPPPEQIAQLARGRAKKKIPEIIASLEGHQMSEHHRKMIHYSLTHMRFVEEQIADIDSEIAAKIQEAGLVQQWENLQTVPGVRERSAANILAETGADMSQFPSQRQISSWAGVCPGNNRSAGRNRSNRPTGGNPWLRGTLTECAWAAASKKDCFLKQKFWRLTTKSGGKKTSALVAVAHTILQLSYEVLRSGQPFRERQLPPLSPEHKERLIRHHVRRLGKLGVRVHSHRTTSASKSRPTKRASQAVENK

SEQ ID NO: 396544 - protein, 342 aa, unidentified
MKKKYFVGIDVSKQTIDVAFIIQTGPQRTQPCWKIFDNNEHGFWQMKTWLQSNHVPFKENTLFVIENTGLYHRLLVNFCNKHQWQLCIENGAQVKWSLGIARGKSDKVDSRRLAVYAVRFADRLKPSSVLHEGVQAIKDLITLRNRHMVQMGSLQTHLKELKITTDRKAVEELEKMHAPLIKIMKATIKKAEMAIAKKIEENELTKRQYMLLLSIPCIGPVTASYLIACTNAFTSCSSGKQLACYCGVVPFDYQSGISIKGKHHVHKMANKNLKTLLHLCALSSIKYVSELRDYFNRKVEEGKHKMSIINAIRNKLLLRAFAVIKNDKPFVENMCKLGGKPI

SEQ ID NO: 396545 - protein, 367 aa, unidentified
MKKISTAARCEFGKFAGQRLTIGLDLGDRSSWYCVLDEQGELLVEQKVATTPKAMKEVFGALPRSRIALETGMHSPWVSRLLSELGQEVIVAHARNVRLIGESRRKDDRFDARTLARLVRIDPQLLSPVQHRSRKAQADLTVIRARAGLVRARTALINTARGLTKSYGERLRGCNSRNMNAEKAQGLSPELQAALGPLLAEIESLSARIHEYNEQVERLSQESYPEVALLKQVKGVGTLIALTYLLTLEDAHRFGKSRDVGCYLGLQPGRRNSGQSEPQLHISKEGDPYLRTLLVQGAHHILGPFGADSDLRRWGLKLAERGGRNGKKRAIIAVARKLAVLLHRLWVSGEVYEPLRNSSRPMLATAA

SEQ ID NO: 396546 - protein, 370 aa, unidentified
MKEYSEAFIGFDTAKKKHAVAIADVGREGEIRYLGEIDSSPLTIERMIRKLAGRYEKLHFCYEAGPTGYGLYRQVRGLGHHCTIVAPSLIPKKSGERVKTNRRDAVSLARLFRAGELTSVWVPDTVHEAVRDLVRARETASQDLRRKRQQLLSFLLRHGRIFSGRQHWSRAHLRWLAQQKFDHPAQQIVFQDAVDAIDDAAARLRRLDEQVAAIVPSWSMAPVVEAYQAMRGVSFAVAVTFVAEIGDLRRFDNPRQLMAFLGLVPSERSTGERVRRAGLTLAGNKRARRVLIEGAWSYRYPARVSQTLQARLEGLPKAVREIAWKAQIRLCARYRRLNAAGKKLPVVIAAIAREMAAFLWAIARHVAPAA

SEQ ID NO: 396547 - protein, 340 aa, unidentified
MKDTVIGVDLARNIFQVHGASRAGEVMFRKKLRRQQFMQFMATQPPALVVLEACGSAHYWARELAGAGHEVRLIAPQYVKPFVKRQKNDAADAEAIVIAARQPEMRFVEPRTEAQQARGVLFRARQRLVHQRTELVNALRAVLYEFGLVVPQGIAHIRHIEAMLDEAVLPEAVKQECLDLLRQISEQSVRIDVRTKKIRMLAQESENTCRLQSMPGVGPLTALAIEAFAPDLQSFRRGRDFAAWLGLVPRQFSSGGKERLGKISKAGQADIRRLLIMGAMTQVNWASRKAPAPGSWLARMLARKPRMLVAIALANRMARAIWAMATKQEDYRDPALSLAA

SEQ ID NO: 396548 - protein, 338 aa, unidentified
MKKIVIGIDISKKKLDWCVMVDKEIAGFHDTANRMDDIYNKFAEVLEYGKIDIGEVLVCAEYTGKYIYPLVLACHKCRVDLWLESGYNIKCEARKERGKDDRTDARRIAEYGRKNQDDARIYRLPAESIATLRGLLSERAMYCSQRAAHKGQLRDMRGFMSPEAYTARAVRQLSLIKELDRLIEEVDNSMAEIVASDPELLRQQRLLLSVPGIGMVCAAALIAVTAGFSLFDNGRELCCFAGLAPFAYTSGTSIRSKRRVSCRADHQLKALLHMCALVAATCMKSGWFAEYYQRKTAEGKNKMSVLNAVRAKLMLTAFAVVRDNTPYDKNFKINLAES

SEQ ID NO: 396549 - protein, 483 aa, unidentified
MVQSVGIDFHQGLHQARCLDERAQLCDGFSFRTTLQGLATLEERIFRDGSTPIVVFEPMGLAWLIVAAYLRARHPGCRLVKAKGQKVAALRRYLRGSAKSDRIDAITLAKMPFIDPEQLAEVYLPPAEVHALQRLTRQRQRLEGEVVARKNRIGRIVDGYLPGVREAFSSPWSLQARAFLRSQLDPFAVVRAGEEALHTFLTKARSRGKGDKGETHMIYLACQNAAALYELSKPSGGVDEGFFADLQEEIARELRLMEAEEAESEAISRRVEELYQKLHTSDNLRTIPGVGEHTAPVFLAIVGDPARFGSQAAFANWTGVVLGARQSSDVEAKGLRMTKAGPPIIRWALYQAGQIGRRYDPQLAWIYYREMVHHGKNHKQAMGAVMSHLAARVLTVLREGRPYELRDAEGKPVSREEARGLLSRYRVPEEIRREKRRRNPAKGSGRTLRKKAQGMASHRTREAADAPQPAVATAIPRDTVYPG

SEQ ID NO: 396550 - protein, 312 aa, unidentified
MAEHSYGGIDVSKDRLDVMVLPAGSCFWVTNDAGGWAELVARVRPLAIAAIGIEPSGGYERGVIRTLLAAGLSVRRINPNKLRQFARARGMLAKNDRLDARLIAEYVAIMPTRVVQRDSAAERLAEIVTMRRQLSDEHVAVENQTAHVEDAMLQRLNRRRMARLRADIILLDKRLAELVATDPQLAHRYRLLVSMPGVGPTLAFTFLALLPELGRIGRKQIAALVGLAPYDFDSGKLKGHRSIYGGRMPVRNVLYMAALSASRYNPELKTFSKRLALANKKSKVIIVAVMRKMITTLNAMLRDDVEWQPRSA

SEQ ID NO: 396551 - protein, 407 aa, unidentified
MEITPIYPRVIGLDVHQAKITACAIAEQADGTVTVEQREFGAFRRDRRALAAWAQAFGPAVVVMESTGIYWKSPYAALERVGIQAWVVNARHVKAVPGRKTDIADAQWLAILARAGLLRGSFIPPAELRQLRLIARQRQKLGGMLASEKNRLHKILTDAGIRLHVLVADLHGQAGRAMVKAIIADEPPAEILKHRGRLKASRQELFEALQTEDLSPAHRFVLAETLSHIEELEARMQRFERQLLNGLTPWQSLLVLLQTVPGIDQIGAALLLVEIGTKMAAFGSAERLASWVGICPGNHESAGKRHSGKTRRGNAWVRRLLCEFAQAAARSRCALRDKFNALKIRKGHKKAIVALGHKLLRIIYAILSRHTPYQDRTVDYEALMVQRNAPRWIKMLRKHGFITPATA

SEQ ID NO: 396552 - protein, 395 aa, unidentified
MFIVGIDIAKRSHEAIIIAEDGQVVRKAFSFRNNCTGYNLLLEQVRRLTLVKSQIVFAMESTAHYWLALYARLLKDGYAVMVLNPIQSHSLRELYIRKAKTDARDSLVIADLVRFGRCKASNVPQDKILALRELCRSRAYLVDMAADLKRKLIALLDRIFPEYESLFDSVFSKASIAVLSKYSTPQKVKNANLRKLTDLLMESSNGHFGEWKAHQLKEAACSSFGIDDSGGVYSTLLGMFLEQILSLTAQADSLEKQISVFFQEFNNPLTSIPGVGTVLAATILSEIGDITRFSSADKLLAYAGLDPSVKQSGEFKSNQNRMSKRGSPYLRRAIWLASTVAVHRDPMFQTYYEKKISEGLHYMNVIGHVSRKMTAVIFAVLRDGQPYQPILQSAG

SEQ ID NO: 396553 - protein, 400 aa, unidentified
MRVVFGIDVSKASSEVAIVINSEKIHGYSMTNDAIGFSRLLEDLKTVSNPEIVFEATGVYSRRLQVFLENNDYAYTRLNPLEAKKQLDSLRVRKTDQIDAEKLAQSQFVLNRKPTYVQEKVYQELRDLSRFYQNLTEDIVRTKNRLHKVLQVTFPEIEKLLSTPTGEQYWNLVTAFPSKEYVLALDINKLENSVRYSTSKHISDKRVSALAEKLQNLAKQSYGAVKKTSPMLEEVRYYGKELFRLSEQRQTVLDQMVELAQPLPEYDILLSIPGIAETTATSIIGELGDIRRFQSANQINAFIGIDLRHYESGNLLAKEHITKRGNPYARKILFKCIHNMASASHTNPCHIADFYEKRKRQSQTTSTKPHTIASIHRLIRTMYYLITHNKLYDYASTQNQ

SEQ ID NO: 396554 - protein, 381 aa, unidentified
MHKEIRTFTTMTKDLLNLSDWLTSHGCTHVAMESTGEYWRPVFNILEGNFEVMLVNARHMKAVPGRKTDIKDSQWIAELLQHGLLRPSFIPPVEQRDLRDLTRHRSNFIRERVNLINRVQKVLEAANIKLASVASDVMGVSARAMLAAIVKGNSTPELIAELAKGTMRNKHELLVQALEGRVRPHQRFILAQLLAQIDSIDHTIELFDQQIEEYCGPFEKAVELIDTIPGVARRSAEIIVSEIGIDMTRFPSAEHLAAWAGLAPGNYESGGKKLSTSTRQGNRALRTILVQAAHALARTKTYLASQFRRISVRRGKKPAAVAVAHFILMIAYHLISRQEPYKDLGADYFDKQRPESVKKRLIKRLEKLGYQVSVESVEVAI

SEQ ID NO: 396555 - protein, 355 aa, unidentified
MSHLNSGIAVIGIDIGKSSFHVVGHDRRGAIVLRQKWSRGQMEARLANLPACLIGMEACVGAHHLSRKLKMLGHDARLMPAKYVRPYSKGQKNDFRDAEAIAEAVQRPTMKFVATKTADQLDLQALHRVRERLVSQRTGIINQIRAFLLERGVAVRQGPRFLRTELPGILATRTDVLSLRMLRVIEDLAGDWRRLDARIDSLSSEIETLARQDQHCERLMTVPGIGPIISSAMVAAIGTGDVFSKGRDFGAWLGLVPKQISTGDRTILGSISRRGNRYLRVLFVQAAWVVLVKLGPKHWERYGLKSWIEAAKKRLHHNVLAIALANKLARISWAVLNNGRAFGRDKTDAMASRPT

SEQ ID NO: 396556 - protein, 314 aa, unidentified
MNKQNFVGVDTHKDTLACYKQGVFKEFKTTQKGFQDALHWAGKAKWAVEGAYCFGRPFSAFLIKNGVDVYEVNPLLTKTWRGALAVSNPKNDYGDAKVISLFAETSNLQKVSLETIKLKEKITARESLIKQKTEITNSLKMLFLTRGETLSFKKFTTKKAIKWLDNNGDMIVKIKVKVLKEVLLGIEEIEEEIKKSLPKKAEKLKQLKGVSDITAAIIYTETKGKLYTAAKLASYAGVSPVEKSSGRTTRHRNNKAGNRQLNSVFYRLSIMQMRFDEKGKAYFEKKLSEGKSKRHARKCLSRQLVNLVFKLLVD

SEQ ID NO: 396557 - protein, 408 aa, unidentified
MQVVYPICGGIDVHAKMLVACLRNEGQRETRTFSTMTDDLLRLRDWLVKSQCTHVAIESTGVYWKPVFNILEGSLEVVLVNPLHVKAISGHKTDVRDAERLADLLAHDLVRPSFIPPPEIRQLRELTRYREGLVREQASVNNRVIKVLESGNIKLAQVASDALGRSGRAMIAALVRGETNTAKLAELACGKLKRKDSELRRALDGRLTRAQRFVLKEQLLRIEELEAALAQVNEQIDQVFQSHPKFAHCRALLQTIPGIGQRVAEIIIAEIGVEVEANFPTDKHLASWCGLCPGNNASGGKRKSGRTCDGNTYLRSALVQAAWAAQRAKHTYLSAQYRRLARRINKKKAAIAVAHSLIVIVYYVLVRDRSYQDLGGDYFDRQHVEQQRAYLVRRLEALGCRITVEQNA

SEQ ID NO: 396558 - protein, 343 aa, unidentified
MKLSRVGIDLAKNVYQLHGVDRSGKTIWKRRLKRHQWLKVLLDKTEPGCVIGLEACASAHHWGRELQSRGYTVKLIPPQFVKPYVKSNKNDARDAEAICEAMSRPNMRFVTVKTVEQQDIQATHRIRAELITQRTAKGNQIRGLVAEYGLVAPKRLSSLRAAIPCWLEDAENGLTGDFRSLLHGVWDDLLILDDRVGEMDKLIKLLAENNENCVRLQQLRGVGPMISTAMVATVGDARQYHRSRQMAAAIGITPKQHSSGDKDRLLGISKRGDVYLRTLMIHGARAVVASANNKDDRLSRWVTGIATKRHPNVAAVALANKTARMAWAMLRHKTDYDPDFAIS

SEQ ID NO: 396559 - protein, 414 aa, unidentified
MPIATCGIDWAQDHHDIAIVDTDGQLLAKRRIPESIAGFTELTAMLAEAGDNPNDPIPVAIETPRGLLVAVLRASGRPVYPINPMSVARYRERTSMSGKKSDHGDAVTLANILRTDADQHRRLPADTELAQSITVLARAHQDATWRRTRASNELRSLLREYFPGFLHTFADRPGAISSPEARAVLAIAPTPAKAARLTKPQIVATLRRAGRRRGLTSLADTIQQRLRTPQLRHPTLVEDAFGVQALAVLATLDAEYDNVDRLGEATAAAFNEHPDHQIITSFVGLADLTGARLLAEIGDDRTRFADARALKAFAGSAPVTKASGRSIRITHRHVKNNRLAAVGFVWAFVASGCQGPTRAHYLARRDHGDRHAAALRHLYNRMLGQLYHCLQTSQTYDPIKAYGPPPTPPAQAAA

SEQ ID NO: 396560 - protein, 360 aa, unidentified
MSSMPHPQPSDAEEVILGVDTHKDVHVAAVLTALGVLLATSSFPTTAKGYRQLLAWARGFGALHRAGVECTGSYGAALSRHLSSEAVTVIEINRADRGDRRRRGKTDAIDAETAARAVLSGRATAIAKSGDGPVEMVRMFKLVKASAIKSRGQAINQLKAVLVGTDPALRDSMTGLSNPALFRRCAELNHSNPTDTPSAAAFTLRLLARRILELSSEIDELNAQIATTIEARAPQLLQRYGVGPDTAAALLLAAGDNPERLHSEASFAALCGVSPIEASSGKMHRRRLNRGGDRQANSALYTITIARLRWDKRTQDYVQRRVAEGKTRREAIRCLKRYIAREVYHDITSTRAAPTARSAA

SEQ ID NO: 396561 - protein, 312 aa, unidentified
MSMEEIRFSQVVSNGCGIDVHKESVVATIEGVGILKTTNQFGTFTSSLTELRDWLLENGITHVAMESTGVYWKPVYNVLEPTGMKVWIVNARHIKNVPGHKTDKKDSAWICKLLLAGLLKPSYIPPKEQRELRDLTRFRQKLIEHIASNKNRTIRILEDCNVKLSSVLNDTSGVVGTKLINKIIDKQAVAIDDIDEVYHRNLKATKGELFEACSGIITEHHSYMLKIIREEILSTEQRVNELSSRIRDILAPYDNVLELLRGVPGIGTKSAEDLVAEIGLDMSVFPNENHLASWAGVAPGNNESAGKKKVVE

SEQ ID NO: 396562 - protein, 336 aa, unidentified
MPSRFFRVFQVHGIDATGSVIIRRQLKRRHVLAFFEKLPPCLIGIEACATSHHWSRELRASGHTVRLMPPAYVKPYVKRQKNDAADAEAICEAVTRANMRFVGTKTPEQQGCLMLHRTRHLFIRQQTAVINAIRAHLGEFGVVAPVGRRGVEELLDVVADSGDERVPEVARACVGALGVQLRMLKAQILAFDRQIMAWHRSNETSKRLDEIPGVGPALATALVASVADPGAFRSGRNFSAWVGLVPRQHSSGGKDRLGSISKQGDRYLRSLFTAGALAVIRYAKIHGTKHRPWLTALLARRPTKVAAIALANKIARMAWAMMARGERYKEPAALAA

SEQ ID NO: 396563 - protein, 395 aa, unidentified
MFIVGIDIAKRSHVARIIDSEGRIAAKPFSFRNSCSGYNALLARMHKITNRKSEFILAMEATSHYWLALYTRLCREGYLVVLLNPIQTHAVRELLNNGDAKTDEIDTMAIAETIRFGRYKPSRVPQDKLLALRELCRNRYYLVDMASDLKRKITALLDQVFPEFETQFSTIFGKAALAVLKQYPTAEKMGRAQLGKLTQLLQTASNGRFGEWKARQLRETAKGSFGIPDCEGVYSTLILLHLQQLQSLLDGAAALERQMAEIFSQFDTPLTSIPGIGPLLGAAILSEIRDISSFPSADKLLSYAGLNPRVKQSGETKFGGIHMSKRGSPYLRRAIWMACTNAVQCDPMFRAYYEKKAAEGMKYMCIIGHVTRKMTAVIFAVLRDNKAYQPILPAA

SEQ ID NO: 396564 - protein, 373 aa, unidentified
MQENSKIFVGLDTSKMKISVALAEEGRRGEVRFLGDIDNTSDAIRRLIRKLTGKFCELLFCYEAGPTGYGLHRQITALGHACSVIAPSLIPKRPGEHVKTNRRDALTLARLHRAGELTTIWVPDPGHEAIRDLVRAREAAMEDLRKKRQQLQSFLLRHGRIYPGLRSWTLVHARWLSNLTFEHPAQYLVLREYRQAIEDAEARLERLTQQVADVVSTWSMAPVVEAYQAMRGVAFLTAVTFVAEIGDVRRFETPRQLMAYLGLVPSERSTGDQVRRGSITKAGNPRARRVLIEGAWTYRYPARLSRALQVRQERLPKTVRAIAWKAQMRLCARYRRLMAAGKRQTLVTTAIAREMAAFLWAIGHEVEPRSAAA

SEQ ID NO: 396565 - protein, 413 aa, unidentified
MEVLHPRCAGIDISKKDAKVCVRIQGRGNRATTTTVRTWGSMTNQILALREHLLAEKVTCVVMEATSDYWKPFFYLMEDVLPVMLVNAHHAKNMPGRKSDVSDSAWLADLGAHGLLRGSLVPPPPIRQLRDLTRARTVLSHDRGREVQRIEKVLEDSGIKLSSVVSDIMGTSGRAMLKALIDGHDEPSAIAELAQRRMRSKIPVLTEALTGRFTSHHAFLISMHLGLIDQYSQALAELDARIGEAMEPLAAARELLVSIPGISTTVAEVLLAETGGDMSVFPTAGHIASWAGVAPGSNESAGRVKSTKTRPGNRYLKGALGTAALAAIRSKDTYYYAKYRRIAARRGPMRALVAVQHSMLTAAWHMLTNGDLYQDPGADYFSAKHPAKTKARAINQLEALGYRVSLQPMTSTA

SEQ ID NO: 396566 - protein, 329 aa, unidentified
MKQLVIAGVDVSKSTLDIFVKPLDQAVKISNDVQGFKKWLKELKPFCSQDVSLMIVMEHTGKYSYCFESFLRSRSISYCKINALQIKRSLGMIRGKNDKIDAQRIAEYGWLRREILVADKPIAQEIKKLQELLSLRQKMVRDRSGYTCRLKEMIAAKICKASDKIAKSQQYLIGVLTAEIKMIEKEIKSLIASNSALQKTCELLMSIKGIGLTIAAYMIGCTDNFKRFAKARKFNCYAGLAPFKHESGTSLKGRARVSHFANKEAKVLLNLGASCAIQFDQELKAYYQKRVAEGKRKMSCLNIIRAKLVARMFAVVKRQTPYRPIFAAA

SEQ ID NO: 396567 - protein, 353 aa, unidentified
MLIIGCDLHTRYQVIAMLNSETGELVTRRLQHENGEAGAFYASLPAPAQVGIEATGYTQWFERLMAELNYELWVGDAAQIRARAVRRQKTDSRDAEHLLELLSTQRFPRLWIPSPEQRDLRQLLKHRHKLVTMVTTLKNQLHFLAMSQGLCRKSKLWSERGREELESLSLGPWARRRRQELLALLDQLQPQIAELDVAVAQAAAADPAAVDLMTQKGVGPVTALAFVLTLGPVERFQNSRQVVSYLGLNPREHSSGGRQRLGGISKQGNTMMRWLLVEAAQAAARFDPELRRKYQRLKFRRGGSVAKVALARRLAVRSYWRLRQRQAETEAQPVRMPGSSGSGVVLPPAGSRH

SEQ ID NO: 396568 - protein, 366 aa, unidentified
MSGHRTSVGLDVHARSVVAAALDGATGQVWQARFGGPHEVDPLLAWLGELPGPVATVYESGPTGFGLYRALTAAGVTASVAASSKLLRAPGDRVKTDRRDALLLARMLHLGEVTQVVVPSVAVEDARELVRAREDVRGVLQAGRQRLSKMLLRQGLLYPGATTWTVAHDLWLRQQWREFQRSGGPGLAAAFEDAYTGMMQAKQRRDALDVRIRQAALEGEFSDLVTRLCCLRGIDLITGLALVVEIGDWDRLTGARIGSYLGLVPSEYSSGASRSQGGITKTGNSHARRLLVEAAWHHKKPYRPGPALQARWAKAPGPVVARADQANRRLNGRWAAFEARKKKRTTAVVAVARELAGHAWALAVMD

SEQ ID NO: 396569 - protein, 450 aa, unidentified
MSKKSSRRPPKKLMITQTVIHPDAAGIDLASEVHYVAVPADRDPQPVRNFGATTDQLIVLADWLQQCGIRTVAMEATGVYWIPVFELLEARGLEVCLVNAQHVRHVPGRKSDVQDCQWLQFLHSVGLLHASFRPALEVCAVRTLLRHRDSLVQVASAHLLRLQKALDQMNVQLHRAVTDISGTTGLAILDAIVAGERDPQKLAAHRDHRCKKSVVEIAAALKGDWKVEQLFTLRQSLAAWRFHHQLADECLLEIHRLAAKLESRTEAVPPPPTKRGKQPDAAVRTLLFQKFGVDVTAVDGVNTHVGYTFLTEVGPDLSRFASPEDFSSWLGLCPNNKVSGNYKLSVSTRPVSSRLASTLRMAAPSLHRVESVLGDLFRRMRAKLGPAGAVTALAHKLARILYTMNKTRTAFDPSKFGHSVLTHQRKERSLRKQAALLGFSLQPANAGAVS

SEQ ID NO: 396570 - protein, 387 aa, unidentified
MYYIGIDISKFKHDCAVIDDSGEIVTPSWSFTNDAEGFSQLKLLLNSLDTETRIGLESTGHYGMNLKLFLESNNFSFMEFNPLLINRFVKSKSLRKTKSDSIDCMMIAHYLMTVEYKPYPSSFYHTEKLKSLTRFRDSLIRFRSRQLVELTNILDKVFPEFKPFFGSRFSVTALYILSNYSSPEKIANMNSKSYEALRKLSRGRFSTVDFAKLKQLAKNTIGTTEDYLLLQMQIVLDIYRQLDSKVDETEVSIKECVSDMNPPMLSVPGIGIESAAVILAEFGDFSKFKNASKMLSFAGLEPGYFQSGTSETTGKMVKHGSSYLRYALMNCAQTVVNYEPTFAMFYSKKRAEGKPHRVALSHVVKKLLRVIYTLQTKNIAYDADLVR

SEQ ID NO: 396571 - protein, 341 aa, unidentified
MTTALPRHYVGIDLHRWRSVVATMNEEGEQLGCERIDNSPLELVRAVTAYGGEIEVALESAYGYYWAADVLAAEGLKVHLVHPLGLHWESRRVKNDERDAAELANRLRRGDLPESWIAPPEVRELRELSRYRLKLTAYRTSAKAQIHAVMAKEGILPELSDMFTPADQRLIDKMPLDGAYAIRVESLRDLLELVDREITMVEKELARRLKDDKGYQAIQALHGVGPILGAIFVAEIGDVTRFASARHLCSWAGLTPVHHESDTTVHRGHITKQGSTYVRWAAVEAVARYHGGSPIAPTYERIVKRRGAMIARVAAARKLLSLVYYGLRDGEIRCLADKEAG

SEQ ID NO: 396572 - protein, 370 aa, unidentified
MAQGSTLFIGLDVHKETIAVAYVAEEREAEVLSLGTIGTRQCDIDKVIRKLQAKGKPLHFVYEAGPCGYWLYRYLTKKNLKCWVVAPSQIPKKAGDRVKTDRRDAMQLARLLRSGDLTPIYVPVVEDEAIRDLVRAREDVLRDSKAAKVRLKAFLLRQDIRYEGRANWGPAHLRWLAKVVCPTPAQQIVFQEYVRAVSEHTERLQRLEAELQTQVQTWRWAPVVEAIQALRGVQVTAAVTLIAELGDLTRFENPKQLMSYLGLIPSEHTTGERRRQGSITKTGNSHARRALIEGAWAYRYPAKVSRHLQLRLEKVPKVIQDISWKAQVRLCKRYRRLVARGKQVNQVVVAIAREMAAFVWAIAREVKVTH

SEQ ID NO: 396573 - protein, 342 aa, unidentified
MTFVGCDLHTRMQQVAVLDTRTGEVSERQLAHDGSAIEEFYAALLGPVTIGIESTGYAVWFHTLMQRLGHTVLVGDAAKIRAMVVRKTKTDRRDALHLLDLLRHDRFPTVWVPDPATRDLRALLTHRMRLVRIRTMVKNGLHAIALNYRLARGSKLLRQAGLAQLHALTLPPHTAQRRDQSLELLAGLTTQIRELDDAITIAALAHPDGPRLITHPGVGALTALATIVVLGPVARFHDSKHVVSYVGLAPALNASADKYHLGHITKQGSTLLRFALGQAAAHAARMDGDLKRTYFTLVHRRGRPKAKVAIARKLLVRLFIMLRDQIDYDEFRRRGRTAPASA

SEQ ID NO: 396574 - protein, 344 aa, unidentified
MEERATAYQLYVGIDIAADTFTAAWRTRAGKPTGPFTAEQTPAGFAALQRRLAASGAAPTDALVVMEATGNSWVALAVTLHEVGYRVAVVNPRQAHHCAKAQLRRAKTDALDARDLAQLAAALQPAPWTPPPAVYHEVRQRLVARDGLLVMRTQARNQRHALLPWPVVVAAVRQHRDELIADLDRRVAALEGEIGAVLKDGTWAESLACLTSAPGIGLVTAAWLLVGTLNFALCAGPDSLTAYVGLAPVPRESGRTIRGRRAIGHDGNGRLRTALYMATLSAARYNPAIKAFYQRLRAAGKPEKVARCAAARKLLHQVWALGSKLQRFDPDQQQQHEALPQLAA

SEQ ID NO: 396575 - protein, 338 aa, unidentified
MKLYGGIDLHSNNSVLSLLDENDRLIYEQRLANELDIILVELAPYREALVGLVVESTYNWYWLVDGLMEAGYTMHLSNPAASKAYEGLKHTDDRHDARWLAHMLRLGILKQGYIYPKTERAVRDLLRQRAQLVRLQTSQILSIENLLSRNTGRRLNSHRIKRLSPEELGELLAPPEPALAAQSNLVVLKTVMAQIKILEEEVKARVKPRSELRWLKTVAGVGEILGWTIVLESGDIRRFSQVGRYASYCRCVESKCTSNGKKKGENNRKNGNQYLAWAFVEAANFAVRYHDRVKRYYQRKRSRTNGIVAIKACAHKLARASYYVQRDQVAFDMTKAFG

SEQ ID NO: 396576 - protein, 489 aa, unidentified
MAKTKRKRSTFERLSRGGLNRKQRRDLGRRLAGNDPGLAIIHSNAGGIDVGNESHFVAVPPDRDANPVQEFGCWTADLKRMAEWLKACRIDTVAMQATGVYSIPLYDILTGHGIQVVLVNAQHTKNVPGRKSDVQECQWLMKLHTYGLLRDSFRLEERMESVRTIWRLRDRHVKDASRAVQHMQKALTKMNIQLANVISDITGVSGQAIIAAILQGERDPWKLADLKHEMVRASREEMARSLEGNWRDDLLFELRQAVNSYHFAHQQMRECDRQLESFLASLPTRILERPLQPDDTPAATTKKAKKTRKPKKARRNEPTVDLTTELKRICGVDLTSIDGIDVITAQTILSEIGTDMSGFKTEDHFASWLGLTPAKDITGGKIIGPGRRKVQNRVAVALRMAATTLLNSKTYLGARYRHLRQRLPSYAAAIKAMARYLAVLVYRVLTHGEAWVDRGAVKFEQRRTELELRSLTSKALAKGFKLVPITVTS

SEQ ID NO: 396577 - protein, 337 aa, unidentified
MTIIRIGLDTAKHVFQVHGVDENEQPVLRRRLGRREVEKFFATLPATRIGLEACGASHHWARVLRGLGHAVVLLPPQYIKPYVKRGKNDAIDAAAICEAMSRPGMRFVTIKSAERQAGLMLLKTRDLLVKQRTMVINAMRGHAAEFGLVAAKGPVKVAELLQQAQAEAAGVPGLAVEMLDVLAGQLDALDVKIKGLEAQLVAWHKQDPVSQCLATQPGIGPIGAVSFTLKLTDPTGFRSSRHFAAWLGLTPKEHATGGRRRPGRISRQGDQTLRKLLVLGATARIRFAKAGRASPWLLSLLARKPKKLAAVALANKMARILWAMMVSGEIYRHPKEA

SEQ ID NO: 396578 - protein, 313 aa, unidentified
MYYIGIDVAKKALSVYDGKTSLEFENKEGLRPFYCYLKKHFKKFDNLVLIFEATGIYSTNLRELCSLHKIKAYILNPKQSHNFAKSLGVRSKTDKIDARVIWRYQSLIPHERVQIPVIDQEVKMLVSYLTSYQFIQGQRTAVSNHLESVTDNTLRKLLEKELLRKRQLEEKLLLDMKTYISKHPGLAKDYQRLMTICGIGERLAFSLLALFRHFQGTNRAQITALVGLDPIYKESGTSVKGEIKISKNGNRHIRKMLYLPTLCAIKNNQRIALFYQRLINNHKPKKVAIIAAMRKLLLVAHAIYENKTEYIPG

SEQ ID NO: 396579 - protein, 346 aa, unidentified
MGKLLRQVAGIDIARKDFVVSLGRMDDGLSEQVYATRKFMNTNDGFIKLREWVKEKSSAELEVLYVMEATGVYHEKLAYFLNEQGCAVSIVLANKISNFFRTLSVKTQTDNTMSETIALFGLSRTLDRWNRPQKVFKDMRQLTRERDQLVQIRTIAKNQLHAEQSEAYPNPGTLERSLKQIEFLNEQEQQILAEINALVRQDEQVKALITLICSIPGIGKLTAAIILAETNGFELIVNKRQLASYAGFDVTHKQSGTSINGKPRISKKGNRHLRKALHLPALSAIKHDERFKAIFTRLVGKHGIKMKAAVAVQRKLLEMTYTIYKSNIPYDTAHFKKLESSNEATP

SEQ ID NO: 396580 - protein, 311 aa, unidentified
MKEPERFVGIDISKQELVVAVRPTAELQSFTNTEEGLAALIRFLQPLSAHAIVLEATGGFARAAVNAMALAALPVVVVNPRQIRDFARSVGLLAKTDAIDAQIIARFAEAVRPEFRPLKDQETQKLEALNNRRRQIVEMLTAEKNRLGASPEWCHKDIRSHITWLEKRLKRANDDIDDLIKQSPVWRQKEKILTSVLGVGPVVTTTLLCGLPELGSLSARKLSALVGVAPFNRDSGQYRGRRSCWGGRAHVRAALYMAALTASRCNPVIRAFYQRLRLAGKPAKVALVACMRKILVILNAMIKNNTCWQQA

SEQ ID NO: 396581 - protein, 337 aa, unidentified
MTIIRIGLDTSKHVFQVHGVEESEQPVLRRQVRRSEMSKFFAKLPATRIGLEACGTSHHWARVLGGLGHEVVLMPPQYIKPYVKRGKNDAIDAAAICEAMSRPGMRFVAVKSAENQAALMVLRVRDLLVKHRTALINAIRGHAAEFGVSAAKGPVKVAELLQHAHAEAAKVPTPALEMLSLLAGQLDAIETRLKTLEAQLLSVHKANPTSQCLATIPGVGPIGAVSFALRVPDPKAFRSGRHFAAWLGLTPRENSTAGRHRPGRISRQGDSRLRKLLVLGATAVIRFAKPGRASPWLLNLLARRPKKLAAIALANKMARILWAMMVSGETYRRPHQA

SEQ ID NO: 396582 - protein, 401 aa, unidentified
MESPIVSIDVSNGNSHYMCFIKNNKRFGKVKKIDHDIEGFKRLLEDIQKLEAETNEKVCAVFEATGVYTKPLERFLSKNSIKTYIINPLESARKRKEEIHNKKTDKLDPISISKVYYDKEEMMELKKKDETYNWLRKKNRLYEDQLNHLRKYKVTFQNQLSICFPGYLDLFKDGYSDIPMTILKKYPHPDLLKNKKAETVARYLEKNTCHTHKVSLEYALKIIEFAKKTYLGCEKDDVEVEIFKILLDKVIETQRECEKTLNEMITVASTLEEYRYISSIDGIGPNLAARIIAEIGDIEEFKSREALVAYAGLDPHIYQSGDQDGKHLKISKKGNKYLRCLLFLAVGCSIRGAKDNPVNRFYQKKKQQSNPLNSKAAKTACTAKLLKIIYGICKNKTTYER

SEQ ID NO: 396583 - protein, 424 aa, unidentified
MQNTAARKRKQVPEGYLVIGVDPHKKRHAAVAITQDFTTQAKFKFDNTREGLEMMLDRARVEMVKSGCRGVIFAIETGGHYWRNIAYYLDERGIPFRFINQYTLKRRREGKDLNRRKNDYRDSEVAAQLLCTGEFVESVIPQGVYAELRTSHNAYQRLVKERTRITNLVKGLLDALFPEFTQVFKDPGGLTALSVLSTCPIPRVIAGMTEDEFVATIEARHRGRRLMRKKLKALHYSAKTSIGINAGARSLSYEIAFLVDKFELIRQQIRIMEGTLVRLVDETEEGKYLLSIRGLNYIAVAGLLAELGCFKAYRSAKQMIKMAGSNPTESESAGKKRLRTPMSKQGRPLLRYCAWTSVIPMLRFNTDFRAWAKQRRERPAHANPLSGREVVGAALNRLLRLAFALVKNQSYYHDIKPALTPVAV

SEQ ID NO: 396584 - protein, 345 aa, unidentified
MHIKSIGIDLGKTTFHLVALGNRSQVVVRKEFSRQQLLLYTANLPSSLIGMEAGVGSHFLGRALREQGHEVRLMPAQFVRPYVKSNKNDYQDAEAIAEAVERENMRFVPIKTEDQLDLQALHRVRERLVSRRTSVINQIRAFLLERGISFAKGPASLRRQRPEILENADEKLTARMRRLLDFLWQEWKHLQLQIESLSEDLEKIANSDAACVRLQKIPGVGPLVATAVVSAIGNGAAFHKGRQFAAWLGLVPRQWSTGGKAKLLGISKRGNPYLRKMFIHGARAAVLRVKREGSCLGQWMSGLETRAARNVVIVATANKLARISWAVLSSGNDYRPMHTAVSCSS

SEQ ID NO: 396585 - protein, 368 aa, unidentified
MGRKSSKLFVGMDVHKESIDITLTEEGGEVRHYGGIGGEQSALLRTVRKLESLGKSLVFVYEAGPCGFWIYRLLQERGHPCWVVAPSNTPRRVRDRIKTDRRDSLKLAGLARAGELTPIYVPDAADEAMRDLVRAREDAVTTQRQARHRLAALLLRNDIRYGGKTAWTEAHRRWIARLHLPGAAQRIAFEEYVLTVDEATASVQRLTRSMEQELGHWRWQPVVHALQACRGIQLIHAVRIVAEVGDLSRFTHPRQLMAYLGLIPSEDSSGERRHQGPITKAGNRSARRALVEAAWAYRHHAAVSPLIVRRQTGLAKPVLDIAWKAQLRLCARFHRLSARGINRNKIVVAVARELAGFVWAIGQRVKLN

SEQ ID NO: 396586 - protein, 342 aa, unidentified
MDEYDGKQYVGIDLHRRRSVIVQMTSEGERIGRPVRIDSDPFELAAQVASWGEAPEVVLEATYGWYWAADVLVEAGATVHLAHPLGVKGFAYRRVKNDERDASDLADLLRMGRLPEAWIAPPAVRALREQVRHRCKLVALRSGLKAQVHAVLARQGVTPSMTDVFGVGGRKLLDELRLDAPYQARVLSLLRLVDAFTFEIDAVGKRVTAELNHYPGYKAIQAIPGVGPVLAAVFVAEIGDVTRFARPEQLCSWAGMTPKHRESDTKVHRGRITKQGNKLVRWAAVEAVQRLHAGPLASRKARLTVKRGTNIAKVATVRKLLTLVFYGLRDGHIRALAHQSAA

SEQ ID NO: 396587 - protein, 383 aa, unidentified
MKKNSSRSVEMKATVERKGRMNNAPGRTVSHRPDYQAVVGLDVGDRQTHYCVLDLDGGLTAEGALVTREASLRMQFEGKARMRIALEAGAHSPWISRLLVDWGHEVIVANPRNVRIISTSNSKNDPADARLLARLAHVGPELLSPVHQRSEKTQVDLALIRARDVAVQSRTKIVNAVRGIVKSTGLRLPKSSTLTFARKAKDACPEALKPALLPLLRVIEELTREIELYEKVVVKKAETEYPETNAIRTIHGVGPLTALAFVLVLNNDRSRFRRSRDVGCFIGLRPKQRESGQRAPQLGITKAGDPLLRRLATQCAQYVLGPFGKDSALRRWGISLASRGGKNAKKRAVIAVARKLVILMHRIWITQEIYEPLRGVAEKSTAA

SEQ ID NO: 396588 - protein, 313 aa, unidentified
MDMNESVVVGIDVSKDRLDVALLPSGEHFAVSNDQAGIEELITRLGASRPTIVGLEATGGYEMLAVGSLSAAGFGVVVVNPAQVRAFANALGRRAKTDPIDAAVIAAFLLATKPAIRPLRDAETQALSELIARRRQIVQMVVAEENRLRMALAKQAQKSIKRLLTALRRELENLDADLDSHIRKSPVWRVRETLLTSVPGVGPTTARTLLAELPELGSLDRRQIASLAGLAPWTRQSGKWKGKSFIGGGRGKVRAVLFMAALVASRYNPELKAFRDRLVAAGKPKIVATVATMRKLLTILNAIIRDGRPWQNA

SEQ ID NO: 396589 - protein, 334 aa, unidentified
MEQVTTVGIDLAKRVFALHGVDGAGSVVLRRTVKRDELVELVAGLSPCLIGMEAGSGAHEWARRFQAFGHTVRLMAAKFVTPYRRNGKNDGNDAEAICEAVGRPGMRFVPIKSAEQQAVLAVHRVRQGFVEERTSTINRIRGLLAEFGVVLPLRSESIRRHAREAAETLPDIARRPIQDLCAHLRELDARVLAYDREIERLARQSEAARRLMKIRGVGPLSALAIVATVGAARDFRSGRQFAAWLGLTPRQHSSGGKSRLGHITKRGDAYLRTLLVLGARSVLNTAMRHKDRISRWVLALQTRRGYHRALIAIANKNARIAWALLSRNQELRTA

SEQ ID NO: 396590 - protein, 310 aa, unidentified
MGACIGVDVSKHHLDWNSGGSGNVTRVPNTPAGLGRLVAKLRGLEATLIVVESTGGYERALTETLSEAGLPVVLVNPWRVRRFGEGLGVLAKTDPIDARILAIYGERARPVRRPLPAPRQRQMADWVRRRRQLIAMIVAEKNRLDTASGGIRRDIQALVKLLERRVGKIDERIDTTIAADPEKAENYERLQSAPSVGPGVARALIVDLPELGALGRKQISSLVGLAPFAKDSGRKSGNRRIRAGRKGPRTALYLAAMNGARFNPVLKEMYDRLIAAGKPPKVAFIALARKLLTILNAMVRDGTTWQQAAR

SEQ ID NO: 396591 - protein, 418 aa, unidentified
MKVVYPICCGVDVHKTFLVATIITSQGITPHYSKKRFSTFNNSIRQFKQWLIDNNCFDVCMESTGKYWVPVYNLLEDTIRITVANPKWVKAVKGNKDDVKDSKWIGDLFRLGLVPGSYIPPKLIRILREYTRYRSKLVSCKISEKNRFQNALTVCNVALDAVVSDMFGKSASSITDYLLSSEFFDPEHCLSLLQKSLKKKADIVVESIKGYQMTMEQKERMLMIRSHLEYVQQSITKLDEKLDKMLLPYKSAITLLCTIPGVDKASATIIISEIGTDMSQFANSKRLCCWAGLTPGNNESAGKKKSVKISRAGVYLKPALVQVAHASVKSNISPYYKSKYECICKRRGKKRAIIAIARMILTAIYHMFVTGEMWNPSDLYKIDMPQEILEKQKEKAIKQAVKLLISNGLIKATDISVA

SEQ ID NO: 396592 - protein, 349 aa, unidentified
MPMLAETLDAVIGVDTHTDTHTACLIDQVGREIAVTTVEATPEGYTEMLDWAAQLAPGPRLLWAVEGCRSHGTGLLRVLVAAGQHVVEAPRPKRASRRPGGKSDPADARQAAAAGLAAKRHAQPRQDGDREALRILLVARDHANTTRTAAVNLFKSLLLTAPDRLREPLRRLTTPRQTAACARWRINPRDSMEDRVRRQTLHGLAQRIRLLDKEIRVNEQQLRDLVRVVVPALLDEPGVGPVSAAHLIVAWSHPGRCRSDAAFAALAGVSPVEASSGRITRHRLNPFGDRALNRALHTIVNWRMVHGHEPTQRYLTRRRGQQKSDNEIRRCLKRYSARHLFRLMEAASG

SEQ ID NO: 396593 - protein, 303 aa, unidentified
MSFQSLKSMQKSSSRPAAFKPSYQRVCGIDISKQSLDVHLRTPETETQLKVDYDPQGIQKIIALCLQQQVQIVAVEATGGLQRTLVVALDKAGIALAVINPARIRHFANAEGQLAKTDPLDAQIISLFALRMSPPPMKVRDDQQEKIARLATRRDQLISAKVAEDNRFQQESDPDILNSIEKHLRWLKKEIGQIDRKLDKLVQASKPLEEKVKIADAMVGIGRVSAVALVVSLPELGRLNRRKIAALAGLAPYNDDSGTVQGKRCIHGGRASVRQALYMPTLTATRYEGKIREMYLRLVSRGK

SEQ ID NO: 396594 - protein, 460 aa, unidentified
MTPDRPDLEVLMSQPILAVGVDPAKRVHRAVAVLFPDEVICDVELPNGLDAIRDLDTRLADLAITHSAELVYGLEDHRRYGRLFCQVLSERGRDVRVVNPLWTNRQRAFYGQDKDDAIDGRSIAAVVLRRREQLPLASDFGDVAQAVREAERTIQDLGEARTQLLNRLHQQLSDTYTSTYEEYFGKLKSPLAVRFFRRFPLPHDLSGHDTTMLAAALLDLAGGRIGPHKSGKRFAVLKAKAQMILDTTAALRSTRRTLALELKAELIRQSCDALLANHEHATRLERMMRDQLLPASQQTITSIPGIGTILAAAIIGETGSISRFRSPAAFAVYNGTAPARNSTGGRDRHKARRDCNHRLKRAFWLAARAAVLHDVLAKEYFIRCKGRGHSYSECVKRVARRMSDMVYALLKSGKSYNRTIVEQAIEQRREQVTHTDSSRANKALPTPSKNKLGGRARNRK

SEQ ID NO: 396595 - protein, 376 aa, unidentified
MNKTEIYIGLDVHKETITAAVAEGGRTGEVRQAGTITNDLHALEKLLRRIRGEGERTLHVCYEAGPCGFVIARRLKQLGICCTVVAPSLIPVKAGDRIKTDKRDAEKLARLLRAGDLSPVYVPDSTDEAIRDLCRARTDAVDDRTRARHRLKAFLLRHGFRYTAKTTWTPAHMRYLRELVLPHPAMKVILEDYLCAIDVANERVNRCEEAMGELLVSWQLRPAVEALMGFKGFKIVAAMITVSELGDIHRFAHPRQLMAYLGLVPTEATSSDKRRQGGITKCGNPHARWLLVECSQHYDTPPKVSKELSMRQAKLDRRSKEVSWRAQNRLHARFNRLRGRRLQRNKAMTAVARELTGFIWELLRELPCYNRVANAQ

SEQ ID NO: 396596 - protein, 412 aa, unidentified
MSKIEITAVGIDVSKGKSTVAVRRPGGEIVMMPFTVLHTAEGLAELTNTLRSIGGEIRVVMEHTGMYWRPIALALKEGGFFVSVVNAMLIHDFSDNSIRKVKTDRADSLKIANYALTFWQDLRDYSVEDETRKMLKIQSRLYERTLNSSIALRNGLISLLDQTFPGANKLFDEQRTKAGHIKWVDFVRRFWHKDCVAASSLSTFADTFQKWCKRTGYHYSLSDAERIHGIARNSVATLTKNDSTKLIITQAVDSLNAVYDTLQILRSEMQHLASMLPEYEVVMAMQGAGPITGPQLMAEIGDVRRFTSKGALVAFAGVDAPPFQSGTFDSKSRHVSKRGSPHLRRVLFTICSVILQHSDPENAVFQFMDRKRAEGKHFYVYTVAGGAKFLRIYYAKVKEYLNTIDSQTGCVA

SEQ ID NO: 396597 - protein, 373 aa, unidentified
MNKFSKYVGLDTHADTIAVSIAEACGGKPRYYGEISNRPGAVAKLAKKLSEDGEVLSFCYEAGPCGYGLYRQLTELGHACDVVAPSLIPTKPGDRVKTDRRDADQLSRLQRAGELTSVWVPGPEQESIRDLTRAREDLVSMERRAKQRLGAFLLRQGKVYEAGAKKWTKRYFRWLEEVKFDFPVQQIVFQEYVDTVTHLEGRVAALEVEMERVLPSWSLAPVVEALMALRGIQLVSAMTLMAELGDITRFDSPRQLMGYLGLVPSEDSSGRRRRRGGITKTGNGHARRTIVESAWSYRFPARKTAHLQRRAKKTSESVQAIAWEAQKRLCGRYRHLMERGKLKVQVIVAVARELAGFIWAIACEVMGRPVTVR

SEQ ID NO: 396598 - protein, 340 aa, unidentified
MGEVTMIGLDLAKHVFQVHGVDASGALVLRKQLRRGQVVAFFAALPRCLVGLEACATAHYWARELQAVGHEVRLMPAQYVKAYVKRNKNDAADAQAICEAVGRPSMRFVVIKTAEQQAALLLHRGRERLVRQRTSLANALRAHLAEFGVIAPHGLWNVARLIAIVRDASDTRLPDLARQVLEVLATQLEQLAAAVAAIEQQLTAWHRNNPTSQRLASIPGIGPIIATALAATVVEPIGFASGREFAAWLGLVPRQHSTGGKARLGGISKRGNRYLRRLLINGASANLLRSKATNADPWVIGLRRRRPSLVVAVALANKTARVAWAVMRREESYRHRSVAA

SEQ ID NO: 396599 - protein, 340 aa, unidentified
MEISTIGLDIAKSVFQVHGVDSDGEVTVTRRLRRGEMLRFFARLAPCVVGIEACATAHYWARELRVLGHDVRLIPPAYVKAYVRRGKSDAIDAAAICEAVQRPGMRTVPVKGVSEQAILCLHRVRSQLVAQRTRFINLLRAQMAEFGFTAPVGPEKLGALTDILTDEADSRLPSPARLALREVAQSITELNARLAEINKAIQIEHKADPASQRLATQPGVGPIIASAFRASVADPTHFRSGRHFAASLGLTPRQHSTGGKERLGRISKMGDRYLRMLLVMGATSVLHQARHYRRPEHAWILRLLQRRPPRVVITAIANKMARVMWALMVTGEQYRIPACA

SEQ ID NO: 396600 - protein, 375 aa, unidentified
MHMGLKGGAMNTIYIGVDFHARQQTICYLTTDNGELRLHELKHQNKQEVRAFYSQFEGHVIVGLEASGYSPWFERLLEELGCEVWLGHATEIRRRARWRQKNDRRDAELILDLMLHDEFPRLYLPPLQSREVLRMLRYRQKLVKIRTMGKNSLQALALQSGLAKGSHLFSKAGLQELRTAAMSPAMQWQREQWLQLLEPLNQRLLETMFWLKQQSQDDQRIIRLRTHPGIGLLTSLCLVHSLEPVTRFRNQRKVVAYAGLEPLERSSAERIRFLGISKAGSRILRYLLVEAAQVAVRKDEELKRFYQRLAARRGRAKAMTAAARKLLIRAYIMLRDEIDYAEFRRRAVAARLARKSQRPEVPEFVIGQPASAEPE

SEQ ID NO: 396601 - protein, 317 aa, unidentified
MDKLPATERFVGIDVSKHRVDVHVRPDAMVFACTTDQGGLVELVKRLMPLQPHVIAMEASGGYEGAVAAALAEAGLPVAIVNPRQVRKFAGAIGRLAKTDAIDAGVIAHFADAIRPTPKPMPDDLMLRLRELLARRRQLVIMINAEKQRLGKAADKLTQRSFKTILRSLEAERTRIDRAIDTLIEGSPLFHAKQDLLKSVPGIGDVVARTLIVELPELGSVDRHQIAALAGVAPMNRDSGRYRGKRRIQGGRVLVRAPLYMACLVAIRHNPPLRSFYRRLRDAGKPARLAIVAVMRKLLTTLNAIVRDNKAWAHAQT

SEQ ID NO: 396602 - protein, 394 aa, unidentified
MVFTLNNLSMQTIIKQCVGIDISKASFTACVCRKSLSGEALLSSVESFENSKPGYNQFVKWSRKITNPSVEGLFLMEATGIYYEGIAYHLHKLGQSVSVILPNKVKHYAKSLNIKTKTDIVDARVIAQMGAERNLPNWQPPIAILKQLRGLTRLYTDLKHERTVYLNRLESENASVAALPFVINSNRSILKELEKQIRQCEKEIKKIIYAEEWLAEKVNKLLTIKGVGLITLAIIIAETQGFSLIKSRKQLASYAGYDIVQRESGTSVKGKTRISKKGNSRIRASLYFPALVASRHNTELKDDYQRINTGKASKMVGVTALQRKILLLIYTLWKNNETFNETKNRTSGNQEAKFLLRHRDEVPKKVGNPRELPTQDELPYNQSTEVLLRQLQST

SEQ ID NO: 396603 - protein, 350 aa, unidentified
MEPYDFGKGSIDYRDFRQSIGIDVSKEEFHARMCMFQIGLDYGDFSEDKVFSNTKTGFNQLVRWARKEFVKGQEYRFIMEATGSYHELLACHLHACGFTVLIIPPLKAHHFAQYYGFSVKTDRVDAYVLSILGCVERRIKPWQPADPLFARLRSLTRTRHELGVERVSLSNRIEAVRHMNNPAREAVKALEQSRDYIGRRIKLLERMIEETIKSDAALWKKCQHMMSIPGVGLISCATVMAETNGFEFVVSAKQLVRFAGLDVKIHDSGKTKGQSRISKKGNKYIRCALYMPALCASRCNPQQNQMYERLINKRKNAIGVKVYALTAVMRKLLTVMFSLWKNDMDYDMNR

SEQ ID NO: 396604 - protein, 338 aa, unidentified
MAIVMGLDQHRAQITAEWIDTDSGEIGRARVCPAHRDDVRKFLQRFAGQRFEAALEATTGWRFVAEELRAIGAEVHLAEPAETAARRGNKKRAKTDRADARHLRELVMIGRLPESWIPPDHLLDLRARVRLRHTLVDQRGEWQQRIQAVLYHHGFPCRHGLLAGENRAWLEDLDLPETAREQVTVALGMIDALDAQSAPITRQLRLYARRQAGCKALMKHYGIGELTAVTILAELGDARRFSSSRHAVRYAGLDITVHQSDQRRAPGHLSRQGPPALRWALFEAAQAARRPGSPDRGYYDQAAERLGGNRACLALARKLLKRSFHTLRELGDNALLAA

SEQ ID NO: 396605 - protein, 420 aa, unidentified
MEITGLPTPVFCGVDWAEDHHDIALVDAGGQQLAKVRISDDAAGFAQLMALLAEHGDDEDTPIPVAIETSRGLLVACLRTTGRPVFAINPLAVARYRDRHSVARKKSDAVDAAALANILRTDMAAHRPLPADSELVQAIAVLARAQQDAVWARGQAHNKLRSQLREFYPSILDAFASHKHGLCSREARSILAAAPTPTSAAKLTRRRLRSLLRQAGRIRGIQAEAERLHEVFKRDYLHQLPQVEAALGHQTSALLRQLNTACDNADQLEEAATQAFEEHPDAPVIRSFPGLAALTGARVLAEIGDDRTRFANAGSLKAYAGSAPVTRASGKSCKVMSRKVKNQRLAAVGYVWAFVSLTRSPGARAHYDRRRAAGDRHVAAQRNLFNRFMGMLFHCLQNGHTYDEAIAFPQPSTSHTSAAA

SEQ ID NO: 396606 - protein, 434 aa, unidentified
MTLRIVAGIDFSTAWADVCLLASDGQRLVAHRRFPNSVPGFQAFKQLLLTTLATHSATGLDISGEATGTYWLPFFLALAADPQLNAHHLRLFVLNPRWVAWHKRCYPDDNKTDARDAYYIADRLRTRPPDTPWQAHLPVRSLRTYTRYRFHLVQALAREKSFFCAHLFLKANAYRRLMPFSDVFGVTSRAILQQPTPLQAFTDRPTAALATELAAISRHHLPDALASAARLQQVAAESFPLPAALDLPVHRLLSGTLAYIAFLDSQIRQVEDWIAAELDNHPPIRQLMTIPGIGQACAAGIGAEICPVQRFLDGTKFDARRGRRRTKNLRDAEDAVAKIAGLWWPRAESGNFAAADRHLAKSGNAYLRYYLIQAADQLRRHAPEYRRFYGRKYREATKHHHKRALVLTARKSVGLIVGLLHRNEAYRSKGVRPT

SEQ ID NO: 396607 - protein, 350 aa, unidentified
MDITTIGVDLAKRVFAVHGADRHGKAVLRKTLRREQMVPFFARLQPCVVAMEACGSAHYWARKLGSLGHTVKLIAPQFVKPYVKGNKHDAADAAAICEAATRPSMRFVAVKTPQTQAVLALHRARDGFIRARTAQANQLRGLLAEFGLILPQGLARLMQEVKGVLADEMNDLPTLMRTLGQRLLSHLLELDRQVQEIDNEVRQLSRQSSVCRRLEQVPGIGPITATALEATVGDTIHTFKNGRQLAAFLGLVPKQHSSGGKERLQGISKRGDGYLRRLLVHGARAVLYHTMNKPERSSSWLTQLAGRRNANVACVAQANKTARIIWAMLVHNREFRSDFCAVAGKEVRPA

SEQ ID NO: 396608 - protein, 389 aa, unidentified
MLLDHPSDGPTAIRTQFGAIFVSLELSRSNWLITSLSPGRGEKMSRHSVVAGDVAGLMTLLADLRRKAVARTDQSYPIITIQEAGLDGFWLHRVLQQEGIESHVVDPASIARPRRRRRAKTDRLDGETLLRACLASKRGEPRVCAMVVAPSPEEEDRRRLCRERRTLIEERITHVNRIKGLLFAQGISDYGPLRRDRRARLDALRSADGRELPPHLRAQIGRELDRIELLLEQIKAVEAAQDALLAAAKKPASEKAAPEPVAMLLALRGVGANFAAVLWSEAFYRSFSNRRQVAAYAGLAATPWQSGGIRHEQGVSKAGNSRLRTTMIQLAWLWIRHQPHSTLTRWFKEQSPQGRKRAIVALARKLLVALWKYVTQGVVIEGAVMKPAA

SEQ ID NO: 396609 - protein, 314 aa, unidentified
MTSQIPVIGIDVAKESLSLCDTQSGEVFELANDRRTIKAWLKTLPACCAIAIEATGIYHMEIATLAYTTGHRIYIINGFRLSNYRKGIGGRNKDDRSDAQLLARYLSHEQAHLEPWQPPSKVYSRLQTLLHRRAVLVRSATSLRQSFSQDRALTSALQPVLKRMAALEQRLEKMIQATLDEAGLKEQSKRCQAIEGIGPLTAAALNLAFLRGYFRNSDAFIAFLGLDVRLKESGRYSGRRKLTKQGDPEIRRLLHNAAMAAARTERWKAIYQGYLARGLKKTEALTILARKLARIAFALMQTKAAYQPPEATMS

SEQ ID NO: 396610 - protein, 354 aa, unidentified
MPSALPASPAPVVIAIDPHKASWTAVAVDSRLQPLATIRVEVSRGGYLKLRRFARRWSHAAWAIEGATGLGAALTARLAADGVDVVDVPAKLARRVRMLSTGHGRKTDQADALSVGIAAHTATRLSTAVVDEASAALRVLTEHRDDLVRSRTQANNRLHALLAQLIPAGLPRGLTADTAAAALRSIRPRTVLARTLRQVAVELLGEVRRLDRRIADATAALSAAVAASGTTLTELHGIGDVIAAKILARSGTVSRFRSESAFASYCGVAPIEVSSGDVQRHRLSRAGDRQLNYALHVMAMAQIKRPTPGRVYYQRKRAAGKTHKEAMRCLKRRLADIVYRTMIHDTEASLLPAP

SEQ ID NO: 396611 - protein, 343 aa, unidentified
MQTVSTIGLDIAKSVFQVHGVDANGLVGVRRQLKRRYVLAFFEKLAPCLVGIEACASSHYWSRQLQALGHNVRLMPPAYVKPYVKRQKNDMADAEAICEAVTRANMRFVPTKTPEQQSGLVLHRTRHLFIRQQTSLINAIRGHLAEFGVTAPVGRKGIEELLRVIADPSDKRVPDVVRACLAALGSQLLSLKKQILDFDRMIMAWHRSNQTSKRLNCIPGVGPLLATALVASVADPKVFRSGRNFSAWIGLVPKQHSSGGRARLGSISKKGDRYLRGLFVAGALAVIRYAKLHGTKYRPWVAALLARRPTKVAAIALANKLARMAWAMMARGERYNYPAALRV

SEQ ID NO: 396612 - protein, 366 aa, unidentified
MKRGLPRSDAPRVLYETKGGPRMLYVGLDLCRKRVDFDARRRDGELVERGSLPPDADGLRVLVRRLGDADVVAVIESMNGARFVHDQLELQGWDVRIADAAKVKGLAPLACKTDAIDARVLAELARRDLVPEIWLPSPEVRAERERARFRLHLVKHRSALKNRVHAILIAYGVPSPSSDLFGDAGRRLLARLELPEPWRSTTAASIALIDVLDEQIAVCERELRTLGADHRYVPLLMTTPGIGWILAYTIASEIGDVGRFATPAKLVGYSGLTPSVSQSGERDRRGPLRKNGPNYLRWALVEAAHTASRNPVYQPILERHRARHGRKKGTKTAALTIARKLAEATWHMLTKNQPFAPAGAPARLAA

SEQ ID NO: 396613 - protein, 339 aa, unidentified
MGEVVTIGLDLAKNVFQVHGIAADGKVLVCRQLRRGEVLKFFQSVPPCLVGLEACGTAHYRAREIAALGHKVKLMPPAYVKPYVKRGKTDAADAEAICEAVTRPTMRFVAIKTVDQQAALMLHKTRDLLVRQRTMLINGLRGHLAEFGIIAAKGPEGVKAVTAALHEAQDRLPELARLALHGIVDQLRQLEAEIDRLEKRILAWHRASEVSRRLATIPGIGPITASAIAAAVPDGTLFRSGRQFAAWLGLTPKAHSSGGKERHVGISKQGDGCLRRLLVVGATAVMRLARKDNASRSWATKLLERKPAKLAAVALANKTARIAWVVMTRGVTYAAPSAA

SEQ ID NO: 396614 - protein, 393 aa, unidentified
MIYVGIDVASKKHDIVIITETSEMFNKPFTISNTMVGFKKLLSEIILAKEFFNDSNVRIGLESTGHYSRNILYFLILKGYSVTLINPLLTNMDRKASSVRKTKTDSIDAKAICMFLLRNQNDFKPYTLLSYHIDELKILVRQRKSLKKQLNRTMNQLHAFIDQAFPEYYKVFKKINSNSSLKLLSHYASISEFKRVRVNALSQLIKKASKGHHGLIKAQLIKSLIKDSIGIDSLALSLSIKQSINMIQEINFQINQIDVNIKSHIDNSNTSLLSIPGIGYQTGAIILAEIGDIHRFKSDDELLAYAGLDPSVYQSGNYNASFKISKRGSSILRWAIFQAAKIAVIHDPVFNAYYLKKINEGKHYFTAIGHVTKKLLRVIRSILKNNNLYSISH

SEQ ID NO: 396615 - protein, 397 aa, unidentified
MYIVGIDIAKRKHEAAVIDGEGTVIIKPFSFTNNCSGYNRLLAMLAKAKLPLDEVSFAMEATGHYWLALFTRLQKEGFRVQVINPVQTNSIRSFYIRQAKTDPRDALLIAEVIRFGHFSESTLHPENIYELRELCRGRHAIVSMQADVKRKVVALLDQVFPEYETAFTNLFGDTSMAILQTCPTPKELSEMPFEELCHLIEVSSHKRFRMAKAQELQALARGSFGFAMAGDVFSTMIRLYAKHLDFLKQQVREMDCKIAEIMETLDTPITTITGIGPTLGAYILSEIGDISRFSSAAKLAAYAGIDPTMRQSGEYNGVRNRMSKRGSPYLRHAIWLAASSAVLHDPALKLYFQKKRDEGKPYMASVGHACRKMVSIIYAVMRDNKAYTPCIPNEISA

SEQ ID NO: 396616 - protein, 414 aa, unidentified
MALVRWVGRAIGLDVHREFCVVAICEDGKVRSAGRVPSTPEGLAALAESLLPTDRVALEVTGSCWEVARILEPHVNRVIVVSPDDTGISSARAKTDKLDSRTLASLLWKGELDAVWMPDERCRILRRRLARREQLMRTRTRAKNEIQAVLQRRLQERPPFADLFGVKGRQWLAGLELPVEERESVDAGLRQIAFTDTEIAAVDRLIAQQALSWPEIRRLMTVSGVNLICAASFLAAIGEPSRFLTSRKLVAYLGLDPKVRQSGEAPARSGRISKRGSASARWALVEAAWSVVKQPGPLRAFYERLRARRGHGKAIVATARKLTVLFWCMLTRGEDYAHQRPALTKKKQRQLELTAGAKPRTKAAAGIWSTNRAISDAERALAEQAEVSYQRTITDQKAGRPSRKVGASATPERA

SEQ ID NO: 396617 - protein, 347 aa, unidentified
MYYVGVDLHKEKSWFCVLDENGSEVSSKNISNSPEVLKAYFEEIPKPFTLAVETTYNWYFFVDLAEQYAEKVYLANSYELKAFAKRNKKTDKIDSRLIATVLYKGYLPTVTIPDKKTRDMRELLRYRMNLVQDRTRTIARLKIMLDKLGEPSVGNLTTYKGLKEISYAHLSDNYRKIIAGYIEKAENLARTIYDINTFIKQKACEDGDILNLTTIPGLDYFSASLVKSEIIDINRFQCFDRLCAYAGLAPRVSQSGNKSIRGPLNKNRRKHLRWILLEVAYHFIKSDRRRELRHQFLTKRKGFNTAKVILARDMLKVIYHVLKERRSYYREGDFKIRSEAAPALVGA

SEQ ID NO: 396618 - protein, 355 aa, unidentified
MNKIKTNFAGQTIYVGMDVHKTSWNLGIHLNDQFVRNVHQKPDPVIMVNYLKQQFPNARYQAAYEAGKFGFWIQRQLTQLGMECLVINPADIPKSQKDTLQKTDPRDARNISLRLQSGVLRGIHIPDEQQEADRVFFRHRKRIWKDLTRCKNRIKGLLAFSGIDIPEQYDNASWSHNFINWLKALDCKQISRRAALNYMIAQLEFLRKELLSISNAIRKMMREQRYKTNYYLLRTIPGIGPLTAASILVEIGDVKRFETFYHLNSFVGLLPMEHSSGQNENKGILTVRKHRQLRSDLVESAWTAKRTDPAMALYFNEQLKRKDSKIVIIKIARKLLNRIRYVLINQQPYEYGVVK

SEQ ID NO: 396619 - protein, 372 aa, unidentified
MDESSKILYVGLDVHKDSIAVAYAPADRGAEVVSLGAIGTRQSDIDKLIRKLQSKGATTLVFVYEAGPCGYGLYRYLAGKGFACHVVAPSLIPRKAGDRVKTDRRDAMTLARLMRSGDLRSIYVPGIEDEALRDLSRGRDDAMQDLKRSKRRLKSFLLRQDIRYEGRATWNAAHLRWLSEVVCATPPQQIVFQEYLRAVSEQQERRQRMERELHEAVKGWRLYPVVEAIQALRGVELTGAVILLTELGDLTRFDSPRQLMSYLGLTPSEYSSGERRRQGGITKAGNSHARRALVEGAWAYRYPAKVSRHLQLRLETLPAEVQAISWKAQVRLCRRYRQLTARGKHVNQVVVAIAREMAAFAWAIARLVPRAC

SEQ ID NO: 396620 - protein, 421 aa, unidentified
MSYRVAAIDIHKKVLMVVVATASDEVKDTAGEALEFECRRFGAGSQERQHVVAWLKERGVTEVVMESTAQYWKPVWLDLEPHIAKLHLAQAHSNRAPKGRKDDFRDAKRLARRLLAGELMLSFVPEAEQRIWRMLSRSKEQLVKDRVRLQNQVEALLEEMRIKLSAVISDLLGASGRRILKALSEGESDAVKLASLGDQRLKCSQEELVDALQGSPSPTHIRILKLFLERVQVVDQQIETLDQLLAKELKKHEEAVIRVAETPGFGVDSGQRIIAEVGADAAAFPSAGEFASWVGYCPGSNVSAEQNHSSRCPKGNQYVRKLLTQAAQAAVKKKGCHFQKVFYRFLPKLGYNGAICVVAHRLARVLWKILHHGVRYVERGIETNPKAKQRRVQKLTRALRQLGYAVTITPVNPEALNPNPA

SEQ ID NO: 396621 - protein, 404 aa, unidentified
MAVMIGIDPHKGSHTAAALNEAEAVLGELRVRSGPAQLEQLVTWAAQWPDRTWAIEGAGGLGYLLAQQLLTAGERVLDVQPKLAARVRLLATSSTNKNDPNDARSVAIAALRSPEAKEVRAEDHAAVMKLWAKRRHDLVSARTQVVCRLHAVLCELVPGGISGQLYASKAARMLDQLEPENAVAAARHELGRQLLEDLRRIDEQMREAKKRIAQAVAASRTTLTEIFGVGPIVAATVIGYVGDVTRFASSDRFAAYNGTAPIEVSSGPREIYRLSRRGNRRLNHAIHMEAVTQIRNLKSEGRAYYDRKLAEGKTGKEALRALKRRISDALFRQLQIDVQRARRSIMGPGGQTGNDSAACVTDSHPDGRLFGEATPEPKTTLRPVATAFRSGRSKTPTRSARRAS

SEQ ID NO: 396622 - protein, 355 aa, unidentified
MSQEKYIGMDVHQATISVAVMDAGGKLIMEGLLETKAATIVEFVRGLHGPRSLTFEEGTSAAWLHDLLKPHVDRLVVCDPLKAALLKDGNKSDRIDARKLAELLRTNQLKPVYHGEHGVRTLKELGRSYLTLTKDVTRGMNRIKALYRSWAIPCSGTTVYAPRHRAEWLAKIVEPGVRLRAERLYQQLDLLQPVRQQARHDLLVESHQHPAVKLLRQIPAIGPIRAALLVALLQTPHRFRTKRQLWAYSGFAVETHDSGEYRYVRGKMQRNRERITVRGLSDNYNKDLKNLFKGAAISASTRPGPLHDFYVALIAKGMRPTMARLTLARKMITITLTIWKKGVSFDPQQLHRQAA

SEQ ID NO: 396623 - protein, 345 aa, unidentified
MQTMYYIGLDVHKRTISYCVKDGSGAIHAEGTIPATRFDLDRWMKTLPQPWTAAMEATVFTGWIYDQLQPHATALKVAHPLMLRAIAAAKKKNDRIDASKICDCLRCDFLPECYMASMAIRERRRTLRYRNLLVRQMVQMKNKISGLLMEAGVSYNKQKLHKAGYFRELLATNPDINEGLRPLLRLCRETVVRLQKTESAMVRSLERDSLLIDRVERLMTIPAVGPITALTWALEVGDAKRFSSIKKAISYCGLCGAEKSSGNTVQRTPLSKQRNKHLQTTLIEAAKMAPRNSPELAMLYDREKQKGNANRATLAVARKLVAYLMAVDRGQRDFQVAERSNCIAA

SEQ ID NO: 396624 - protein, 401 aa, unidentified
MVSDFRKGRYNLMKIYVGIDIAKLNHFAAAISSDGEIIIEPFKFTNDADGFQLLVSKLESFDKNSIIIGLESTAHYGDNLVRYLVTELYQVCVLNPIKTCQMRKNNVRKTKTDKVDTYVIAKTLMMQDNLRFVSFFDLDMMDLKALGRFRQKTIKQRTRLKIQLTTYVDQVFPEIQYFFKSGLHQNAVYALLKEAPSPKEIASMHMTHLANLLKVNSHGHFTKEQAKELRVLAQKSVGANDSAISIQITQTIQQIELLDSQLDKIEAEMTDIMKFNDSVIMTIPGIGYINGGMILGETGDIHRFSNPSKLLAFAGLDPSVYQSGNFQAKTTKMSKRGSRVLRYALVNAAWNVVRNNATFKAYYDAKRAEGRSHYNALGHCAGKLVRVIWKMLTDEVEFNLE

SEQ ID NO: 396625 - protein, 416 aa, unidentified
MKKGQNTRGYERYMALDIHREYLLVGGWNEEKEWVLTPRRVGIEKFPEWAKKNIRAGDIVVLETTTNVWAIYDIVAPLASRVLVANAAEVGEIANARVKTDKEDVKRLLKLLIGGIVPEVWVPPMEVRELRAFISYRGRLVKTSTMIRNRLQSLLHKHNLMLSEAGLLDQDWWEAQKNISALEKLQIRQELVLLQEVEKLKAAVDEELQRQSTSTTWGKQALQIMQLPGVGYIVAMTVLAAIGDISRFENAKQLVGYAGLGAGVHDSGKTHKEKKITKKGRRELRWAMVQAAWRAIRLSPFWKAEYEKHLQRMRKPNQAIVVIARKLLIAIWHVLSKEETDMHASEEDLAYKMLLLSWSLKEETRRGLTYKQFAKYALMKLGVETDITRFVRKNVPRRLASREEVLAQMTELGLSA

SEQ ID NO: 396626 - protein, 424 aa, unidentified
MKNCNKQNEKIELVDEKTLVIGVDIGSYDEYARAFTCRKQELSKKPLRFHNTAEGFKTFKDWAVNIMKANGIEKIIVGMEPTSIYWEALATYCKDNGMILVHVNPAAVHKSKELDDNDPSKNDRKDPKVIAGLVADGRYQFPYMPEEEYAELRELSNLRIRTQESLTQCKNRLSRWYSRYFPEFKGAYKNVVSKTAMMILDLYPLPEDIVTLGVEGILQIWRSKKVRGAGERKARKMYEAARNSIGRKEAASIARIEFKSIKEDLDRYQERLDEIEKKADEILPKIKNVDKLFEIKGVDKATVLTFLSEIGEISRFDNPKEIQKLAGYAIVTNESCKHQGEKRISYRGRKRLRWVLYQTALSVIAKNAEFRQIHAYYTTRANNPLKGIQSVVAVACKMIRIFYKILTDGVSYDGTKMTQDIVHA

SEQ ID NO: 396627 - protein, 410 aa, unidentified
MAERFVGIDVALHEHRVAVLDRDGEAVGQSFTIAASTDGVATLLRTLDARAATAAQTLIGLEASGHLWENLEAALVGAGYRVIVLNPLQTRRYRDVVRRKAKTDDIDAHVIAGLLRSGAAQASYVPDEPIQSLRELARLRARLMADRQDYLRRLVAQLDVVLPEHHAVLGDLLTARARGILAQFPTAQHLATATPRAIRRAAADAGARGFALDDATSVRDRARGSLYSGKAAAARAHVVRTLVSQLERLTSAIDEVDRAATTLLPPSDPGTGPSDAELLQTIPGIGPQTAATLLGELGTLTRFTDARALVAYVGFYPVINQSGDRAATPRLSRVGSRLARHSLYLAAVNAVRRSGEWRTIYLRKKAQGKTGKQALVVVAVKLLHAVYAMLKHRQPYNPSRLLVASATIGT

SEQ ID NO: 396628 - protein, 328 aa, unidentified
MQKNKEYVGVDVSQERLDMVAYPTGEIRSFGNDSAGIAKATTWLTEVKPAIIVMEATGGMEVSLYVTLQEANLPAAVINPRQIRDFAKSIGILAKTDKVDAKVMARYAATVQPEARPLPDEEAHKLRTLVTRRRQLGEMIIAETNRARATRDKAMKQRIHAHIEWLKRELANIDKDVSRTIKENPVWQAKDKLLQSTPGVGPVLSATLIAELPELGILNHKKIAALVGIAPFNRDSGKRRGERSIWGGRCKVRQSLYMAALSAARCNPTIQTLYQRLVASGKEKKVALTACMHKLITILNAMLKHNSYWSCHHATFTDTRISSAKTVA

SEQ ID NO: 396629 - protein, 336 aa, unidentified
MKQYVGLDVSQKETSVCVVDEVGQILFEGKAKSDPGALAALLRKRAPQAERIGFETGAMASWLWHELRRIDFPVVCIDARHAHAALSIRMNKSDQNDARGLAELVRVGWYREVKVKSEESQKIRAILVARSRLVAIRRDIENQVRSLIKEYGLLFPRAIGLQFRNQVRELLREDHQLLGVIAPLLSIHEQICKQQSKFDNEVRELAKSDETTLRLMTVPGVGVVTALTFRHTIDDPSRFRSASTVGAYLGLTPRRNQSGETDINGKISRWGDRLLRTYLFEAATVLLYRTKKWSSLKAWGMKLAKRIGMRKAKVAIARKIAVILHCIVSAVFRPQL

SEQ ID NO: 396630 - protein, 466 aa, unidentified
MARKQKSDKSKKHRRPIQSLETIQPNAAGIDLGSREHWVAGPPQEDKVPNVERFGTTTPELLRLADWLTQQGVKSVAMESTGVYWIPLFEILDSKGFEVLLANARQVTHVPGRKTDMLDCQWLQLLHACGLLRGSFRPSDDICRLRSLFRERNTMVDQRSDWVRRMQKSLDQMNICVHHAVSDITGVTGMRIIRAIVDGERDPQALARMRDRRCRKSEEQIAAELTGNWRSEHLFNLHQALKMYDQLCTVVADYDSEILAYLQTLQPEDNNDIAVPAPASKAKARSIAKRGQEPVRQALYRFSGFDLTTIDGIGVDIASVVVTELGLDYTMFPGEGNFVSYLRLAPNLSISAGKKVPSKSKASTCTRVASALRMAALTLRNSKTALGAYYRRVAWRKGASVAVFATARRLAQLVYRLVRYGQAYVDAGAKAYETRFNQRRLKFYTKALKDMGYNVEPLAAAEANSG

SEQ ID NO: 396631 - protein, 349 aa, unidentified
MLADELDYVVGVDTHRDEHVLAVVAAATGAVLARRAVRANARGYQEALRFVGETACAARAWAIEGTGSYGAGLARYLAGRGETVLEVSRAPRAERRLRGKDDALDAARTARAALASETLARPRNGERREALRLLLVARRSAVDVRREALGQLRGVIVTAPDQLREELRGLPVGRLLARCSRLRRSSSMAADELATRLVLRSLARRIEAATLEAAELEREILAQVRALAPALLDEPGVGPIVAAQLIVAWSHAGRLRSEAAFARLAGVAPVPASSGQTIRHRLSRGGDRQLNRALHTVVLHRRQHDPTTQAYIEQRVAEGKTRRDATRLLKRYLARHLYRLLQQQEPLMA

SEQ ID NO: 396632 - protein, 352 aa, unidentified
MTVTIVETRTQARAITGGVDTHAEVHVAAALDAVGGLLGVQEFPATPAGYGQLPGWLRGFGTVCLLGIEGTGSYGAGLARHIAAAGIRVVEVDRADRQDRRRAGKSDPLDAVSAARAAQSGRAAGAPKGRDGAVEAIRALMVAKRSARAGRTQTINQARALVLTGPDDLRIRFCEHTSADLVAELAALRPRPGAPVGYPTRIALRELGRRAQFLDRQLQRLDELIVPLVTARAPRLLALYGVGPDTAAMLLIAAGDHPERLRSEAAWAHLCAAAPIPASSGKVTRYRLNPGGDRQANHALWRIVITRMSSHPPTRAYVARRTTEGLSKKEIIRCLKRYVAREVYPHLRIPAD

SEQ ID NO: 396633 - protein, 344 aa, unidentified
MKKVLIGIDFSKEKFDVAIIVKPTSTQEHALFDNKVSGYRKMIKWINSVVEDIPCSSWLFCGETTGGYSRMMSDWLYAQGYDVWIENALVIKRTFPLKRLKNDTVDAFMIAEYALRFEDRVQLYEPMSQALTELREIFLYRHHLVRHRCSFEVRRIEKRFTQQKSANKNVISQSARHIITEINKEIAKCDEKIKEYIESDDQLSSIFAIVTSMPGVGTINAVSLMVYTNNFTKFAYNPRKIACYYGIAPFGRDSGTSVHTDPRVGFIANKMLKSILTQAALASVRTCPQIAKYYKRLIERGKKPMVALNNVKNKMIAIITAMVRNGCMYQPDNIWLATQCVNVK

SEQ ID NO: 396634 - protein, 308 aa, unidentified
MAYFVGLDVSVKETSVCIVDDAGKIVREARVASEPEALLQVLTNTIYRFKRIGLEAGPLSQWLYSALAEAGLPVICVETRHMRAALKAQINKTDRNDARGIAQMMRVGLYRPVHVKTLRSQKLRVLLTHRKLLQSKAIAIENDLRATLRNFGLKVGMVGTVKYETRIRELVENLPDLAVLVEPLLIVRRVVREQLGILHRRLLAIVRDDDVCRRLMTIPGVGPVVALTYRVTVDVPARFRNSKAVGAVFGLTPAKYQSGENDRTGAISRCGDEMMRMMLYEAAQIMLVRSTKWSWLKAWAMKIASIAG

SEQ ID NO: 396635 - protein, 364 aa, unidentified
MNKCHLNTELSSHEGTRFEFNRSPSAIKLGIDVHQDFCVVVEQVGGTNPKPPQRFGKQAFLHWAAKLKQTGADVHAVYEACGFGFSLQRQLSALGIKCHVVCPQKLDERNKRVKTDGLDAKALCLRLDRFVQGNRDALAIVRVPSEEEERSRAIHRQREQLVGARKRLEAQGRSLMVNHGVDPLQNWWKPRTFAALSVPQWMRELLGNSQPILLALQEKIAALTLQLQSAAAPNQPRGLGKMTSVIIDREIGDWRRFNNRCQIASYTGLCPGEYSSGNTRSQSRVTKHGNPRLRAALVELAWRLVRFQPNYHPVRKWRQILATGALATGAARKKAIVAVARQLAVDLWRIKTGRLTAEQLGLTI

SEQ ID NO: 396636 - protein, 314 aa, unidentified
MNPRPVHPVRYLGADIAQDHLDLHGEIPGLPGRIPNTKAALGKLLKLLSIQGDVHLVCEATGGCERLLVAACHQAAISISVLNPRQVRDFARAKGQLAKTDAIDARILCAFGRTFAPPPAQPLDPSQIKLAALTARRRQLLTARTAENNRLLRALPLLVASHRTMLRALDQHIKLIDDALARTVAACPRLQATIDTLTQVKGLGPTSATALIASLPELGSLSKNQAAALAGLAPFNRDSGLFRGQRTIRGGRLNVRSALYMPALVASRHNPVIKAFYLRLLSNGKPPKLALTASMRKLLIHLNSLLKNPPLAPS

SEQ ID NO: 396637 - protein, 390 aa, unidentified
MIIIGIDIGKFRHQAIAMDEQGKSLCPSFAFENTDEGFTFLLKRLSPFQEKDCICVGMEATGHYWLNLYFALLDLGMVVHVINPIQTDAVRRINIRKTKTDSVDCKYVAEVIRIGNFSDYHVQTKEIQQLKQLCRFRYGLVDEMVMLKNRTIGILDIIFPEYSTLFSNVFGVTSLALLKKYTSPEEILKVPTKRLADLLSKNSRGRFGEEKALEIKAACKRSVGLMDNTFAFIYQLRMTIQLIDYMGQQLEDVEKQIEALYSSCDCYLHTIIGVGITTAAVIYAEVGNIDNFDSPKKLVAYAGMDPSRKQSGNYESTHNSMSKRGSTYLRRAVWNAAVVAAQKDPALNAFYLKKRDEGKNYMTTIGGVSHKLLNIVFAVMRDNKPYFPRV

SEQ ID NO: 396638 - protein, 487 aa, unidentified
MGILDRLLGLLARKERSSGLGADRGKQLDALSQALDVQFRDLTLLNQALMHRSYVHDAELDRGESNERMEFLGDAVLGLLVNEHLYYKYESRQEGRLTKIKSLVVSEAILSRKAEELSLGDYILLSENERSSGGATRTSIIADAFEAVIGAVYLDSGLPEARRFVEDHLLHEIDELLKVDEYQNYKSMVQEYAQKKFGSRPRYRVVSAIGQRQARPLIVIEPTGGYEHPLQAILLDQGFSLAKVNARQVREFARAKGRLAKTDAIDAAVLADYGHVMSPRTMVGPSHEQSELAQLVKRRRQLVELATIEKNRLEKAPDDLATQSIQRLLRVLKEEIQEMDARMATLMKRHQSLAHAHDVVKPIKGLGPLTVATLLAELPELGRIGNKQISSLVGVAPHNIDSGMRRGTRHIRGGRIQIRCALYMAVLSAIQHDPGMKQFYQHLVEHGKKPKKVALVAVMRKMLVRLNAKMREYYLQVDSSAWQPQEG

SEQ ID NO: 396639 - protein, 401 aa, unidentified
MKFVGWDWASTSHDMTVLNEQARVVERWALRHTEQGLGQALARLARHGQPAELPVIIERSTGLVVDRLLAAGHPVVPVHPTAFHAARPRWGAAGAKSDPGDSYKLADYLRTDGHRLRRLQPLDPGLRELQALVRLREDHVRARTAASNQLGALLDAYWPGPKAMFCKLASDIALAFLTDYPTPQAAARLGQARLAAFCRRHAYRGGKPPAELLARLRAAPIPPAGLAPAVLAQLIGAQVQLLRSLQATIGELETAITQRIAQHPRAKLLRELPGVGTINLAQLLAEVGPILDRVSTAEQAAAECGAVPVTRASGKSSGSTFAGPPTPRPHRPHRLRPQPSHAVTLGRPALRRRSGPRQTQPTRHPDRRPRLASRHLGLLAHRHALPPPRSSRRAAPRGRLT

SEQ ID NO: 396640 - protein, 359 aa, unidentified
MLKQSHYKVGCDAHKHYSLFAVLDGHGNLLDQSRINHEPSSIRAFLSQFPPGTPVALESVGNWYWIVDEIEAAGCVPRMAHALYAKKMMGRIHKTDKLDAAGLATLEHLGSLPTVRIAPGEIRDARELPRTRMAFSKMRTALKNRMHSTLAKYALSLGTASDIYAPKWRPQLLQLIDTLPEETCNCMHQELELLGLVQGHIDRLEVRIKERIQLTESMQLVKSLPGVGPILSTVITLEVGSVDRFPAASHLASYSGTVPKVKSSGGKHRHGRMIKQANNYLKWAFIEAANVVVMKRRHHLWHRKHVSMLYERTRRRKGHAVAVGAVARHLAEATFWVLTKAEPYRDPAKVSPRQGQARG

SEQ ID NO: 396641 - protein, 348 aa, unidentified
MDVHLRSTTVCALDAETGEAVTRRFRGNPWGEVAEWMSGFPGPSLAAYESGYLGFAPQRELSGLGVDCVVAAVSKVPRSAADFSSKNDRNDAARMAKAILSHDISPVWVPSPEIEGLRDLAGAHDAATARLAAAKQRLLAFLARRGYAYGGTTPAGNPRRYWTYDFLRWLDKVRPADDGGIRALAALRNEVEAAAETRDDLLAEYRAAVAAGPLSAEVEALQSIKGCGFALAAAFASEVGDFSRFRSGRQVTAYFGLAPKQRSSADSVRLGGISGAGNALVRKLAVEGSWSYVQASHQPKLMPKGSGVPLEVRMHGRKGSERLLRRREEMLARGMPQAKANAATAASS

SEQ ID NO: 396642 - protein, 343 aa, unidentified
MDYFAGLDVSVKETSVCIVDDTGKIVREVKVASEPEALLAVLRNPAYHFKRIGLEAGPLSQWLCSALAEAELPVVCVETRHMQAVLKAQINKTDRNDARGIAQMMRVGLYRPVHVKTLRSQKLRMLLTHRKLLQSKAIAIENDLRGTLRNFGLKVGMVGTVKFEGRIKELVENLPDLAILVEPLLIVRRALREQLVILHRRLLAIVRDDAVCRRLMTTPGVGPVVALTYRATVDVPARFRKSKSVGAVFGLTCAKYQSGEIDRSGRISRCGDEMMRVMLYEAAQSMLRSKKWSWLKAWAMQIARRRGVKKAIVALARRLAVIMHRIWVDGTEFRWTREAVTAA

SEQ ID NO: 396643 - protein, 377 aa, unidentified
MKKNNIAAGNVAATPVAVTGSTSEGRLTIGLDLGDRRSRYCVLDQNGVVIREDSVATTKDGLRRIPGAAAASRIIIEVGAQSPWISRYLKELGWEVIVANARKVAMISKSTRKNDRTDAQTLARLGRMDPELLSPIRHRGEQAQRDLAVIRIRAEMVEQRTAMINCARGTAKAMGERLPACESDNLGVDTLAGGKFSEALEQTLKPLLTMIDHLSGQIAVYDKQIDGMAKQYPQVALLTQLYGVGNLIALTYLLTIEDPGRFRASRDVGPYLGLVPKQRDSGDSQPQMNITKEGDRYMRKLLVQAAQCMLKKGAPETDLKRWAEGHFRTGDKKGKKKTVVGLARRIAVLMHKLWANGEVYDPNYQQKQKQKARTKAA

SEQ ID NO: 396644 - protein, 363 aa, unidentified
MRFYGEQPRFYCGIDLHASKMYVCVLDEQGNVVLHRNLRTEPEALKRALAPYRASLVVGAECMFSWYWVADWCREERIEFVLGHALYMKAIHGGKAKNDRIDSEKIARLLRGGTFPLAHVYPKEMRGTRDLLRRRNLFVRRRAELLAHVQNTFTQYNVPTASGKGRDRLREGDVGSSFEDGSVQVMLDADVEVIEQLDETIARLETHVLKHAKVHDPARLHLLQTIPGVGKVLSLVMLYEIQDVDRFENIGQFVSYARLVSCAKESAGKKQGSGGRKIGNAHLKWAFSEAAALMIRSSPEAKAFMEKMTRQRGKARAVALVAAKIGRAVYWMMKRKQPFDARKLWKSILPKGVREMEGAAMKG

SEQ ID NO: 396645 - protein, 354 aa, unidentified
MPTTARTAIAVVGIDIGKNSFHVVGLDDRGAIVLRQKWSRNQVAVRFANMPPCLIGMEACVGAHHLSRGLQRLGHDARLMPARYVRPYSKGQKNDFRDAEAIAEAVQRPTMKFVATKTADQLDLQGLHRVRERLVRQRTGIINQIRAFLLERGVAVRQGLRFLRNELPSILAAPSDALSPRMLRIIEDLAGDWRRLDERVEGLSKEIEAIARQDAGCERLISVPGIGPIISSAIVAAIGAGDVFSKGRDFAAWLGLVPRQISTGDRTILGKISKRGNRYLRVLFVQAAWVVLIKPKSWERHGLKSWIEAARKRLHHNVLAIALANKLARIAWSVLAHGRSFEASKLATAVTQPA

SEQ ID NO: 396646 - protein, 352 aa, unidentified
MKYNVGCDAHKHYSQFVVLDKDGKFCRQARIEHARGAIQEFLSEFPEGTPVAVESVGNWYWIVDEIEASGCEPQMAHALRAKVMMGHVDKTDKLDAKGLAVLLHNGTLPTVWIAPKEVRDERELHRTRMVLCKLRTALKNRIHASLAKYNLSLPTHSDIFAPKWQSELHQLINQLPAETGRCIHQELELLKTLQEQIHHMETRLQERVQSTLNMRLLQTLPGIGQILSLVIEREIGSVDRFPSAQHFASYAGTVPTTNASGGKVWQGSLRKQANQYLKWAFVEAANVIMLQQNHPRWRSKHTVHLYQRIRRRKGHAVAIGAVARHLSEAAFWVLRKQQPYQDPAFCMVAQTG

SEQ ID NO: 396647 - protein, 404 aa, unidentified
MNMNAVGIDVSKGKSMVAILRSYGEIISKPFEVKHTVSGIRSLIEQIQSIDGESRIVMEHTGRYYEPLVRELSKADLFVSAINPKLIKDFGDNSLRKVKSDKADAVKIARYTLDSWTELRQYSLMDEIRNQLKTMNRQFDFYMKHKTAMKNNLIGVLDQTYPGANTYFDSPAREDGSQKWVDFATTYWHVDCVRKLSLNAFINHYQKWCKRRKYNFSQSKAEEIYGKAKELVPVLPKDDITKLIIKQAVDQLNSASITVESLRTLMNETASKLPEYPVVMAMKGVGTSLGPQLMAEIGDVSRFTHKGAITAFAGVDPGVNESGSYEQKSVPTSKRGSSDLRKTLFQVMDVLIKTHPQDDPVYQFLDKKRAQKKPYYVYMTAGANKFLRIYYGRVKEYLASLPES

SEQ ID NO: 396648 - protein, 341 aa, unidentified
MPIVTIGIDLAKNVFAIHGVDDSGKPVLVKPRVPRDQLLTLIAQLPPCLIGMEACSGAHHWARAFQQYGHSVKLMAPKLVAPYRMSGKRGKNDAADAAAICEAVTRPSMRFVPLKDEHQQATLCLHRTRQGFVEERTAAYNRMRGLLSEFGVVLPQSPERLRREIATHLDALPGWVRRCVSDLLEHVGNIEDRLAEYDRAIGEIARTDERSKRLMKLRGIGPTTASALLASIGAGHDFRNGRQVAAWIGLTPSQYSSGGKERLGTITKTGDAYLRNLLVLGARSVMASLGDRQDRFSRWVRNLVERRGYWRTAVAIAAKNARLAWATLKYGEAFKHEPATA

SEQ ID NO: 396649 - protein, 357 aa, unidentified
MGKSIRNLSTVTRVGLDLAKRVFQVHAVDAKGEIVVARKLTRSQLIPFFAELPPCVVAMEACSSAHHWGRALMELGHEVRLIPPAHVKPYVRRNKNDPADAAAICEAMSRPGQRFVPVRSIDNQAELMRHRARELLAGQRTAALNALRGHLAEIGLIAPQGAQHAYGLKRMAADGFNENGEIVVPDCVRGALRSLVGQIDALDEAIGAIDRELAASVKADETAKRLMTIPGVGPVTASAIVATIQDASAFASGREFAAFLGLTPRQNSSGGKTRLGRITKMGDRYLRKLLVVGACATLRHRRGHNDALRLWASGMLERKTVKYKFNLTAVALANKVARIVFVLMTRGGRYDDRPIAA

SEQ ID NO: 396650 - protein, 366 aa, unidentified
MYIVGLDVHAKRSSMCILDENGKLVKHLEVKGAWARMLQVVDEQVPRPFAVCFEASCGYGYLHDQLAKRAERVTVAHPGQLRLIFRSKKKNDRVDADKLAKLLLLKEVPAVHVPGMDVRAWRGLINYRRKLIGRRAAVKTQVRAFLRGLGIAVGVKGGLWTKKGVAWLTELALLTSPADAVRRDVMVDDLTALEEKVRRVERELNRIGRAHPGVTLLQTIPGVGPRTAEAFVAHVDDVRRFARVKQVGSYFGLGALPGRVGGSQPPGPHHQGRAGGRAVAGRRGGVAGPAAQRQDPRVLRPGDAQRPGAQEDRAGGDGASPDAGDGGDAAQRGGVARTGAAAAADAAAAVERAGQTGNEQGKDKGV

SEQ ID NO: 396651 - protein, 389 aa, unidentified
MYYLGIDVAKRKHTAMVVDEQGQVFTRAFSFSNDRAGFGQLLAKIQILTAAVTVALEATGHYWLALYDYLTSRDYTVLVLNPLQIAAYRRTGIRKRKTDRHDAYWIADFVRIGGGQPCHISQQVILQIRELARFRFRLVEQIGDCKRKIISVLDRVFPEYETLFSNIFIRTSRRLLQEAVTAEEFADFPLDELHSLLSSTSRGRFGLSKAQQIIDTAAQSIGVSFLADAARLELHCLLQQIEFLEAQVADVDAALNTLLQQTEQYLTTIPGIGSTTAAAILGEIGNIKRFPSLEKLVAYAGIDPTLYQTGRFEAKVAHMSKRGSPYLRHALWQAASAARQYDPQLKAYYQRRRAEGKAHGVIMGAICRKLLARIYAVLSENRPYVIDQL

SEQ ID NO: 396652 - protein, 408 aa, unidentified
MNTLYVGIDVSSKSNVVYLMLPNGDKHSNFSVANSHEGSTLLVKKIYSALTSHSLDTVLIGLEATSVYGDNLVYFLREDATLAPFNRKIHVLNPKQVKKFHDTYNDLPKNDYVDSFVIADCLRFGRINKEVYMGEYRYKALQNLTRARFFAVQNLVKEKQRFMNVLFKKYSTMTQEKVFSDDFSTTALAVYDEFESAEALANMDLHELTDFIIEKGKNRFPDPDAVAKAIQKAARSSYRLPKTVNDSVNQVLSISITSMKALESQIKEFDKAIKALMELLPNVLISIPGIGPVYSAGIMAEIGDINRFDNQASLAKYAGLAWKQHQSGGFEAEVTRLIPSGNRFLKYYLCEAAFSLVRCDKKYSDFYHLKYKEVNRCQHKRALALTARKFVRLVFRLLKDNRLYCPAK

SEQ ID NO: 396653 - protein, 342 aa, unidentified
MISAPVPSYDLFVGIDIAAATASVAWMTSKQTASRAITIDQTPQGFSLLQQRLLATGHPAKTVLIVMEATGSYWMNLATTLTQAGFAVSVINPAQAHHFAKALLKRAKTDAIDAQTLAQLASLLQPTVWDPPPAIFVELYQRLTERESLMQMRQQLRNQLHALTQCPTVIASVRIRMEHLIEALTKQMIEVETELNAVLALDPSWTASATRLQTITGIGPLTAIWLLVTTLNFTLCDTVEELTAYAGLAPHPYQSGTSVHGRACIGHTGNAALRTAVYLATLSAAQYNPVIKTFYDRLRAAGKPMKVARCAAARKLLHIAFAVVTNKQGFDPLYAAKPRKAA

SEQ ID NO: 396654 - protein, 411 aa, unidentified
MEQIYERVAGCDVHRDQVTVCVRTPGPRGGVHKDKARFKTTTAGLIEMADWCGERAVELVAMEATGVYWKPVYYALEDRFRVWLCNAYHVKNVPGRKTDMSDADWLADVAAHGMVRPSFVPPVPIRELRELTRYRKKQIDTRASELARLEKVLQDAGIKLTSVASKVLTQSGRAMIQALIEGEGDPGALAELAKGKLRPKIPELTAALSGHFGAHHALVADRVLAHLDFLDDTIAQLSRQIAERVAEGYEPVLDLLLPIPGLQHTSIEVIIAETGADMSCFPTPGQLASWAGLCPGNHESAGKRRKVGTTAGNQWLRRTLIESARAAARTKGSYFGAQYHQIARRRGPNKAAVAVAHSLLDVIWHALSTGEVFTDPGADYFTTRQDPEHRTRRLVNQLERLGYTVELTQTA

SEQ ID NO: 396655 - protein, 372 aa, unidentified
MAFKGSGLGAEKVFSPETAMSKDITLTVDYHDRACVIRWFDHSAGNDQVFSEVPTTKEALNEMIEKACLAAGRKGGVTWIQESTTGWARMQTLVPDRVKFLLANVLQMPLPPKGRRSKTDKIDTARIQREYLNGNLPLAYQPPAHWRQLRRLVAYRENLVNRRTALRNWINRYLAHETWFDRTGLWSLRGQRRLRALLKHLPRTDALVIGQKLDELTRLEEQLGVALAELVSAHGDCLEAKRLDAIAGIGPVSAVSIVARIGPVERFPNVDNLIGFAGLAPGIQESDQTRRNGRIGGGGTDSHLRHYLIEATMWARKLPRYKRAYERMKKRRGMKVGRLVVARMLVRSIYTMLKKGVEFDPGATTPAMATVG

SEQ ID NO: 396656 - protein, 370 aa, unidentified
MTDGMRSGGCAVLAAPTMWGASHHPEVVPRPRAVVMGLDQHRAQITADWIDTRTGEVERARIAPADRAGVRRFLGRFRGLPLEATLEATTGWRFVAEELRAIGAEVYLAEPAETSARRGNKKRAKTDRADARHLRELLLVGRLPESWIPPDHLLDLRARVRLRHALVNQRGEWQQRIHSMLYHHGMPQRRELLTRANRAWVEQAPLPATAREQVTVALTLIDALHAQIDPITRELRAYAPRQPGCRALMGHYGIGPLTAVAILAELGDARRFSSSREAVRYAGLDITVHQSDQRRAPGHLSRQGPPALRWALFEAAQAAARRTGSPDRAYYQQAAERLGGNRACLAVARKLLKRSYHTLRELGEEALTPA

SEQ ID NO: 396657 - protein, 348 aa, unidentified
MHYIGMDCHITTLDFAVVNDAGRLIKANRVATSVNNFMGFVKKVTPPRIIYMEEGTLAAWALETCVSYGEKLVITDPKENHWIGSSGQKDDALDALKLARLARGGYIKEIHHPVGQRRRFRELMIAYHNTVRSGARIKNKIKAKFRQNGIQCTGDTIYAKTYREEWKRKLPQDPTLLLILDGLWLQMEQLEQTEKKILAAAKAQAKQYSEIKLFNALPGIGFINAATVSALLETPHRFANKRKVWMYAGLGLMKHSSGGKLYSERLTTEYNRLLKYTIKQAAEAAIRAKENPFRRKYLDMTLLRGIAPHRAKLTIARDMLATMLAMWKKGEKYNPELGEKTIHKQDWA

SEQ ID NO: 396658 - protein, 355 aa, unidentified
MDSTKYIGMDVHQASISIAVRDASGKLVMESLIETKAATILEFLQGLKGTLWVTFEEGTSAAWLYDLLKPHVVKVIVCDPRKNALLKTGNKNDRVDAQKLSHLLHAGLLTPVYHGESGVRTLRELARSYLTLTKDLTRVMNRLKALYRSWAIPCVGEKVYSPRHRSAWLEQLSEAGVRRRAEQLYQQLDILLQIRRDARQELLRESRKHPAHELLRQIPQLGPVRVALLIALVQTPHRFRTKRQLWAYCGLALQTRSSGEYRFTVGQLQHSNKQPALRGLNSNHNHDLKNVFKSAATHVSTSPDALGDFYRSLLAKGMKPAMARLTLARKMAAIVLTIWKKGERFDPGELKRQAA

SEQ ID NO: 396659 - protein, 358 aa, unidentified
METTNLRQKVDFTGKNIFVGMDVHQKSWNISIHLERTFVRSFTQPPSVDALVHLLHRDYPGATYMCGYESGYCGFWIERDLRYKGVPCQVLHAADIPQTAKQKLVKRDPVDSKKIGEALSAGTANPIYVPIEDDERDRSLIRYRDRLLKDLTRSKNRIRSLLYEFGVDLPERFNSGWSNRFIQWLKEMDQVRGSARITLDHMIGQVVLLREMLLKVNRDIKALQNSQKYQQKMHWLTSIPGIGPLTAITILTELFDIRRFSSFRHLNSFVGLYPMEHSTSEQDHKGAIMIRHNKHLRKILVENSWTAIRHDPVLTLAFNQWKSRMTSKRAIVKIARKLLSRIRYVLINETTYSNGIVK

SEQ ID NO: 396660 - protein, 397 aa, unidentified
MYLNVGIDVSKNKHDACILNENGEQIGKFMKLTNTRTSLDKFLEQIKLISEKNGAEVRIGLEATGIYWYSLFSKISDDHKISIYNPTQIHAFAKVNVRGSKTDKIDAKTIANMLRFGNAPQTNYSDKQRLELREYVRFHWKLTNNKTNLKKRYKRNLHLVFPGYDQVFKDVFTKTSREILSQSPTPDDILEMGEGKLLELMKKASKNHIDKEKARELIVKAEDTIPSEILKESSLFELQIMMEMIENLEKHIVTLENKIFAIWDKVKDKHYIQTIPGISEFRAAMIWAEIGDIENFNHPDQIVAFAGLDPKVRKSANKEVIGGPNKRGSSTLRWALGWAVQESKNVNPVLAPYFEKKIAEGKHYNTARCAASKKLIRIIWSVEKNKKPFQIPSNHKS

SEQ ID NO: 396661 - protein, 354 aa, unidentified
MSQKLNTAIAVIGIDIGKNSFHVVGLDDRGAIALRQKWSRGQVETRLANIPPCLIGMEACVGAHHLSRRLRMLGHDAKLMPAKYVRPYSKGQKNDFRDAEAIAEAVQRPTMKFVATKTPEQLDLQALHRVRERLVSQRTGIINQIRAFLLERGVAVRQGLRFLRAELPQILAMRTDVLSARMMRVIEELAGDWRRLDERIEGLSTEIEALARQDTACQRLMTVPGIGPIISSAMVAAIGNGAVFSKGRDFGAWLGLVPRQISTGDRTILGKISRRGNRYLRVLFVQAAWVVLIRPKTWERHGLKPWIEAAKKRLHHNVLAIALANKLARIAWAVLNKERDFECVRTDETASRSA

SEQ ID NO: 396662 - protein, 307 aa, unidentified
MFVGIDVAKDRLDVHLRPDGEVFTVARDGEGIEALAARLSALKPVLVVLEATGGFETVVAAALAAAGLPLAVVNPRQIRDFARATGRLAKTDPLDAAVIAHFAEAVRPQARSVASAEAQALGELVARRRQLIGMMTAERNRRRQLTTKRLIKGIDRILAVLQAQLTELEHDIGDAVRGTPAWREKEDLLVSVPGIGQKIARTLIAELPELGSLDRHQVAALVGVAPFNRDSGKWRGRRSIAGGRAVVRSALYMSVLVSIRRKLPLAALYNRLRAAGKPAKVAIVACMRKLATILNAILRDKTPWQTA

SEQ ID NO: 396663 - protein, 419 aa, unidentified
MELMYERVAAIDVGKKEIAVTVRVPGSSPGAARVEVTRKFKTFYPVLQVMAAWLTERQVTHVAMESTGVFWRPVFHALCDAGAEFEILLVNAAHVKNVPGRKTDVKDSQWLAQLLEVGLLRGSFIPPADIAAIREVTRYRKKLIQSRTSELQRLGKVCEDAGIKLDSVASSLTTKSARDMIEALITGERDPRVLADLARGVMRKKIPDLSMALAGRFGPHHGVLARTHLDQIDHLDAMIARLDGQIEQMVAPFGPQAAALCTIPGISDRLAQVIISEIGVDMSRFRTPGHLASWAGLCPGNNESAGKHGNTRTRKGNREIRTALVEAAWAAARTNTYLGARFRRLHRRFGRKNGGKAAVAIAHNLLIIIWHVLHDGVEFYDLGPDYFQRPDTPAARHRKDQLIRELTALGYTVDVTTAA

SEQ ID NO: 396664 - protein, 422 aa, unidentified
MSYCPVAGIDVSKRFSDMCILSPDNKIFAQEKIYHDETSINRANALLQKAERLFFSKPVIVMESTSHYHLILFQFFSEHGYDVIVVNPLQSNSMKDFSIRKRKTDRVDAFKLAMMYRTKTLRPSQIPQTATRALRQLCRHRAELLNDVSSYKNRLTALLDQTFPGYDKVFSDVGGVTSCAVLVRFPTPTILLVEEESELVEVIAAASKSGYSFAKKKAGLLISAAQKAQTLGIHSCADETLIVCTIQMLRTLSESVLQIETAIDNLLAQIKEMRNNVSLLQSIPGIGSHSAALLLGEIGDISLFKKPKQLAAYFGLDPTERQSGSFRGTKNKLSKRGSSYARAALHMGVVNSICKRGKDSAANPVLLSYYEKKCKNKPAKVAQAASMRKLVFIVFAVLRDQKPFELKTPEQHAVEQGFVKAA

SEQ ID NO: 396665 - protein, 348 aa, unidentified
MAHFVGLDVSVKETSVCVVDDTGKVILEQKVPTEPADIITLLSSLGVSYGRIGIEAGPLSQWLVNALTVAELPVICVETRHMKALLTAQQINKTDRNDARGIAQMMRVGLFKPVHIKTLVAQEQRMLLTSRKLLQRKLLDLESDLRGTLRNFGLKVGVVSGGRYEVRVRELIAGFPRLAAIAEPLLKVRQVMRQQLAVLHKMLLDTVRDDPVCRRLMTAPGVGAVVALTYRATVDQPQRFVHSRAVGAHVGLTPKRYQSGEIDYDGGVSKCGDALLRTMLYEAAQVLLTHGSKWSWLKAWGVRVVQRRGMRRAIVAVARRLAVVLHRMWVDGSEFRWSKDSAAVPMAA

SEQ ID NO: 396666 - protein, 409 aa, unidentified
MEVVHERCCGLDVHKRTVVACLLTLGERGQPAREVRTFGTMAADLLELREWLVAARCTQAAMESTGVYWKPVYNALEGVVELLVVNAQHVKMVPGRKTDVSDAEWLADLLRHGLLRGSFVPPAPQRELRELTRYRAVLVRERATEVNRLQKTLEGANLKLGSVATDILGVSGRAILEAVAAGESEAAVLAGLARGRLREKRTELERALAGQVKPHHRLLIAEHLEHIGYLNEAIARVNREIEERLRPFEDTLARLQTVPGVGLRTAEVLMAEVGTDMSRFPSHGHLASWAGLCPGSNESAGKRKSGKTRKGSPWLRSALVEAAWAASHSKRTYLSAQYHRLAARRGGKRAVVAVAHTLLVIVYHLLNRGEAYTELGGNYFDERDRWQVERRLVRRLEALGYAVSLQPAA

SEQ ID NO: 396667 - protein, 339 aa, unidentified
MQAITIGLDIAKSVFQVHGIDADGQVVIRRQLKRRYVLAFFEKLAPCLIGIEACASSHHWSRQLRALGHMRLMPPAYVKPYVKRQKNDATDAEAICEAVGRANMRFVPTKTPEQQSGLVIHRTRHLFIRQQTSVINAIRAHCAEFGIVAPVGRRGVEELLNVIANEKQVPGIARACLLALGAQLRRIKEQILEFDRMIAAWHRSCETSRRLDEIPGVGPALATALVASIADPRAFRSGRDFSAWIGLVPKQNSSGGKPKLGSISKQGDRYLRGLFTAGALAVIRYAKIHGPGHRPWLTALLTRRPIKVAAIALANKIARMAWAMMARGERYREPVALTA

SEQ ID NO: 396668 - protein, 348 aa, unidentified
MDHIAIDLGSRESQVCVRTATGEIVEERRVGTRSLRAYLAKRPRSRVVLETCAEAFAVADAATAAGHETVVVPATLAPSLGVGERGVKTDVRDSRNLSEASCRMSRLPAVHVPTKTSRDRKAMCGAREALVQVRTKLINTVRGWVRPQGWGVVRSGSPETLPMRVQEHVASRGGSIPAYVERLLTTIHALSLEIAAADEELEAAAAADPTCQLLMTAPGVGPVTAVRFAAAIDDVGRFADAHRLQSYLGLTPGERSSSEKQRRTGLTKAGPSKLRWVLVQAAWVARRYYKDHQLVAWSKVVESRRGKQIAVMALARKLAGVLYAMWRDGVPYDRQHGLRNPRIVPVSD

SEQ ID NO: 396669 - protein, 344 aa, unidentified
MDYFAGLDVSLDTVNVCIVNDTGDVLLERKIEAEPAVIADLLTRFGHPFKRVGLEAGPTSSWLHSALREAGYPAICLECRHVKAGLSAMRNKTDRNDARGIAHLLRLGWFRQVHIKSDEAQQVRMALVSRQQLLNKTHDIENVVRGSLKVFGLRIGIVTRRAFEERVLELVADHPILLAITEPMLRVRQTMIEAFEGLDRMCRQLARRDTVCRRLMTIPGVGVVVALTYRAGVDAPERFSRSRDVGAHFGLTPRRYNSGQTDFDGRISRCGDEMVRTALYQAAHVLFHHGPWSSLRSWAMRLAKRGSVKVAKVALARRLAVIMHRMWTDGTEFRWSATPGSAAA

SEQ ID NO: 396670 - protein, 483 aa, unidentified
MKPKRVEKNKKASCRPTPNNWHKMNHKQRREMTRKIQSEDLSLEVVHPHAAGIDIGNESHYVAVPPTRDSQPVRRFGCTTWELKEMAVWLKECAIRTIALQSTGVYWIAVYDILEDAGFEVYLVNARETKNLPGRKSDVQESQWLMKLHTYGLLRNSFRPSQEIRTMRTYWRQRNDLVRAAGRHIQRMQKALTQMNIQLANVLSDVSGMTGQAIVKAILAGERDPYQLAALRNWRVKASEEEIARSLEGNWQEDLLFVLQQEQDGYEFCQKQIAECDQRLQQYLQQLEDRSHGAGLPEEKRKERLRKKKKGNAPQFDLRAELFRMTGTDLTQIDGIDVTTTMTILSEAGWDMSKWKTEHHFVSWLRLCPDNRISGDKIIGKGRLPTNNRVTNALRMAASTLRLSNTYLGAQFRRLRTKLGAPVAIKAMAAKLARLVYRMLRYGITFIDRGAEFYDAQHRKMQINYLKRKAANLGFQIIEAPAA

SEQ ID NO: 396671 - protein, 332 aa, unidentified
MSAVVCGLDVHKETSYATVLDRDGQVLVQRKMMNEDIPAFLEMTHPDKLAMEASTYIIPLYRKLTESGYDVTVSHPRKTRLIAEARIKSDRVDSRALAELLRLDSLPTSYIPPRDIAQIREKVRRRAFMVRQVTKLKVKIRDVLAAEGVKTPEGFGLFTAKGVEWLRSLNLEPVDCYLRLIEPLKNEVKHVSGDLKRSAGKDDEVQLLMTIPGVGYYVALLVKSEIGDVRRFSSGDHLASYAGLVPSTRSSGGVERHGGITREGSRWLRWAMVEAAMVHIRYDTPVTRFYHGVAERRGKRAALVAAARKLMEVCFSVLVHGRPYFNPLDAQA

SEQ ID NO: 396672 - protein, 362 aa, unidentified
MKKVSRQLPKMEAGIAKPEMTLGLDLGDRYSHYCLLNGDGAVIEEGRVQSTEAALRRHFEGDPCLRIALECGTHSPWVSRLLTTLGHQVIVANARKIPAITGSESKNDRNDAEKLARFAAYDPMLLAPLEHRSPERQLDLNLIHARSTLVRARTMIVNALRGLVKSAGGRLPVCSTAALPVLAAPVIPAVLVGVATPLINQIALLNAQINGMDKQVEKLSTKYPEISLLRTVPGVGPIVAAAYVLTLERPDAAASNRSAGAFLGLRPGQSQSGASDPQRRITKTGDSCLRSLLVQSAQYVLGRFGPDSELRRWGLKLAATGGKRGKKRAVVAVARKLAVILHSLWRSGERFQPFPQSAAAAA

SEQ ID NO: 396673 - protein, 355 aa, unidentified
MERYIGLDVHAASCTLAVVSEKGRKLRDFPVETNGQALVEAVRMIPGHKHRVLEEGLQSAWLYETLGPHVDEIVVTGVTQSRGPKSDKRDAYGLAEKLRVGDLDKAVFKAPRQFTLLRELSRTHLTLVGDVVRVQARIKSLYRSRGIFVSGMNVYGPHQREEWQKQLRSSVQARATRLYDHFDFLLEQKKQAESDLLREAKKHPMVRILETAPGFGPIRAARLVPIVVTPHRFRTKRQFWSYCGLGIVTRSSSDWVQATDGSWIRARVPQTRGLSRQHNHFLKSIFKGAATTVITQRNKDPIYLRYERLLNGGTKPTLAKLSLARMIAATVLRMWKDEEEYDPGRGGPSTATREG

SEQ ID NO: 396674 - protein, 322 aa, unidentified
MKKTVEYEQVFERGCGMDIHKDSVYATVMGEGINTETRVFKTTTRGLRELGAWLTELDVKAAAMESTGIYWKPIFHVLSEFPINLMVVNASHIKNVPGRKTDKADSQWICKLLISGLLKGSFIPPADIQKIRDLYRYKKKLVHYISSERNRIIRALEDANVKLSSVISDTSGVMATHIIEGLLAGRKDLKNLVMERYHHRVKASPEEIVEAIDGKITPHIRFLINCIQKHISALHQQIAEVDAEIDKYVKAYETQIELLESIPGVGREGAISIISEIGVNMDFFPSEHHLASYGGMCPGNNESAGKKKVVERAKGINILTHI

SEQ ID NO: 396675 - protein, 354 aa, unidentified
MSQKHSSEVAVIGIDIGKNSFHLVGQDRRGALVLRQKWSRGQVEARLANLPPCLIGMEACVGAHHLSRKLRSLGHDARLMPAKYVRPYSKGEKNDYRDAEAIAEAVQRPTMKFVATKTAEQLDLQALHRVRERLVSQRTGIINQIRAFLLERGIAVRQGLHFLRAELPGILAKRTDVLSPRMLRVIEDLAGDWRRLDERIESLSAEITRLVEQDPACQRLMTVPGIGPLTSSAMVAAIGTGDVFSKGRDFGAWLGLVPKQMSTGDRTILGSISRRGNRYLRKLFVQAAWVVLVKVKPQQWERYGLKSWIEAANKRLHRNVLAIALANKLARIAWAVLHNGRAFECVKTNAPRPA

SEQ ID NO: 396676 - protein, 445 aa, unidentified
MHYKRLLTWIDGSSSYLSVGLDVGADFTWMSIALPNGAFIGKPFKIVHSDPRSRDLAVTKIKEAQETYSLKSRCFLESTGIYHIPLLCFLRDKGFDCSVINPIITKNSTNINIRKLHNDKFDSKKAALVGLNVSLKTSIIPEDSIVDLRNLVRDYYYFKDLQSAVALKLTAELKMSFPAYAKVFSKVTTQSSLKLLSSYPLAGDMLEASKDDIVETIRSTARFGEAYALRKYDAVIAAAQDASVFGRALPSNAVRIRLYIDTYQEYQKHLDALLKALHETVERLQDTLIYDQICLLQSLRGIGFLSAVVLIAEMGDFKLFPSPKKLYAYFGLDPAVKQSGKLNGDKVHMSKRGSSLARRVLHMVALNNVKVDKGSGTPVNPVIYDYYTRKCSGKKKPVAMGAVMHKICNIIFAMLRDNKPFEIITPEEHCQRFAAEYPDKIWKAA

SEQ ID NO: 396677 - protein, 321 aa, unidentified
MTQESHFVGIDVSKARLDIAVIPTGEQWSVSNDDMGIDKIVQLLRKIQPVRIILEATGGMEVPVTVALAAAGLPVVVVNPRQVRDFAKATGKLAKTDRIDAQVLARFGQAIRPPIRPLPDAATRELNTLLTRRHQITEMITSEGSRMMTVSGRVRANIEAHIDWLKDCLKQLDKDLEDALRSSPIWQEKDNLLQSVPGVGKVTSSSLLAGLPELGTLNRKQIAALVGVAPLNRDSGTLRGQRTIWGGRSHVRAVLYMAALAATRWNPVLKAFYLHLLSKGKAKKVALTACMHKLLIILNSMLKHRTTWNHATITQFIGPCS

SEQ ID NO: 396678 - protein, 343 aa, unidentified
MQAITTIGLDIAKSVFQAHGVDVEGHVIIRRQLKRRYVLAFFQKLPPCLVGIEACASSHHWSRELKALGHTVRLMPPAYVKPYVKRQKNDTADAEAICEAVTRPTMRFVATKTPEQQSCLMLHRTRHLFIRQQTAVINSIRAHLAEFGIVAPVGRNGVEQLLGVVADSNDRRLPEVARACVAALGAQLQTQKAQILEFDRLIRAWHRSSEASKRLDEVPGIGPALATALVASVADPKAFRSGRDFSAWIGLVPKQHSSGGKDRLGSISKQGDRYLRGLFVAGALAVIRYAKIHGTRHRPWLTALLARRPTKVVAIALANKIARMAWAMMAKGKPYKEPVALAA

SEQ ID NO: 396679 - protein, 389 aa, unidentified
MLQSNDLSRPFTALNQDSSLIVVIEMSQSSWLVAGMIPGIERQPLKKLEPDEDQLLKLLSRWRHEARHAGHAIERVVVAYEARRDGFWLARWLRERGVEAYVIHPSSVAVSREHRRAKTDRLDSELLMRAFLGWLRGERRHCSMAAIPTIEEEDAKRPNREHEKLVGDRTRLVNRMKSTLARLGVRGFKPTLRRAEDKLTELRTAEGTPLPENTRDELRRDMGRHRLVREQIKEIERQRLHKLEAATPAGKGPHAMIQLIAQVMGIGVETADMLVNEVLSRHLRDGKAVARYAGLTGSPDESGKRRREKGLARAGNARVRRGMIQLAWRFLRFQKESALAQWFCARAADGRSSTRKTMIVALARKLLIALWRMAKTGEIPEGVILRPVA

SEQ ID NO: 396680 - protein, 338 aa, unidentified
MERQYVAIDLHKTRSLIVRDNAAGEELAVVRINNDPVALAAVVAEAGPAPEVAIEATYGWYWAVDVLQDIGAHVHLVHPSGLNWEERRVKNDYRDCRELLDRMHLGKLPESWISPPDVRELRELVRYRGKLVAQRTSVKAQVKAVLAKHGLHPPVDDLWGPGGTRYLDELELPDAYAVKIVSLRQLVEVFDREVAMAEAETRRRLADHDGYRAIQVISGVGPILAAVFVAEIGDVGRFESPQHLCSWAGLTPKHRESDEKVWRGRITKKGSTLVRWAAIEAISKIRGGPKIQADYHRIAERRGKHIARVAAARKLLTLVYYGLRDGEIRCLVRADEAG

SEQ ID NO: 396681 - protein, 395 aa, unidentified
MSAEGEAIRSNDYRKDTTVKAPSTRPGAVLGLDVGKSSHWACLIDRGGEVLASAPVRNREAELDALFSSAPAGTLVVVDQFRNIGSLAVRRARAAGLAVAYLPGLAASRAAGLFAGEAKTDERDAEVIARTALGVPDSLSGVPGRGEALEAARALSSQRDHVVACATRDKNRLRAVLLESCPALEAAVDLSDRRWLELLAGFGGAWGIARSGAGGPRAEAAGEAAAASTAPPPALVEAENRQVRFLAARISEALDEAGALEAETAALLEGDETYACLLTVPGIGPRTAAQLAVSVDIGRFPDHDHLASYCGIAPRVRSSGTSVRSVRASRRGDARLKSLLIFSCNSLVRSSGRYGEYYRACRARGMGHGRALKAVARKRLRAIYAVMRDRVPYRE

SEQ ID NO: 396682 - protein, 419 aa, unidentified
MTVDIEKAGGTALLFIGDDWAQDHHDVEIQDESGRRLAKARLPEGVVGMARLHALIGEHLGDLDGVGTDEVAVGIETDRGPWVRALVAAGYQVFAVNPLQAARFRQRRSVSGAKSDAADAHTLADMVRTDRHQLRLVAGDSELAEAIKVVARAHKTLIWERTRHVQRLGDALREFFPAALMAFEDLTSPDALELLGKAADPTTAARLTRTQITAALRRAGRRHVADRAEQIQTALRSEQLTQPPAVAAAYAATVRSQVAVLATLSAEVKTMQGEVEAHFGRHPDAEVYLSQPGLGAILGARVLAEFGDDPHRYADAKSRKNYAGTSPITRQSGKQKFVLARYVHNDRLLDALGRQAFSALSASPAARAYYDQLRQRGKDHNAALRQLANRLVGILHGCLKTGTLYDEDTAWPPSQEAVA

SEQ ID NO: 396683 - protein, 457 aa, unidentified
MKDKEAKLQSNIVTMPLVHACAAGVDVGDTLHSVAIPEGIFAERVKTFGTMTCDLEAMAAWLLQGKITTVAIESTGVYWKPLFSLLNKKGLEVYLVNSRQTKNVSGRKTDEDDAMWIQKLHSCGLLKSSYLPDDEQEALRTLVRYRHTLVQDCSRFKNRMQKSLELMNIKFHTLFADIAGKTSIAFIEAILAGERNSQNFLPLVDGRIKASKEEILKSVEGNWRSEHLFTLAQSYEMNKVYLQKIAACDTAIEERLQCYQAFANDGQCGEPVNENTAILKPVLKKKKQRGAPVFDVRSYLKKIYKVDVLAIYGLSEMGGLEILAETGVDLKKWPTENHFKSWLNLCPNNKISGGKLISSKLLKKKPNAASQAFRIAANTVQRSNHWLGDYFRRMKSKGGNKFAVVATANKIATIFYKMVVQQKDFMPFDLEAYQQKYKQAKIAFYEKKLKQLKAVAA

SEQ ID NO: 396684 - protein, 423 aa, unidentified
MTAVGSKAWIGVDIGKTHHWVCAVDESGHKLLSVKVLNDEAQIIEVIAAVKAVAPDRVWAIDILGTPSALLVALLAKADEQVRYASGRVVAAMSAAYSGEGKTDAKDAYIIAETVRIRSDLSVIDADADLVRTLGVLTGYRADLVADRVRMINRMRDLLTSVFPALEREFDFASCKGALVLLSGYATPEAIRRMGEARLSRWLRQRRVRGYADVAARAVAAAQTQQTVLPGQDVAASIVAELANSVLVQHERLKVLEQQIQDTFAQHPQADVIESIPGFGPVLGASLLVAAGDLAAYPTAGHLAAAAGLVPVPNDSGRRAGNLHKPRRYSRPLRHALYLSAQTSMMRAGPNRDYYLKKRDQGRTHSQAVIALARRRIDVLWALLRDNRTWTPPHRRGLKLLDNTIEIPTFRALPGLRPRPAAH

SEQ ID NO: 396685 - protein, 356 aa, unidentified
MAADARSSSPRDESVRIGGLGIDVHQDFYVVVEQVGGSNPKPPQRFQKEAFLFWAARLKQKSGAEVYAVYEACGFGFSLQRKLSALSIRCYVVCPQKLDEQNRRVKTDGLDAKALCLKLDRFVQGNRDALATVRVPSEEEEQERAIHRQREQLVKARKQLEAQGRSLMVNHGLEPVYNWWKPRTFTALDAPQWMKELLANSQPILVALQQKIAALTVQLQSAASPEQPRGLGKMTSLIIDREIGDWKRFNNRRQIASYTGLCPGEYSSGNTRLQSCVTKHGNPRLRAALVELAWRLVRFQPNYHPVRKWRQILAKGALATGAARKKAIVAVARQLAVDLWRIKTGRLRAEELGLIN

SEQ ID NO: 396686 - protein, 406 aa, unidentified
MNMNAVGIDVSKRKSTVAILRPGGKVVVKPFDVPHLSADFQSLKRLIRQLDGETRIVMECTGRYYEPVARELSQAGFFVSTVNPQIIHNFQGQDNPLRKVKTDQADSIKIARYTLDSWANLKQYSPMDELRSQLKTMNRQFDFYMKHKTAMKNNLIGLIDQTYPGANTYFDSPAREDGSQKWVDFIDTYWHVDCVRKMSLSVFVDHYQKWCSRRKYNFSKSKAEEIYGKAKELLPVLPKDTFTKRILKQAIDQLNATSQTVEQLRTLMNETASKLPEYPVVMAMKGVGPSLGPQLMAEIGDVTRFTHKGAITAFAGVDPGVNDSGDYSQKSVRASKHGSPVLRKTLFQIMEVLVKTKPDDAVYWFLDKKRSEGKPYYVYMTAGANKFLRIYYGRVKEYLSSLPESE

SEQ ID NO: 396687 - protein, 386 aa, unidentified
MQKLNDLSRSLTALEPNGTLIAVIEMSLSSWLVAGIVPGVERQPLKKLAVDESALLKLPHRWREEAEKAGRRIERIAVAFEAGRDGFWLARWLKARGIEAYVIHASSVAVSREHRRAKTDRLDTELLKRSFLGWLRGERDHCKMVEIPTMQDEDAKRPNREHDSLIGERSRIVNRMKAALVRLGIRGFNPKLKRATMRLDGLHTPEGEPIPPNALAELRRDMERRRLVNNQIRQIEEERLERIEQAPCDGAHVMVRLLARVMGVGIETADMLVHEVLSRNMRDRRAVARYAGLTGSPDESGRKRREKGLARSGNARVRRGMIQLAWRFLLHQKNSALTKWFRSRTESARGTRKPMIVALARKLLIALWRLMREGIVPDGVVLRPAQ

SEQ ID NO: 396688 - protein, 402 aa, unidentified
MRVVHERCAGLDVHKSSVVACALLPEGKQLRTFGTMTWQLEQLADWLRSLEVPVVAMESSGVYWKPVFNVLEAAGFELLVANARHIKAVPGRKTDVKDAEWIGDLLRHGLLKPSFIPGREERELRELTRYRRTLIEERAHEVQRLQKVLEGANIKLEDIISNVVGLNGRRFLGALIAGDYDPQAVAATANYGLQRKRELLAQGLRGSIGSHQRFLLDQLLSHIDFLEQRITALDRELKQRSLPFEAAIAHLDQIPGVGTRAAEEILAEIGTDMSRFPTHRHLASWAKVCPGNNESAGKRRSGYAGKGDRWLRSILVECAWCASRKKDSYFKAQYHRLAARRGRKRALLAVGHSLLTLIYHLLREGVLYQDLWLQLLRPTRPLTDRSPSSPQAGAPRLSSSAH

SEQ ID NO: 396689 - protein, 316 aa, unidentified
MESQRPFVGIDISSQRLDVDTLPASQPFFKPHTEEGIASLVQHLKPLNPQIVLLEATGGYEISVAYALYEAGLPVVIMNPKALRHFAKAIGKLAKTDKLDAQVLALYAQKIQPPVRPLQDQEQLELANLMTRRRQLQGMIVMEENRRRTCTPRVRGNIDRSLAHLRQLLKDLDREIHDSIRRTPLWHENSEILQSFTGVGPKVSASLIADMPELGTLPRGKASALAGLAPMNRDSGQFRGKRMIQGGRPAVRQALYMAALVASRHNPVIKEFYQRLRLAGKPAKVALTACMRKLLVILNAMLKNRTYWNPQLPLAA

SEQ ID NO: 396690 - protein, 346 aa, unidentified
MKVLIGVDPHKASVAVAALDEAKGELLERANFPQDRAGLRALERWAKRFCERRWAVENAGGLGRHLAGRLVAAGESVVDVPPKLSARVRVLSSGSARKNDELDALATALAASRNERPAAVDPEAASEVLSLLSERREDLVAERTRALNRLHGLLRDLLPGGVARKLSADRAARILRGIRPQGASDRLRRRLASEILRDVRTLDRKVADLERRIEVEVEASGTTLTEIFGVGPILAARIIGAVGNAARFPSKAHFASYAGTAPLEASSGEAVRHRLSLLGNRKLNYALHMVAVCQARSDARGGVYYRKKIAEGKSRKEALRCLKRRVSDAVFRSLVVDLQAPSCSAA

SEQ ID NO: 396691 - protein, 371 aa, unidentified
MEHTRFIGLDIHKERISIAVAESGRSGAVEYFGEISNDPVAIGKLCDRLRRPGKTLAFCYEAGPCGYGVHRQLTSLGHRCDVVAPSLIPTRSGDRVKTNRRDATMLARLHRAGELTPVWVPDADHEAMRDLVRLRSVVRQIVTRARQHLQGFLLRHGRKHGRGTAWRMAYRRWLSTLAFEHPAQQVAFQDYVDAVMDAERRLQRVEEQISGLLPEWNLRPVVDALQAMRGIALITAVVLVAEVGDFTRFASPRQLMAYFGLVPGERSSGETTRRGGITKTGNAHARRALVEGAWAYRMKARIGRHKVDRIEALPKVVRDIGWKAQVRLCTRYRRLSARGKTANVVNVAIAREMVGFIWSIACTIQSAPKTA

SEQ ID NO: 396692 - protein, 467 aa, unidentified
MGLKKYNKHFNNIQGKKGSQFSSQLRGINLEKVLIVAIDAAKFFQKALICNYFGDVIEKPFFFGINQSGIQDLCSRIEKAKNEVLAERIFIGVEATGHYYEDIVRELGKCGYGVTIINAATTYEERASALNWSKTDDLDLYAIAHALIQNKGMENKLPEGIHRQLMILTRARRNEVRKRALLRVQIRTLMDHVWRDYQGYIVMENNRPKRKLIFSDFWGMSSLFFMENYPHPSSLLELGVDGIRKVAKENKLRIKESTIQTLLSVAKQSIIRSKEEVSAELLLLRLAIQDLRRLDENVRVIEKEIEQMLLQTDGRLLLTVPGIGVVTAAEFYSELGDISHYTHAGQLIKKAGTNPIIIQSGGVQGFYGRISKQGNKNLRFMVYTVGKCLAQHNRDLHPYYKKLLDRGKHPRKAFIALGNKFIKIAFSMLKHKKPYESKQADYSYFEEIKKKLVYTKMKDFLTIVLAA

SEQ ID NO: 396693 - protein, 340 aa, unidentified
MEKRYIGIDLHRNHFTCCVRLNNGRSYLSQWRLEDLPRFVKKLRPSDELAVEITGNTRLFVDAGASQVGRIAVVDTNQFRVISRSVKKTDANDARLLALYLSKDLLPEVRMKDKQHGQLASLTQTRETLVKLRTALKNKVNNILSARGINLPKEALSSEKKLNEILALPFDELVQIELRIIVEQIRSLNKSIVELEKTIAEEASKLEGHKNLISIKGIGKITSAILLSVIGDISDFPDESRLASYFGIVPRVANSNETERSGHIHKRGTKLGRTALIQSALIAANYSPYLKNFYVRVKVRRGAGKAIIALARKFLGIIYRTLKNKWVFEDFTNFTLAEAA

SEQ ID NO: 396694 - protein, 411 aa, unidentified
MEVVVERQSALDVHKAQVTACVRLPDGQGGRRELVEQFATTVAGLLVVADWLRAHQVTHVVMEATGDYWKPIWHVLEDDFELMLVNARHVKQVPGRKTDVSDAAWLCRLAEAGLLRASFVPPKPIRDLRLLTRYRRTQIAERKREAQRLHKALEDTGVKLDCVATDILGKSGRAMLDALVSGTTDPQVLADLARGKLRKKIPALREALRGRFEAVHALLIGSILAHLDFLEEHISGLSEAIEEQIAPFAAARDLLMSIPGVGQRTAEVLIAEIGTDMTQFPSAGHLASWAGQCPGNDQSAGKRRSGRTRKGSKNLNIALKDAAMAALRTNDSYLQALYRRKKSQLGHGRAVGAVKHSMICAAWHMLSTGELYTDLGGDYYTRRNPERQTKRLVAQLERLGHDVTLQDANAA

SEQ ID NO: 396695 - protein, 350 aa, unidentified
MKKNSKTVKQHPAETIGVDLGDKMSCYAILNEAGVVVEEGSFRNNVESIAKHFGKQGRARVALEVGTQSAWISREFSKLGHEVIVANARELKWITASDTKNDRNDAIKLARLARADRNLLAPVEHRTAEQQAELAVIRARDALVKSRTLLVNTARSVAKGFGVRLPACITPTFGARALARLPQHLHAAMKGLLEQIDALGVKIRDYDQGIAEVAAKHPEVELLASVPGVGTLTAATFVLTLGRKERFAHSRDVGSFLGLRPRQKQSGERDPKLGISKCGDKYLRKLLVQCAHHILGHWGKDSTLRQWGLSKSDGSPGKKRAVIAVARKLAVLLHRLWTTGEIFKPFPKMV

SEQ ID NO: 396696 - protein, 327 aa, unidentified
MMFIGFDISKDKVDLCWLRDPITNKKKTKVFKNNHLAFKEIKQWLLSTTKTIAEEIVITVEPTGVYHEPLMYFLYQQGFNIILANPSKAKKYAEALNVVHKTDRSDAIMLASYGYAKQSTVNFWQPEAKEIRELKSLLRRLDALESNKQREQNRLEASEFNATSERVTQSLKETINFLDDEIKKLKSDIDSHINSFPDLKKNRTLLETIPGIGPVMSRELTYIFAAKNFSRAKQAAAYCGLIPRLHESGKMKGHTTMSKLGPSKIRSKLYMAAVVAGQWNYKIQQQKIALLNNGKTSMQIIGANMRKLIHICFGVIKNQEAFKLQES

SEQ ID NO: 396697 - protein, 404 aa, unidentified
MIFVGVDWAEVHHDVCVLSEAGAVLARKRIPDTPSGLGALHELLAPHADEPDEVFVGIEKDRGLIVTALLGANYHVFALNPMSVARYRERHVTSGSKSDSGDAKILADVVRTDRFNHREAIGDSESVDAIKVLARAHQGAIWSRQREKNALRSALVDYYPGALSAFGTGLDDGDAVEVLAIAGTPALGAQLSLAKIMSALRRGGRTRNLERRAKEIQGALREEQMRERPRVELAYGKITSAHVAMIRGYNTQIVELEKALTEDFEQHPDAKIIRSLPGLGIVLGARVLGEFGDDPNRYADAKSRRNYAGTSPITRASGKSRVVLARHARNKRLAAAADQWAFCALGSSPGARVYYDNLRSKGKTHRQAIRQLANRFVGILHACLDQRVEYDENFAWKHLEDIAA

SEQ ID NO: 396698 - protein, 337 aa, unidentified
MECSKMNHCGIDTGCKTLDVVVRKKGKSLTCRSFENTPAGHKELLKYLRKHKVNRVGLEATGYYHLDIAIELDDATDIDVMIINPRASKNFASALMTKLKNDAVDAEVLAIFVERMDFIIWSSPDHQVFALRACGRRLITLTKEKTKAKNQLHAFSMTKHTPAFIINDIKLTIEQLENQILNIVKNALAIIHENNKLAKRYNHLVSMKGVADKTAIKLLGELGVLEADMKGKQWVAHAGLFPREFQSGTSVNKKTRIGKIGNRYIREALYMGALSASRHEPHVRAFYLHLINDNGLTKLQAICAVMRKMLLAIHGMLINDKPFNGQLFYRLDEAQAN

SEQ ID NO: 396699 - protein, 445 aa, unidentified
MSEALITAVSEPEWAAFAAIDWADQKNFWRLLPAGSQRQEQGELDNTPEAVEVWAAGLQQRFSGRRIAVILEQSRGALVYMLAKYPHLVVFPVHPTTAALYRETFCPSGAKADPSDTASLLDLLLRHRERLHQLRPDTVETRLLQFLVEERRRTVDERTRQSNRLVDCLKLYFPQVVQWFDDLTSPLVGDLLERWPGLEQLQRAHPGTLHKFFHEHNCRGEKRMEERIQAVYQAIPATQDAAVLEAGAMRARGLVRLLATLRDQIAALDRRIAELVLAHPDGGLFGSLPGAGPALIPRLIVAFGTQRDRYQAAYQVQCYSGIAPVKEASGKTERVHFRLACPKFLRQTFHEFATHSIGRSEWATAYYEHLRDDEKKSLHAAVRTLAYKWIRIIFRCWKDGKPYDERVYLDSLRRRGSLLGAGLKAATRPEWKTVGGFQKLSENNA

SEQ ID NO: 396700 - protein, 408 aa, unidentified
MKTLHNRCAGLDVHKVEVVACLRLVRRRKVEREVRRFLTTTRGLLELAEWLERGGCTHVAMEATGGYWKPVWHLLEGRFELVLANAAHVKNVPGRKSDVNDATWLADLLAHGLIRESFVPPPAIQELRDLTRTRKQLTREIVQHVQRIQAVLEEANVKLSSVITDLLGPSGRRILTAMIAGEMDAAKLAALGSERLGCPRATLVEALTGRVREHHRFLLAQHLQTIEQLEGSVAAFDARIEAALAPFRDTIGRLNEIPGIGITAVQTIIAEIGTDMRRFPTAGHLLSWAGLVPRLDESAGKRRSTRIRKGAPWLKPVLVQCAWAAARKKSSYFQAQFLRLKARHGAKKAAVAVAASILRTVYHMLGDGTCYRDLGPQHFARRDPDRAAARLANRIRNLGYHVEIRPAA

SEQ ID NO: 396701 - protein, 327 aa, unidentified
MEQRVLGIDVAKETLDIVLSDGIHMYHNQFQNTQKGYELLEMWLQKQRADDIHVCLEATGQYGDGVAEYLYLRGLTVSVVNPARIKHYGNSKLRRNKTDKADAQLIAEYCLSQKPVVWSPPPASFKDLQALVRHLEDLQITRQQEVNRLASGVHTTIVIDSLRALLAFLDEQIKQTKKAIQDHIVQHEELKCMQALLVTIPGIGKLTAAKLLGEIRNILDFQSARQLAAYAGLTPRNFLSGTSVHKKSRLSKTGNANLRHILYMPAIVAKNHNPIIHIFCERLSQSGLKPMEVIGAAMRKLLHLVFGILKSGQPFDPNYLNNVNASS

SEQ ID NO: 396702 - protein, 328 aa, unidentified
MSKQVIYVGIDVGSQELVAALEGRRPRSFKHSQTGIREMVAWAGRIASGAIMQFCLEATGVYGYSVACRLFREHGCPVSVINPAQIAAYARAQLRRTKTDFVDAQVILSFAASQKPPLWKPESNVLRQLYLLVTEADRIRQEQTQWSNREHTRKYQDDLPQVIKQSRKAVQRTLKRQLEKIEKATTNICKQNDDIKQQVELLCSIPGIADHSAVRILAYAKSALWNLDRRALTAHAGLAPAHKQSGTSINGKSRIAKQGDRRLRTALFMPAVVAAHHNPILKIFYQRLLEKGKPKMLAIVAVMKKLLMMIRAMLKNNLPFNPNYALDS

SEQ ID NO: 396703 - protein, 370 aa, unidentified
MGWTAPDGIECARLRVVITTAKGSRPMTIIRVGLDTSKSVFQVHGADEQERPVLRRQLRRGQIEKFFAKLPPTRVGLEACGASHHWGRVLRDLGHEVMLIPPQYIKPYVKRGKNDVIDAEAICEAMSRPGMRFVPIKSREEQAALMLLKVRDLLTKQSTMLSNAIRGHAAEFGVIGAKGPQKIKELLERIAGEANMPEPARELLNDLASQLAAVEVRLAALEAKLMAHHKADPRSQLLATIPGVGPVTAVNITLKVPDATVFRSGRHFAAWLGITPREHSTAGRQRLGKISREGDEGLRRLLVLGATAVIQQVERRRKAKKTSGNDSPWLLQLLARKPRKLAAIALANKMARTIRAMLVSGELYRRPQAA

SEQ ID NO: 396704 - protein, 383 aa, unidentified
MRNSAYAADREELVLAVSLELATASWKIACHDGRRDKPAVHTLTNPQAGVRLQAVLNLIERQKQQWSLPAGVRTVVCYEAGQDAFWICRALQAHGIECYVVDAASIPVARHRRRAKTDRLDAIKLVLNLRAWLHGERDRMHVVHVPSVQDEALRHLTRDRAELQKEVLQHRNRMGKLLRTLGCWDDLKHAFASRLARGEVRCYDGSPLSPEMHDRLLRECERLALARQQLAALEKARHQALPATVRERIDHLTRLKGVGQIGASRLVLELFWRQFDNRRQVGSCTGLVPQPYDSGDSHTDQGISKQGNRRVRSLLVEMAWYWLRYQPGSALAQWFRHRTEGTGANRRARRIAIVAVARRLVILLWHYLEDGVIPQGVQLKPSA

SEQ ID NO: 396705 - protein, 438 aa, unidentified
MRSVGLDVHKHFAEVAIVQPGQGIVSRQRLPVTPASLRTFATSLGPNDQVVLEASFNTWAVAELLGKHAGRVVVSNPMKTRAIASAKVKTDQVDAGILAQLLAADFIPPVWIPDPATRELRRMVSEHRGLVVQRSQLRNRIHAILNRNLVECPYTDAFGRTGLQWLTETRLPAAERREVDRLLRLLAALEREIEGLEMELAQARLVDSGLRHLVSVPGIGLITGVALLAVIGDVRRFDRPNRLAGYLGLDPRVRQSGDRPAYTGHISRQGQAHARGLLIEAAHSAIRVSGPLHAFYERVRARRGPQIALVAVARKLAVLAWHLLSKDTDYQWARPSLKAQKWRQVELRAGLPKRTVHGIWSQGNRAQEEAVLQQAEAAYQSLVAARRRQTDAAAPMRKRLEGQRPDARRRSHPQPPLFSRGSTASPTSIVPAEPAEKE

SEQ ID NO: 396706 - protein, 350 aa, unidentified
MEFFVGLDVSLDETHFCVVDEGGRIVKEGRCPSEPAALARSIRHKGRRIEHVGLETGGLSQWLFEGLTREGFSVSVMEARHVRAAFAAMRVKTDRNDARGIAQLVRLGWFKRVHVKSMDAQETRALLTMRAFLVEKVTATENSLRAALRNFGLKMGAVTRRTWEARARELAMGQEMLEQIVEAMLRVRRLLLVELEAVEARLLAQAKADPVTRLLMTAPGVGVVVALSFRSAVDDPVRFRRTRDVGSWLGLTPRRWQSGKTDIVGRITKGGDARVRTMLFEAATTLLGRVRLMSPLKAWGLRIAKRTCMKKAIVAVARKLATMLLAMWKSGTAFWATKREPASAQDFAPV

SEQ ID NO: 396707 - protein, 347 aa, unidentified
MNKIFIGIDFSKKKFDATAITADGLNETGDRKYDTFSNDVKGFRKFAKWCKGISGGIDPEDWLFCGEDTGGYSHPLSSWLYSQGYNIWLENALRIKGCNALKRLKDDKVDSAMIADYAMRHADKAELWRPLGESLSQLRELFLYRHRLVRHRCSFEVRNSEKNLTLEKSPVKKLMRHSSDRIIAQINREIAQCEKAIRELIASDEEINRIYGIITSMPGIGMINAVCLIVYTENFRRFGFNARKIATYYGVAPFGKYSGTSIHTEPHVSPFANRTIKSLLSQAALAAIRFNPMIHAYYHALIDRGKDKNLARNNVKCKLIRIITAMVRQGIAFDHNYNENKIVCLSA

SEQ ID NO: 396708 - protein, 354 aa, unidentified
MVVLGVDVHKDTHTTVAVDEIGREIGQKTVPARDRGHAALVRWARAHHPGGRMWAIEDCRHVSTRLERALLSAGERVVRVPPKLMAGARAAARTRGKSDPIDALAIARAALREPDLPAAEHDRTSRELKLLVDHREDLVAERTRMQNRVRWHLHELDPDLDIPSRGLDRLRVLDRLLAWLGQHPPAPQSQMVARIAAELLADIRAVTVRVNALERELSRLVEQVAPQLQAVPGVAGLTAAKIIGEVANMSRFRSEACFAMHAGVAPIPASSGRTNRHRLARAGNRQLNAALHRIAVTQARLPDIPSRTYYQRRLEMGNTKMEALRALKRRLARVVFNLLHTTTSTTTGPQPVAA

SEQ ID NO: 396709 - protein, 399 aa, unidentified
MSANSPLELRVGVDVGCHSHNVAIGLSTGQLLDEFDIPHNPEGFRLFFARIEKQEKKHGCPVAVAMEGFNGYARPLDTLVRGRNYRLFNVNNLKLARFKEIFPAPAKTDNIDARKCLELFQLRDHLPLAKAALLEVAATPLENEVLKRLTRRRRRLVSEKARVLNNMQVDLQAVCPGLLEITADAGNLWFLRFLTSADSLIKLARLQRSTLLKIPGIGVKYAANIQSWQKRSHFSQEAELVGEMIQEDAYRILDLHDKIQAMETKLEDISSRSVIAQKIETIPGFGAISKAELAGEIGTIERFKDEGSLALYLGMATLDNSSGKQKGTKSPKHVNTRAKAAMMIAVDRHRKFIPESQRYYEKKRAEGKKHNQAVRALGRHLCRVIFKMLKQEIDYEIRK

SEQ ID NO: 396710 - protein, 319 aa, unidentified
MQPSELFIGIDVSKSCLDGSARPTGLTFQQPNDPQGIAAVVDLLKPLNPTAVVLEATGGFEAPLAAALASAGLSVAVVNPRQVRDFARATGQLAKNDRIDAAVLAHFAQAIRPQPRPLPDAEVRALQALLARRRQLLEMLVMEQNRLGSCADDAVRADLEAHIRWLSERLKKAETDIEEAIQRSPNWLAKEDLLRSIPGLGPVSSRTLLSALPELGTLSNREAAALAGLAPFADDSGKRRGPRHVQGGRACVRSVLYMAALIAARYNPLLKAFKERLVRAGKKAKVILTAVARKLVVLANAVLRTGRRWDPSFATTATT

SEQ ID NO: 396711 - protein, 403 aa, unidentified
MQEATQHDAVDVFVGVDVDVGKGQHHAVALDRNGKRLYNKALPNDEVKLRALIAELKTHRRLLFVVDQPSTIGALPVAVARAEGVLVAYLPGLAMRRIADLHAGEAKTDARDAAIIAEAARSMPHTLRSLRLADEQLAELTMLRGFDDDLAAQLTQTSNRIRGLLTQIHPALERVLGPRLDHPAVLDLLERYPSPSAPAAANEKTLANRLTKLAPRLGKNLAAEIVQVLNEQAVIVPGTQAAAIVMPRLAQQLAALRKQRDEIAAEVERLVLAHPFWPVLTSMPGVGVRTAARLLTEAAPKAFATAAHLAAYVGLAPVTRRSGSSIRGEHPSRRGNKVLKRALFLSAFAALRDPVSRAYSSCKIQQGKRHNQALIALARRRGDVLFAMLRDGTIYPPKSAPNA

SEQ ID NO: 396712 - protein, 339 aa, unidentified
MTVKTVGLDLAKDVFQVHGISENGRVIFNKAIKRAKLLRFFETLPPCRVGIEACGSSHHWGRQLRKLGHDVKLMPAGYVKPYVKRGKNDAVDAEAICEAVRRPTMRFVEIKTEEQQAILSIHRTRDLAVRQRTQLANMIRSLLREFGHILPIGIEAVTAFAKRHLGGDHPEMPEIANGMLGIQCYQFLGLNERIDGYSKMIQQHALLNADARRLMRMPGIGPITASAIVATIGDAKQFRTGRDLAAWLGLTPLNKSSGGKERLGKITKQGDRYIRKLLVVGMTSRAVMAKRSPEKVDLWTAKIIADKPFRLATTAMANKAARAIWAMLTKKQEYRQPAF

SEQ ID NO: 396713 - protein, 392 aa, unidentified
MIYIGIDVAKEKHDCCIIDSDGVILNDSLRISNTLKGFELLYNSILSVLPDKDISNVKIGLESTGHYSTNIQSFLYNKGFKLSILNPLATNLFRKAQTLRKTKTDKTDALVIAKMLFSDDTKSYIPVSYQIQELKSLTRHRYRLIGYRSKLKISINRLIDIIFPELPKLLWSIHQSSSYALLKELPSPKDIESCHLTKLTNLLNKASKGKYTKDKAIELKTYAKDSIGTSNRSLSFELQQTIRLIESVQDEIKILDNQIKEVVTELNSPIMTIPGISYTLAAIILSEIGEIERFTTPAKLLAFAGLDPSTYQSGKYSASHTPMVKRGSKYLRWAILMASRTVCMRDLTFSEYLSKKRSEGKHYYIAMSHVSKKLLRVIFYLLKTDTAFVPQM

SEQ ID NO: 396714 - protein, 407 aa, unidentified
MAEHSMAYVAFDTSKLHNAVAIAESGRAGEVRYLGEFENAPAATAKLVRKLAAKHGALSCCYEAGPTGYGLYRQIKQLGHDCIVVAPSLVPRKPGKRVKTNRLDALSLAQQLRAGELTAVWVPDERHEAVRELTRARGASVVDWRAKCQQVSSMLLRLGRHYPGKTTWGKAHMAWLAGQKLEHLEQRIALEERLVAVRQAKERIERLERAIREAVPAWSLAPLVTALMALRGVDFIAATTLLAEIGDLSRFRTPRELMAWLGLVPSEHSTGEDTRRGPITKAGNRRARQILIECAWSYRHPPRIGAAKLSKVEAAPAAVRDIAWKAQTRLTGRYRSLCRAGKPDVVAITAVARELAGFIWAIARALDAGTAVADAKATVAACAGGSTARDCNSLVHGNLAALALPGV

SEQ ID NO: 396715 - protein, 427 aa, unidentified
MRFIGLDVHRDFCEVAISEGGKARRAGRVAAQPAELDLFAQSLAADDRVVLEATGNALAIARILAPHVGEVVLAHSRKVRAIAEAKVKTDAVDACTLAELLAADLVPRVWVGDERTRLLRRLVSRRRQLVKQSTRTKNEISAVLLRNLKGRPPVSDVFGKAGRVWLASLGLGIDERETVDAGLRQLDFLQGELGRVDRAIAEQALGSPEIRRLMTIPGVDVTTAAALMAAIGDVGRFPGPRHLVGYLGLDPKLRQSGVSKPRQGRISKEGSAAARHALVEAAWSAAKAPGPLRAFAERTAARRGRHIAAVAVARKLAVLAWHLLSQGEDYAYQRPSVVRRKLRRLELKTGAPRAKRQAGAAPLWGSRDQDDLERELARQAELAYRRLVTDWQRTQPRDGAGATPGRASSRPSKRQAARQDSAPRPAL

SEQ ID NO: 396716 - protein, 356 aa, unidentified
MPYIGVDYHKKFSFVTVIDEKGKCLREGRIGNSRESLDKFLEGYKEDGVAVMEATRNWTVMHDWLEEMVEEVKLAHPLKVKWIAEAKIKTDKIDANVLAQLLRCDLLPEAYVPGKAARVVKNILRQRMFLIRIKTMVKNRIHAIIDRHPELNEEKKSIGTDLFSNRGLDWMRELKLSGADQDLLEREIKLLDDIEARLSESNGLVRKYGKNDDRVKRVRTIPGLGDFFSLLIVNEIDDIGRFRDAKKLAAYAGLVPSTYSSGGKTFHGHITKQGNKWIRWAMVEAVWPAIRKDEELRKFYEEIKRRKGANLAKVALAKRLLTIVYRVLSQNRDYEERPYNRSSRLPSLFPGCYSNN

SEQ ID NO: 396717 - protein, 391 aa, unidentified
MIYVGIDVAKDKHDCFITNSDGEVLFKAFTITNNLDGFNELHQKIASVMDDVTKVKVGLEATGHYSYNLLEYLIDKGLPTYVINPLHTNLYRKSLSLRQTKTDKVDARTIASMLMSDVNLKSYSDISYHNEELKSLTRYRFDKVKERAKLKTSVSRLVCILFPELEKLVPTLHITSVYALLSEFPGAKHIATAHLTRLTNLLSEASKGRYGKDTAITFRDAARASIGSNMPAKSLELKHTIKLIQELDSEIDEIEKEIKIIMDEINSPILSIPGINYRMGAMIIAEIGDFNRFDSPDKILAYAGFSPSTYQSGQLDGAYAHMEKRGSRYLRYALYNATKYVCHWDPTFAAYLAKKRAEGKHYNVAISHAVKKLVRVIYHLEKTKQQYIKAA

SEQ ID NO: 396718 - protein, 384 aa, unidentified
MKINPELIKYKVTDSKNGITYYIIGVDLSKSKLDVMLDKHLVFANDEIGCTKLCKAIKEFDKNTVVVYEATGYISLNFAYILDKNGIRHCQVSPKKVRHHAKAGESEAKTDKLDCALIASYAVKYWEKLSIDSPMHENHVELMELNRVRNQYTESIRRVKQVLSTCSYASARTLLEEELQHLQELQQKIDTQIRNLMVKDEMTRHLLILLEQQMGVGKETAKTLVLELPELGKVNRREIAALVGVAPFNYDSGSHTGKRYTRFGRKKIRSLLYLCTRAALNAKDENDYKTRFAKLSSKPNLKGGRSYQQVMVACMRMMIVRLNAIVRDWIKAGCPDPTPVKKNKNSQTTTNEAATEASSTSVDETATNKAGKQKKSKATTKSKE

SEQ ID NO: 396719 - protein, 427 aa, unidentified
MEEVTDEPLYRDRVCGIDIGKAGMAATIRVPSDANPARRAQETRSFGTTKREVLALADWLRSWQVPAVVMEATGDYWKPVFYRLEAEGFECVLADARQVKHLPGRPKRDPSDSRWLAACFERGAITSCFVATPEFRIIREHTRYRRDLTAERTREKQRAEKLLESAAIKLSSVVTDLHGVTGRDIMDHLIAGERNPKVLAQLARARARRKISELEAALEGAEFFTPQLAALLARMLARIDQLNASIGELTAVVETLLEPYEEQLQQAESMPGWGRRSAQDAVAETGVDMTRFRTGGHLASWAGRTPLDNQSGSRSGRAKSKKGNRYLAAITGETAVAAGKTQTREGARYRRIARRRGKPKAGVALGNTQLKVYHKLLSTPGMRYEDLGVDYYDNRASTRRQVRALQKRASELGYTLVPDLTGCPEIA

SEQ ID NO: 396720 - protein, 345 aa, unidentified
MKKGITIGMDLGDKKHQVCILDKTGKIIAEEEVAGTRTAMASFFKRYRGAVVAMEMGAHSRWVSQIAAAVGLEVLVGNARKLRMIWQSRQKSDTRDAVMLARIARMDPALLCPIHHRGEQVQMDLEIIRARDLLVRERTRMVSHVRGVVKSTGERLAPSSAASFGHKARIPEALNEAMKPMLEMIRELTKKIHGYDLMIKDAATKKYPETEQLCQVGGVGPLTALAYVLTLEEPERFAKSRMVGSYLGLVPRLDQSGQIDKQLRITKHGDGYLRRLLVGSAHYILGPFGPDCDLRTFGLKLMQRGGKNAKKRAVVAVARKLAVLLHALWRSGAIYEPKRMQPLAA

SEQ ID NO: 396721 - protein, 342 aa, unidentified
MLYVGIDIAKNKHDVTALNVPGKTVLKPLTFSNNKAGFELLDLSLRQLNQDCLIALEDTGHYAFNLLNFLHEQGYKVYTYTPLLIKEFAKSLSLRKTKTDKKDAHGIALKLLSDPNREQFQHDNRQVELKILARHIHRLKRKQSDWKVQYTRCLDIIFPELDKIVGKHSEYTYQLLTCYPNPQKRLEAGFNKLIEIKRLTASKIQDILSVAPRSIGTTSSAREFEIIENIKHYKRLIDKAETCVNDLMAEFNSVITTVTGIGGRLGAVILAEIRNIHAFDNPAQLQVFAGLDSSIYQSGQIDLAGRMVKQGSPHLRWALIQAAKACARFSPAFKAYLKTKLE

SEQ ID NO: 396722 - protein, 365 aa, unidentified
MPQLWAGIDAGKTEHHCVVIDGNGTKLLSQRFKNRETAILTLMGDVASPPGGTDVAWATDLNHGGTGLLQTLLHSHAQPLFYISGRVVHHASGAYRGEAKTDAKDAVIIADQARTRRDVTLMRQADEVTAELRLLSARREDLVHDRTRAVNRLRAILVHYFPSLEGAFNYATTRGPLVLLTRYATPGAIRRMGESRLAAWLKGQGCWKSAAVAKTAVEAAREQTSVVVGEGAAARLVSRSARDLLRIRDEVAELDGEIEAALQDSRSADLLVSIPGFGRRLAADFLAATGTDLAAFDTPDRLASFAGLAPVPRDSGKISGNHHRPRRYDRRLLNACFQAAFIASRNCPVSRSFYERKRQEGKSHK

SEQ ID NO: 396723 - protein, 342 aa, unidentified
MCIVYVGLDLGSSSFQQVAISNDGAVIVNRSFSTSELNLRKAFSDLRGELQVHLEAGELAPWVSTVIAPLVQRVVCSHPAANSWIANDADKCDRIDAFKLAELLRLNRFKEVHYPQEQTRREFKTLVQHYDELTAQQARLKTKLKARLRMQGVIVTGERLFSSAGRKPVLAQVRSRNVRTAISQLYEVLDQSVAAQGQAKLLMLRAAQALPEIKLFRTVPGIGPIGSCRFSAYIHTPQRFSSKRKLWKYCRLSVSHRSSNGKPLRRPRLDRSGCGRLKDVSRKAFEVALHSRQDNGFKRAYQQSLQNTHDAVHARLTVQRKIVSTLRAMWLSHSPYREQLTH

SEQ ID NO: 396724 - protein, 450 aa, unidentified
MREPQEIEDEEHEQTWERVAAIDVAKASGMVCTRVAHPSRPGRRLTKVWEVPATTGAISELAGQLAGLGIQKVTVESTSDYWRPFVYLLQAGGLSVQLVNAREVKNVPGRPKTDRLDAVWLAKLTERGMLRPSFVPPAEIRRLRDYTRLRADLTQERARHDQRLEKLLEDALIKVSSVASKLDGLSVRDMLEALIAGERDPAVLAGLARGKLKAKHGALAEALAGRFDDHHAELARMLLDQIDALGGQIGTLTTRIEELLAAIPAAHGVDPDGTTGPGAGSGPDAVVLPAVARLDEVSGIGPGTAQVIIAEIGLDMDVFPTPGQLVSWAKLSPRTLQSGATRRAGKTGKGNPYLKGVLGEAAAAAAKTDTFLGERYRRLVRRRGKLKALVAIARSILVIVWHLLADPTARYHDLGAGYYASRIDKDKKARNHIRQLQALGFAVTLTPAAA

SEQ ID NO: 396725 - protein, 387 aa, unidentified
MIAVGIDIAKRTHEACFMGQDGQQIGKGRRFRNTRLGVRALLDDLQRLREPATIGLEATGHYWLALHDELVRAGHTVQVLNPLQTHAYRKTTIRKVKSDRKDAWLIADVVRIGRGRAAYVPDETILQLRELTRFRWGLVDQIGDAKRRALTILDRVFPEYESLFSDVFIKSSRAVLQQATTAAEFADADLDELASVLKKTSRGRLGQARAEAVQAAARESLGLTKLGGVAGFELRALLDQIAFVEHQVATVEQQIEMLLGTLEQHVTDIKGIGPMLAASLIAEIGDVHRFQRFESLVAYSGIDPTVFASGEFTATETHMSKRGSPHLRRALWLAAVSASSCNPDLAAYLQRRLEQGKPWGTAMGAVARKLLSRIYVVLRENRPYEVR

SEQ ID NO: 396726 - protein, 347 aa, unidentified
MLADQLDYVVGVDPHRDSHALAVVQVVSGAVLFEAAVSASSDGYANALKLVDQHAKGRRAFAVEGTGSFGAGLTRFLTANGERVLEVGRLRRERRSGGKTDALDAIRAARSVLTQNRPATPRASGEREALRALMAREGAVNAKRAGLCQLRDLLVTTPEPLRSELRPLTRARLLQRLAATRPERRHDPELRGALLALRSVARRVLQLTAEERELAREIETLTRKLAPQLLEQPGVGPLAAAQLLLSWSHRGRISSEAAFARLAGCAPIPASSGQTVRYRLDRSGDRRLNRALHMILVTRRRTHAPTIAYISRRTQEGKTKREATRCLKRYLARNLYRLLEQGAPPAT

SEQ ID NO: 396727 - protein, 370 aa, unidentified
MRVMYERVAGIDVHKDMIKVGIRTPGHRAWTRTSEVLEYRTFYGVLQTMARDLRKREITHVVMEASGVYTEPVYYALMEQDFDQVAVIGPAHAKALKGHKADAKDALRLAELSGCGLLRGSYIPPQALKDLRDLTRYRAKTVQGRTSEIQRLAKALESAGIKLDSVVSDLTGKSAGLMTGALIDGERRGRVLADLAIGRMRTAGKLADLSQALAGRFTDHHAVLCRLHLDRIALFNTAVAGLEAKIAVKVTSYQRELDLLKSITGFGDAVAQAWLAEIGPAPHEYFASCEKLASWVTLCPGNHMSAGKRKHGRTGNAGTYIKPMLVQAAWSAIKSQGRLQARYHKLVRRFGGRRTRPRSRKRSSRSPIPC

SEQ ID NO: 396728 - protein, 366 aa, unidentified
MKKELTGTNIEQGSGEGKCDRVLKLGLDMHYRQVTVAMQEEDGPIKAVGRMGHDGFENWVERKREAGWEIYSCYEAGASGYWLHRDLEQMGVKNLVVAPKAMGQDKGQKTDRRDSAELVDQLDRYLRGNRKALSAVAIPTAEQEQKRALLRFHRQIMADRSRYEARGKGLLCAQGIEVQGRWWQPQAWKELKTHGRFQGWMQTQLQGWRGKLLSAEQEQQKLRKQIEALAPALLPKGVGAYSAVALEYELKGLARFKTARALSSYTGLCPGIHSSDGRGKEGSINRCGNAAVRWNLVEMVWRLLKWQPNYQAVRQLAAGLVRSKRARKRLVVKAARQLAIDLWRLETGRVSAQELGLVMQPTSKTK

SEQ ID NO: 396729 - protein, 459 aa, unidentified
MERLVNRFRNRAAPAPISTKQNYAHKEEQSQQKSESAKSANSSPGCAGIDVGAKQHLVAVPADRDPRPVRTFQAFTPELHELAQWLKHCGIRTVALESTGIYWIALYEVLEQHGFEVRVVNARHVKHVPGRSKTDVLDCQWIQKLHSFGLLNGSFRPDQQIRKLRTYQRLQDNLVVNSAQAIHHMQKALFEMNVQLSNVISDVSGESGLRILEAIIAGERDPEQLAALCSSRIKASRQTVAKSLHGNWDPALLHCLKTALDTYHFTQRQIQECDLCIQRQLTEMDSRAPIPGTATSLKAQLYRVCGVDLTKIPGIKEQAAQIIISEVGLDMSKWNTEKQFSSFLGLSPDNRISGGKVLRRSTRKVYNRAADTLRLCAQSLTHSKSALGAKYRRLRARLGAPKAIVAMAHHLARLVYRMLRYGENYVEKGIEHYERKFRLQRIKWLKKEARALNLQLVAA

SEQ ID NO: 396730 - protein, 345 aa, unidentified
MELHTIGIDLGKTVFHLVGLNLRGEVVVRKKFSRIQLLRFTANIHVELIGMEACGGSHFLGRALREQGHEVRLIPAQYVKPYVKTNKSDYIDAEAIAEAVSRPTMRFVPIKTDDQLDMQSLHRVRERWVMRRTAVINQIRGLLLERGITLRKGRHHVHAALPLILEDADANLSGAVRLLLTQLKLDLDQLSVRIDEADAVIQKTAHENEACRRLVAIPGIGPVTATALIAAIGNGGAFHKGREFAAWMGVVPREHSTGGQQKLLGISKRGNSYLRRLFVQGARAVMQQRTKQSSGLSAWLAQLTSRTHRNVAAVALANKLARIAWAVLAKNEQYRPAVVADVAAA

SEQ ID NO: 396731 - protein, 315 aa, unidentified
MVDVPCFVGIDVAKAQLDIALRPAGERWAVPNDASGIAPLVDRLQALHPTLIVLEATGGLERAATAALAAAGLPVVVVNPRQARDFARATGQLAKTDALDARALAHFADVIRPTPRPLPDAQTQELRALLGRRQQLIVMRTAEQNRLAGTSARLAKDIAAHITWLNAGIATLDDDLETMLRASPLWRENDDLLQSAKGIGPVCARTLLLELPELGTLTRQQIAALVGVAPLNCDSGTMRGRRTIWGGRAHVRTVLYMGTLVATRFNPVIRAFYKRLLAAGKVKKVALTACMHKFLTILNAMLKHRTPWKAQEVQS

SEQ ID NO: 396732 - protein, 464 aa, unidentified
MTTQRIIGIDLAVTAAHRAIVLDTASNCFVSSVISFQANPADLDRVLEAARKGTPPETPIIAVLEATGMAWFSVGIYLQRHGVEVYRVNGRQTADQRRVYNRHAKSDRIDARVLPRLYLSAPERICRMYLPEPPVMELQRACRELDRLNRLISACKNRLLATDGFAWLGLQDVFKPYEAPARWLRRHWYSPWRVCEAGEAGLQQAWQEDPPEADQVLDWIPALVEKARQVVAFYGDPSPIDYPHLQDFLVRELNRLETCEAQKRFLQTKVIHRLYRQLYPQRFLETIPGVGQDSAAVYIAFIGDIQRFPSSNNFLGWTGMIPFSSQSGETQAKGLHITQAGPDLVKRTAFLDASIARLYDPQIAAVYYDQMMHKGKHYLQAICACSTHLLTRVFAVLRDNRPLELRDLDGTSVTKHQARTICKQRYFVPDEVRIQNNHRVRTQRRELRLEQRSQRAEQKQGSKG

SEQ ID NO: 396733 - protein, 379 aa, unidentified
MGDCSEVFVGIDTSKLRNAVAIADGGRDGEVRFLGEIENSEAATAKLVRKLASQYQRLTFCYEAGPTGYGLYRQITELGHECIVAAPSLIPKRPGDRVKTNRRDAVGLAKLLRAGELTAVWVPDRHHEAMRDLTRARETAMLDLRRKRQQITGLLLRQGRHYQEGNQERRKPWTKIHKAWLMRQKFEHPERRLVFEEMMLAMREAEERLARLEQAIRVAVADWSLAEVCTGLMAMRGIDLVSSAGFLAEMGDLNRFPTPSELMANLGMVPSEKSTGETIKRGPITKAGNRRARRLLVECAWAYRHPPRVGVTKQAKVAAAPRAVREIAWKAQHRLYGRYRALIRRGKLKNVAIAAVARELAGFIWAVNREITVAGAAAR

SEQ ID NO: 396734 - protein, 409 aa, unidentified
MDIVPIYKRVIGLDVHQAQITGCAIIEQADGSVTYERREFGGFKRDRKALAEWARSIGPDIVVMESTGIYWKSPYAALEAVGIVPWVVNARHVKAVPGRKTDVADAQWLASLARAGLLSASFIAKADLRSLRHIARHRQKLGGMLASEKNRLHKLLTDAGIRLGVVVSDLHGQSARAMVKALIAGKTVPEVLSLASNRLRASREDIFEALQAEEITPAHRFVLTEIMAHIEELEQRIARFDAELLRSLVGAGYEAALRLLQTLPGIDLIGAAMLLVEIGSDMSVFGSAQRLASWVGMCPGNNESAGKRKSGRIRKGNAWVRRLLCEFAQAAARSRCAFKGKFQALNVRKGHKRSTVALGHKMLRTIYAMLSKNTHYVDKTVDYEALMVARNAPRWLQMLTKHGFVPTPA

SEQ ID NO: 396735 - protein, 340 aa, unidentified
MKKYLFIGIDFSKSKFDVTILKSIDQQDFVQATFDNESKGFNNFLKLVSKQSNVPKQDWLFCGEHTGLYSRGLTEFLLKKNLFIWLENPLQIKCSWGIKRAKTDRIDSLEIARYALRFQDKATTCKPANKEIESLRLLLAYRGRLVKNKVSLEIAAKETRRVINRDPTSRFIFENSQRDIERIKKEIEVLETKMHDVIINSQLKENYLLVVSIKGVGMITAIALIVHTDNFSTFETARQLACYCGVVPFEKSSGTSINGGNHISRLANKDIKVLLTQCARCAVQYDKELAAYYIRKIAQGKKDRVVINNVRNKLIHRIFAVVKSKIPYRENYLNPWADCA

SEQ ID NO: 396736 - protein, 318 aa, unidentified
MNIVPKIYVGVDVSKDNLDVHFYPMEEAFRVKNSMKGIQTLLGKLDEYEVEQVVFESSGSYENLLLKSLDAAGYNYWQVDPKRIKSFILGEGIKFKNDKNDAKMIALFAYKNQLPYKKVILTKQKRDLRDYSRRRSYLIDLVAKEKTKLKLPSQEAFKKGIESLIKFLEKQIKDLNEKIVEIITNDKELARKREIMESIPGVGKRSSSILLAEMPELGTIEDKEAAALLGAAPYTKDSGNYRGKARVGYGRARPRKVIYMAALTASRSNPILSEFYKKLLVVGKAKKVALVAIMRKLICLINTLIRKNCFWDENVKFS

SEQ ID NO: 396737 - protein, 318 aa, unidentified
MVSFVGIDVSSRTLDIAVRPQSLKINVTNDRAGFEVLEKSLRGLKVKRVLLEATGGYEREVLSFLQSAGYKVIRVNPRRARSFAESMNIKAKTDAIDAAVLAHFAEVIPDKPTLQVSPQRALLRELLQQRDRLVQQRDDDRRRLKQVQSEVVAHFLKSNLQHFRSQIRQIEHEIKLHAEGLGDERIAQLVQVKGIGLVTAGKLVTLLPELGRVQAKEIASLVGVAPFNHDSGMSVGKRSISGGRFEVRRTLYMSCLVAVRHNPALKAQYEALRARGKVAKVAIVACMRIFIVRLNAMLRTGTPWQDVELPQCKSATPA

SEQ ID NO: 396738 - protein, 353 aa, unidentified
MSSDKYIALDVHQATTVTSVLNAAGREVDQSVIATKSQPIRSYLEGFSGPLHVTLEEGTYAAWLYDLLEGRVAELVVCDPRHNALLKEGSKTDRNDARKLADLLRAGMLRPVYHGRHSLRPLQELVHSYEALVEDTTRAMNRIKALYRRRGIDCAGRGVYTQKQRASWLEKLPAGASRLRGELLHEQLDHTRSLRRKARLALLQESRKHLISARLREVPGLGPLRVARLIAWIQTPHRFRTRRQFWTYCGLGLVIFDSSEYRLIQGRVVRRAQPVKIRGLNRNHQPRLKEIFKSAALSAIRQPGPFKEYYDARVSQGRDPALLRLSVARKLAALVLSLWKKGGRYRAQDVKQA

SEQ ID NO: 396739 - protein, 359 aa, unidentified
MKETKVLKQALGIDVSKDGLSYCLGILRDNLEKEFIQGKEVSNAKKGFKALEKWLRIVSCKKGLPVIVMEATGVYHEDIAYYLYNQGYEVCIMQSGRVKKYAQSLDQRSKTDALDSKMLSMLGCERNLTPWTPPSETLQELKYLSRERSRLVKERSIEKNQYHAMNFSSYGYKQAIKRYKKRIGLLNSQITEIESEMQGIVNKDIVLSAKINFLTSIPGLSFISVATVVAETSGFSLFTSGKQLVSYSGYDVVLRESGNHKGKTKISKKGNKYIRAILHMPSMAAIRLNPTLKPFYDRLKPRKVKPLIAVVAVQRKLLLLMYSLWKNNQYYDPRYEIKKAARKQVLAAQDRSKNEFATS

SEQ ID NO: 396740 - protein, 350 aa, unidentified
MARFGSLARLRTQAAVTAKLVRKLATKYERLTFCYEAGPTGYGLHRQIKALGFGCAVVAPSLIPKRRGDKVKTNRRDALSLAKLLRADELTPVWVPDGRHEAMRDLTRARETAMLDLRTKRQHVSAFLLRLGRPYPESNKTWTRAHVSWIASQKLDHPQQRLVLEEMMLAIRQAQERLTRLEQAIAAAVPEWSLAPLVTALMAMRGIDTISATTLLSEIGDLSRFQTPTELMAYLGLVPSEASTGDTVKRGPITKAGNRRARRMLVECSWSYQHPPRVGQAKQPKVDAAPLAVREIAWKAQCRLHRRYRMLIRKGKLKTVAIVAIARELAGFIWAVARAVSTMPIAAATT

SEQ ID NO: 396741 - protein, 373 aa, unidentified
MKKAKYYGSIDVDDSNFNVALIKTVGEELLHFKCSSNVGAMIKKIKQKNIHLKDIQLCYEATYLGYTLYRELKTKGIRCEVIAPSLIPKAPGNKVKTDRLDCIKLAKYYLKGMLTPVHIPDEEDETVRDLIRSRKLLVDQVKRIKTHIISLCKRMGFDYRKQRGISNAAYWTQVHYKWLEKEINQLPENSPLRLNLSGLLSTCNNIETFVSSYDEQISLIAERPKYKEKVKALNCFRGLKTLSSLTLTTELGDIRRFPHPSKVTAYSGLSIREYSSGGKELRFGITKQGNRILRTVVIEACQFSFKPPKVSNNLKERRIGADPEYINIADRCMHRLSKKSIRMFMNKKHRNKIKVACAREMLCFVWEALHKAA

SEQ ID NO: 396742 - protein, 355 aa, unidentified
MNQEKYIGMDVHAATISVAVKNAEGKLLMECVLETKAATILEFIQGLRGTLALTFEEGTLAAWLHDLLKPHVSRLVVCDPRKNALMRDGNQNDRVDARNLAELLRTNQVKAVYHGKHGTRALKELGRSYLTLTKDSTRVMNRIKSVYRSWAIPCAGSSVYSRRHRAEWLAKLVEPGVRIRAEHLYQQLDSLEPVRQAARRELLRESRKHAAVKLLRQIPAIGPIRSALLVALLQTPHRFRTKRQLWAYSGFAVQTYDSGEYRMVRGKLQRNRERITVRGLNRNHNHDLKNLLKGAAISAIERPGPLQDFYAALVEKGMRPSMARLTLARKIAAITLTMWKKGVSFDPQQLQRQAA

SEQ ID NO: 396743 - protein, 342 aa, unidentified
MVMIGIDPHKASHTAVALDDAHRPLGRPRVDAGKTTTRALRAWAGQWPQRCWAVEGANGLGRLLAQQLVAAGEDVVDVPAKLAARVRVLNTGHGRKTDAADALSVATAALHQPDLRRVTAEDYTAALRLLSDRRDHLNEDRRRTVNRLHVLLRDLHPGGARRQLSADHAASLLRTIRPTTPVDVERKTVARELLTDVRRLDKALADNRKRCAAAVEASGTALTRILGISEVLAAKIISHTGDIRRFRTADHYGSYTGTAPVEASSGDVRRHRLNRGGNRSLNNALHLAARTQLNHHEGAQRHHARKIAEVKTPDEAFRSLKRQLAKVVYRQLKADRERVLLT

SEQ ID NO: 396744 - protein, 341 aa, unidentified
MQITTIGLDIAKNVFQIHGIDAAEKVIVRKQLRRGQVMAFFEALAPCLVGMEACATSHHWARELTKLGHEVRLMPAKDVKAYVKRNKNDAADAEAICEAVRRPTMRFVRIKSAEQQGQLMLHRARDLLMRQRTQLINALRAHLAEFGITAAQGREGIKELLAIVAEEEGSRLPVDAHASLTVLATQLQAVQTMIGSLEKRIVAQHRSNEASKRLETIPGIGVIGATTIAAVVPDPRVFRSGRDFAAWIGIVPRQDSTGGKPKLGPISKQGDQYLRRILIVGAHAVLRRARQQPEKYPWLTQLLARRPFKVVAVALANKMARVAWALLAKGGTYRAPQLVAA

SEQ ID NO: 396745 - protein, 419 aa, unidentified
MEVPDLNCYCGIDWAEGHHDVAIVGSDGKLVAKRRIGDDPVGFTVLTGMLAEAGDSPEDPIPIAIETPRGLLVAVLRASGRPVFAINPMAVARYRERSSVARAKSDHADAMTLANILRVDAHVHRTLPADSELAQGIAVLARAQQNAVWRRSKAINELRSALREYYPAFLDTFAGKSATNLAKAHARAVLAIAPTPADAAKLTKARVAAALRRAGRKRGIDDLAANIVERLRVPQLRQPGLVEKAMGCQALALLAMLDAACAGADELEQLASEEFRKHPDHAIITSFPGLADLTGARVLAEIGDDRARFADHRALKAYAGSAPVTRASGKVTSITYRRIKNDRLAAVGWVWATYAAINPGPARGHYRHRRDHGDRHSAALRHLFNKMLGQLYHCLQTGQTFDPIKAFGQPCLEPEPAAA

SEQ ID NO: 396746 - protein, 336 aa, unidentified
MSDQKFVMGIDISMDDFHVCAKVKKSTGEVKIKGTRSFANTEKGFRAFYTWSKKRVGVEDELYFVMEATGVYYENLAYFLYAQGEYTAVVLANKAKNFAKSLNIKTKTDKVDSKIIAELGLERKLERWEPMSSHYKEVRDLCRELLSLKKEMTRAKSQLHAMEHSYRKSSRVIKLKNEQIDFYENAIDEIHEELKRLVADDLELKEKLEKVQTIPGIGFETSIILASETNGFRLFKNIRQVVSYAGLDVAFNESGIFKGKTRITKKGNSRIRQALYMPSLSALRDNDPIKMLYERVCERNPEVKKKGVVAAMRKLLILTFVLWKKNEAYDKNYVWG

SEQ ID NO: 396747 - protein, 395 aa, unidentified
MCKVIMIGCDLHDKTMLLKMAVGRQTPTMRTVRNTVKDRKKMIADLKERKKQTGAQRIVFAYEASGLGFGLYDELKDAGIECHVLAPTGLERSVQHRRRKTDERDAEQLLGALRAHVLAGNDLPDVWIPSLQTRDDRDLVRTRVDLADKLTAVKNETKSLLKRNGIRRPTAMGKGWTRRYFLWLDDISEDGDARLAPGASVALKSKLLQIEFLVAELQRLDGYVIELAMTARYHDAFFRLTRIKGVGNLTAMLFLTEMGDLSRFENRRQIAAFLGLAPSTYESGEANDRKGHITRQGPARVRKLLCQATWSQMRTDEHTKATYERLVERNPKHKKIAVVACMRRLGIQMWHRASGHPQPDTSLGLDRAGPPRGTLPDAGPWPVAEVHATAKAQPG

SEQ ID NO: 396748 - protein, 405 aa, unidentified
MEILVDRACGMDVHKATVVACIMGTGIKKEIRTFTTMTNDLLRLKAWLTDNRITHVAMESTGVYWKPVFNILEESFEVILANARHVKNVPGRKTDADDSAWLCKLLRSGLIRGSFIPPKEVRELRDLTRYKRKLIQAIVSEKQRVEKILEDANIKLSSIASDTFGASGKRIIEELMKGELKPEAMAELTKGRLRSRKAEMKEALVGNMEDHHRFMIQAHLTHIAMMEELLATVEKKIQETIERHFKKDYELLKTIPPVKDSASVIIAEIGVNMDPFPTEMHLSSWSGMSPGNNESAGKKKPGVTTHGNKHLKTILTEFGWIASKMKGTYLWSKYHSLVGRRGKKKALVAVGHKILVMCYHILKHKVPYKELGPRYLDERRKDRIARSYIKRLSSLGYAVTVKEAA

SEQ ID NO: 396749 - protein, 350 aa, unidentified
MMIIGCDLHTRYQQIAMVDTETGEFVQRRLEHESGEARGFYAGLKGAVRVGIEATGHTHWFEAMLSELGHELWMGDAAKIRAAVVRKQKTDARDAAHLLDLLCTERFPKIWRPALAERDLRQLLWHRQKLVWMRGAVKNQMHALAMGEGVCRKKKLFSAKGRKELEGLTLGPWASYRRQELLRMFDELQGAVTKLDEAVEQAAQSQPLAVRLMTHPGVGPITSLAFVLIIGPIERFERSRQLVSYLGLNPQEHSSGGRQRLGSISKQGNPMMRSLLVEAGHTAARLDPQLQRMYQRLKFRRGAAVAKVAIARKLAVRMYWMLRSPADYAQLVRMRGSSWPTLVEDNPSLG

SEQ ID NO: 396750 - protein, 336 aa, unidentified
MEVTTIGLDLAKHVFQVHCMNATGSVVLKRRLRRREVIAFFAALKPCLIGMEACATAHYWARELRALGHEVRLMPAQYVKAYLRRGKNDAADAAAICEAVTRPSMRFVPVKSEAQQAALMLHRVRDLLVRQRTQLVNAIRAHLAEFGIIEARGPWNVGRLLVELEQDSAVPELVRELVHLLAEQLQEVERRIADVDARILAQHKADPVSRRLAAIPGIGPLVATAIAATVPDPLAFQSGREFAAWLGLVPRQHSTGGKPRLGRTSRQGDAYIRRLLVIGAQSVLYCSKAARANPWIQGLLAKRPRMVVAVALANKTARIAWAVMAHGEAYKAAVTA

SEQ ID NO: 396751 - protein, 358 aa, unidentified
MTDGSSEQPQMTAGLDLGDKYSYLCLIDQEGGEVIEEGRLRTSPEAFRRRFASERPLRIAIEAGTHSPWASRVLEECGHEVLVANARKLRLIYANKRKTDEIDAENLARLARLDPKLLYPLKHRGEDSQAHMALIRSREALVSTRTQLVNHVRGAVKSFGARLPKCPASSFHKKAAEHIPEALWLALGPILQTIGSLTQRIRDYDRKLETISKEHYPETELLRQVEGIGTLTALTFVLTLEDPYRFEKSRSVGAYLGLVPAQDQSGDRDPQKRISKEGDEMLRRLLVSSAHYILGPFGSDSDLRRHGEKIASRGGKNSKKRAVVAVARKLAVLLHSLWISAEVYEPLRNTHRSGGQAA

SEQ ID NO: 396752 - protein, 340 aa, unidentified
MLNYGLDVHKRYTTFCVMDEAGKILTQGRCPNDELPLHPAFSLKDKKRAVMEAGGNWYAVYDRLEPAVDELLLAHPLRVRAIASARVKTDEIDARTLAHLLRADLIPPAYVPPKAVRQLRELLRYRQDLVKQRTALKNRVHALLARQGDISPVTDLFGTSGRRWLRELDAEPQQRYQLDGYLRVLDCLTEQIKDVDKLVTKRCSGDPAAMLLTTIPGIAALSALTILAEIGDVGRFLDSSHLVSFAGLSPRVRSSGGKTRMGGITHQGPSALRWVLIEATQIAVRKPGRLQDRYRRLCRGKHPAVAITACARELLVAIYHMLSRGDAFRAGGRLVPLMTP

SEQ ID NO: 396753 - protein, 392 aa, unidentified
MVISVGIDVSKDKHDCFILSSEGETLADGFTIPNTLDGFNFLLQKIQDCTTPQDKIKVGLEATGHYSYNLLGFLLDNGLATYVLNPLRTNLYRKSLSLRKTKTDRVDARTIASMLLSDAGLKPYTSTAYHNEELKSLTRYRFDKVKERAKLKSSISRLVCILFPELEKLVPTLHMVSVYALLEEFPGAKQIAGAHLTRLKALLETASKGRYKRDVALQIREAARNSIGSRMPAKSLELQHTIRLIRELDTEISEIENQIQSIMKELHSPITTIPGVGFRMAAMILAEVGDFTRFASPDKLLAYAGMSPSTYQSGQLKNCYPHMEKRGSRYLRYALYNATKYVCLWDPTFSAYLAKKLTEGKHYNVALSHASKKLVRLIFAMEKSRQPYRVAP

SEQ ID NO: 396754 - protein, 530 aa, unidentified
MAWLFFRLPPYLGLAFERRASLPGLAVAWLKRGVSAAKVLELGVPATVLARRKGRSVSMAAVMIGVDPHKALHTAVAISAVEEPLGELRVRACAVQAERLLAWAATWPQRTWAVEGAGGLGHLLAQQLLPAGERVLDVPPKLGARVRLLAAGDTNKNDPNDARSVAVAALRSAGVREVRPGDHAAVLKIWSKRYRDLGRSRTQVACRLHAVLCELTPGGVSKAITAPAAAQLLESITPAGAVEAARCDLAAAFAEDLRGIDARIRETRKKLAVAVAVAAAGTSLTGLYGVGPVVAAAVIGDVRDVSRFPGRDHFAACNGTAPIEVSSGPRKIYRLSRRGNRRLNHAIHMVAVTQIGHRHSEGRAYYDKKLAEGKTPKEALRSLKRQVSNAIFACLQADARRAAARAGGPGGQQGNDSIASAAGLHPRHRLFGQATPGPGHHTTTAASNPAPGPARARGTAGHSSIAASLPPAQPQVQVERPQRSEDERPGGAARRRPHSAARKARGQGSPRKPQRPKGTSQAAKNTGRAS

SEQ ID NO: 396755 - protein, 483 aa, unidentified
MKSKRVEKYKKASCRPTPNNWHQMNRKQRREMTRKIQSEDLSLEIVHPDAAGIDIGNESHYVAVPATRDSQPVRHFGCTTAELKAMADWLKQCAIRTIALQSTGVYWIAIYDILEEAGFEVYLVNANQTKNLPGRKSDVQESQWLMKLHTYGLLRNSFRPSQEIRTMRTYWRQRNDLVRAAGRHIQRMQKALTQMNIQLANVLSDVSGMTGQAIVKAILAGERDPYQLAALRNWRVKASEEEIARSLEGNWQNDLLFVLQQEQDGYEFCQKQMAECDQRLQQYLQQQEDQSHGASLPEEKRKERLRKKKKGNAPQFDLRAELFRMTGTDLTQIDGIDVTTTMTILSEAGWDMSKWKTEHHFVSWLRLCPDNRISGDKIIGKGRLPTNNRVTNALRMAASTLRLSNTYLGAQFRRLRSKLGAPVAIKAMAAKLARLVYRMLRYGMQFVDRGADFYDAQHRKLQINYLKRKAANLGFQIIEAPAA

SEQ ID NO: 396756 - protein, 350 aa, unidentified
MIIIGCDYHPGFQQIAFVDTETGDYGEQRLEHSEGAEKFYRDLAAQGKKVRVGMEASGHARWFERLLAELNCELWIGDATEIARKRERKQKTDRQDAQHILQLLMENRFPKIWVPSGENRDLRQLLWHRHRMVQMRTRIMNQLQAVALNEGLRCKKRLWRQHGREQLESFRLAPWASRRREDLLQLLDRLNPTITDLTQVIEQEVEKCPEARRLRTHPGVGALTALAFVLIIGRAERFQCGKQIAAYLGLVPLEDSSGNRRRLGHITKQGSSMLRFLLVEAAQVTARSIPEWRSKYFHLAMRRGRKIAKVAMARRLAIALYWMWRKGWNYEQSRKFGSHAGKLGTGDGVQ

SEQ ID NO: 396757 - protein, 349 aa, unidentified
MTQQRISYAGERVYVGVDVHKETSTVTCVCHKQIVKTATVPAEPASLAASVLQWFPGAMLASAYEAGFAAFVLHRALTQVGITNIVVNPASMAVAANDKVKTDRRDSKRLAIDLADGRVRGIYVPTEGEELARLLPRTRAQIVDHRATIARQIKAKLHQFGVIAPASRRMISNRYLREIAAWSLPPELRVSLTLLAEQWRFGTRQLIEIRRLLRTQAAAQAELAHVYRSVPGIGAVVARTLATERGDMPRLANERALFSYTGLTPSEDSSGPAVRRGHSSRQGSGRVRHLLIETAWRALPRDKVLQEILDRIAATRGKKRAIVAIARRLTGRMRACFRQGTTYAVGTYA

SEQ ID NO: 396758 - protein, 338 aa, unidentified
MYYTGIDLHKFSSYLTTIDSSGTIVKQENLKNVAHNFVQYFSSIPGEHQTTVESTMTWYWLNDLLTSINIPLVLAHAKYVKAIAYAKVKTDKVDSHTLAQLLRMDYIPAAHKISNDNRTLRDALRARLKIVQRHTSITNSMHLLLAKYNYDSPTQLTGIPEFQYQQLSEVESLLDEQMLELEKQLYPYLIPNDDIQHLLWIPGIGKMNAFTILLEVDDINRFPDVKNFFSYCRLVPSARNSSGKSKQRSSKDGNKYLKVTFCDAAVHALQYYPVIKKYHDSRLRKKKKQVAHAIIAKEIARIAFYVLKNKSDFNNKFKGTELEHKKSLQWPRVVNPCA

SEQ ID NO: 396759 - protein, 310 aa, unidentified
MEPTTIAIDLAKRVFQIHYVEPETGAIHSKVLKRAQLAPFFANRPASRVVMEACGSAHHWARVLARLGHDVRLIAAQFVRPFVKSNKNDAVDAAAIWEAAQRPGMRFVAVKTEDQQAMLAMHRIRQQLVRIRVMQVNQLRGLLYEFGVVLPQGRRASIEAAKAALASLADELPAMLLDSLQDQLSRLRALDEQIARIEQRILSWRRNDDACLRISEIPGVGVLTATAAVSVIGQAKTFRSEREFAAYLGLVPRQNGSGGKIKLGGISKRGDVYLRTLLIHGARSVISCSKHLPERLRQMNRTGFCGGPHS

SEQ ID NO: 396760 - protein, 428 aa, unidentified
MNCNTQNAKIASITEKTLIVGIDVGSETHFARAFDWRNYEYTKKPLEFSNTEAGFLTFKAWVEDIAEKQGKTAVIPGMEPTGHYWFALGKFLQDNGMKPVHVNPHHVKKSKELDDNNPNKNDRKDPKTIAALVNEGRFSYPYIPTGIYAEIRSLSNLRFQTQEELTRIKNRIARWFAIYFPEYKDVYGDLKAVSGRMVLKVAPLPEDIGKLGVEGVNQIWRSAKLRGAGIKREKTLVSAAEHSVGSKEAPEAARMELKNLLDDMDVYVSRLDELLVNIEEKLKEIPYVDKLMEIKGIGLVTVSGFIAEVGDIGRFDNPKQLQKLAGYAIVANDSGKHNGESRISYRGRKRLRYVLYEAAISLIGKNAEFKSIHEYYRTRKENPLKKMQSVVAVACKILRVFYTILTKGVDYDPVKLLGDIKRPQLQAA

SEQ ID NO: 396761 - protein, 345 aa, unidentified
MNKQLSTHPATVFCGIDISARSLAVALIGSDGALVQREFPNDARGHRALLAWLGKCGKHARVSMEATGIYSLDLALALDAAAMIELAVLNPKLVNRFAQTLRRSKTDQADAVVLAEYSQRMPFARWQRPTELHLQLRTLSRYIGTLVEEQAGLKNRLGTAASTATTPRVVLTDLKRALAQVERRVKQMRRNALKLVETEAELHERYRLLITVPGIAEANGLAILSELMLLAPTMTVRQWVASSGLDPAHQQSGTSVHKPSRISRAGNRHLRAALYMSSLSASRFDRHLNAFYRALRERHKTGMQALMAVARKLLHAIFGIFKTGTPYDGQRLFPQMELQPKTATA

SEQ ID NO: 396762 - protein, 343 aa, unidentified
MEYYAGIDVSLESSSLCVVDATGRIVREAKVASEPEALIAWLQSLGFDLARIGLEAGPLSQWLYAGLKQAGLAAELLETRHVRNAFKIMPVKTDRKDARGIAQLMRMGWFRSVHCKSLPAQETRSLLGARKLLQGKLHDIELSLRGTLRGFGLKVGKTTPETFEARIRTLVADHPTLTLIAEALLRARAVLLDEFIKLDKKVHALARQDPRARLLTTAPGVGSMVALTYAAAIDDPARFKSSKTVGALFGLTPKKYQSGETDITGRISKTGDAAVRTALYEAANIILERPVKGGWLKAWALGVAKRAGMRKAKVALARKLAVVMHRMLVDGTPFDLNRVTATA

SEQ ID NO: 396763 - protein, 387 aa, unidentified
MYYVGIDIAKLNHFASVISSEGEVLVKPFKFTNDNDGFFRLLSALESFDRSSRIIGLESTAHYGDNLVEFLVSRRYQVCVINPIQTSTMRKNNIRKTKTDKFDTYVIAKTLMTQPHRFMTQEDIDMMHLKNLGRFRMKLVKERTRTKIQLTAYVDRVFPELQYFFKSGLHQKAVYALLKEAPSPEQIASMHLTHLTHLLEVSSHGHFNKEQAKELRVLAQKSVGSSDRALSLQVTQSVDQIELLDRQIHEVESEMENIMLGLDSVIMTIPGIGYINGGMILGEIGDIHRFAKPNQLLAFAGLDPSIYQSGNFNASHTRMSKRGSRALRYALINAAHNVVKNNATFKNYYDKKVAEGRPHYNALGHCAGKLVRIIHKMLTDDVAFNLE

SEQ ID NO: 396764 - protein, 372 aa, unidentified
MKKRSTSQQSPKRAANSRTATGSCTIGMDLGDKSSRYCRLDEEGAVVEEGSVATTKKALLQRFGARKRCRIAMEVGTHSPWVSRLLSRLGHEAIVANARQVQLISQSSRKDDRLDAQTLARLARIDPQLLRPIRHRSEKAQQDLLAIRVRATLVEARTGLVNAARGLAKAAGERLPKCDTDNLGPAAMAELPQGLQEGLRPLLEQVEALTVQIKASDLRIEQIARNQYPETELLRQVSGVGPLIALTFVLTVEDAARFDKSRDVGCYVGLRPKRHQSGESQPQLGISKEGDRYLRTLLVQGAHYILHRGPDTDLQRWGWQLAGRGGKNAKKRAVVAVARKLCVLLHRLWVTGEVYEPLRNSQTQQRLKQTAA

SEQ ID NO: 396765 - protein, 387 aa, unidentified
MEVLYQSCAGIDVHQANIVVCILHGPLTSTRPKREMATFDTTTKGLRACHDFLSQFHVEAVGMESTGVYWRPVWHALCDDFELILAQPAHMKAIPGQKTDKKDAHWIAKLTRIGLLPRSFVPDETIQELRELTRQRKHYVESRNRETNRIHKILQSGGIKLTTYIEDIMGLSGRNLLQLLVDGTPITPRIVHQSVYTSLKKKVPQLLEALDGYFSDHHRFMLKQSLEIYDFYQKQIELLEERITVYLSQYENHVETLDSIPGIDVITASVIISEVGVDMSQFPTSGHLASWAGLCPGNNESAGKKRSTKIRHGNSYLKKCLCQAAFAARNQKGSTLADRFYQIQSRRGSQKATIALAHQLLKIAYILLKEQMTYPEFLAQKRLLGTS

SEQ ID NO: 396766 - protein, 353 aa, unidentified
MTSIPPDAERRKVIVGVDTHKHIHVAVAIDQHGAQLGDLTVSADTGGYTQLEQWARALGRIDRFGIEGTGSYGAGLTSFLRRCGHRIVECNRADRRARRQNGKSDTVDAEAAARSVLGGTSAVVPTGDGQIEMIRQIKIARDTARKGRTSAIITLKTIIVNAPAALRESLAGLPDKTLLDRCAGFRPGVIDDTTGSTKHTLRALAKRWSDLDDEITGHDRLLDTLTARASPTLRDGFGIGPDTAAEMLIVFGDNPQRIKSEAAFAKLCGTCPIPASSGMTNKHRLYRGGHRQANAALYRTAIVRMRFHQPTIDYVARRTAQGLSKKDIIRCLKRFIAREVYQRVMSDHTARTT

SEQ ID NO: 396767 - protein, 338 aa, unidentified
MKLYGGIDLHSNNNVIALLDEKDEVVYQRRLGNDLSYVLSELAPYKQAIEGLAVESTFNWYWLVDGLMEAGYRTHLVNTAAVKQYEGLKYSDDHCDSRWLAHLLRLGILPKGYIYPKAGRAVRDLLRKRGQLVQLRTSNILSVQNLLSRNTGSSISANRIKKLKLEEVDELFSDPDIALAIKSNLVVMHTLHEQIKILESAVTKKAKLQPEYRYLLSTPGIGMILGLTILLETGDIQRFPKAGNYASYCRCVGSTRKSNGKHKGKGNTKNGNKYLSWAYVEAANFAIRYNDRIKGYYQRKQAKTNNVVAIKTIAHKLSRACYYMMRDQATFKIDKAFG

SEQ ID NO: 396768 - protein, 369 aa, unidentified
MAECIFVGLDVHKDSIDVAIAEDGRDGEVRHYGKIGGDIPALDKVIRRLQSRGATLHVVYEAGPCGYEIYRHLSKRAIDCMVVAPSMIPKRSGDRVKTDRRDALSLARLHRAGELSPVYVPCEDDEAMRDLTRGREDAKAAEKKAKQRLGAFLLRHGKRYEGKSPWSRAHRRWLGDQNFAHPAQQITFQEYVAAVEQCQERVERLAEQIRVLVPTWRLAPAVEAYQAMRGVSLIVAATVAAEVGDLSRFDNPRKLMAYLGLVPSEHSSGGSVRRGGITKTGNSHARRVLVEGAWAHRFPARVSRALGDRQEGLPEAVRDIAWKAQVRLCERFRRLQNVGKPKQVVVTAIAREMAAFLWAIAREVPIPAT

SEQ ID NO: 396769 - protein, 413 aa, unidentified
MVVGVDIGSQIHYARAFDNRGRELTKRIFSFHNDLEGFNSFNLWAETLKTENKKTAVLIGCEPTGHYWFAFAKYVNDHQKRLVMVNPFSVKKIKELDDNSPKKTDSKDPKTIAKLVVDGRYSISYMPEGIYAEIRDLVYSRDRIMKQHNISANRIQRWLAIYFPEYLGLYTRFDAISGLAVLEKAPLPKDVIALGVNGIRKIWHDKKMRGRGVTEDRAKTLVEAAHNSVGLDGGIGTKSELYMLLEEHRLWTSQLEAVNKVLEEMILKVPHVEKLLAIKGVGSITIAGFIAEVGDIRRFDSPKQIQKYAGLELVENSSGKHKGRTRISKRGRRKLRKILYQVMVPLLARNKEFRGIYDYYVTRVKNPLKRRQAMVAVSCKLIRVFYAVLTKGVEYDRFKMMSDIHRKSDIIAA

SEQ ID NO: 396770 - protein, 403 aa, unidentified
MTLAEDCEHVFGGVDTHENSIHVAVVSDRGKDLEDREFPTTPPGYRRALAFLASFGQIVAIGVEGSSSYGAGITRAARSEGLVVVEVMRPERAERRRLGKSDPIDAYQAARAAMATHRVSPVKDAGAIEGIRALHNARRSARKARTAAMVQIYHQLVTAPAEIREKYRDLASDKRITALARLQIRSDRPAAERAVLLALKTLAIRCQQLQDEHERLGKLLDQLVTAANPGLRGAYGVGPDTAAQLLITGGGNPDRLRSEAAFAALCGTSPIPASSGKTVRHRLNRGGDRAANGALHRIALVRMSSDPRTRAYVAQQREKGLSSKEIQRKLKRAIAREIFRYLNTPMLIPEITDLRPTRQAKNITLTAAANHFAVWPSVISELERGLRRDDTLANAYREWLRAA

SEQ ID NO: 396771 - protein, 353 aa, unidentified
MKYVGLDWAYRTAQWCALDPGGEIAGEGRFAADRDGLARLVLELGDEVEACLEMMSGALWARDELVACGWQVQVADARKVKTVAPLAAKTDKVDARLLAELSRRQLVPALWLPSLDERALRERLRRRMHLVRLRTSAKGRIFGLQTQWGVRISLRRLRRADGMTLLERAGMPAVWRHSIGECLALIDFLDARIVPLDAELRPFAQADPRAVLLDTIPGVAELLALTIAVEIGEISRFAGPEKLVSYGRLAPRVRQSGEGRPHTGPLNKSGSRLLGWAAVEAAQHAWRESNPWHQLYLDVSRRSRNHNSAKAAVARKILIAAWHMLSRNEPFKPAPRSTEGTPVSASSRLALAA

SEQ ID NO: 396772 - protein, 343 aa, unidentified
MKHTTIAVDIAKNVFELAISHCPGQVEETHRLSRSRFLRFLAQREAADVVMEACGMAHYWARQLQQLGHSVVLLPPQYVRPYVRRNKTDRTDAKGLLEAHRNKDIRPVPIKSVEQQTLASLHRFRSAWLATRTARINGVRGILRELGIFIPLGAKQVVPRVRSLIEDADSQIPMALRDSLHQACDEIGNLESLIHDADKQLQALARQLPTVEQLLTIPGIGILTATALLAFVGDVHRFRSCRHFASYLGLTPRERSSGTTRRMGRISKQGDVYLRTLLTHGARAVLWAATKHSQPDRLRTWALELQHRRGHNKATIALANKLARIVWAVWKRGTEYQSLPKAA

SEQ ID NO: 396773 - protein, 359 aa, unidentified
MQTQRKELNFEGQNIFVGIDVHLKNWNVSIFTEDLYHKTFNQPPNAELLSNYLKLNFPNAIYNSVYEAGFCGLHAHYELTNLGIHNIVTNPADVPTTDKEKRRKTDKIDSNKLARSLRNKELKGIYTPTQDILEDRSFVRVRSSIVKDQSRLKHRLKSMLYFYGIEFPVEFQKSTSHWSKRFMVWLKTIQLKSHSGNMALAMSIKEAEQLRALLLEVNKELKVLSTTEKYAKNMEFIRSVPGIGLVTGILFLSEIETIKRFENNDKFAGMIGIVPDCHSTGNNEQIGEITHRGHIHLRRALIESSWIAVSIDPALSRAFSEYCKRMEPNKAIIRIARKLSNRIYFVLKNEKKYETRIVK

SEQ ID NO: 396774 - protein, 387 aa, unidentified
MMTMTRTEESTAVATPVAPTTLLLAFELGERSWKLGFTTGLGQQPRIRQISARATDRVEEEIARAKARFRLPADAPVLRCYEAGREGFWLHRWLGAHGVSNHVIESSSIEVNRRARRAKTDRLDLGGLLNLLARHHQGDGRVWRIVRVPSVAEEDARQLHRTRETVQQDRNRLINRLKGLLTTQGLKLPVDATFPTQLETAQLWDGTPIPAGLKARLRRGWTQLEFLTRALTELDAERDALTADPQTAMGRYVEALPTLRGIGPIGTWTLATEIFGWRDIKNRRELAGLVGLVPAPYQSGESHHDQGITRAGNTHVRRLMVQLAWSWVRYQPESALTKWYAGKFGHGSRRLRRIGIVALARKLLIALWHYVEHGEVPEGAIVKGQAA

SEQ ID NO: 396775 - protein, 348 aa, unidentified
MTHFVGLDVSVKETSVCVVDDAGNVMCERKVLTEPDDIAVLLTSVGGDYARVGIEAGPLSQWLMNGLSEAGLPMICVETRHMKALLQAQQVNKSDRNDARGIAQMMRVGLFKPVHVKTLAAQEQRMLLTSRKLVQRKLIDIESDMRGTLRNFGLKVGVVSTIGYEARVRHLVEGFPRLAAIIEPLLTVRRVMRQQLATLHKMLLDTVRHDPVCRRLMTAPGVGPVVALTYRASIDQPQRFTHSRAVGAHVGLTPRRHQSGELDYDGGISKSGDTMLRTMLYEAAQILMTQSRHWSWLKAWGMKVAQRRGMRRAIVAVARRLAVVLHRMWTDGTDFRWGSEPGTAVAVA

SEQ ID NO: 396776 - protein, 353 aa, unidentified
MEQFIGCDAHKKFSVFVAISDRGEYGSATRVGHEREVFRSYLKQLPPGSQIALETSGIYYWMVDEMEQAGHVPRLAHARTAKRRMEGRHKTNARDAQGLAMLLRNGTLPQVWIPSAEMRDERELLRWRMCLSRMRARVKNRIHGALLRYNVDVAVSDLFGDQGRAELLSRLDELPRYSRASVLDQLQLVDSLETEIAEREAEIKEMLYPRVERDLLDTLPCVGAVLSAVLALELGDVRRFPGPAWLASYAGLVPAARESADWKKQDGCPRDCNVYLKWAYVEAANLIAAHRKQWPERHAVRLYERVRNKTRMHGKAAMAVARHLAEASWHMLSKLTVYQEPRPRRPALSSTHG

SEQ ID NO: 396777 - protein, 370 aa, unidentified
MYGLLQPIGIGYELSKTLKRNPYMKNSNTIGVDLAKNVIQVSIVSASNKQLQNKALSRKKFAEFLAKQNPSLVAFEACATAHYWARVAKRHGHNIKIIPAKAITAFRQGHKTDENDALAVAEAARRPNIKEAPYKTISQQSMQAIQRSREHLVQERTALSNHMRGLLMEFGLVIKQGFASLTQTIPEILEDGDNELADSYRPTLYRLYQRFKYLQDDIRFMDDEIKALIKSHDSCHRLTQMEGIGPISAVLLYATLGTGEAFKNGREFSAYIGLTPKQFSSGGKTNIIGISKYVANRRLRAVLITGARAYVHKMKEPKTAKDKWLWSLIQRGGYGRAAVALANKNVRTAWALLTQGTEYNKQHEALLHAA

SEQ ID NO: 396778 - protein, 382 aa, unidentified
MKHTVPPSREGEQREEVQSMRSFMGCDAHRKYSVFVGMDEKGRTTAPIRVEHERKELRLFLRHIPPGTDVAVEATGSWYWLVDEIEAAGLVPHLAHPFAAKRMVGAGGKKTDSIDAKCLATLLRNGTLPETWIPDAANRDLRNLLRTRLAMREYQTGIKNRMVAAINCYGLRDQEDDGDLFHNKGRVRLSVYIGRLPKHTREAVIRQWSLVDELEKAIEDLEQQIKIELKPIAAAQRLKTLPEVGSILGATIYLEIGAVNRFASAQKLASYSGLVPVVHASGGRVFYGPTSNRSNPYLRWAFVEAANLASARRKAHPQRHVSRLYERLRPGKGQQKAVVAVARHLAESAWWILTKIAGLSRAAAGGGRGVFVRETGKRGVSV

SEQ ID NO: 396779 - protein, 350 aa, unidentified
MIIIGVDFHPEFQQIASVDTDTGEFQEKRLTHREEAEKFYRALACAGQKVRVGMEASGHARWFERLLAELQIELLIGDAAEIRTKRVRKQKTDRQDAQLILSLLLEDRFPRIWVPSWENRDLRQLLWHRHRMVQARTRIMNQLQAVALNEGLRCKKKLWRERGREQLESFRLAPWASRRRRDLLELLDRLNPTIAELSQAIQQEVEKCPEARRLMTHPGVGPLTALAFVLIIGEADRFQCGKQVASYLGLVPLEDSSGNRRRLGHITKQGSSMLRFLLVEAAQVTARSLPQWRSKYLHLMMRRGRKTAKVAMARRLAVHLYWMMRQGWDYQQWIKFGSHAGQLGNRHGVQ

SEQ ID NO: 396780 - protein, 345 aa, unidentified
MESMYYIGLDVHKKTISYCVKDASGQVLQEGKIGATRGELDSWMKTLPQPWSVAMEATIFTGWIYDHLLPHAAQVKVAHPLMLRAIAAAKKKNDRIDAGKIADGLRCDFLPECHMAPTEIRDRRRTLRYRHLLVRQMVQLKNRVSGLLMETGVSYSKQKLHKVGYFRELLSSNEEIHPNIRPLLKLSRDAIVRLQKTEYALVSSLQRDPLLADRIKRLRTVPGVGPITALTWALEMGEVSRFPSIKQAISYCGLCGDEKSSADKVIRTPLSKQRNKHIQRVLVEAAKLAPRENHELALVYETEKQKGNANRATLAVARKMVAYLLAVDRGQRNFVPAEDHRGVAA

SEQ ID NO: 396781 - protein, 343 aa, unidentified
MERYYYIGLDIHKRIIAYCIKAIDGSLIGQGKIVADRQSLEAWVKDLPGPWIGAMEATMFTGWVYDFLKPHAVTLKVAHPAMLKAITAAKKKNDRADAEKIADLLRVNLLPECHMLSEEIRELRRILRYRNHIVRTAVKMQNKMSGLLMEVGVTYSKKRLHGKKYFRELLERVDEIPPSVKELLQLSRSSYEMFRSFQKRLIETLRTNQLIRDRVHRLMTIPGVGEITALTWTLEMGDPGRFSSIRKAVSYCGLCSAQKESAGKEQRGPISKKRNKHLQTMLIEAAKLAPHWNEQLAIVHERELKKGNRNRATLAVARKLVAYMLAVDKNQADFKLSSEIRAA

SEQ ID NO: 396782 - protein, 430 aa, unidentified
MNCNTQNAKIAGITERTLVVGIDIGSEMHYARAFDWRGYEYSKKAFAFSNTEAGFTSFVAWLQEFMEKYNKDTVLPGMEPTGHYWFNLGKFLQDNGMKPVLVNPHHVKKSKELDDNNPTKNDRKDPKVIAGLINEGRFSYPYLPEGVYAELRTASNLRFQAQEELTRVLNRIARWFSIYFPEYKDVYGKTDSVSGLMILKQAPLPSDIKALGVEGVNKVWRDAKLRGVGIKRAKTLVLAAEHSIGSREGLTVARMEIQNLLSDYEIYNRRVEELMILLTGLLESIPYIDKLLAIKGVGLKTVSGFIAEVGDLSRFDNPKQLQKLAGYALVENSSGKHKGETRISRRGRKRLRYVLFEVAMSVLGKNSEFRESHHYYTTRPENPLKKMQSLIAIACKLIRVFYVILTTGVDYDGSKMLLDIRRPCTQAQAA

SEQ ID NO: 396783 - protein, 448 aa, unidentified
MSKSRTKNEKVKRISQLPVINTLVAGIDVSDTEMMVAYPINSDELEIRAFGCFTDDLHSIAECLKAKGITSVAMESTGVYWVALFLLLQEYGFEVFLVNAKHVKNVTGRKDDESDAEWIQKLHSCGLLKTSFQPDNMTRTLRSMVRHRKNLVCTSTSYINRMQKAMELMNLKLHTIISDIDGKTGTLIIEAILSGERDPQVLADLRDKRIKASREDIIRSLKGYWTTEHLFELKQCYQLYTTHRNMIEDCDREIEKQLIGYIACKNDGVIPEIPKTRRTVSSKNKVSFNLTMYLKKILEVDVTEVFGISEISGLTIMSEVGTDMTKWKNEHHFTSWLGLAPNTKISGGKEISSRIMKKKHHAGQAFRMCAFSLYGSKTALGDYYRRIKSRAGAGKAIVATARKLAIIYYKMVRNKEAFNSTALNDYQKKYKEMKITQLKRKLAILEAA

SEQ ID NO: 396784 - protein, 289 aa, unidentified
MSLPKPLCVGIDVSKATLDIAASSVIEQFSVGNDADGFDSIIAELRTREVALVLMEATGGLEAAVASTLQVEGFEIAVVNPRQARDFARAMGYLAKTDRIDARALAQMAEVINRHPERNRFIRALPDAERQVLNAMVVRRRQLIAMLVAERNRLYPAHPQSRKSINIIMKTLDDELARIDEGMNNHIRNHFKELSERLSSIKGVGTMTVAALLAEAPELGRLSRRGISALVGVAPVNRDSGTMRGRRTIFGGRAGVRTALYMAALVATRFNPVIKAFYMRLVSVGKPKK

SEQ ID NO: 396785 - protein, 356 aa, unidentified
MSETVPAEVIVGVDTHKHLHVAVAIDALGARLGAMTIPVRAEGYRDMVAWARALGTIRAFGVEGTGSYGAGLSRFLREQGYDVFEVNRPDRQLRRRRGKSDPLDAEAAARAVLGGQAAALPKCGTGAVEMIRHLKAARDGALKARSQAMLTIKALVVGAPAALREQLERVAGKVTLVRHLAALRPGALTSTTASAKAGLRALARRWLALGEEIEAHDVHLERLTRQHAPELVEAHGMAAGTAAEMLLLVGDNPERIRSEAAFAKMCGACPIPASSGKTSRHRLNRGGNRRANSALHRVVVTRLRGHRPTLDHVRRRTAEGESKAEIMRCLKRYVAREVFGYLCRRPTVSAPAQIAA

SEQ ID NO: 396786 - protein, 346 aa, unidentified
MTIVEDRRAVTGGVDTHADMHVAAALDPIGGLLGVREFPATAAGYASLLGWLDGFGTVALVGVEGTGSYGAGLARHMAAAGVRVVEVDRADRQDRRRKGKSDPLDAVSAARAAQSGRAAGAPKGRDGAVEAIRALMVAKRSARNERTQAINQARSLIVTGSDDLRARFGKHTTAALVAEIAALRPRPGDVPGYATRIALRELGRRAQFLSAQIANLDELIIPLVTARAPSLLALHGVGPDTAALLLIAAGDHPERLRSEAAWAHLCAVAPIPASSGKVRRHRLNPGGNREANHALWRIVITRMSNHPATRGYAQRRTAEGLSKKEIIRCLKRYAAREVYPHLRPAG

SEQ ID NO: 396787 - protein, 341 aa, unidentified
MKRFIGVDLHKNSFTVCYMQNKGEHGLKTFKVSPNDVEAFKATLTEQDEVAVESTGNTGYFAREVKGAVSRVRIINPIQFKIISESVKKTDEHDAITIARYLSKGLIPEVRMRSKEEAKLASLIGTRDKFVKLRTTLKNKIHNILNASGIVTTKEMFSGDKSLDKLLSMGLDQADLFEIRIIVDQIKSLNKSIDEINRELTDRGKKLPGHKNLTSITGIGDLSATILLNTIGNVDDFGDDKKLAAYFGIVPRVAVSNDTSHYGKITKRGNKIARTALVQSTLIAIRYNHYLRRFYFKLKAKKGSGKAIIATARKLLTIVYRTLKNDWVFEDFNKFKLAVSV

SEQ ID NO: 396788 - protein, 368 aa, unidentified
MDVHADSISIAIAEPERKGEVRLYGKISSDLHSVEKLVRKLGHPGKELRVCYEAGPCGFVLARYLLKMKICCTVVAPSLTPKGKGDKIKTDRRDALMLARLHRAGELTAVHIPDAQDEAIRDVCRARTDAVGDLRRVRHQLKFFLLRNGYRYSESTAWSEAHMRYLRELSLPLPAMKIVLEEYLQAIDGAKERIERLEVHMGELLENWSQAPVVRSLMGLKGFRLVAAMIMVSELGDIHRFKSPTQLMAYLGLVPGESSSGGTRRVGSLTKSGNGHLRWLLNECAQHYRLPPKVSTDLSKRQLAIAKLHRDEVKKISWKCQNRLHEKGRKLAARLKLRQKVQIALARELCGFVWSVMRVVQPQPTPKA

SEQ ID NO: 396789 - protein, 344 aa, unidentified
MKVTRLGFDIAKRVFQVHGVDENGKVKARKTLAREKVLEYFAQLPVCLIGMEACGGAHYWGRELTKLGHTVKLMAAQFVIPYRKRGKNDANDAEAICEAVGRPNMHFVAIKSEEQQSVLMVHRARTLVVANRTAQVNQIRGLLGEFGLVVAKGVARLRRQLPGILEDAENGLPVLAREVLAGLLDQFREFDARVTAYDRQIRALAEASEPARRLMQVEAIGPQTATALVASMGDPHVFKSGRSYAASLGITPRQHSSGGIDRLGQITRQGDRYLRTLLVHGARAYLRVVDKKTDGKSVWARRLKERRHINVVAVALAAKHARIAWAMLAKGTEYRLVDTEEAAA

SEQ ID NO: 396790 - protein, 428 aa, unidentified
MSNQEIIRRKQYCQIVQEITGSDQYLVVGIDVGKDKHHAFMGSATGKALFRKLIFENNLDGFSRLLKTADEIKSQNGLCKIVYGLEPTGNYHKPLARHLIRYDCNVALVSGVAVKRNRELLDGRWDKNDTKDAANIADLVSRARCLYYDSPSPSIMELRALLSLRRRLKREEHGLRMRIRNNLLAQYFPELDRFYNACESESLAIVQWFLNPDTIAAMEFGEFFHLVTKTRRGIAQTLRLRKIHGLATKSVGCPMGPAAEYEADLLVEKLKQVRQQIQKTADLIEDFCLEFDEYSYLLTIPGFGPYISARVLASIGDPFRFENRKQLIKLAGYDLCAKRSGKTSDKAVPVISKKGNGELRYALYQAASVAAARVDLFRTYFTRLLRERERERGIKTKMRVKLAVKMLVIAWTLMKKREVFDPAHLNIE

SEQ ID NO: 396791 - protein, 348 aa, unidentified
MPVYIGVDFHARKQMLSYLTTEDGEIQQIELLHEADDVRGFYEQLRSKGAVIVGFESSGYAAWFEEMLEELDCEIWIGHAAQIRKCAKRRQKNDRRDADLILELMLRGDFPRIHRYSRANREVLQQLRYRQRLVKMRTMTINSLRFMAASRGITLRGKLQSQRGQDRVLALALPTPMDQQRNELCRLLMELQQKIETVEELLTQTAAADVKVERLRTHPGIGLLTGLCLVHTLASIERFANGRKVTAYAGLDPVEDSTGERRRMGSISKQGSRLLRALLVEAGQVAARHDDELGQVYRRLLVRRGHATAKVAVARRLLVRAFIMLRDEIDFAEFQRRGVAARSSRWSA

SEQ ID NO: 396792 - protein, 315 aa, unidentified
MDEPRRVTTCVGIDVSKDRLDVHLRPSGQAFAVTRDGKGLENLVERLLALDVSLIVLEATGGFETTVAAALASACLPLAVVNPRQIRDFARALGKLAKTDAIDAQVIALFAERIGPQARPIASPQAQKLGELVTRRRQVVEMIGMEANRKRRAADKRLVRKIERHLGFLEKDLAEIDADIDADIRASPAWRETEDLLTSVPGIGPVTARTLIAELPELGLLDRRKLAALIGVAPFNRDSGTWRGHRMIGGGRTDVRKAMYMAALVATRWNPALKATYARLVQRGKPKKVAIVACIRQLLTILNAIIRTKSKWQNA

SEQ ID NO: 396793 - protein, 342 aa, unidentified
MQITTIGIDLAKTVFQVHAVDADGATVVRKRLRRSEVLSFVSGLEPCLIGMEACATSHYWGRELAKFGHTVKLMPPAYVKPYVKRGKNDATDAEAICEAVSRPNMRFVPVKSADQQAVLMLHRTRALLIRQQTMLANAFRAHLAEFGIVVAQGIRHVRALIEKVFGEDTVDLPALARTALRPLVAQLMELRLQIKTIEKELLAWHRTSQQSRRLETIPGVGFITATAIAATVTDPSHFRSGREFSAWLGLTPRQNSSGGKDRLGRVSKMGNGYLRSLIVVGATAMIRYAREKGPVSARWINVLLEKKPARLVSVAVANKTARIAWALLVRKENYQVSVPVAA

SEQ ID NO: 396794 - protein, 337 aa, unidentified
MEYFAGLDVSMAETHVCVVTRNGAVIHNAKVPSTPADIAAELAQAPACRRIVFETGRMAPMLYHGLSQLGLPVVCVESRQAYQALKLLATHKTDRNDARGLAHLARTGFFKPVHVKSLPAHAVRSLIIARKKLVGQRVTLENQIRGLAVVFGVRLPRALSPAFIRQALGASEGIPCLSAAMRGLVAARAAVLAAVVAIDADIKRMVRASDACRRLMSIPGVGQLTALAFTAAVDDPRRFRRSRDIGAYLGLVPRRYQSGEVDYTGSISKCGDRRVRTLLYEAANVMLTRYKGPLKLKDWAFAIAKRSTMRKARIALARRLAIIMHAMLRDGTEFKPA

SEQ ID NO: 396795 - protein, 361 aa, unidentified
MNAVAVAEANGEVRSLGMIANREDSIHKFIRKLGSPEHLRACYEAGPTGFVLYWQLTQLGVKCDVVAPSLVPKKPGDRVKTDRRDALKLARSHRSDDLTAVWVPDEGSEALRDLVRAREAAKQDQLRAKHRLTKFLLRTGQRPPLGVKAWTEKYVEWVQQVRYTHPAQEATLLDCLNEVQHMEERVKRLEQSIVEVIQLAPAPMQEVVRGLQALRGIAHISAVTIAVELGNITSRFESARDLMGYSGAFPSEDSTGKRIRRGGITKSGNAHLRRIVVESAWSYRHRPAIGARLRRRQEGLPAEITEIAWKAQNRLHKRYMTLMARGKEQRKTMTAIARELLGFIWAIGIKAEAACKQQMAA

SEQ ID NO: 396796 - protein, 340 aa, unidentified
MNATTYGLDVAKLVFQMYWVDAQSGEITNRRFRRDELLVFLAQRSAGRVALEACGSAHWWARKIKALGHEVVLLHPKFIRPFVQTNKTDAADVRAIWTAVQQPEMRTVAPKTEDQQAMLGLHRMRSLLIKFRTMQVNQLRGLLYEFGVSFRAGRVAGLNEIRTRMAELEDTLPGTMISSLQDQLKRIDSIEQDIDQLENKISVWHKQEAACQAIAAIPGIGKLSATALVATIGDASTFRSGREFASFIGLVPRQSGTGGKVWLGGISKRGDPYLRTLLIHGARSVMCHTKVPGDWQKAIQERRPGNVVAVALANKMARTVWAILAHGSTYDKHHVSIKPA

SEQ ID NO: 396797 - protein, 452 aa, unidentified
MARGSGLTRGDRDRNRKIAALRGVVRRDRAVLAVDLGEDKQAAVLVDHEGRVLARKMVKVKAHQLGGLLEWAAGRAARAGFAGLVVACEPAGHRWKALMGLADAAGAGFCCVQSLAVARAREGDDYTRDKTDHRDAYLIGRLAVRLGCYLPGRAEEGRARLRHRGARRFALVADLIAARQQIGDLLACAWPAALGTAARPLESTTWLAAMGVVTDRCCGDPARLRKMGYDKFAAAIRRELPRWGAKRACGKIAAGLREALADRGGVAAQRRGALERVHLLMADWRSLLARLADTEARMCAVLDELGLTSLAASIDGMPAVGAAVILAETGDLSRFASGRAVVKHAGLNPAENTPATLAGATRISRRGRPGLRTAAWRAAWPGLRHNRVLRARYAHLTGRDSGNRLSGGQARAACAATLLRWLRAVITRRQAWDARIAAGLIPARAVTAPAAG

SEQ ID NO: 396798 - protein, 402 aa, unidentified
MVVSVGIDVSKSKSTVAILNGDGSIRAKPFDVHHVADELQALVDYIKRTSEPPTILMEPTSHYHYPLLKAFTEAELPVCLINPYQMKKYGDTELRKAKTDKRDSLRIAQYALEKSYSLIPYTPQDQKYEDLRFLSRQYSQRISTLTVAKVQLLSLLDETMPGITTILPLKSRDPDNCVLLRFIKRFIKRFKSFDVIRKMGKTRFLDSYQVLVKKTKDRFAGSKGLAIYELVLNSVTTRGENPLSAMTQDQCVDLVSTSQKAADEINLQMRIIAETMPEYKVLRSMAGVGDRLGPIILGEIGDIRRFHSGKALNAYAGNDAPPYQSGQFESRNRHISKRGNPALRKACFEVMQALKLTKPQDDPVYLFLLKKEQEGKPYNVAKMAAVNKFLRIYYARAMELYK

SEQ ID NO: 396799 - protein, 412 aa, unidentified
MDLMVERCAGVDIGKDEVVACVRTPGPNGKGRHKQTRAFSSFTSQLEAMADWFASEGVTEVVMEATGPYWKSPWYVLGERGFDLKLVNARHVKILPGRKSDVADAEWLAELLEHGLLRSSFVPPAEIRQLRDLTGYRKRLVQEHTSECQRVQKTLEDAGIKLDSVASDVLGVSGRLMLQALVAGERDPEVLADLAKAQLRKKIPELREALQGRFRDHHALMVRLSLDHAKYLEAAIAELDAQVDRVMAPFVEARDHLDTITGVGKRAAECIIAEIGADMTRFPTAGHLASWAGMAPGNNITGGKRQSGTTTKGNVWLAEILNQCAWSAARSRNTYLSAQYWRLARRIGKKKAATAVGHSILVICWHLLSNNADYDDLGGDYFTRRGNTDRHQDHLVRQLQDLGYQVTLRKVA

SEQ ID NO: 396800 - protein, 386 aa, unidentified
MHDGINLPVPERTGIPGDCATLFVSLELSRSTWVATSLAPSSKKMSKYTLVGGNGRELLDLLARLKTRAEQRIAAPVKIVAIHEVGLDGFWVHRLLEANSVESHVVDPASIAVPRRHRRAKTDAIDGETLLRTLMAWQRGEPRVCAMTVPPSPSEEDRRRISRERAVLLRERIRHTNRIRGLLFGQGIANYNPLNKNRRECLEELRTGDGCPMPARLKAEILREIDRLELVLRQISQVEAERDEMLRPAEASSPAALLMRLKGIGAEFATVLYLEGLFRHFENRRQLAAYAGLAPSPWKSGSIDHEQGISKAGNPRLRTTMVELAWMWVRYQPDSALSCWFRQRVGSERGRTRRISIVALARKLLIALWRYVTHGEIPAGAVTKPV

SEQ ID NO: 396801 - protein, 371 aa, unidentified
MGWLPPSPDGIAMCQECGCDSHKNGKDGKMKDTIIGVDLAKRVFQIHGATIAGEVKFRKKLTREQFRLFIAQQPACIVVFEACGSANYWAREVEKLGHEPKLIAPQYVRPFVKRQKNDATDAEAIVIAARQPEMRFVLPKTAEQQAKAVLFRNRERLVRQRTELVSALRSALYEYGYVFPIGLAHLKRMDALVQGPDCGLPSLIVTECQELLAQIAGTTEKITTKTKRLKALADETDTARRLQTMPGVGPLTALAVEAFVPQMGQFRCGRDFAAWLGLVPRQHSSGGKERLGRVSKAGQTDIRRLLIIGAMTRILAHTRYKGPAESWLGRMLAKKPKMLVGIALANKMARQLWAMLTRNEDYRDPAMAAAM

SEQ ID NO: 396802 - protein, 336 aa, unidentified
MNKFKTFIGIDVSKKTFDAAVLKDTDPQQIHHRSFAQSVRGYASFYQWLIEQGATSEILVCLEHTGIYINGLVEFLIQQGLAVWVEMPLRIKKCMGLQRGSNDKLAAIHIAKYAWRYRDEKRLWQPTDTNLEELRHYIAQRDRIVLALTQLSVPVAELAEVGQQKHSQKLARLQAQAIRSLKKSMEKIETAINELIESDIKIKVIVERVSSIKGIGKQTAINLYVYTKGFTEFDNGKQLACYCGVVPFTKSSGTSVRYKTGVSPFANRKLKKLLHLCAMAAIRWNEDMKQYYERKVKEGKNKMSVINAVRNKLVLRIFAVVRDERIYVEKRYPAGG

SEQ ID NO: 396803 - protein, 361 aa, unidentified
MTTTYYIGADVHSNTTELAIEKSKKIVARYSVPTTIPAISNVLDSLQGKRLLVFEEGPMAGWLYRNLNEKVDELIVCDPRRNNLISSDGDSDDKIDAAKLALLLRGGYLRAVYHSDNDERAELKHWVNLYHDRVRDAVRNINKIRARCRMFGLSIPRAVLRNPAHRLKWLLQINHPVLARQLKMLWIGYDATAKQARIGKRQLSVLGKEHDIIKLWGRLPGIGLIRATTLFAYLDTPWRFKRKNKLWKYCGVGLQRAASGTDKKGRPKPARLQLPWAVNRTLKNAVLGAAISAINQKDNPFKDYYERMVQNGVITSNARHAVARKMLTAMWGMWKTSSQFDGKLLCLLSGHNRPTGSVSSR

SEQ ID NO: 396804 - protein, 343 aa, unidentified
MQTITTIGLDIAKSVFQVHGVDAAGQVVIRRQLKRRYVLAFFQKLPPCLIGIEACASSHYWSRELQALGHTVRLMPPAYVKPYVKRQKNDATDAEAICEAVARANMRFVPTKTPEQQSCLMLHRTRHLFIRQQTAVINSIRAHLAEFGIVAPVGRKGVTELLHIVADPSDKRVPEVARVCLAALGNQLLSLKEQIVEFDRMIMVWHRSNETSKRLHYIPGVGPMLATALVASVADPRTFRSGRNFSAWIGLVPKQHSSGGKDRLGSISKQGDRYLRSLFVAGALAVIRYAKIHGTKHRPWLTALLTRRPTKVAAIALANKLARMAWAMMARGERYRQPVALAA

SEQ ID NO: 396805 - protein, 319 aa, unidentified
MQRIIIGVDVSQDFLDVHVRPTAARRRFANTSAGIEELVAWAKPLAAERIVFESTGPYQMAAVGALLAEGLPAVVVNARQVRDFAKALNYLAKTDTIDAAVIAHFGEVAVTQVRPLESEEIRTLRELYDRRGQLVHMLAMEKNQRHSATVARASAKVLHSIERHIDYLDKQIHDLEERMDRLIENSATFQARNEILQTITGIGPQVSRTLLVHLPELGQYTRQTIAALVGLAPFNDDSGDHAGQRHIRGGRSKVRVGMYQAAIAAIRHCPRMKVFYAALKARGKASRVAIIAIARKLLVLANAMIRDMSPYQAPANSVC

SEQ ID NO: 396806 - protein, 354 aa, unidentified
MGLKHQKEKRSMDYFGGLDVSVKDTSICIVDDTGGIVREVKVASEPEALLAVLVSPLYRFKRIGLEAGPLSQWLFSALVEAGLPAICVETRHMRAVLKAQINKTDRNDARGMAQMMRVGLYRPVHVKTLRSQKLRMLLTHRKLLQSKAIAIENDLRATLRNFGLKVGVVGTVRFEARIRELVENHPDLTLLVEPLLVVRGVLREQLDILHRRLLAVVRDDNVCRRLMTVPGVGPVVALTYRATVDVPARFRKSKSVGAVFGLTCSRDQSGERDRPGAISRCGDEMMRAMLYEAAQSMLRSKKWSWLKAWAMKIARHRGMKRAIVALARRLAVIMHRIWVDGTEFRWTREAAAAA

SEQ ID NO: 396807 - protein, 343 aa, unidentified
MDQIIRIGMDTSKHFFQLHGVNAAEHPVLRRRLRRQDVVAFFSKLPSTEIGMEACGAAHHWARVLSELGHTVKLIAPQHVKPYIKRNKNDGRDAEGLCEAMSRPTMWFVPVKTAEQQAALMLAGTREQLVARRTQVSNAIRGYAAEFGVAMPKGLDRIEPLLARIAADTSVPAMARELFALYAADYAQLQLQVKAIDRRLLAWHRAHADSLRLAEIPGIGPIGATALVMKAPDPKAFGSGRDFAAWMGLTPKDHSTAGKTRLGRITRAGDERLRSLLVAGATAVIRWVRRGRGRASPWLVALVARKPPKLAAVALANKMARIAWKLMVTGERYRAGSATTLAA

SEQ ID NO: 396808 - protein, 372 aa, unidentified
MKNIAYVGLDVHQDFIVVAMLAEGSERLLDERKIINDRVKLVKYLKKYRRDYELRCCYEASGCGYVAYRWLREEGIECEVIAPSLIPKRSGEKIKTDRRDAEKLARLFRAGELVSVHIPTEKEEVIRGLVRCRETLKREVIKSKHYVLKFLQARGLVYRGGSNWTGKHWNYLRQLKFEGAEDITYRQYINLLEYKLTQLKELDRQIEEIAFTDEYRGKVSRLRCLRGIDTLTAMVLISEINDFARFSRPGELMSYLGLIPSESSSGNVRRQGRITKAGNVRCRRILIEAAWHYQHKPAMSGIIRKRQIGQPLEIIKHCWQAQQRLHKKFWRIAVRKERNKAVVAVARELVGFIWAIMTGRIDRGKGIELTVA

SEQ ID NO: 396809 - protein, 422 aa, unidentified
MCLPFILTRGLLWFWPEQSRTNGRDTRVPEALQCKQFELANTPMKSELYLGLDVDKEWIVITVAEWGRNGAVQDLGAISNDLHALEKLLARLRKRYGPEVIIRACYEAGPCGFTIARRLRQLGVECAVVAPSLTPTRAGDRLKTDKRDARKLARLLRAGELTEIYIPEPTDEAIRDLCRARSDAVDDRRRSRHRLKAFLLRHGYRYQGKSAWSAAHERYLRELVLPHPAMKVILEEYLISVQLASERIARCEAAMSDLLGKWRLEPAVRALMAMKGFQTVAAMIVVSELGALDRFTHPRQVMAYLGLVPSEKSSSDRRRQGAITKCGNAHARWLLVECAQHYAAPPKVSKELSRRQQNQSRAVRTLSWKAQNRLHQRYCRLMARRLQRNKVMVAVARELCGFIWELLRTQNCYHAPAPSGIS

SEQ ID NO: 396810 - protein, 346 aa, unidentified
MKINRIGVDLAKNVFQLHGADHKGKAVWKRKLSRDKWLKVLFETAEPGSVIGMEACAGAHHWSRVLTEKGYEVKIIPPQFVKPFVKSNKNDANDAQAICEAMARPNMHPVKVKTIEQQDLQAVHRIRHEIKSHRIAKANQIRGLVTEYGLVAPKELLSLRKAIPEWLEDADNGLTMFFRELLHGLWGDLRSLDKRMAELDKQVAVIAQENPVAKRLQQLRGVGPLIATALVATMGDAKQYRKGRDMAAAIGLTPRQHSSGGKDRLLGISKRGDAYLRCLLVHGARSAMRTAKDKDDRLSRWITSLQERRHANVAACAMANKMARMAWVIMSKGVDYDPDFSPVMAN

SEQ ID NO: 396811 - protein, 310 aa, unidentified
MDIITVGIDVSKNRLDVAVRPSGEAFSVERNAGGLEQLVGRLRELGPHLVALEATGGFETIAAAALAAAQLPVVVVNPAQIRAFAVAIGQRAKTDPIDAAVIAHFAEATKPQVRPLPDEATRLLADLVARRRQIVEMIGAERQREKRVTVPHLRKSIARLLKALEKELTTVNTDIDDAVRGSPAWREKEDLLASVPGVGPTIARTLVAELPELGQLTRKQIAALAGLAPFTRQSGQWRGRSFIGGGREAVRTVLFMGAMVAKRHNPVLKAFFDRLVAAGKPKMVALIAVARKLLTVLNAILRDSRPWQVA

SEQ ID NO: 396812 - protein, 445 aa, unidentified
MSESSISAASEPEWAAFAAIDWADQKNFWRLVPVGSQRHEQGELENTPEAVEAWAVALQQRFGGRPVAICLEQSRGALVYMLTKYSHLVLFPVHPTTAARYRETFCPSGAKADPSDTASLLDLLMRHRERLRPLQPDTVETRLLQFLVEERRRTVDEKTRQSNRLTACLKLYFPQILHWFGDVTTPLVEDLLERWPCLEDLQHAHPGTLRRFFHEHNCRSEKILEDRITAIYQAIPATKDQAVLEAGMMIAHGLGALLAALRSSIATFDERIAALVLAHPDGALFASLPGAGPVLVPRLIAAFGTRRDRYQNADEMQRYSGIAPVKKASGKSQRICFRLACPKFLRQTFHEFASHSIGQSEWAKVYYEHLRNDEKKTHHAAVRALGFKWIRIIFRCWKDGKPYSEQVYQQSLRRRSSLLGDALALATGAGWKTVAGFRKLSENNA

SEQ ID NO: 396813 - protein, 409 aa, unidentified
METIRERGCGLDVHQASVVACLLIHALGRKVKKLIRTFGTTTQDLLALRDWLQSEGCTHVAMESTGVYWKPVYALLEGAFEIVVANARHIKNVPGRKTDVKDAEWIADLLCHGLLRSSFVPPKPIRELRDLLRYRRKLVESRGAERNRLLKLLETANIKLSSVATDVFGASGQLMLDALLEGVQTPQQMAELAKGRLREKIPQLQLALEGRLEEHHRFLLRLQRRRLQQVDADLAELEKQITDKLQPYASQHALLMEIPGVDRIVAATLIAELGIDMSVFGSAPRAASWTGICPGNDESAGKRRSGRISQGNMHLKTALVEAASAAARAKGTYLREKFYRLKARRGYKRAAVGVAHKILIAAYHMLDKQVSYNDLGDAYLDKLSSKNLTRSLVQRLERLGLHVNLTAAA

SEQ ID NO: 396814 - protein, 370 aa, unidentified
MHDNHPATLFVALDLSRSSWVAAVHAPHAAGKVSRHKLAPGAEGLLALIGRIRAQAERALGAPVRVASCHEAGRDGFWLHRVLQKAGIDNRVIDPASLLVDRRARRAKTDRLDAEALLRALMALCRGEPRVCAVVRAPSVEEEDARRTTRERANLLKERVRHVNRIKGLLATQGIDDYQPLRPDRLERLGTLVTGDGRPLPERLAAEVRRHLRRLELVLEMLEEVEAERDRATAAAPGKAALLLRLKGIGPEGAAVLCAELFYRPFANRRGVAAYAGLAPSPFASGDSCREQGIGKSGNARVRRMMVELAWLWVRLQPESALGRWFTARVGSAKGRVRRIAIVALASKLLVALWRYVETGLIPTGAVLKA

SEQ ID NO: 396815 - protein, 347 aa, unidentified
MALAAISVLGVDLGKNVCSVVGLDASGKVVMRRKIRRETLIGLAEKLPPCIVGMEACCGAHHLGRVFTAHGHDVRLMSPEYVRPYVKAQKNDDRDAEGIAEAATRPTMRFVDLKSQDQLDVQTLHRSRDRLVGERTALTNQLRAILLERGLIAPKGRRKLEEFLAELMDERGGADLSPRMVLLVVDARQQWAELDRRIAAFNDEFVRWAKENEEARRLTAIPGVGAIVASALVAAIGHGESFDRGRDLAAWLGLVPRQLTTGGKPKLLGISKRGNTYLRKQLIHGARAALPHVAERDTPLGRWAKALMMRAHRNVAVVAFANKLARIAWAVLRRGERFAAAGMTATA

SEQ ID NO: 396816 - protein, 312 aa, unidentified
MNGSVCVGIDVAKAFLDVHILPSGLAGRYRNSKTGIAALVKMLKGQDPVLVVLEATGKLELPAASALGDAGIPVAIVNPRQVRDYAKATGQLAKTDALDAKVIATYGRDLHPEPRPVPDKESLALQGILARRRQLVQMLTAEKNRLDRAHPAARRDVREHIEWLYERLKLVDHDLHELIKASPSWRQRDALLQSVPGVGPVASRTLLIDLPELGTVDKKAISKLVGVAPLNRDSGGLRGSRSVWGGRPQVRCALYMASLAAIRANPAIRAYYRKLREAGKKPKVAQVACMHKLLVILNAIAQSGAQWEAQPT

SEQ ID NO: 396817 - protein, 404 aa, unidentified
MAMNMQYERAFGLDLSKKTFHGCILDGPDLAKRHFFTGEMGPKGKAKLAGRLCKGDLVLMEAGSSSFSLARFLLENTEAEVVVLNPAKLYNIFNSTLKTDKVDSEKIVRIARNMPRDEWPTVSIPTKSEQAERSAVSMEVFLAQEITRLVNRVYALFNSMGHPFISKKDLKDEETRLVLANRLLCEEPMAFHQLLMLSEQIKVVTGHLEECKQTLREICLAHPTQALSLLSLPGVGLMTAASQIAFLGDASRFNSPDSYVNYVGLSERRFDSGNKVSKGHISHMGNRCIRRNIIQAAWVATTKTKANPLSRKYDDLRFRGKSKPVAAVAVAKKMIQLSYILVKSEGIYEFTKQQGLEAFRRKLQNHGLVQLLEHLPETTRRQMEEVDRIKKEEVAATTSPRKLA

SEQ ID NO: 396818 - protein, 373 aa, unidentified
MTSIIRIGVDTSKSVFVLHGVDASEQPVLRKKLRRRQVLAFFAKSEPTEIGMEACGGAHYWARELRALGHEVFLLPPQYVKPYVKRNKNDSADAEAICEAMSRPTMRFVPVKTADQQAALMLVGTRDALVRRRTQLTNMIRGYAAEFGLTAAKGLAKIEPLLTRIAEDAKLPELAKQLFALHAQEYASLKRAIEKLEAELMAWHKHNEISRRLVEIPGIGPIGAILAAMKVPNPQAFSCGRDFSAWLGLTPKDHSTAGKTRLGVITRAGDEALRSVLVAGATAVIQHVRRGQGRPSPWLLALLRRKPPKLAAIALANKNARVAWKLMVSGERYNPARASTESEGRGAALRDGSAPRPSLTSPGRSRKTVAMNA

SEQ ID NO: 396819 - protein, 411 aa, unidentified
MDKENFIYVGIDLHKETHTAVMIDCYNQKLGEITFPNRPVDFPKLVTKVKKCNTDGKEVVYGLENAYGYGRALAVWLIDKGYLVKDVNTAISHQQAKHRGAMYRKSDSDDAKAIALATLNMLDKLPDACPNDAYWSLGQLVHRRDNIMKQRTRLVNQLHEQLCIAYPSYKQFFNDISRPTALYFWEHYPSRKYLKGKSVEDLRAELVPVSHNKCSTKTCEKILDAVASDKVKNNAYQDARDMVTLSIVSDLQHYDSQLAEVDKMLEQMYKMLGCTLTTISGVNVITAVKILAEIGDIKRFSNANKLAQFAGIAPLHLSSSGKGKDVATKQGNRRLQATIYFLAIQMVQVSSKGTPRNPVVRAYYEKRKAEGKTSQQALICISRRLISIIYGMLKYGTEYRMPVVENAGEKL

SEQ ID NO: 396820 - protein, 351 aa, unidentified
MREYMAFDSHKHYTLAECEEATSGRTRQCRIEHGPGAIRAYLSKYPSGLEVAVEATGNWYWIVSEIEQAGDLPLLVHPRKAKLMMGMINKTDKLDVHGLNRLQRNGTLPTVWIPPGALRDLREVTRVRMLLGNQRTRLKNRISSTLAKYALGVDEASDVYSATVRPRLLEQIALLPTHTQWAATLMLEQLNFVQAQIVQQEQRLKEILTVTPTMELLISLPGIGLILAAVLALEIGDIRRFASAERLASYAGTTPRVQASGDKLRYGRLRPDVNRYLRWAFMEAGNSVALNYTRCPQRHVSQLYARLRERRGHAKAIGAVARHLAEATFWVISRNEPYRDPALKTSRSREV

SEQ ID NO: 396821 - protein, 277 aa, unidentified
MLLIGCDYRPSVQQIAMLDTETGDYSEYRLKHSDGEAEKFYRDLKLHRAEIRVGLEATGHRRWFERLLTELDCELWVGDAARIATMRVRKQKTDKQDAQLLLKLMLENRFPRVWISGLEDRDLQQLLWHRHRTVQMRKRILNQLQSIAMNEGIQRRGGLRSVQGRKRLEQIPLGRWGARRRKDLLVLLDQLNQRVDELTAAVQQEAEKRPEARLLMTHPGVGPVTALAFVLIVGYPERFPCGKQIGSYVGLIPAESSSGVHRRFRTWRCDVSGRSPK

SEQ ID NO: 396822 - protein, 422 aa, unidentified
MVMDEITEERGALVERVAALDIGKATLTVCIRVPHEDKPGARRQEVRTYATLTPALLELRDWLICQGVTLVVMEATSAYWKPPFYLLEDDIECWVVNARDVKNVPGRAKTDKLDSVWLCKLAERGMLRASFIPSRPQRQLRDLTRYRRTLTQERTREKQRAEKLLEDAQIKLSVVISDIFGKSGRAMLDALIAGQRNPHELAALARRNIRAKTSVLQEALTGHFTDHHAFMLGMMLARIDALTTQINTLTTRIEQATAPLSAQIAQLDEIPGIGTTAAQDLLAEFGTDMSRFPTPGHLVSWAKFAPKARQSAGRSKAASTGKGNPWLGGTLGEAAAGAARTKTFLASRYKRIVRRRGKQRALVAVGNSILTIAWHLLSDPAAHFTDLGPDWHDRLTPLRRKHHLIAELERLSGKKVTLHDAS

SEQ ID NO: 396823 - protein, 330 aa, unidentified
MKSWNVILGVDVSKLTLDISCAERNTHIQIENGSKGFEVFKKWCKTHDVDLKETMVVMEYTGGYEYRFLQFCDSKSIPYCRVPGLEIKQSMGLVRGKSDKADSFRIGQYGEEKKGRLTPSKPLDNNILRLKQLLSFRKRLVRDNAGLKSTEKERQYMYPVKQSDRIIRICKAKIKANEKFIGQVEQDIRELIKSNEQMWQNYRIITSIKGIGEVNGWMTIAYTENFTSFPNARAYGVYVGVIPFEHTSGTSIKGRKRVSHLANKELKSELSQAAKAAIAHDKEMHDYAERKLKNKDYGLVVNNVKFKLILRMFSLVKRGVMYVENYKKSA

SEQ ID NO: 396824 - protein, 384 aa, unidentified
MRGNFIPREYDIFTGLDVSKKSISVTFTSHQGFIRSLNMPHKAEHLLNYVRKHFPDQKIAFVYEAGPTGYGLYDGLAAQAYPCLIAAPSMIPRAPGQRVKTNRLDSKALSENLRGGQLKSIHVPSPTYRQLRHLTQLRDVLVSELAGMKQRIKSLLLFEGIEFPPAPPGSQWSFLVKGKLRKLPCSGTVRFKLDQLLDSLEFNEKQVLKTITEIRRFCRNDPELSQCMKYLMTISGIGWITASQLLARIGDWRELKNIRQLAGFLGLVPIEHSTGERIDRGSITRTGDERLRSKLIQASWSAIRQDGELREFFRSVCRNHPREVASRVAIVAVARKLSVRISVVLMKQRPYEVREKVHSAPLTQEETSPQGTTRRLREPGEKNS

SEQ ID NO: 396825 - protein, 461 aa, unidentified
MRSGGAWCCEPADNFDPGVLRHHRLLLPAGKHAQHTHDEEDAPRGRRTQEATMDVLYERCCGLDIHKRTAVACLVVPGSTGATTKEVRSFGTMTDDLMCLADWLAANAVTHVAMESTGVYWKPVWNLLEGQFELLLVNARHVKAVPGRKTDAKDCEWLADLLRHGLLRGSFVPERPQRELRELTRYRTSLVQERSAEVNRLQQTLEGANIKLGDVATDIMGLSSRQMLAALAGGETDAAAMAQLAQGRLRDTLPALERALAGRVGSHQRFLLARQLAHIAFLDASITEVSTEIAERLRPCAAELEQLATIPGVGRRTAEVLVAEIGTDMSRFPTSGHLASWAGMCPGNDESAGKRRSGKTRKGSPWLRSTLIEAARAAGRTKGTYLAAQYHRLAARRGTKRAAVAVGHTILVIAYRLLSEGDVYRELGDRYFDERDRHAVERRLVARLEGLGYTVSLDPAA

SEQ ID NO: 396826 - protein, 358 aa, unidentified
MGLYAGCDLHAKSNFWGVVDGEGKRVFKKKLGNDPGRILEVLRPFQGELVGVAVESTFNWYWLVDFLMDKGYRVHLANPTKMQKYSGMKYVDDEQDAFWLAEMLRLGVLPEGYIYPKEERPIRDLLRKRAHLVRMRTSALLSLKNILSRNLGGRVRGREEKSGRSEGLRSELLGNEDLVLAGKVSEEVMDVLGQKIREVEGVILGRVAGRESYGGLLSLPGVGKILGLTILLETGPVGRFGDVGNYVSYCRKVPSRWWSDGKAKGQGNRKNGNRYLAWAFSEAAELARRFHAEPRAYYQRKMGQTNAAVAHSALAHKLARVAYYILRDGVFYDPEKLFGTNRAGAESLKGGLVHNHEA

SEQ ID NO: 396827 - protein, 409 aa, unidentified
MEVIYTRCCGLDIHKESISACVVIKEESRREKHLARFGTMTADLLQLGDWLRSRGVLKVAMESTGVYWKPIWNILEGEFELELINAQHIKKVPGRKTDTKDCEWIAELVQHGLVKASFVPAQPQRDLRELTRYRATLCEDKVRVANRIQKVLEDANVKLASVASDILGASGRAMLEALVAGQQDAEQLAHMAKQRLRDKLPELKRALEGRVREHHRFLLRQLLDELYFIEGKIIQVEQRLEQQMSSFQQAVTLWRTIPGVSEVTAWSLVAEVGVDLTKFERVEKLAAWAGLCPGNNESGGKRLSGKSRKGNRWLKRVLTQAAWATIRNRESYLSARFRRLASRRGRKRALLAIAHKILVIAFWMLKTGTQFRDLGADYFDRLKSTDVTRSLVRRLERLGYKVALEQVAT

SEQ ID NO: 396828 - protein, 397 aa, unidentified
MYIVGIDIAKRKHEAAVIDGEGTVIIKPFSFTNNCSGYNRLLAMLTKAKLPLDEVSFAMEATGHYWLALFTRLQKEGFRVQVINPVQTNSIRSFYIRQAKTDPRDALLIAEVIRFGHFSESTLHPENIYELRELCRGRHAIVSMQADVKRKVVALLDQVFPEYETAFTNLFGDTSMAILQTCPTPKELSEMRLEELCHLIEVSSHKRFRMAKAQELQALARNSFGFAMAGDVFSTMIRRYAKHLDFLKQQVREMDRKIAEIMETLDTPITTITGIGPTLGAYILSEIGDISRFSYAAKLAAYAGIDPTMRQSGEYNGVRNRMSKRGSPYLRHAIWLAASSAVLHDPALKLYFQKKRDEGKPYMASVGHACRKMVSIIYAVMRDNKAYTPYIPNEISA

SEQ ID NO: 396829 - protein, 450 aa, unidentified
MQPEVEEIPDAEHELLAARVAAIDVAKASGKVCVRLPGRARRRVSRVWDVAATSGAVTELAEHLVGQGIEKVTVESTSDYWRIWYYLLEAVELSVQLVNARDVKNVPGRAKTDKLDAVWLAKLTEKGLLRPSFVPPAPIRRLRDYTRLRTDLTHDRSRQVQRLEKLLEDALIKLSAVATDITGVSGRAMVEALIAGQRDPKVLAGLARGRMKTKHSALLAALDSRFDDHHAELARMLLDQIDALTTQIDALWARIDELLTAMPDAQPVDPHPGGPTPGPSTDTVSDAALGAVDRLDEIPGIGPNVAQVILAEVGLDMSRFPTAAHLVSWAKLCPRTIQSGPLTRGGKTGQRQPYLKGALGDAAAAAAKTNTFLGERYRRIVKRRGKLKALVAVARSILVIIWNMLDDPTARFRDLGADYHTTRINTERRTRNYVTQLMAMGYRVTLEPAA

SEQ ID NO: 396830 - protein, 422 aa, unidentified
MRSSGLEFVEQRQGKEGGVVFVGIDWSEHHHDVCVVDERGTQLARVWVPEGIRGVVKLHETIADHAEEPEEVIVGIEIDRGLLVGALVVAGYQVFAINPLSVDRYRDRHSTSGAKSDQGDAKVLADLVRTDRHNHRPVAGDSELAESIKLIARAHQSFVWERQRHVNRLRSALREFYPQALEAFGTDLASADAIAVLKIAPTPELGRRLSRSKIAAALGRAGRRRNLEARAEQIQRALRSEQLRASQGLERTYGVIVSSLTGLIEGLNTQIAGFEDELERSFEQHPSAEVLRGLPGLGIVLGTRVLGEFGDDPTRYADARARRNYAGTSPITRASGTKRVVLARFARNERLFDACYLWAFSSLTKSPGARRYYDLQRARGKTHSQALRALGNRLVGILHGCLKHGDPYREEVAWNVREAEAA

SEQ ID NO: 396831 - protein, 364 aa, unidentified
MSEGICFAGLDVHARRTAAAAVRLGSGEVFKAQVVGSPLEAIGWLQTLRGPVHAVYEAGPTGFGLARAARQAGLEVMVCSPGAIPRQPGDHTKTDTRDALKLARLHAAGQLRAVQVPSLELEALRDLVRAREDLRGDLMSARHRIGKLLLRRDLVFGGPGAPWASKRHLAWLGAICLGDPLAHRVLGEYLACHEVLLARRDRLDGLIADQAAHVPWAATVGRLRCLRGVDTLTAVGLLAEIGDFAAFAHPRLLASYLGLVPGEQSSGDKRRQGAITKAGSTHARRLLIEAAWHYRRQPAVSLTLRRRQEGQSPAAIDAAWRAQMRLSGRWAHLDARRGKRRTTVAVAVARELSCFVWEIARQPD

SEQ ID NO: 396832 - protein, 330 aa, unidentified
MKEYTIIFGVDVSKKTLDISYLCGAVTEHKKFSNTVTGMKDLRQWITAYNCTLQNTLFCMETTGIYCFMLTKFLYDNKYDTWVEHATQIKKSMALARGKNDKIDSKRIAQYAAKNLDRLRLFVPASTTLEKIKHLAKTRDRIIDTQSRLTVPVAEFEDVGNKEMAKLLGKSIKKTLSALEADLKNIEKQLLDLIRKDENLCRKYASATSVIGIGFVTAVNLIVHTQGFTQMTDVRKLACYCGVAPFEYSSGTSIKGKTKVHFMANKKLKSNLHMASLSAVKLDADLKKYYERKVEEGKNKMSVLNAVRNKLLARVLACVNNDKLYVKRVA

SEQ ID NO: 396833 - protein, 356 aa, unidentified
MPSNKTTDFAGHDFYVGLDVHKKSWTVTVRTLDLEVAHFTQTPDADLLARQLQNKFPQGHFYSAYEAGFCGTTPHVDLQKVGFENIVIHAADLPQTDKQRKNKTDLHDSRAIARYLERGLLKSIHIMPVHLQEQRALFRCRQAKVKDVTRCINRLRSLLIFFGMELPVEFRDKEYISKNFVNWLSKVQLHTQPGTQVLIQDINDLLYHRQQLLLLTKKLRTAIIAQYKQSYYSMLTVPGIGSITAMALLAETGDLNRFKNPDEFASYLGLIPGEHSSGETLHHIHIQPRCNTHLRPLLIEAAWQAIRKCPVLLAYYKKHAGKNSKKGIIKVARKLALIAKAVAIKQSSYQSNFIEK

SEQ ID NO: 396834 - protein, 388 aa, unidentified
MNITTDQPEAPTAIRTDLGAIFVSLELSRASWLITSLSPGGGEKMSKHAVRGGDVSRLLERFLQLREKARARTGKVFPLIVIQEAGLDGFWIDRVLQNEGIESHVVDPASIATSRRRRRAKTDKIDGETLVRSLLAYKRGEPRVCSMVKAPTPEEEDQRRLCRERKVLTAERVLHVNRIKGLLFCQGICGYEPLRRDRRDRLEELQTGDGRPLPPHLKAQVERELDRLELLLKQIKTVEGERDALLAVAITSMPAPAAMLLDIKGIGPEFAAVLWSEGLFRHFDNRRQVAAYAGLAPTPWQSGAIDREQGVSKAGNPRLRTTLIQLAWLWLRNQPQSALTIWFHERVLRNGGRLRKTTIVALARKLLVALWKYVTTGVVIEGATMKAP

SEQ ID NO: 396835 - protein, 342 aa, unidentified
MESAVTIGLDLGKSVFQVHGVDGEGAVVIQRRLTRGKLLAFFAKQAPCLVGMEACAAAHHWGRELSKLGHRVRLMTPRYVKPYVKRQKNDAADAEAICEAVSRPTMRFVEIKTCEQQGTLVLHRVRLMLTRQRTQLSNAIRGHMAEYGLVAPVGRNGLQRLIAILGNPDDDRVPAVARASLAPLVSQFGLLNDQVLDNDRWVRASARSTELGCRLMEMPGVGPVLASAVVATVPDPAAFKSGRDLAAWIGLVPRQNSSGGKEKLGGITKQGDRYLRQLLVAGALAVIRYAQRHGTKRPWLVHLLARRSPKIAAVALANKMARMIWAMMMTGERYREPMVAAA

SEQ ID NO: 396836 - protein, 394 aa, unidentified
MKLVGIDVGKNSHHFCVMDKETGELNVTPSSFPNNKEGFDFLINSLKPYSKKSILIGMEDTGHYHVALLKFLLSNGYTVALINPKTTDLARKMEGGITKNDKLDTITICDVLDTPERKKQYRITKVDRFDLYEQRQLTRHHHNLKEELNVYCNRLQKSIDLVFPEFNTLFSSKYSIVYMNLLKTFGSAEAIASTDIRTIRKCFEVKGRGGRISLTPEKLKECAKNSIGISSEVETIQIKHLVSQITLIKEQIAEIDKKIEEFSITNNSPILSIPGISHFSGTSILAELGDIGNYSKPSQIIKFAGVAPYHYESSQYNAQHTAITKKGSKYLRKTLYQIILPVINNNPVFKKYYRLKISQGKGHRCAQGHCIRKLLRIIYHLLETGQSFDPALLR

SEQ ID NO: 396837 - protein, 341 aa, unidentified
MSNANSYIGVDLHKKMCFVTVMDKEGKIKKQTEISTDTDKVAKFFSKHTDASVAVESTMNWIPFYENLEGLGCKVVLSNPLATKAIAAARIKNDKVDSKILADLLRTNLLPLSYVQPREIRDLKELVRQRMSYVEMRTQIKNKIHSVLFKNNLKHDFTCLYGKAGMIWLRQLELRDIYRQEMDRYLTTLDLLDKQIEELSATIMETAKTDYDCQLLMTIPGISYFTALVIKSEIGNIERFPSAKKLCSYAGLIPSTYASADKVRHGRITKRGSKWLRKALVDAITSGSRHPSKLSCLYRKLKKNKGTGKAKVATARKLCTIVFAILTDKQPFREFVSVKQR

SEQ ID NO: 396838 - protein, 402 aa, unidentified
MNCVGIDISKGKSMIAVMRPFGEVVVSPFEVLHTDSELSKLARLLKSLDGETRVVMESTGNYHAPVAWLLHDAGLYVSVVNAMLVHDYGNNSLRRAKTDKKDAVKLANYGLDHWLTLPRYVPEEDTRLMLKACYRQYQQYSKVQTMLKNNLISLLDTTFPDANRLFTSPPRDDGREKWIDFVATFWHRECVCDLSEKAFAAKYQKWCKKYGYNFSEGKALDIYAAARGHFGVMPKTDTAKLLVEQAISQLRATSSALAALKQEMQSLAASLPEYPVVMEMFGVGPTLGPQLMAEIGDVRRFHSKKALVAFAGIDAPPYQSGQMDVRSRSISKRGSASLRRTLFLVMSVILQHAPMNEPVYQFMNKKRSEGKPYRVYMMASANKFLRIYYASVKAYLDSLEHD

SEQ ID NO: 396839 - protein, 379 aa, unidentified
MMANIDTGDICCAALEVSKTSWVCAFATPGDSQVVVHKIKAGDVDRLIGILNSSKAKAERHLGRPLHIVLCYEVGYDGVWLARLLIARGIRTIVFDPASFLMPRRGRRAKTDRIDAEGMTRTLRIWLSGDSKVARDVQIPSVAQEDAKRIERERKHLVEARISIVGRIKGLLALHGIWLTGKRIGKGLRERLDAIRTGDGRPLAPFLRRDIERMLCHHDFVTQQIEEVLADRKEALTDRSGRFPHAEKVQLLATLGAVGETTATVLVAEVYHRSFETRRHVASFVGLAPSPYNSGDTDRDRGISKAGTKLARQTLVELAWFWLRYQPNSKLSLWWHERFGGMGMRGRKVGIVALARKLAIALWRFVEEGVIPEGATLKA

SEQ ID NO: 396840 - protein, 350 aa, unidentified
MIIGVDYHPSFQTIAFLMEETGEYGEQELKHSDGEAERFYRDLKQRGIRVRVGMEATGYSRWFERLLAELGFEVWIGDPAMIKTKRVKKQKTDREDARLLLRLMREGSFPQTWVPTPENRDLRQLLWHRHRMVQMRTRIMNQLQALAMNEGKRWKSKLWSQQGRAELEKLALAPWASRRRRELLELFDRINPTIEELTAAVEQEAQKRPDALRLITHPGVGPITALAFVLVIGTPERFRRGKQIGTYLGMIPSENSSAGKQRLGHISKQGNSLLRYLLTEAAQSAARFNPHWRRRYIHLAMRRHKSIAKVAMGRRMAVRLYWMWRNGCDYSPSLEFGSYAGQLGTRHGVE

SEQ ID NO: 396841 - protein, 404 aa, unidentified
MWFIGLDWADEHHDICVITDTGKQIGSLRIAHSPQGFENLKEFLYSITGPVDKEEVACIVETNHGLLISWLLEAGYPVYPVNPKTIDRRRRPSGAKTDKIDAYLLAKYGRSEMADLRRLEPDSAIVAELKALTRDQDSLIRSQTRLVNQLTACLKAYYPVALKLFSKVQQRCTLAFLQTYPTPQEAMAASAEQIAQVLKEAGHPTAASVAPKIFETLHQPQLIADAITVRTKARLMLVLVKQLQPLVEEITRYDKVIQELFLTHTDSKMFRSLPRAGKRLAPRLLAEIGDDPDRYADAASLQALAGTSPVLFESGNYSKPHRRYACSKPLRNALQQFAWQSTQRAGWARDYYQRKRKEGKSHTVAVRALANVWVRILFAMRSGHSCYCAATFEEAQRKHAPRAA

SEQ ID NO: 396842 - protein, 428 aa, unidentified
MEVIHPRCAGIDVSKKDAKVCVRVQGRGRRGTSTTVSTWGSTTGEILVLGEHLLAERVSCVVIESTSDYWKPFYYLLEEQLPVMLVNAKAARNVPGRKTDVSDAAWLADLGAHGLIGASFVPPAPIRVLRDLTRARTTITRARTKEIQRLEKLLEDAGIKLSAVASNIVGVSGRAMLEALIAGERDPAVLADLAKRQMRSKIPALTEALRGRFTDHHAFMVRLYLDRIDAHAADIARLDGRIEEAIAPFRCTRELLMSIPGWSQVIADVFIAETGADMRVFPTAAHLASWAGVVPGCNESAGRVKSTTTRPGNRHLKAALGVAALSAARTKDTYYSARYRRIAGRRRPTQSRKNNSRGSSIAGMIALVAIEHTMLTDAWHMLVDGSFYRDPGADYYTRHHPGRTKTKAIKQLENLGYKVTLEPLTEVA

SEQ ID NO: 396843 - protein, 405 aa, unidentified
MYEAYVGIDWATTDHVVCVLDQNGRRLSRFRVDHTEDGLDDLVNKLGGFGDRADVGVAIERPDGLVVDRLLEAGHQVIPVKPAAIRAYASAETPSGAKSDPADAETIAEYLRLKAVRLDPLRPYSPQTRALRETSRTRVRLVRRRVRATNQLETTLGVWWPGALTAFPDLDTDIAMAFLTRYPTPEAAAHLGPKRMERFLDIAGYSGYGWRRSGQEMIDLIKKAPRGAGTGQLTASCQAIIGAQVTTVSALRDAIKHLNRSIRTQLDEHPDAEIFLSLPHSGMINAAQMLAEWGDVRQAYPDPDSVAAQAGVSPVTRQSGKYRGVHFRWACNKWFRQAMTTYTDNSRHGNQWANDVYQRARARGCDHPHAIRILARAWIRIIWRCWIEHNPYNPDRHGNLQALTG

SEQ ID NO: 396844 - protein, 347 aa, unidentified
MRFYTTQHPFYCGIDLHARTMYVCILDQSGAVLVHRNMKTDPETFLHVVAPYRQGMVVAVECMFTWYWLADLCADAGIPFVLGHALYMKAIHGGKAKNDKIDSHKIATLLRGGMLPQAYVYPAKMRATRDLLRRRMHLAHKRAELLAHVQNTNSQSNLPAIGKKIAYKANREGVAERFADAAVQKSIEVDLALITYYDALLRDVELTIVHTARHHDANTLHLLQTVPGIGKILSLVLLYEIHDVHRFPRVQDFVSYCRLVKCARESAGKRYGTSGAKIGNAHLKWAFSEAAVLFLRDHPAAQKYLARLEKKHDKGKALTILAQKLARAVYHMLTRKVAFDTETFFQR

SEQ ID NO: 396845 - protein, 369 aa, unidentified
MDNGSTVVGLDVHKATVVAAVLPPGADRTRETVTIENSPTAIARLVTRLAARGPVAFVYEAGPCGYEVQRQLTALGQPCAVVAPALTPVRPGDRVKTDRRDAEKLARLYRAGELTPIRIPTRAEEAARDVVRVREDVLADRLRARHRLGKFLLRQGRVHRETKAWGVAHRAWLHSQRFEWPALQQTFAAYLRALEEVEAHLAVLDQQVVDLAQQAPYRTLVQALRCLKGIDTLSAVTLAVEAQEFRRFPRARAFMSYTGAVSMERSSGGTVRRGSITKAGNAHLRRILVEAAWSARHGTGVSPALTARRKGCPAEVVRIAKKAQTRLHRTFWRLTCRTKPAQVAVVAVARELAGFVWAIAHQVPEGGPA

SEQ ID NO: 396846 - protein, 417 aa, unidentified
MTVNSLMQRRSAIKPDTLIVGIDVAKSNHVARTLVPGGAISRPFVFPNNREGFIALAAEIEARKPVPTSAVIVGLEPTGVYWLNLARWLVEQGYQVVQVSGLYVHRAKELTDNSRGTSDGKDALLIADLVAQGKYLGFVRPTGVLADLRQLVTLRQRLVQERTARYSLLHHSIELLFPEFRAVFRGVTGPGARRVLRHFPTPAAVLAHSADEMRRLLSADGRRRVNSTKLAQLRAVAEQSVGACEGTTGMQYALMDTLRELDSLDSRLHDVELEIGRLLAQIDETPILTSLVGPMTAAIILGETGGLRQYSCAVAVLKLAGLNLYQISSGQYRGDRHISRMGRSLLRQALYFAVLQHTHPGAPLYPYYAELLRRGKPKPVALVALCCRLVRLLYALVRDGRCFSPQPPENNQPSAAA

SEQ ID NO: 396847 - protein, 424 aa, unidentified
MSQRTLTERVTMVKRGMLLVGIDLGRDDNVAVVLTDTAQRLARFKFPHTRAGYDFFYRQLEQLRAQHPGQGLLIGMEPTNHYWKWLAADLEAHQPPLPYRLVNAYTVRKHREGEQLERAKDDLRDAFQIAELLRTGKFTETQLLQGAYAQLRQYATLHMRLQHDAAQLQNVLTTAVDLGFPELRQVFKDLSGETALALLRTASCASTIRELPLSEFLAQVREQLQGHRLSVSKLKQAHALAQTSVGLVDTGALHFTIQVYSEQLAHAHESLKRTETALVELFLTMPEAPYLLSLPAISPLFAALLLAELGDPQDFSCASQWVKLAGVQPVADSSGHRTRSPTPMSHKGRSRLRELLYWLVLRWVQHDPYFKAEYERLQTRPQHPLTKMEALGALMNKALHVIWAVLRDRTFYDPQYRQAGAGAL

SEQ ID NO: 396848 - protein, 335 aa, unidentified
MCKQFWVGVDLAKDSFVASVASVEHQPSEWASLPVREFTNNGHGLLSFLAWLEKHNVNREVVSGVCLEATGRLAWRWGERVGDRLGPLSIVNPARPVAFAKSIGLRDKTDRIDACVLALYGAAMRPVSKPLPTSYERQLRELASLCESVKQDRIASENRLREKPESKVVRKCLRRQMVHLARELECLETEMDTLIAQNATLEQHRVRIQTIPGVGAKTARMLLAEYGDLREYSRNELVALAGLYPKHFQSGSSVHKKPRLAKGGGRRIRAVLYMAALTARRFCPHLKRFAQRLKERGMSNMAILGAVMRKLLLLIRAVVVSGNAYDPHFGLEQSP

SEQ ID NO: 396849 - protein, 359 aa, unidentified
MDVIIERCAGLDVHKRTVAACVRSPGAGRTRRRSKTFGTFEHELAELRSWLVAEGVTAVAMEATGVYWKPIWYALEADFDLLLVNATHVKKVPGRKTDVADAEWLARLLECGLLRGSFVPPEPIRDLRDLTRYRKRLIQDRGRESQRLEKVLEDAGIKLAAVATSTLGVSVRAMLDALIAGERNPEALAELAKGRLRGKLPQLRLALSPTRFRPHHALMLAEHLAHIDHLSASINRLDERIDEVIAPFADARDRLMTIPAVAKTAAEVIIAECGVDMARFPTAAHLASWAGMCPGNNESAGKHRSGHTSGVTPGWLGFSPSAAGRRATRKTPTWLPTSGTSPAAGVPSEPRSPLATPSW

SEQ ID NO: 396850 - protein, 339 aa, unidentified
MSEQKITGIDLAKTNFYLFSINAHGKPAGKIKLSRNQLLNWLVQQPKMTVVMEACEASHHWAREIRKLDHDVILLPAQHVKAYLRRQKNDYNDAQAIAEACQHGTIRPVPIKTLEQQDVQTFLKMRRLVSMERTQLINHIRGLLAAYGIVFSKGATELRQKLPALLEDAENELTDTMRTLLHRQYIRLITLDNELEWYDSEQKKYVRQDPGGKRLLAIPGFGPLVSQAIKSWMGDGKQFRRGRDASAALGLVPRQFSTGGKQVLLGITKCGDQYVRSMLIHGTRAVLFRASGKTDSLSVWVYRIREKRGSNRAVVALANKLLRIAWVIIARNERYLPAT

SEQ ID NO: 396851 - protein, 349 aa, unidentified
MTIVEPHRAVIGGVDTHLDLHVAAALDAVGGLRGVEEFATTTAGYEELLVWLSGFGPVLRVGVEGTGSYGAGLARFLLDHDIVVVEVDRPNRQERARKGKSDPVDAIEAARAAQSGRASGVAKTRDGAVEAMRALLVVKRSARNQCTSARVQMRHLVFTAPDELRSRFFGLTKVELVKQASTLRPRQGGDAVAYATRVALRTLARRVQHLTAEITQCRSLLRPLVEATAPGLLGLYGVGVEVAAILLVAAGDNPGRIKSEAAFAHMCGVAPLEASSGKVTRHRLNRGGNRQANHALFCVVVTRMASDPRTIDYVERRTKEGKSTSEIVRVLKRYVAREVFQHLPRPPAA

SEQ ID NO: 396852 - protein, 422 aa, unidentified
MDSNASAVDYAAFIGLDWGSEKHSIALQAAGSKEIERYELKQSPEDLHGWLSKLRDKFGGRPVAVAIEQTKGAVIYALMSYDFVHIFRINPKSMADYRKAFSPGGAKDDPSDAEYLLEWLTLHRDRIKPWVPDDPQTRALQRLVEFRREIVNQRTAFTNQLTQILKDYFPQALDWAGDIDRVMACDFLSKWPTLEKVKKAKPDTLRTFYRQHGSRSKEVIEERLKAICTAQALTEDTIVIETSVSVAQTIIRVLRPTLESIDRLDEEIKTRFQAHPDMAIFDSFPGAGAALAPRLLAAMGSDRSRFESASEVQQYSGIAPVMERSGKHMWIHRRFACSKFLRQTFHEFSGQSIKWSGWARGYYDMQRDRGKGHHAAVRALAYKWIRIIYRCWKDRVMYNEEIHLKSLRDKASEILNFIAKAA

SEQ ID NO: 396853 - protein, 408 aa, unidentified
MTVVGIDVSKGKSMVAAMKPGGELVAAPYEVRHSDIELSHLALDVLCMEPDTRVVMEATGRYHEPVAALLHSEGIFVSILNPLLIKQSGAGSLRKVKSDPKDALKIAKYGLDNWSTLREYTPMEAIRQQLKLCARQCDLYNKNIVMLTNNLISLSDKTFPGVNELFSSPEKADGHLKWVDFYRSFWHCDCINRMSPDAFEERYKKWCKRKGYHFSTDAADALYAASCGSYTTLPRDNNAKLLVTVAADQLIALRENQSKLEAEMLNLCKQLPEYETVMAMYGVGKSTGPHLMAELGDVRRFPHRSSIVAFAGVDPGVVGSGKMQLSSVATSKRGSPQLRKALFQVVSTYVKCKPENEAVYQFYAKKRDEGKPFFVCTTAAANKFLRIYYARVKECLNAAESATQVEEG

SEQ ID NO: 396854 - protein, 413 aa, unidentified
MNASDSKCLFVGVDLGDERFQLCVVDPTGASDEQRSYSHDAEGIGQATASLKAAAIERGSRVAIAIESPRGAVVAGFLEAGFEVFSINPKQLDRFRDRFSVAGSKDDRLDARVLGDSLRTDPRAFRRLTAEPDWLVRMRQASRMEDELKQEHRRSANRLRAVLHEYHIELLALLPAADEPWFWDLVASAPTPALGARLRPKQVERLLAEHRIRRTTAQDVVERLRRPSVPAMPGVVDAGSTHALMLVPRLHLLTQQLAQCQTQIQKLLDELGSEDQPEQTSEHRDVPILRSLPGAGRYVVATMLAEAFWALQQRDYRLLRAVCAAAPVTEQSGRSRFVHMRYACNRRLRNAVHHWAWNASLVDPHFARLYKGMRGRGLTHARALRGVADRLLNVTVAVLRNGTRYDASLRAAA

SEQ ID NO: 396855 - protein, 443 aa, unidentified
MTRKNQKRFEIVHPNCTGIDVGGGEHWVAVDPEKCDDPVRKFSTFTDDLIALAKWLESMDVKVVAMEATGVYWIPLFEVLDARGLDVYLVNSRATRQTSGRKSDVLDCQWIRQLMTYGLLSGAFRPADQICSLRSLVRQRLNKVRDQAKTINRMQKSLTQMNIQLANVISDITGVTGLKILRAIVQGERDPEKLAAFRDGRIKADQVTIARSLHGNWRAEHLHALSQELACHDFLEKQIAECDQAIAQALERLPVLEQKTATPSKSLRSPHRTNDEQLILHRALNKIMGVDLTAIPTLGVDTALVLASELGPDLSKFPSSQHFCSWLGLAPPTRISGGKPLPGKAPKIINRAAQALKQAASNARQDKSFIGASHRARLTRMDTSCAIKATAHQLARLIYAMLTKGQPYVEKGIETFEEKSRDRQLRALERKARKLGMQLVKAG

SEQ ID NO: 396856 - protein, 385 aa, unidentified
MDRGNNFLSDTVIALFQWPCSKWGARDERTNHFFGVTAMQAFIGFDISLQSTHVCVVDYEGNVVREGVVPSDVSALDIWLRTHSKKWAIKRIVFETGQLSTHFYHGLSPSWPVTCIDARHAHGTLKAQRIKTDKNDARGLAQIARTGWFKATHVKSDEGQALRALVGGRKQLVTIRLGMENHIRGTLKTFGIKLGVVTAAGFATKVKAALVGKDTVLTETMLTLLRARDGVLAQQKALDKQCVTIAKTDAVCKRLKTIPGVGVVTALTFKAEIDDPLRFKKSRDVGVHIGLTPRRYASGEVDRSGGISKCGNGALRTLLFEASVTMLTRSGKWSRLKAWGVRLAKRSGFKIAATAMARKLAVIMHRMWVDETDFAYGDVPAAQAA

SEQ ID NO: 396857 - protein, 413 aa, unidentified
MVLGIDVGSEAHYARAFDYRGIEYSKKPFKFSNKEAGFVTLKAWILDIKEKHGKDKVVPGMEPTGHYWFNLGKFLQDNEMKPVLVNPHHVKKSKELDDNNPTKNDRKDPKVIAGLVREGRYMIPYLPDGVYADLRTASNIRFQLQAELTRIQNRISRWFNIYFPEYKTVYGKPDAKSGMLILKAAPLPEDILTLGIDGVNQIWRDAKLRAVGKARAKTLIKAAEHSIGSKEGTMSARMEIRMLLEDYESQNMRLQEVMVLIEELVKEIPMAEKLLEIKGVGIRTVSGFLAEVGDISRFNNPKELQKLAGLALVENSSGKHKGKTTISRRGRKRLRYLLFEVAMSLVAKNPEFRELHNYYTTRRLNPLKKMQSLMAIAAKLIRVFYAMLTKGVDYDPKKMISDIKRPTVYLQAA

SEQ ID NO: 396858 - protein, 356 aa, unidentified
MSHKLNSAIAVVGIDIGKNSFHLVGQDKRGEIVLQQKWSRGQVEARLANLSPCLIGMEACVGAHHLSRKLRALGHDARLMPAKYVKPYNKGQKNDFRDAEAIAEAVQRPTMRFVATKTTDQLDLQALHRVRERLVGQRTAIINQIRAFLLERGIAVRQGLRFLRTELPSILAKRTDVLSPRMLQIIEGLADDWRRLDERIEDLSNEIAALACQDKGCERLMTVPGIGPIISSAIVAAIGTGDAFAKGRDFGAWLGLVPKQISTGDRTILGSISKRGNRYLRTLFVQAAWVVLVKVGPKHWERYGLKSWIEAAKKRLHHNVLAIALANKLARIAWAVLHKGRAFECVKTDATASRAA

SEQ ID NO: 396859 - protein, 403 aa, unidentified
MAKVFIGVDPHKLSATIEVVDEHEKVLAAGRFDTDKAGYVAMRKTVSRWPDRVWAVEGSNGAGRPLAQRLLADGEHVVDVPAKLSARARLFDTGHNRKTDAHDAHAVAAVAVRTRGLRALSYDVELEALRMLADRREELTRARIQTVNRFHRLLAELTPGKSKKDITTGQAKAILASVRPRDLAGKTRRRLAAEQLAELVVVEKKIKTLTKELKTMVLARGSTLMDLPGVGPVVAARILADVGDVARFADRNRFASWTGTAPLDASSGEQIRHRLSRAGNRKMNHMLHIAAATQIRLDTRGRAYYRRKLAAGKSRMEAMRCLKRRISDAVYRQLLADARATQTEPTGAGPGGHCGASQESSAVDLPPHIDTSDQPLPGPAQPTLQPSKTLRKTPARKTLQTTR

SEQ ID NO: 396860 - protein, 341 aa, unidentified
MGQAHTIGLDIAKRVFQAHGADASGRVVFRKRLVRAKVLAFFAAQPPCTVAMEACAGAHHWARELGKLGHIVRLIPPAYVKPYVKRQKNDRADAEAICEAAQRPSMRFVPVKTEEQQANGVVFRARDLLVRQRTQCINALRGHLSEYGYIFPQGITHADAVIAHVEDPDSAVPESARAVLTVLIGTFQALEAQIQALDAEITQRAKADPVARRLMTIPGIGPIAATAITALVPAPEGFRAGRDFAAWLGLTPLQTSTGGKQKLGAISKMGERTIRRLLILGASAVVRWAGQRGTPAGSWLARMLARKPKMLVTVALANKTARIVWALLVKGGGYRAPAPAA

SEQ ID NO: 396861 - protein, 343 aa, unidentified
MKLFIGLDVSLAKTAVCVINEYGKIAREAQVPSDPQAIVDFANTLEGAVAIIGLEAGPLSQWLHRGLADAGLDVVLMETRQVKGALKAMPIKTDRRDAEGIARLLHMGWFRPVHCKSVSAQEVRALLAARKAIQQGMIALELSLRGLLRNFGLKVGAISRGQFDARIRELVDGNAMLEAAAGPMLRARASLRQELAGLERQVRLLAKDDAVCRLLMTMPGIGAVVALTFRSAVDDPARFSSSKKVGPWVGLTPSRNQSGERDVIGGITRAGDANLRRALCQAATVMIHRGRSTWLRSWAAQVAKRRGAKRAMVALARRIGTILHRMWRDGTEFSTVPLIAKSA

SEQ ID NO: 396862 - protein, 439 aa, unidentified
MNCVNDIRLEQFLQLKKEIRGSEKHLIVGIDAAKEKHNAFFGTARGKTLVKNLVFDNTLEGFQKLLAYVERIKVQDSLAAVVFGIEPTANYHKPLAEHLIKCGHMVVLVGGVAVKNNRQLLDGRWDKHDVKDAANVADLIAQGKCLFYEYPLMTLRNVRILIALKRRLKKREHSICVCIRNNLLAQYFPELDQHYGPSETLTVVRECLDPSEIAGMEYDDFCRTVAPGKMTLAKGRRVGTIWRAAVDSIGCTMGEAASFEAQVMVDSLKQIRQTIKSVEDKLEDACLEFPEYTYLLSIPGFGPDISSKVLGAIGNPHRFTSAKQVLKMAGLDLCADRSGKKSNSAIPVISKQGKADLRYGLYQAAFIASLKNKDFIAYFTNKLKGRAKEKGIVTKMRVKLAAKLLVIAWTLMKKKECFDPKFRKQENQDAEKGGMIREA

SEQ ID NO: 396863 - protein, 362 aa, unidentified
MAHAIRWVGLDVHAHESTFAIFDQDSGEVITRRVAGRPHVLLAWLRGVEAPMRAVYEAGPTGYGLARRAADEGLDVRVCAPGHSERRPGDRVKTDKRDAIRLARLLAAGELTLVTVPSIEHEQLRDLVRCREDIRTDLMRARHRLGKLLLRREIYYTGRCRPWTHEHRRWLTHLRFADRASQLTFEDYLHAHDVLLARRDRIEHELAEIADESPWASTIARLRCLRGIDTLSATGLCAEVGDFARFAHPDALSAYLGLVPSEHTSADKRRQGAITKAGSSHARRLLIEAAYHYRHHPAIGMTLERRHRGQPAPVIDAAWHAQRRLHARWRLLKTARGKQNGIVAVAVARELAAYCWQIALTH

SEQ ID NO: 396864 - protein, 410 aa, unidentified
METIVERPAALDVHKAQVTACVRTPGAGRSREQHFAEFPTTVAGLLTLRDWLAAHGVEQVTMEATGVYWKPVWAILEDEFELLLVNARHVKQVPGRKTDMSDAAWLCQLAEAGLLRASFVPPTPIRTLRNLTRYRKTQIQERAREANRLHKALEDTGIKLDCVATDILGVSGRAMLDALVAGTTDPEVLAELAKGKLRKKIPALREALEGRFDRMHALWIGAILAHIDFLDEQIEQLTGAIAEQIAPFEQAVELLCTITGVQRRTAEVIIAEIGVDMSIFPTAKELASWAGQCPGNDQSAGKRRSGKTRKGSKWLGIALEEAALAAIRTKNTYLAAQYQRLKPRLGHGRALGAVKHSMLIAYWHMFTTGETYHDLGGDFFQRRDPERATTRLVAKLQALGHHVTLQPAAT

SEQ ID NO: 396865 - protein, 278 aa, unidentified
MAQNDVVVMGIDVAKDKVDVCIRSLGARQVFPSATQGHRKLVAWLRKHQVGKAVMEASGGYERVWAKVLREAGIEVRIVDPKRVRSFALSAGRLAKNDTIDAEMIAWFAETFNDAPSQTYDAAREELQASVKARLDLIDSRIRLVGQTEHAAPGLAQKTHARILKSLASEIAKLEAAIRAQIKSTPDFAERVEIIESVPGFAETSAANLVAGMPELGEVSNQIAAALIGVAPYDDDSGKRRGERHIKGGRRLVRNAIYMPCVGAATLNNPVLKASIGA

SEQ ID NO: 396866 - protein, 346 aa, unidentified
MRILALDLGKYKSVACDYEAETGGHRFMTIPTNPKALHDLIVDREPDRVVIEICSIAGWVSDLVRALGIEMQVVNPNDERWQWRKVKTKNDRADALKLAQLSALNQLRLVYVPQSEIRQWRALIAYRQHLVQRRTKIKNHIRDLLLREGQLLPRYRSAWTHEGIANLEAMSKPFSEVSLDELWRGELGVELAQFKAVQRQLADVVTKLDELGAANRSVQLLRTIGGVGPRLAEAVVTMFDDPHRFRTAGQVSAYVGMVPKQFDSGETQRAGRITRHGNRLVRSLLVEVAWCALRHNPWARETYQRISGGKKSRKKIAVVAVGRKLLVRCWAMLRKQTEWRTELSAV

SEQ ID NO: 396867 - protein, 403 aa, unidentified
MNGPIVSVDVSKGKSDYQAFKDLNVKFTDVRSIKHTKEGFDEIVNLVKDMERKLETEVCVVYEATGVYHRVLKKVLEDNNIKQFIINPLLSAKTRKNDSLRSPKTDKLDPKSIAKTYYNQSLHSSYKPQTTYHELRELSRYYEDILVHIRKDKVAFRAQLDIVFPGYDTLFDDLYGAVSLTVIEKYPHPELLQKKSINTVSKIIQKKTRHRQAVSNKMAFKAIEYSKTIYSGCGKDDIDVLILERLIKKLNEDLNEAERTINEMIRLVQELPDFIIIKSIPGIGDNLAARIIAELGDMTRFKKKNELVAYAGLDPRIYESGQKDGAHMHITKKGNKRLRCLLYLAVTCSIRLKRDDNSIKDFYIKKMQQSNPMCSKAAKTACASKLVRIIYSMCKTGELYQYK

SEQ ID NO: 396868 - protein, 345 aa, unidentified
MDYYAGFDVSEEATSVCVIDGGGQVAGEAKVVTEPAALAAYLARWGGELVLVGLEAGALSPWLARELEGLGLPVTVIETRRMKAYARASSVKTDRRDAQLIAQALRAGLYRAVHVKAEAAHAVKLMLSARGMLLTQARQLQVKVRGDLKPFGIRLGKIGSGGFAARVEQRLEGREDLMALVAPLLAMRAQMLDRVRHYDRAIRAHVRTDPDCRRMMSVPGVGAIVACAFKAAIDRPERFARSADVPAVLGLVPRIDQSGERERIGAITKAGDAMVRSLLFEAANALLTRTGKSFALKRWGLKIAERRGMNRARVAVARRLAIVLHRIWADGTTFRLQEERKVTPA

SEQ ID NO: 396869 - protein, 372 aa, unidentified
MNYNTVYVGMDVHKESFSLCAYTIEAEKASHYQRTEADYKKVLNYLEFLRTIYGDDANFICGYEAGCFGYTLYHQLTANNVKCIILAPTTMLEQRSKKRIKTDRRDAEIIAKCLAQHNYSPVHIPTAKDEETKEFLRMRDDHKLALKKVKQQILAFCLRHNYRYDGKSHWTAAHLKWLKALTPEALYKEILDEYLLTYQTLSDKIERLDKRIEELATQDEYKEAVKKLCCFIGVKTHTALSVLVEVGDFKRFASAQHFASYLGPVPGEDSSGDDQNRLGITKAGNRHVRLLLTEASQCYARGQVGFKSKELKSRQSGNTPAVIAYADKANERLRRRYYKMVLNKYKKHNVAKTAIARELACFMWGMMTDNIA

SEQ ID NO: 396870 - protein, 341 aa, unidentified
MTEVSTIGLDLAKNVFQAHGASASGAVLFRKRLRRDQVLAFFAAQPRCLVAMEACASAHYWAREIAKLGHAVRLIAPTYVKPFVKRQKNNAADAEAICEAAQRPTMRFVAVKSEAKQASAVVFRTRDLLVGQRTQIINAIRGHLAEYGLIAPQGPSHVDQLIAQIEDPSSGLPDPARSCLAVLVETLRALQGKIAALDTEIAARAKRDDGARRLMSIPGIGPLIATALEALAPPIETFRSGRDFAAWVGLTPLQRSTGAQERLGKISRMGERTLRRLLIIGASGVVRWARRKGVPAGSWLARMLARKPPMLVIVALANKMARIAWALIAKGGSYRAPAVAA

SEQ ID NO: 396871 - protein, 341 aa, unidentified
MQITTIGLDIAKNVFQVHGIDAAEKVVVRKQLRRGQVTKFFAALPPCLVGMEACATAHYWARELRKLGHQVRLMPAKDVKAYVKRSKNDAADAEAICEAVGRPTMRFVEVKSAAQQGRLMQHRTRDLLLRQRTQVINALRAHMAELGVVAAQGREGLKSLLTIIADEKDERLPVDARASLIVLAAQLQALQTMIGSIEKRIIVQHRASEESKRVATVPGIGTLGASAITATVTDASAFRSGRDFAAWIGLVPRQDSTGGKPKLGPISKQGDRYLRRILVVGAHSVLRRAKQNPEKHPWLMQLLARRPFKVVAIALANKMARVAWALLARGGIYQVPRLAAA

SEQ ID NO: 396872 - protein, 341 aa, unidentified
MDKVSTIGLDIAKSVFQVHGVDAAGAVLIRKRISRAKVLEYFGALPPCLVGIEACPSAHHWGRELQGLGHTVRLIPPSYVKAYLKRGKNDANDAAAICEAVTRPSMRFVPIKTKEQQTALMLHRARQLLVRQRTMLSNALRGHLAELGIVSAKGRNGTAELLRIIADGRVSPAVCGILKVLTRQYGAVGTEIASIDKSIMALHRGCEASQRLAEIPGIGPIGATALVAEIGDWKTFSSGRSFAAWIGLVPKQHTTGGKDRLGSITKQGNRYLRWLLVVGAMAVIRYARKHGTQKRPWLGRLMERRPTKVAAVALANKIARMAWAIMVRGERYKEPKLLLAA

SEQ ID NO: 396873 - protein, 422 aa, unidentified
MKKDAPIELAALIGIDWADQQHDVSLQAAGSTAVEHARVRHTAEALTEWLNELRQRFNGKPVGIAVETSRGPLVHALLDYEFVVLYPVNPRSLQRFRETFTPSGAKDDLPDADLLRELLVKHRARLRAWEPDDPQTRTLRRLVEDRRKMVDLGTRLTQQLRAALKEYYPQALSWAGDDLTTALACDFLLHWPTLESVQRARPKTIRKFYYAHNCRSADRIEERIRSIQNAKPLTRDPAIVQSSTLLVQTLAGQLKALRPRIARYDEEIKQRFAAHEDADLFDALPGSGAALAPRLLAIFGSNRDRFQNAAELQKLSGIAPVTQRSGQRSHVHWRWAASTFIRQTFHEFAHHSIRHSAWARAYYDLQRQRGKGHHAAVRALAFKWIRVIWRCWKNRTPYDETRYMRTLAQRGSPLVAQLSAAA

SEQ ID NO: 396874 - protein, 346 aa, unidentified
MLHAGLDLSRKRLDFCLLDESGERIEVGATPPDADGLRSLAQRLARHDQPVQAAIESMNGARFVHDQLELAGWQVEIADALKVKGLAPLACKTDRIDAWVLAELCRRDLVPAIWLPDPSVRAERERARFRLHLVRHRSSLKQRVHAALLADGKPCPVSDLFGVSGRALLERLALPEPWSGTVAASLQLIDELDRQITTCEAELRRLGADHHYVPLLMTVPGIGWVLAYTIAAEIGDIARFPAPRQLVGYTGLCPRVYQSGNSDRRGPLAKNGPRYLRWALIEATAHASKHPLYRDRYQRTKTRLGKQRGGKVAQVDLARRLADAIWHMLTRDQPFAPAGATDPLAA

SEQ ID NO: 396875 - protein, 360 aa, unidentified
MGNGTWVGLDVHAKSVVAGVICDDTGELRVMRAPHRTEDLVRWVRQFDHPLRVAYEAGPTGFGLARSLEGAGIGCVVAAPSLIARSPAGRNHKNDAHDAEHLARLLRQGELTPVRIPDPADEAARDLVRAREDARADLMRARHRLSKLLLRHGVVYESGRAWTRAHDAWLRRQQFAHPAARAAFDDAYDAVLGAGIRRELLDCEIAQMASDLRWADVVGRLGCLRGVGTLTAFALCVEIGDWHRLTGATIGAYLGLVPSESQSGARHARGPITKAGNSHARRLLVEAAWHHRQPLRTSVAIEARRSGQRPEVRARAEAAGVRLHHRWYHLERRRGVRSTIVATAVARELAGWCWSLAVMD

SEQ ID NO: 396876 - protein, 342 aa, unidentified
MEKVSIIGLDLAKRSLQAHGARADGGVAFRKKLSRDKVLAFLAEHPRCVVAMEACGSAHHWGRAIGALGHEVRLIAPVYVKPFVRRQKNDAADAEAICEAAVRPTMRFVAIKTEEQQARAMLFRTRDLLVRQRTQLINALRGHLTEHGVVAPQGPANVKGLAEAIGSETTSLPLLVVELSRVLLGQIDELSKTIAELEKATVQEAARGATMRRLQTMPGVGPITAMAIETFAPPMAVFRRGRDFAAWLGLVPRQHSTGGKPLLGKISKMGQRDIRRLLIIGAMAVIRSASRKGGPEGSWLHRMLARKPRMVLAIALANKMARAIWAMLTRGEDYRVPTVAAL

SEQ ID NO: 396877 - protein, 472 aa, unidentified
MPRSAKPSRSKHQKASSSTTVRDLESLAQINLNAAGLDIGASEIYACVPSGRDEKSVRVFATFTPDLHALADWLAHCGVTTVAMESTGVYWIPIFQILEERKFEVYLVNAQYVKNVTGRKSDILDCQWIQQLHTYGLLHASFRPDTSTCALRSLVRHREMLLRYRASHIQHIQKALEQMNLKLNNVLSDVVGVTGLRILRDIISGVHDPQQLAKHRDWRCGKSEAEIAKSLTGDYRPEHLFALQQAVELYDIYTAKLQVCDEEIEKCLAQFMPRVNLDENPLPPPTRRPTTRPKNHPRKDLRPSLYQLAGVDLTQVDGLDVLTVQTILSEIGTDMSKWKTVKHFTSWLGLCPHNAKTGGRVVRSKTKPTDNRANLAFRQAAAALVHSKSALGNFYRRIRTKLGTPKAVVAAAHKLARIVYYMLKEQVPFTSIPPEQADAQYRERALRQLQRKAQQLGVKLLVEPAVEPGLVS

SEQ ID NO: 396878 - protein, 350 aa, unidentified
MQYISFDAHKHYTVACVEQPAGGIVLEVRLPHQRGAIREFLAEWDPGSPVAVETVGNWYWLVDEIEEADMIPRLVHARKAKLMLGMINKTDKLDARGLNRLQRTGTLPTVWIPPAEIRDQRDLPRTRMVVSRARTRLKNRIHATLAKYAITVPEASDLFGVEGRELLTSRLDLLPPHTRFATERLLDQLETVEDQLEQFESRMREVFTETIELKLLMSLPGIGFILGTVIQLEIGDVHRFPDAAHLAGYAGTTPRVDASGGKVRFGRLRPDVNHYLKWAYLEAANVICRHQQHWPSRHVVRLYQQVSHRRGHPKALGAVARHLAESTYWMLTKKESYREPKLRPGASTKA

SEQ ID NO: 396879 - protein, 344 aa, unidentified
MSQLTRIGVDTSKAVFTLHGVDAADRPVLRINLRRAQMIPFFRKLPPAVVAMEACGSAYYWARELAALGHTVRLVPPQYVKPYVKRGKDDRNDAAAICEAAGRPGMHFVPAKTVEQQAAGMVLKARDTLVGQRTALINTVRGHAAEFGIVAAKGAAKVHELFSAIEHRSDIPPVAKEMFVLLRQQINDINARIAELDVKLNASHKANPVSQRLATIPGVGPITALTLAIEIDPAQFESGRHLAAWAGLTPKEHSTGGKQRLGGISRAGNERLRRLLVAGATAVIQAASKPDSQQMTEWLRALLARKPRKLAATALANKMARIAWKLMTSGQTYRRDATLGVAKV

SEQ ID NO: 396880 - protein, 355 aa, unidentified
MTSTQYIGMDVHKESISIAVRNAAGKVVMECVIETKTSTILQFFDGLRGDVQVTFEEGTWAAWLYDLLKPHVTEVVVCDPRRNALLQEGNQNDRVDARKLAELLHHNQLRSVYHGDHGLRTLKELVRSYLTITQDLSRVMTRVKALYRSWAIPCTGKQVYAPRHRAEWLGKISEPGVRRRAEFYYQQLDALRTLRLEVRRDLLAESKKHQAWKRLCGIPSIGPIRAAVLLGILQTPHRFRTKRQLWTYGGVGIETSSSADHRVVDGQLERKKKQMEIRGLNRNYNHDLKNLFKGAAIVAATKPGPFAEFYAELLAKGMRPEMARLSLARKIATIVLIVWKRGVSFDAQHLKPQTA

SEQ ID NO: 396881 - protein, 358 aa, unidentified
MTQVKKLDFSGTTIYCGVDVHKKSWRVNIQDSEFELEDFTQNPDAVVLYKHLARRYPGAVYKIGYEAGFSGFSMQRTLSQSGCECWVVNPADIPTSDKDKKQKQDKADARKLCNYLQLKKLKGIHIPEAEWEHARTLVRTRERIVHNQTRCKNRIWQLLHFSGLPAPAAQQEGRYWSKRFTDGLQEMDCGGSIHLQQSLQLHLKDYLQTRQLLLEATRSIRALCREEKYAGDIKLLRSIPGIGEINAAVILFELQDVTRFKRFDYLCSYVGLVPDTSDSGDTKRTKGITHRHNYYLRTALVESSWSVVRKDPALLMKYKAYCTRMEKNKAIIRVAKHLLSRINFVLKNKKEYVTGVVA

SEQ ID NO: 396882 - protein, 408 aa, unidentified
MQVLYPRCAGLDVHKDTIVACVRCVSAPMHHEVRSFDSTTAGLLALADWLALHNCTHVAMEATGVYWKPVWHILEGNFELVLANPQHIRNVPGRKTDVNDAMWIADLLAHGLIQSSFVPPAAIQELRDLTRTRKQLVREISQHSLRIQKVLEDANLKLGSVLSDVLGHSGRAMLKAIVNGEGDPERLAALAQGNARKKSAELREALRGRITEHHRTMLKLHLDIIGALEHTLAELDAVVGKALAPIQQRARLLTTIPGVSDLTAQVLLAEIGVDMTRFPDAGHLVSWAGLCPRNDESAGKRRSTRVRKSGTWLKTALVTAAWAAVRVKASYLRAQFLRIKARRGAKKAILAVAASMLTAAYHMLRDGVEYADLGPDYFDRHDVNKTIRRLLKRLADLGCNVDPMAHAV

SEQ ID NO: 396883 - protein, 342 aa, unidentified
MDITTIGIDLAKNSFSLVGMNKHGKIGFRKTLTRNKLLAFIAQHPPCLIGMEACSGAHYWGREFTKLGHRIGIIAAKFVEPYRKGAKNDNNDAEAICEAVTRPNIWFVPIKSPDQQAVLCIHRVRQGLVRDRTSMMNQLRGLLSEFGIVMPKGRYPAQNAIAGILEDAENGLPMIARRVIDTLWQRIKQANEQINGHNKELALLVKENSVARQIMTIPGVGEQTASGIVASVSDPRMFKNSRQIAAWLGLVPRQYTTGGKIKLGRITKRGDQYLRTCLVHGARAVVANLRDKQDRVSCWVRELIARRGYLRAVVALAARNARLIWTLMMKQEDYRAMPVSAP

SEQ ID NO: 396884 - protein, 343 aa, unidentified
MKLYGGIDLHSTNSYVAVVSGDTKKLLIHKFPNDKGKIISALTPYKKRLEGIAIESTYNWYWLVDALMEEGYKVHLANPAAMKQYQGIKHLDDKQDAIWLANLLRLGILPEGYIYPKQNRGLRDLLRQRSRFVVHKTSMKHTLQQVYCNQTGSSLTNNALTRLNPETLETIFKEEDLIYNGQSQLAAIDFLGDHVKKIERYIEKKLDGQYPFARLRTIPGIGLILGLTIALETGPVERFESAGCYASYCRCVPTAYWSNEKQKGSGNKKNGNKYLSWAFAEAANFSIRYCKEIKSYYQRKCAKTNPPSAYRAVANKLAKTCYYLMKENVPFDVHKAFSSKGLG

SEQ ID NO: 396885 - protein, 370 aa, unidentified
MADVITYVGLDVHQASIAVARLTGRDRAPEIWEIANDRPAVRRLARKLRREAPGALECCYEAGPCGYAVQRQLIAEDVPCQVIAPALMPRKPGDRVKTDRRDARKLAELLRAGLLTAVHPPTPAEEAARDLVRARDDARVDRQRCRHRLGKLLLRRGLRPPGRAWTHAHTRWIDGLTWEHDAERRVVEDYRLALAQLEARLQALDAALTELAATPPYREAVGWLRCFRGIDTLTAITILAELHDVRRFPSARALMAYLGVVPGEHSSGETTRRGRITKTGNALVRRVLIEAAWQYQHRPGIGKGLAQRRVGQPARAIAIADKAQQRLCGRFRRLGLTRMAPPKIAVAVARELAGFVWAVLQPPVGVANRV

SEQ ID NO: 396886 - protein, 460 aa, unidentified
MNTISSSKPLKEDFERRYRKNLEMLNPNAAGLDLHKEEIWVCPGGFQDNHEPEVKTFGTLTGELRKLVAYLKEKKVTAVAMEATGIYWIPVFEMLKNEGFDTCLVNARNIKGVKGRPKSDYADCVWISRLHCYGFLRASFVPDGNVSALQSLWDCRGKIIDDIARYAQRINSELIKMNFRLDMVVSNTLGLTGCRIIEALLSGNHNPHQLLELVDTRVQKTAEECLAAFDGNFQSDHLTVLKVWYQCYRDQQRQLHELNEEIYLMLEKFPKKATKEDLPPEPLNYREDGLEFPYKLRPVLYEIFGTDITQLCGIGASVAMTFLSTVGTDVKAWPTAGHFTSWLALAPMNQVSAGSRKSSKTARSANPLRRALVNTAMIVQRTDSYLGENHRRLKSRLGPATAKVAIARKLAVIIYNILKNDLRTIRYDAEAYQRHRQEKELKNLQKKARRLGYTLSALSN

SEQ ID NO: 396887 - protein, 315 aa, unidentified
MEHSPAGPTFVGIDVAKDRLDVHLRPADEAFALGRDGAGLEALVERLMALAPTLVVLEATGGFEVVVAGALAAAGLPLVVVNPRQIRDFARATGRLAKTDRLDAEAIARFAEAVQPAPRPVPSAAAQALGELVARRRQLVAMITSEGQRRRQARDPRLGRRLEAHLVWLQKELSALETDLDDAVRATPAWRVAEDLLASVPGIGKTSARMLIAELPELGSLDRRKIAALVGVAPINRDSGTCRGRRMVMGGRASVRTALYMPTLTAIRHHPALHAFYQRLIGRGRPANVAITACMRKLLVILNAILRDHRPWQTP

SEQ ID NO: 396888 - protein, 366 aa, unidentified
MVNLLENRYKVMKKIFIGIDFSKKTFDATMIQFIDEETETRLYAKFDNHKKGFKKFFRWAKKGAKDVPYTDWLLCGENTGMYSIPMAEWAYGQGFFIWIENALAIKRSLGLVRGKNDQLDSARIAEYAMEKRKKARRWHPLSESLKSLKTLLLRRDGIDQCRRKLLNIIKEEQAVLGHNETLDWVYDRVRELTDQMKELTEEMKTMMEQKALADPELATNYTIIKSFKGIGVINTTTLLVYTNNFQDVPTANKLATMYGVAPFGEDSGDTIHKEPHVSFYANRWLKAQITNAAKSAVIWNDKIVAYFYRLTETEKKPYGVAMNNVKSKILHIVFTMVKNQQVFDYAYDVKKKDKNEKGKPKVLNLS

SEQ ID NO: 396889 - protein, 321 aa, unidentified
MNQDGEIIQEQRLENAKVGDYLEQTVPQNTYAVLEATRNWPFMYDLLADHVDRVELAHPKEVKAIANAAVKTDKIDAGVLAHLARLNFLPTAYAAPKEVRDLRLYTRHRKWLVEQRTQAKNRIRAVLASYNLASGVGNLFGIRGRELLTEILPQLRPAGQRVIKDQLVIIDHLDQQIKALEKEIPLTDDQKHKVKLLSSMPGIRKVTAMTVLAEIGDISRFHSPKSLCNWAGLTPRVRKSDAIVRHGRISKQGSRYLRGAMVQAATVAYRFSPRWGRVHDRIAKRCGRKGAKTALARHMLTVIYYMLKRNEPYREDYPRGA

SEQ ID NO: 396890 - protein, 407 aa, unidentified
MDLLKTVFGIDVSSRKSNVCIMVNGQKVNDYAISNDMVGFNRLLGDLKQVTKPQIIFEATGVYSRRLQAFLDMHELRYVMMNPLEAKRKTKDDLHQNKTDKLDALYLAKLQSEHPQRLAYVQNKEYQELMANNRIYEQASHDLITNKNRLHKAVQLTFPEIEHLLANPRGKNYWSIVLRFPPPDIVLETKEADIIDFLKGLSGIGKKRANDITQSLIRLAKVACPAVKKNSAHIRGLKMAINNILSAEEECQTALQEMAKLAPKRDLEILTSIPGIGENTALRIISELGDIRRFNNPSQLNAFVGVDPQVYESGNLTAHLSISKRGTAIGRKVLYLAINQIQSAKKAGKPCHIADYYEKRKRSSETASHKKAAIASIHKLLRTIFALIKNDQLYSYDVAKHNQRLLS

SEQ ID NO: 396891 - protein, 317 aa, unidentified
MTESVKVNVGIDVSKDFLDVHVGNVALRRVPNRSSGLSVLKRILSRYTVSLVLLESTGGYENLAVTYLQSLGYDVCVINPRQARDFARSMGRLAKTDRIDAQILCRLADVIDVSPERTRFVKPLTDERRQRLVSMVRRRRQLCDLMISERNRRAKTDSYGSESINTVLDFLTAEVARIDCDISAHVGACFSDISSLLQSFTGIGPVTASTLLGELPELGKLNRRQITALVGVAPFNRDSGYMRGRRRISGGRSGVRNVLFMAVLSAVRFNPVLKAFFARLVAAGKPKKVALVACMRRMVCILNAMLRDGSRFEVAPG

SEQ ID NO: 396892 - protein, 458 aa, unidentified
MGRARARKVPAQLVEDEEYQLRHERVAGIDVAKAKADVCTRLPPARDGGRRASKVEEVPATAGEIVALAGRLLADRVQLVVMEATSDYWRIWFYLLEAAGLSVQLANPSHARQLAGRPKTDRLDAQWIARLAEMGLLRPSFVPPPEIRALRDLTRTRLQLARDRTREWQRLEKLLEGALVKLSSAVHSLARTKTARDILEAIAGGQRDPKALAALAHGGVKGGRAAIERALDGMMPGGQHLMLIRIHLDHITFLDRAVAAVEDEIGAALDAIPAARGIDAGGGTGPGAGRGPDAAVLPAAERLAEIPGVSPKLAMAIIAETGLDMTRFPTAAHLASWAGLAPVARQSGPRNRKPGKGQGDAYLKGYCTQAANGAAKTETFLGERLRRLSRRLGGNRAKCAVARSILVIIWHLLASPETRFADLGPDWHARHGDRDRKIQAHLRQLRALGLDVTLTPAA

SEQ ID NO: 396893 - protein, 337 aa, unidentified
MKTTTHTTLPPSFFLGIDVGKKDLFCHIIGSDQSHSERFDNTLTGIRLLLKWITKTCIPTHLVACLEQTGHYGDSIAEALYKLKLAAVYLVYPQRIKAFGMQKLRRNKSDTADAKLIARFLKSEHFEMRPWQPRSHVQQQITALSRYVDSLTQNTARLKTMLEGQTERIAITSIKRRIKLQEKEILTLNRKIKELIKSDPGLQAKSVLLKSIPGLGDTATHIVIAELPDLDHFDDARQLAAWAGLTPRHFVSGTSGKTRTPITKIGSCRLRRGLFMPAMTARIYNPLLREFAERLLKNGKKRKEVIIAIMRKLLHQIYGILKSGQPYNPEKRGYAGT

SEQ ID NO: 396894 - protein, 373 aa, unidentified
MNEYSKYVGLDTHKDTIAVAVADFGRSNPRYYGEIPNTPEAIIKLVNKLSPDGEVLSFCYEAGPCGYGIYRQLTQIGHDCAVVAPSLIPRRAGDRVKTDRRDSETLCRLHRSGELTAVWVPDHKQEAVRDLTRAREDMKQMERKARQRLNAFLLRHGKIYETGKSKWTQAHFRWLERVKFEEPIQQIVFEEYVDAIKQTQQRVAGLEDEMRKVLSDWSLAPIVESLMALRGVKLITAMTIIAELGDISRFDSPRQLMAYLGLVPSEYSSGHTKRRGGITKTGNGHVRRVLTESAWCYRFQARKTAHLQRRAEQTSEKVQAIAWKAQKRLCGRYQHLLSRGKIKVQVCTAIARELAGFIWAIACEVMGRPVTVR

SEQ ID NO: 396895 - protein, 395 aa, unidentified
MFIVGIDVAKRSHEVCMITSDGQTVQRPFSIRNNCTGYNLMLEKIRKHTNIKSQIVFAMESTAHYWLALFTRLRKDGYHVILLNPIQTSAMRDMFIRKIKTDAKDSFIIAELIRFGRYAESNVAQDRLLALKELCRNRFYLVDMAGDLKRKLIALIDRVFPEYEAQFDTIFCKSSVALLKKYPTPQKLSNAHLDKLTELLWNSSNGHFGEWKARELRELARNSFGVEDCDGAYSTLILLMLDQIQSLSGKADALEKEISRLFQSFDTTVTTIPGVGPIIGAVILSEVGDISRFSSADKLAAYIGIDPSVNQSGEFQAAHAHMSKRGSPYLRRCIWMASQVAVQRDPMFHAYYEKKAAEGLKYMTIIGHVTRKMTAVVFAILRDHKVYEPILSTAA

SEQ ID NO: 396896 - protein, 362 aa, unidentified
MGESTTIVAFDQHAATTVAAVLLPGQRTPALHPMTSDLGELCRFVRRLGRQGPVRCCYEAGPCGFELQRALQTDGIACDVIAPALIPRRPGDRIKTDRRDAGHLAVLYRAGALTAVHVPTEQEEAARDLLRCREDIRADLLRARHRLSKFLLRHGRRFTGTKKAWSKRHETWLRAQTWPLPALDQTHRAYLRAVEEAGARLRAVETDLQALLTLEPLRTRVERLRCFRGIDDLTALTIAAELGDPRRFPSAPSAMAFVGLVPSEHSSGAKTARGAITKTGNAHLRRVLVEAAWHYRHHPFVGRRLRQRQEGADEAVKARAWTAQQRLHRKYRGLLGRGKPQQHIVTAVARELTGFVWAALTP

SEQ ID NO: 396897 - protein, 365 aa, unidentified
MNATAALPVVGIDVANSVFQLAVADGAWRVTEEHRLTRTQMERWFANRSVGLVVMEACGSAHHWGRWLNALGIEVRLLPALYVRAYVKRNKTDAADACALLEAARCADIVPVKVKSIEQQALQGLHRTRSLWMGTRTSRINALRGFCREFGIVIAQGARLGVERIARVLADPHSAVPELIRGTMKLLIEEIRLLEARIAQLERELTLVARASGACTRLLTIPGVGLLTATAMVAATGGGVQHFRDARHFASWFGLTPKERSSGNVRHLGRISKRGDRYLRMLLTHGARSVLNAAGRAVQIGKNVDALRQWALTVQARANHNKAVCALANKLARICYATLRDAQPYGEPVRRPNKKLERSSFAIAA

SEQ ID NO: 396898 - protein, 341 aa, unidentified
MATPMQYSVAFDCGKEEFAAAILLQNNEQSTVVKATRKFSNTLRGFSESEQWIERHKKFDLPVRITMEATGNYHEHLAFYFHQKAFRLSIVLPNKAKKYLQSLGQKSKNDKLDSIGLAKMGAQQNLFAWQPFSSSIYELRTLTRYYEQLSQHRTQLRNQLSSLRYNQYRMQEVEDRLSVLIKEIEKQLSEIKDKIEDAIKKDDKLNQRADNVLSIKGIGMLTVATVIAETNGFQLFDNQRQLCSYAGYDVVENQSGKRNGKTKISKKGNSHIRRIMYMPALNVVRCQNPKFVAMYERIMSRNTKKMVAYTAIQRKLLVLIYTLWTKNEKYSPDYKIAERIL

SEQ ID NO: 396899 - protein, 343 aa, unidentified
MKDVSTIGLDLAKNVFQVHGVDGSGETVIRRQLRRGQVLPFFKRLPPCLVGIEACATSHYWAREITALGHEVRMMPARYVKPYVKRNKTDMADAEAICEAVTRPTMRFVPIKTPTQQSILMLHRTRELFVRQRTMLVNALRAHLAELGIVAGVGRNGLEKLLEVIADERDERVPPEVRGCLLALRAQLVLTKQQILEADRRILAWHRSSELSRRLDEIPGVGPLIATALVASIPDPEAFRSGRDLSAWIGLVPKQNSTGGKERLGHISKAGNRYLRKLLVVGALSVIRRAKQTGTTRRPWLVALMARRSTKVAAIALANKIARIAWVIMARETRYKEPLPQAA

SEQ ID NO: 396900 - protein, 339 aa, unidentified
MQVTTVGLDLAKNIFQVHGITSNGTVAFNKSLRRAQLLAFFGKLEPCLIGMEACGASHHWARQFQKLGHEVRLMPAMYVKAYVKRGKSDAIDAEAICEAVTRPTMRFVAIKTEEQQGVLFLHRAPDLVVRQRTQLSNMLRGLLGEFGIVIAQGIGHAVKLAKAVLDGDRPSIPEVAIEVLTNLCNQMVALHLRILWYDKRILLEGRRDPKVMLLRTIPGVGPVTASAIVATAGDGHQFRNGREFAAWLGLTPINRSSGGKERLGRISKMGDRCLRRLLVTGMTARLNQMKVNPDRVDPWAMSLRERKPPRVATVAMANKTARIIWAVLTRNERYRLHTA

SEQ ID NO: 396901 - protein, 377 aa, unidentified
MIVIGVDPHKSTHTATAVDPATNSDVGSLRIAASLAEYRRLIVWAKAWPERSWAIENADGLGHHLALWLLALGEAVLDIPTTATARVRELSRGGRRKNDRIDAAAAASVAALQGDARQVHPETTSDSLALLDERRVNLSHSRTRTVNQLHALFRELMAGGAPTSLTSTSATAALRGFRPRTGPDRVRVELAKELIADIRRFDEQLKANSAKIAVLLDEHGTRLREIDGVGPVLAARLLGRTGSPGRFVSAAAYANYTGTAPVQIASADSCQHRAVPLRRPAAELRDLHDRDDPDPDACQRWPGLLRQEDRRGKITSIRHPCAQTTPLQPPLAHHDRRRKPHRTNTSRPLLPLWPRLFAASTLESARLINDRFSDHLR

SEQ ID NO: 396902 - protein, 406 aa, unidentified
MKPTYFLGIDAAKHKMRAALSNRSEHVLFEKDLPVQATGLRQLLAAIKRQVKDPEQLLVLIEATGLLHLNWSAALTKAGYAVAVINPLIARRLYTLQNSIRDNKSDPIDARGLCTIGLLHGEKLLAHYRFSLRPEQFTLQRAQSVRKALRSALTNLKKTYQSLMDLSFPELGGLLQLDGVGIRQLLIQAPTPAAIASKRLSTLEKNWMVRPKAAALKALAADSMADPDLAAASGPALVALLEAVAAMEARLHALDQQIAELACTSVDPQTKALIETIPGFGPVNAAKTLAWLPTEILHSGSNRKVAARLQAFMGNDPRLRQSGQWKGHTKMSKRGVEMLRTAFFQSAFSAAHNDPELRTYYQCKRAQGKTHEVALSHLMRILTRRLVAVLRSGKPYQSHYNLKNAA

SEQ ID NO: 396903 - protein, 299 aa, unidentified
MRQVYVGMDLGSKVCTAVAIDHRGKMIDSSVFRTGEGNMISFFEGLKGRALVMIEEGELASWVARTLRPHVERVVVSDPRRNAWVARGGNKNDALDAAKLAELLRLGSYSEVWHPKDTDIFEFKLVVQRYDECSRKLARTRCQIKSLFRRQGVIAGGKDVYGLKGRSEVLNRIQSESVRQLIENEYEMLDFLFCANAKTLRILKRESTKFPVIKRLKEIPGVGPILAARFVAYVGDPHRFNKRTLASYSCLSIVKRSSDGSPIGRERLLSVNMFFPSATVKTPHDMSRSLTSFFPPPHP

SEQ ID NO: 396904 - protein, 305 aa, unidentified
MQEFVGIDVSKEWLDVHCLPSGREWRVKNEAVDIEPLAAKLKQAERVLVEATGGYERVVTETLRQYGIEMWVVNPKRVRDFARSTGKLAKTDQLDAQVLAAFCATMTPKTQKFDTCLELKALQAHRQDLVKLMTMQKNRLQQNRAGQIRESIQRLLGALKVELQAVEEQIKGVIQASPQLQSKAQVLESVKGVGFVLSSTLLAQLPELGYLDGKEIAALVGVAPFNCDSGLYRGKRRIWGGRQDVRHMLYLGAFIARRYDPHMKAFYERLRAAGKPFKVAMVACMRKLLVILNAKVRDHLQTVSP

SEQ ID NO: 396905 - protein, 342 aa, unidentified
MKFYCGIDLSARDCHVCVIDQQLKIVVQQKLRNELTKICQLLEPYKANLKIVVESTFNWYWLIDGLQAEGFEVVLAHTLGLYLITGAKVKTDRRDAYALAKLLLVGAVPAAYIYPVETRPVRDLLRRRLHLVQVRAGEYGSLRRLLLRQGILSSKQQEIKTATETELEQWFAHPLVRLHASQELQRIELYSQQIAELEQTILSLAKTEQAYQLLLQLPGVGQTIALTILYEVGELTRFANVKVFSSYCRVVPGIAQSGNVTGRGRASKQGNHYLKAAFSQAAVHAVRCYPKVRRYYERQLKRHQGRGRQMICYNIIAHKLAQAAFHVLKEQTEYREELLFGR

SEQ ID NO: 396906 - protein, 361 aa, unidentified
MRIIGCDLHARQQTLAMLDTKTGEIVNLTLMHEGNKVREFYSQLPRPVLVGIEATGSMYWFLNLMEELGIECRVGHPATIRAAEPRKQKHDRRDAELILKLLAENRFPAIWLPSKELLDLRALLLHRHQWVRMRTRIQNALQAIALANGLRRGSGLWSHDGQNKIASLPLWPHTAYRRNALQAMYQKMESEIENLTQQVAEQANHRCTSRRLMTHPGVGPVTALATDVFLGDAKRFVDGKSLASYVGLIPGEHSSGRRQRLGKVTKQGSPLLRFLWGEAGAHAVRRDPELQRFYRRKLVQKGLGKARVAVARKLGIRLWIMLRDEIDYEEFCCRGQKQHSGAACAGMPETANGANRHRPID

SEQ ID NO: 396907 - protein, 354 aa, unidentified
MGLKHQKEKRSMDYFGGLDVSVKDTSVCIVDDTGGIVREVKVASEPEALLAVLVSPLYRFKRIGLEAGPLSQWLFSALVEAGLPAICVETRHMRAVLKAQINKTDRNDARGMAQMMRVGLYRPVHVKTLRSQKLRMLLTHRKLLQSKAIAIENDLRATLRNFGLKVGVVGTVRFEARIRELVENHPDLTLLVEPLLVVRGVLREQLDILHRRLLAVVRDDNVCRRLMTVPGVGPVVALTYRATVDVPARFRKSKSVGAVFGLTCSRDQSGERDRPGAISRCGDEMMRAMLYEAAQSMLRSKKWSWLKAWAMKIARHRGMKRAIVALARRLAVIMHRIWVDGTEFRWTREAAAAA

SEQ ID NO: 396908 - protein, 339 aa, unidentified
MRLYAAFDLHSSNSYLGISDEKGKRIFKKKLPNDPVKIKEALKPFKDEIEGIVVESTYNWYFLVDLLKEEGYQVHLANVMKTQQYAGLKYSDDKHDAFWLTEMLRLNILPEGYIYPKEERPIRDLLRKRGHLVRLRTSLIASLQNIIARNLGSRLKSNDVKVMTTDRVTPLFHGNEDLALAGKVSKEAIDFMTRQIKAIESTIGNRIYLTNPYDRLLSIPGVGKILAFTIQLETGSIDRFQKVGNYVSYCRKVPSGRFSNDKKKGAGNRKNGNKYLAWAFSEASDHARFSDAESRKYYQRKLQKTNAPIAHNALAHKLARAAYYIMRDGVIFMPDKAFA

SEQ ID NO: 396909 - protein, 319 aa, unidentified
MTNNVESEVNVGVDVSKDRLDVAVRPHGEAFSVANTEDGHKELRKRLLKLRPQRVVLEPTGGYETAVVQVLIAAKFPVVVVNARQVRNFAKALGRLAKTDRIDADVLAHFGQAVRPDIRAFPDQTLRELEAIVTRRRQLVDMRAAEIKRKQIASVRVHPSIEATIEFLTRQIDDLDNELKRQIRNTPAWRETDELFQSVPGVGPVLSSTLMALVPELGQLNRKQIAALVGVAPFNNDSGNGERKRMIWGGRAPVRAVLYMAAAAACRFNPTIAALYERLLERGKQPKVAIVACMRKLLIILNAIQRDRRPWALQPVPAP

SEQ ID NO: 396910 - protein, 351 aa, unidentified
MPRTKKNAVVAVSTEDVVYVGLDVHKASIHVAVWKNGMLATTWVATADYEALAEQLEPLRPALRRVAYEAGPTGFALARLLAFRQMPVLVCAPSKTPQTAADETKCDRLDARKIAEYAAKDLLSAVTIPTEKEEHERGLIRHRTHVVRNIARVKSRIKSTLLFHQCGEIASWAQAERQRLLDSDLPQELLFQLEALFQELSFFEVQKKQAEEKLQETLSDRRHAATVKRLESHPGVGKVLSACFVLELFKPHRFTSGDAVARHLGLAPRVRQSGATSRGGPLLKAGQGKLRAVLIEAAWRWRACDEKARAIYSRLLANTGNGKKAIVGLARRLAIRLWTMWIRGEAYNPGS

SEQ ID NO: 396911 - protein, 337 aa, unidentified
MIIILHIDWSIKNMAIARMTKKSNKITVIDVDSDIEDLQAYLKNLRGTKILTIEETTTSQWLYTELREYVDRIIICDPNRNKLLNEGPKTDKIDAGKLVQLLKAGIIKEVYHSTDKFLYLRRIVSGYEDLVKAGVRLKNQRYSLLRVCGKNGNEKIGSRLDAQGEQFVLECLDRQIQAYEENKDGYEMQFAKLARSNPEIKHQKSLPGIGVINAVKIVARVVTPYRFPDKGHYLSYTGLIKLAKISGGRSYGKRNPRYSRQLKSVYKSGVLAAIGGNNPINDYYNSLIQDGHAQHNARQKACRRLAVLSLGVFKSGKRYQPYRRNHVKGGKQGTSSL

SEQ ID NO: 396912 - protein, 371 aa, unidentified
MNSIVYVGMDVHKEQYTLCCYSYETDKVEYKQTIPSDYKLVLKYMEQVRSRYDGEVTFVCGYEAGCLGYSLYHQLKEHAVDCKILAPSTMGITNTHHVKTDKRDAANIAKCLAFHTYSEVYVPDNDDNDIKEYIRMRDDQKLYLKKVKQQILAFVLRQGKRFEGGKTYWTIAHLKWLRTLELSALQRETLDEYLLTYEYLTEKINRFDERIEELASTERYEKKVKHMSCLRGIKTHTALSMIVEVGDFERFEKAPKFASFLGLVPSEDSSDTRVNRYSITKAGNSHLRRLLVEAAQSYTRGTIGHKSVALKQRQQGNPPEIVAYADKANERLRRRFYKMTLNKGVNRNVATTAIARELACFIWGMMTEHVS

SEQ ID NO: 396913 - protein, 312 aa, unidentified
MNDKKTSVYAGLDIAKASLQLHLQGKSYDLANTTEGHAQLIQRLAAVPGSHVICEATGGYERAGVAALHAAAIPVSVLNPARVRQFARAAGKLAKTDPIDAAMLTAFGQAFTPAPTPQRTATELKMAALVTRRAQLLELRVAETQRADTCADLDLRKLFTPWLAQIKKQIAKVEALVEALLQAQAPLASQVQRLDDIMGVGRLTAVMVLATMPELGTLNRQQAAALAGLCPYNRDSGQWAGKRCITGGRAEVRRALYMAALSASRSNHLLKPFYDRLIAAGKPAKVALTAVMRKLIVLMNHLLKNPNFSLAH

SEQ ID NO: 396914 - protein, 389 aa, unidentified
MIQEHTENREGERIAVGIDPCKEFLQLAILSPGRNVEFRKLPLLPCITEQIAKSTDPHRTQIAIESYASYGRLLIHELLQKGYDIREVNPSVSHKLVDLFTEEHSDQRDAESLAKALWMIPGLPRVSFTEEKLWLTKLSRLRKRLVQDLNGYLNRVHVVLTEGYGAVYRKIFRTLRTEKALAFFETYPTINDALAHPQKVRKVLGEAKWELLRKAGQWGEGFYLELLGKEVRTLTRLIRVLQATRKEIDEEIKRIGQKDEEVKRLRTFPGIDYLTAATLLSEIGNVERFKNESCLSSYCGVSPVMWQSGASRTKAKRRKRFSRRLKGVLYFISLSQIRINPESKQYYWRKRQEGKSHWQAMNALSRQLIKIIYYMLKNKESYYRKEAVN

SEQ ID NO: 396915 - protein, 415 aa, unidentified
MSGKMEKACGADIHRDFLVATILSTDGSKLQNRFDTSLESLLKFKSWLKNNGCHKLAVESTGTYWISIYNVLYDSVNFILANAYQIKHIPGRKTDTLDSEWIAEVCLKNLISPSRILPKESRDLRSLTRARERLVKIRTALKNQVHQELEAASIKLTSVLSDAFGKTGRHIVDGLLNGWNIDKILDSIPSSRLKAKKDEIRATIQANISQEQAFLIRSLLSSIDAVAGQIAEIDVKVSELFSRKDDLRIAMSMPGMGAISASSILAEIGDYNNFDSPNKLAAYFGIVPSVYQSAGKQINGHITKHGSPHIRRMLVEVAHAIARTKSNSKLKRFFLRIKARRGSKIALVALARKILCILYHLLIKKETYQEDGPFKPKSVKAVKGATQPSMSLDEMIQVICKTGYEVRSLTNLERG

SEQ ID NO: 396916 - protein, 423 aa, unidentified
MSYRIAGIDVHKKMLAVVVADVEVHSEYEFERRRYGSNPEHLRLLAEWLTEQQVEEVVMESTAQYWSPVWGALERYWKPTYQKREGAGPMSGTLHLAQAQSNRGRRGRKKDFPDAERLVKRLVANELILSFVPDAEQRLWRTITRRKYQLTRDKVRLQNQLEALLEEVHIKLSSLVSDLLGVSARHMLKALAEGETDPTALAAMAHKQLRATQAQLCDALGACAELKPIYRRLLNMSLEQLQVIEQQISQLDQEMANLLSPHQDAVKRLAEVPGLGVDSAQQIIAEVGAQAATFPSAKQLASWVGACPGDEESAGVSKGHRSPKGNRQMRRILNQAANAAAKAKGTIFEIVYRRLVSRLGHNQTIGAIAHRLCQLIWIILHRNVRYEERAPSVNARSRQRRTNKMIRELRNLGYRIEPVAIPA

SEQ ID NO: 396917 - protein, 413 aa, unidentified
MKLFVGIDVSSEKLDVCFLDSSDTTLKEVTLPNNINGASSIKEDVLQFHQSFNYEKIVIGMESTSIYSFHPATFLSEDLELKSLGLVEVVIQNPKSIHRYKGLFEEDKNDRIDAFRIADFLRIERFNKTVLKEERYVALQRLTRSRYQMVHQLTECKQHFLENLYYKCNTLSKELDTSVFGATMLDLLSDALTLDEMAEMELEDLANLLQEKGRGRFSDPQKLAKAIKKAIRDSYRLGKVVQESVDMVLATYARLIQTLKKQIKDLEKSIVALFEIVTEAQCLKSIPGIGIVYAAGIVAEIGQIERFENEAQLAKYCGLYWKKNQSGNFESERTPLTRTGNQYLRYYMVEAANSIRRHEDTYRLYYQKKYDEVPKFKHKRALVLTARKLVRLVDTLLRNHQLYTPERSVSLKS

SEQ ID NO: 396918 - protein, 370 aa, unidentified
MEEGIKFFVGLDVHKDTIAVAVAETGRAPARLVGSIAHEVNQLLKRLARYGEPAQVHVVYEAGPTGYGLQRALARRGYQAQVIAPSLIPKRAGSRVKTDRRDSLRLAELSRAGELRAVWIPDPADEAIRDLARAREDAVNARTQVRQQLKGFLLRHDVRYARRTSGSKTYYRWLATLNFGETGVQTAFTDYWQAVSAADERVGRLTTALVGSIAGWRFASIVAALQALRGIDQINAIGLVAEIGDIGRFAHPRQLMSYLGLVPTEASTGERVVRGSITKTGNAHARRLLTEAAWNYRFQPRIGMRAQRRAEDLPQAIRDVAWKAQLRLSGRFRRLHTRGVHLNKVCTAVARELAGFVWAVARARSELPQS

SEQ ID NO: 396919 - protein, 394 aa, unidentified
MFFIGIDVAKRSHQAAVTDISGNVIVKPFNFKNSSDGFTKFLSIVESNAIEKNDCTIGLESTGHYWYPLYFFLIENGFDVKVFNPIQTAAFREITIRKVKNDNLDSLLIADFTRFGRYSETYIPDENMLALKNLTRFRLSISDICGSLKKKVIAILDQVFPEYTGVFSDVFGKTSKQLLEQFSTPDEFMDISTTKLTNLLLKVSRGRNGREKAELIKTAAQSSIGISYALDAFSFELKQLLAQIEFMENRLSDVDAEMEKLLSQSEYAVITTISGIGPMLGSVIVSEIGDINRFENSSKLVAYAGLDASVKQSGEFNSSKNKISKRGSPYLRRALWMAAFMSLQCDPALYDYYSKLRARGKTHRCATTAVARKLCIIVWAIMKSKKPYSPVLKN

SEQ ID NO: 396920 - protein, 399 aa, unidentified
MKKNLPLELRVGVDVGCHSHNVAIGLSTGEILEEFSIAHEPEGFRQFFSRIEKNERTYGCPVAVAMEGYNGYARPLDTLVRTRNYRLFNINNLKLARFKEIFPGAAKTDDIDARKALELFQLRDHLPIAKDVLQEVKTTPQENDILKRISRRRRRLVYERVRVLNNLQADLQSVCPGLLEITGEAGNLWFLRFLTSTDDLRKLTRLRETTIRKIPGIGAKYTSIILKWQKAAEFSHETEWVSDMIQQDAERVLALHDQIETLETQMAEMAANSNIAQLLTTMPGFGPITTAELAGEIGTIERFESESSLALYLGMSNLDNSSGKHKGSKAPKQVNERAKAAMMIAVDRHRKSVAQSQKYYEKKRAEGKKHNQAVRALGRHLCRVIFKMLKENRGYFFTQ

SEQ ID NO: 396921 - protein, 383 aa, unidentified
MRAVCGLDVHKDTVYLCILCSDGLIFENVYGVLTKDLKSMCTDMQRHGVTEATMESTAMYWIPVWRVLEPHFRLKLVNPYFIKQLPGRKSDVKDAQWIAECTLKDLVRGSFVPPERIQQLRQYDRRIFDLDAEMVRKLAKLDGIMQRCNIRLSNYVSNTDTKSYKDVVDDLCNGITDPEELIKKVHGRIVNKHGRETILASLTGVVSDAEKDTMRQLRREITLAEEHKQECHQKMVNICKTCYPKEFSRLTTIPGIKERAATSLIAEIGVDMTKFQTAAHLASWSGLKPRNDVSNGKYKSRRITHGNVYLRKTIIECAWAASRTRDCFFSRFSYHQTVVRKKNKMKVLVAVARKLLIAVWHVLHDDKDYVDFNPDCKEPVKNG

SEQ ID NO: 396922 - protein, 368 aa, unidentified
MGYHTEAFVGIDTSKLRNAVAIAEGGRDGEVRFLGEFPATEAAIRKLASKYRRLMFCFEAGPTGYWLYRLIKSLGHECLVVAPSLIPKKPGERVKTNRRDALSLAKLLRAGELTAVWVPDERHEAMRDLSRARQAAKKDQQGKRQQISSLMLRLGRIYPGKKTWGPAHMNWLMAQKLEHREQRTAFEELIEGMRQESERVERLEEAIREAVPEWSLAEVAAALQAMRGIDLITAVAVLAELGDLSRFRNPRELMGYLGLVPSECSTGETVKRGGITKAGNGRARRILVEAAWSYRYPARVSREKLPKVSAAPMRVREIAWKAQTRLCRRFRSFERKGKRRTVIATAIARELSAFIWAINREVMAGQQR

SEQ ID NO: 396923 - protein, 403 aa, unidentified
MEGPLISLDVSKGKSNYRFFENGTDRKGKKGVIRHDIQGFDSIRDEAEKMKKRLRIKPSVIFESTGVYSDVVEKYFTDKGFDVYVISPLLSASMRKEGVRPAKNDSLDTLSIAKVFYSKDDLRKCSENDKKAERLREMSYELDMMNRRIRPMKCQFLRLLDKVWPCLDEVSDYSSRFMLDFIIAFGHPENIKTVKGVLSVIRKSEMGTAGRKDKIAQDLFDYCHTHLSAVSKDSSYVELLKRMAIELKAMAKKKSELIDRMAEEARNKDEFARLLTIPAVAKTTALKIMARVGDISRFRNAEALVAYCGLDPRVYQSGKMTGEHRTITKKGDCILRSTLFLAVKLMVMLYPDTKVARFVAAKAKNGLSYKQAVVAGSAKLARIIYSMLTHHENYVEFNADIVA

SEQ ID NO: 396924 - protein, 354 aa, unidentified
MSQTSNTAIAVIGIDIGKNSFHVVGHDARGAIVLRQKWSRGQVEARLANVPPCLIGMEACVGAHNLSRNLASLGHDARLMPAKYVRPYSKGQKNDFNDAEAIAEAVQRPTMKFVATKTAEQLDLQALHRVRERLVSQRTGITNQIRAFMLERGIAVRQGIGFLRMELPTILATRTDALSPRMLRVIEELAADWRWLDQRIDGLSGEIEALARLDQACLRLMTVPGIGPIISSAMVAAIGTGDVFSKGRDFGAWLGLVPKQISTGDRTILGKISRRGNRYLRVLFVQAARVVLARIKHLERYGLKSWIEAAKKRLHPNVLAIALANKLARIAWAVLAKGRAFELTRTDDAGVRPA

SEQ ID NO: 396925 - protein, 359 aa, unidentified
MLYLGIDQHARQITISLRDEDGDVLQARQVSTQPEKINAFFAQLTRERLRNGESFVAVVEVCGFNDWLIRMLQDYRCQKVIVIQPDNRKKRKTDRRDAAALSELLWVNRGRLLAGKSVRGLRQVDIASTTDQENRRLTTLRKEASQARTRVINKIKHMLRRHNLQWEMPTKTFPTKTAIAWLKQLVLPEIDRLEMNHLLADLEHVQQRFEELEEVIAERCGSNEDAVLLMSLPGTRHFTATGLACRVGRVERFPRSHSLANYWGLTPGCRNSGENNQRLGSITKAGSGMARWLLAQVTRHALRMDAQLREWFKRIKRRRGASIARVAVMRRLATIIWHMLTKRKTYAACRVFAAAQAKP

SEQ ID NO: 396926 - protein, 340 aa, unidentified
MKLSVIGIDVGKNVLHVHGADAQGKPVLRKTFGRGVLVEWLAQQAPCLIGMEACGGAHHLARVLTDCGHTVRLIHPSFVKAYVKSNKNDFRDAEAIAEAVTRPTMRFVAIKTVAQQELQALHRLRSGAVTQRTAVINQIRGLLLEFGITVPQGPTALRRRLPEILETADAGLEALGRDLVAELQREWVHLDERITALEQRLKQQTQTSEPCRRLQTIPGIGVLGASAFVAALGDGHQFASGRDCAAALGLVPRQHSTGGRSQLGGISKRGDPYLRALFIHGARAVLRYADRHDDPRSRWVRALKERRGIPVAAVALANKMARTAWAVLTRGTTYQIPAAA

SEQ ID NO: 396927 - protein, 347 aa, unidentified
MNFYTPQHKHYCGIDLHARSMYVCILDQAGTILVHKNLPTTPDAFLCVIAPCRADLGVAVECIFTWYWLADLCEREGIAFVLGHALSMKAIHGGKAKNDKIDAHKIAVLLRGGMLSQAYVYPAEMQATRDLLRRRCHLMRQRAELLAHIQNTSSQYNLPEIGKKLAYKANREGVEEHFPDPSVRKTIAVDVSLFAHYDQLLGEVELYITRTAKTHAVQTCSRLQSVPGIGKMLALVILYAIQDIARFPRAQEFVSYCRLVKCAKESAGKRLGTSGKKIGNVHLRWAFAEAAVLFLRHNQPGKEDFTKVAHKHGKAKALTVLAHKLARAVYDRLPREPAFDLQRLVTA

SEQ ID NO: 396928 - protein, 412 aa, unidentified
MADVVAWIGLDWADERHSVHLQPPDGRIEYFELEQKPAVLHEWVAQLQQRFAGGKIAVALEQRKGAVIHALLMYDCFVLYPINPKALARYREAFTTSGAKNDPLDSELLLDLVVRHRDKLRAWVPDTVESRKLQALCEQRRKLVNHRVALTNRITSLLKQYFPQALDWVGDVASVQACDFLVQWPALATVQRARPSTVRRFYQDHNCRKKAIINARLAAITSARPLTTDAAVIEPLSLSVQTYATQLRTLITAIQTFDARIAEVFAQHADHDIFGSFPGAGDVCAPRLAAAFGTDRSRWDSAAELQAHSGIAPVTERSGKSLWVHHRLACPKFVKQTFHEFADQSIRFSRWARAYYDQQRARGNDHHAALRALAYKWIRILFRCWKERRPYDEDTYIAALRRRGSPLVNNFA

SEQ ID NO: 396929 - protein, 476 aa, unidentified
MARSKKARPDLALIPMLAHETIYIGVDVGKFRHVAGFLSRTLLQRHGHFEGCPTFTFEQSREGFRAFVDHIREYTPLEQATVLLEHTGHYHKNLEQYLLELDITVYRIHVQERPKGMMKTDKRDALGLANRLYTQLELGAQVADKMQLVRRSVPPTKAAAQLRGLTQHRYELSHHSTQLRNKLTSIIDELFPEFVQVFRDPNLPTALAFREALPTPHVLATANLSALRELRRSNFPSEAQLLHLQQLAAQTIGIKDVDRLRGLLLEQQLLIKELRLVQEHLEVLLTEISDIVTNCREGQILLSLPPIGPIQAATIIAAIGTIANFEKASELKAYFGWAPRRDQTGVSYDQTKLARRGVRPVKQMLFLMATRATLLDCEWARIYQRLLPRMATYDERIKGYRGKLKVIGRIAGQMASMIFALLKTDQELLSQVPPGQKPPPPMLYDPEIHRSHQEGHYRSLKPGIQPRKIIQLPKLS

SEQ ID NO: 396930 - protein, 352 aa, unidentified
MAKGTKLDFTGQHIYIGMDIHKKSWSVSIHTEQFEHKTFNQPPEVEKLTNYLQRTFPGATYHSVYEAGFSGFWIHDRLTEEGIHSMVVNPADVPTKHKEKAGKADKVDCRKLARNLRSGDIKGIYIPCRTQVEDRHLIRTRQSMVRKQTRCKNQIKSILFFYGIPIPEKSHWSRNFINWIETIHMEKTSGDLALKAHLEELKHLRQIIASLNKAILALSRSDAYRDKVLLLRSVPGVSTLTAMTLPAELCNIKRFSSLDKLASYTGLVPDIKSSGEKEYTVGITYRRNPALRAVLIEASWVAVRKDPALIMAFNKFSLRMKKTAAIVHVARKLLNRVRFVLINQERYVPAVV

SEQ ID NO: 396931 - protein, 358 aa, unidentified
MASITPQQQQDFEVAGGVDTHQDTHTAAVIDPIGRVLGTEQFPADPAGYAALLAWMRSFGPLQRVGVEGTGVYGAGLARLLRDQGVCVIEVDRPDRKTRRFQGKSDPIDAISAAKTALAGERTGTPKQRDGRIEAVRNLRVARRSAVDQRADAQRQIKALIVTAPDDLRERLRGLPVKQLISICAGLRPDQADTASPATAAKIALRSLARRHQRLSEEIDELDALLDPLVAAINPRLVAANGVGTDVAGQLLVTAGENHERLTSEAAFAMLCGAAPIPASSGKTTRHRLNRGGDRQANKALYRVVICRLRWDPRTRAYMARRTKDGLSKKEIIRCLKRYVARELYRIITTPNDQKLAA

SEQ ID NO: 396932 - protein, 420 aa, unidentified
MELAEEPGGLVERVAALDIGKATVMACVRVPHEDQRRRCQEVREYGTTTGALLTLAGHLHRHGVTLVVMEATSDYWKPVFYLLEAEGFTCWLLNARHVKNVPGRPKTDKLDAVWLAKVAERGMCRPSLVHPRPIRELRDLTRYRRSLIRERTAEKQRVEKLLEDAQIKLSSVASNIFGVSGRQMLAAMLAGQRDPQILAGMAHGRMRRKIPQLQEALTGQFTGHHAFLCQMMLDRIDDLTARIGQVTARIEEQIAPYARAVEQLDEITGVGEISAQELIAELGPDMTRFPTAGHLASWARFAPVSRSSAGKAKGASAGKGNPWLAATLGEIVTAASRTDTFLGERYHRIARRRGKRRAMVATGNSVLVIIWNVLSDPDARYHDLGPGFYHSRTTSQHRERDLIRKLERLTGKTVTLQPAA

SEQ ID NO: 396933 - protein, 350 aa, unidentified
MTDTGSIAWLGLDAHSQNCVLAHLDDDGTQRRWWRFPTGAQALQKHVSAIAAPDKRLVLEESNLARWISQLLRPLVQQLVVSDPRHNRLISAHPNKHDQRDAFNLARLFRLAEIKGVWQPQEDQRALFRSAAQAYEDAVLRQTRLKLQLKCLFQHWGLFPLGSTVYSGVGRQSWLKQLPQEGLRAQALLLYALLDQALQSQSQARRLMVQAGRAFPEIARLRTVPGVGVIGSHLFVAYVAEPTRFTDFAQLTRYCRLAIRDRSSDGKPLGFQQLDRQGHGVLKALSYRAWLQATKKKSGPIWEFFQASKKRTGSSTHARLNTQRKLLLTLWTLWLEGREFDPKEFSRTAT

SEQ ID NO: 396934 - protein, 347 aa, unidentified
MRFYTKQHKFYCGIDLHTNKMFLCILDETGEIRLHRNIETNRKIFMKTIQPFKEDIVVAVECMFTWYWIADLCVKEKIPFVLGHALYMKAIHGGKAKNDKIDSHKIAVLLKGGMTPQAYVYPQKMRSTRDLLRRRNHLKNKRAELLAHIQNTNSQYNLPEPFGCIAKPRYREGVAESFDDPSTRMMIETDLAVINAYDPIIAKMERYIIHSAKHHDPVSHALLNTVPGIGKILSLVILYEIENIKRFPRVQDFVSYSRLVTCTKESNGKKYGSSGKKIGNAHLKWAFSEAAVLFLKGNEPGKKYLDRLTNKHGKGKALSILAHKLGRAVYFMLKNKKPFDQNKFLGF

SEQ ID NO: 396935 - protein, 349 aa, unidentified
MSTIAREDEQVEVAVGVDTHGDTHTAAVIDTTGRLLGCAQFPADARGYAGLLAWAMTFGLLLVAAIEGTGAYGAGLARHLRGAGVELLEIDRPDRKTRRFAGKSDPLDAEAAARAGLSRARTGIPKDRTGKVEALRNLRVARRSAVDQRADCMRQIKTLLITAPDELRERLRRLPDRGLLHACASLRPDTTRVGEPEQAVKVALRSLARRHAALVVEIDDLDELIAPLVTAINPALLELNGVGADVAGQLLVTAGENTDRLHSEAAFAMLCGVAPIPASSGRTHRHRLNRGGDRQANAALYRIVLCRLRWDPRTQAYVQRRTEQGLSKKDIIRCLKRFIAREIYYVLTA

SEQ ID NO: 396936 - protein, 407 aa, unidentified
MNAVGIDVSKGKSTVAVLRPFGEIVVSPFDVSHSPKELSKLVTLLKTLNGDTKVVMEYTGNYYLPIALFLRNNGFFVSVVNPILVKDYSTKSLTVRKVKTDKKDALKIASFALDRWNELSPFSAQSEARLLLKSYNRQYNQYNKLKIILKNNLIALLDQTFPGANTLFSTPTRKSDGHEKWVDFVLKFSHSECISKKSFSFFLKSYLSWCKKFGYKFSKSKAQAVYDFACNCSPSLSFSDSSVLLVSNAIIQLNSINETLASLASEMNKIAATLPEYDSVMSMFGVGSVLGSQLIAEIGDVSRFPNKKALVGFAGLDASPFQSGNFNPQSRSISKRGSAALRKTLFQVMSVVLQRAPTNNVIFQFMDKKRSEGKHFYVYMTAAANKFLRIYYARVTEHLNLFTTTTA

SEQ ID NO: 396937 - protein, 410 aa, unidentified
MKIAGIDVHKKVLMVVVIDASTPQEKPWRRRFTTMPSELHRLLIWLREQGVEEAVMESTAQYWRSVWLELEPHMRLHLAQAFSNRAPRGRKHDFKDAERLVRRLIADELILSFVPNGEQRIWRSMTRMKVQLTRDRVRLQNQMECLLEEMRIKLSIVVSNLLGASGLRILQALARGETDPKMLAQLGDERLQCTEEQLVDALTGRVQPMHRTMLALQLQRLQLIDQQIAQLNGLIAQAMKPHQEAVMRLAEVPGLGVDSAQQIIAEVGVQASTFPSAAELTSWVGTCPGKEESAEQNHSSRSAKGNKYLRRVLNQAAHAAVTKKGSHFQVVFRRLLPRLGYQSAIWAVAHRLCRVVWKILHEGVRFIEQGREPDPQAKKKRAQMLARALRKLGYEVVLTPINQVAAPNAT

SEQ ID NO: 396938 - protein, 382 aa, unidentified
MPDVISSAPAAVRMRAALDVHKRTIVCAAQPDDPRAELRLEEIPNTERAVRGLVRRLGGPEGLVVCYEAGPCGYDLFRLLSAMGVACDIVAPALTPVAPGARVKTDRRDAKRLLVLHRAGALKFVAPPTREQEGLRDLVRCREDLVCARRAARHRVAKQLLRHGHVFREGKKSWTKTHQAWVRRQRLGDPLAQSALEHMLAHLDSLDAQIAALDHQLDEIAAREPWSDPVRWLCCFRGVTTITALGLLAELGDLRRFATARELMSFLGLTPSEYSSGEQRHRGHITKAGPRHARRLLIEAAWHYQHPPRVSQRIAAVHPHVPPDVAARAFSAQVRLHHRHRHLTSHGKRSTVANVAVARELAGFLWAAMTRQPLPAQEVTAA

SEQ ID NO: 396939 - protein, 415 aa, unidentified
MALKIVYKVCCGIDVHKTFVVACIASTNKQGVTTYKSHRFSTYTKGLKELLKWLLESNSKDVCMESTGKYWIPVYNVLEKDCSIVLAHPKYVKAIRGKKTDNKDAKWIADLFKHDLVAGSFMPPADIRQLRDLMRYRYKLTCFMSSEKNRLQNCLTVSNIQLGNVVSDTFGKSSKRILDRILENPLNTSFDIEPLIHGSMKDKIPELELAIDGYITPEQSGKLKIIKKHFEDLESRKTELEELILALASPYQQELDLILTAPSFKNIFSAITVISEIGVNMESFPSAKHVCSWAGLTPTNNESAGKKKSVRVSKAGCYIKPLLVQCANSVVKSVKHPEIRNRYLRLRKRRGHKKAIIAIARMLLTALYNMLKKNEPYNAELYRNSDVIPANREITVEQAIQLAKFQGYRIKSATE

SEQ ID NO: 396940 - protein, 359 aa, unidentified
MSTITIGVDLAKSIFSACEMDGSGHVLRRQDLRREPFGLWLAQLPMGTVVAMEACSGAHHWARRCLEHGLEPRIIAAQFVKPFRKSSRTKNDRADAEAIATAARQGNMRFVPIKSVDQQVRLSWHRVREGYKTESLAIGNRIRGLLAEFGVIVAQTDLALRRLLADLDAQPGLPAELKELLRDLADHWAQLRTHFDACDARIEAHAREDERCVRLRAITGIGPITADAAVATVGNAQEFKQGRQMAAWLGLVPTQHSSGGHARLGEISCRGDAYLRTLLIQGARSSLQRAKSVTIEKATPEQLWIRTLDGRMPFGKVIVAIANKHARQIWAMLARDVDYDPHACLNHPMHQRRHTTNAA

SEQ ID NO: 396941 - protein, 415 aa, unidentified
MPPIYTVAIDLSKQKHTATILDTTTTSVCKTVAIPVSQTGFQQFEATLAAFSTNPGDFIIGCEATGHYGETLLRRLQDKGFPIVRMNPAQVVQFRHGLGRRAKTDALDADAMAKQLAITEWTSEQPIQETARRLQSQTRLRLDFVEEQSRWINRVRGLVNQIYPELEAILKRITSPTSLAILTHFPSRLLLANAPVEAITAVVKRASRGSKTEAFACQIQQIAQTSVGLDDPWLETELRLVLNQLTALHDNIKQIEKNIKALTEQLLEEYSSKLNLEQALTIKAFPCGDYVSIGTLLSEIGNVGRFKSLKHLLSYFGWCPNTKESGMSSVAHPRMSRRGNRFARRIIWMMAIAAVRWVPEYRTYFNRRVDAGKNKMKTLIAVGRKLLSVVFAILRTGQPYDAQWYLQQPILILAS

SEQ ID NO: 396942 - protein, 342 aa, unidentified
MDHYAGIDVSLECSSVCVVDSTGKIVREDKVASEPAVLIAWFLSLGLNLVRIGLEAGPLSQWLYPAMKEAGLAVELLETRHVRNAFKTMSVKSDRKDARGIAELMRVGWFRPVHCKSMAAQETRVMLTARTLVQSKLHDVEASLRGLLRNFGLKVGRTTPMRFAGRIKELVAGHPSLEIIAGSLLLVHDVLLREFKNFEKRVRIMAREDARARLLMTTTGVGAIVSLTYASAIDDPARFKSSKMVGPHFGMTPKKYQSGETDFTGRISKVGDRSVRTALYQAAHIILTKPVKASALKSWALRLAKRIGMSKAKVALARKLAVIMHRMLVDGTPFNPAAGAAA

SEQ ID NO: 396943 - protein, 297 aa, unidentified
MQKSCLGIDVSKLTFDVSLIVVVTGQKQPIVISKFDNDATGLKSFKVWLDDHHVTFDKNSLLVIENTGIYHRLIWDFCTTHLLPIFIGNAADLKWSFGIARGKNDKVDSMRLCDYAYKNYDEIKPTTGLNKVLITLKDLLSNRSKLIKLKNAIKQTLNELKGSNDKTTQSLMEKLNKAALDGLKKSIAQMDAELLKIVRQDEAILVNYKRMLSVPGIGKITATFIICCTNNFVIKVTGKQLANYAGVVPFENTSGTSVRGKSRYILWQIKNSNHCLLWEHYQPFSHTRSLQIIMSAK

SEQ ID NO: 396944 - protein, 341 aa, unidentified
MTIVGGIDIHRAQLTYDYVDLATGEVHTGRVTPAHRDQLRIWLERFRGLEGVAFALEGCTGWRYVVEELVRASVTAHVAEPAETAALRGKKSRAKTDRADARHLRQLLVDGRVPESWIPPPHVLDARVLVRLYKDLVDERTGWLQRVHATLFHHGVPAVGASLVTTAGRDQLASACLPPAGRYAVDAGMRQVERLTAEMVPLRRQIVTLGSHQPGCVALQQHYGIGPLLAVAIWEELGDCRRFTSSDDAVRHAGLDVTVWSSDGKRTRGHLAKQGPPVLRWALYEAAVYAARPSSPDHAYYRQLRHHLEAHIALITIARKLARRCYHTLRNTGDAALEAAA

SEQ ID NO: 396945 - protein, 341 aa, unidentified
MDIDILGIDLAKRVFQLHGADRGGSTKYGAKVMRAELLTTVRKLAPRIVAMEACSSAHYWGRRFKELGIEVRLISPQYVSPFVKTNKNDANDAAAIVEAASRPTMRFVPVKSVEQQDMRAVHRVRELLVHQRTALINQVRGLLGERGVIIAQTPAAFKRAVPVALAQCEGDMTSTFQAILIELLEQMRVLEERIARTNQWIAAFMKHSVLCQKIQAIDGVGPITATAMVAAVGDAKEFKNGRHLSAWLGLVPRQYSSGGKSRLQGISKRGDTYLRTLLIHGARVVLRYAIGKADARSRWLQDLIARRGYNRAAVALANKNARVIQVLLSHPDSYRLSDRPV

SEQ ID NO: 396946 - protein, 337 aa, unidentified
MNNNAVGLDISKNVFHLYSQTDDGKVVKKKLKRGELLAYIANMPVSLIGMEACGGAHYWAREFSKLGHEVVLLNARFVKGFVVSNKNDFNDAEAIFTAVTRPNKRVVAVKNETQQDIQMLHRLRQQRIDQRTALVNQVRGLLSERGITLPKGINQVRKQLPWILEDAENGLTSLSRELFAEQYEQLKALDGDIKAQDSRINRRCQQNALSRRFLEVPGIGPIFATIMASDIGDGKGYTKSRDYAASLGVVPRQHSSGDKQVLLGISKRGNAYLRTLLIHGARSVIKCCHDKSDPLSRWLQALVERRGFNKAAVALANKNVRILWAMARQDQPYQAAA

SEQ ID NO: 396947 - protein, 398 aa, unidentified
MICVGVDVSKGKSTVAAIDENGEVFMQASEYEHTETGMAELIQKLKALKEEPRIVVENTGYYHWPLVNSLMDDGFFVCVVNSIIVSKFAKVQMRSGKTDRLDAMILCRFGLAYWSELVRCQPDEERRTLLRLYSREYSHAVHLVVEQKVHFTSLLDKVMPGIKTLLEDKGGRSKLSDFALEFWHFEKISKQQPDSFTKRYCKWAKEKGYHANESKAAQIYALSQNGIPTLPCTDAVKRLVQEAARVLKHLEESVNSILAQMNALASTFPEFGVVSEMKGVGKHTASRLIAEIGDVRRFHSAKALTAYAGLDAPPYQSGKFESHNRKISKRGNKYLRKVGYEVMASLVSTKPVEDHAVYSFICRKKAEGKYYLSAYMAGLNKFLHIYYARVCGAMKEPT

SEQ ID NO: 396948 - protein, 384 aa, unidentified
MGGIILDVLMTRCAGLDVHAETIVACVMIGEQDDELFIETETFPTLTKDLFRLLKWLENHGITHIAMESTGVYWKPVYNILEDYFDITLANAQRIKNVPGRKTDVSDAEWIAKLLRYGLIEKSFVPPEDIRNLRDLTRLRKKWIGHLTSEKNRILKVLECSNVKLNSVISDVFGVSGRKLLSKLIQNGYVDSIDVENSIHGRMKHKKQMITDSLFGTLNDHQVFLIKQSWQHIVYLESLISEIEERIDEILKNYKEEVELLLTIPGINKDSAAIIIAEIGVNMEQFPTSQHLASWAGVAPGNHESAGKRKSTKTTKGNPHIKTVLCEVAWAISRSRNRWLAAKYWSIAARRGKKKALVAISHRMLRIIYSMLINKEPYKEPLIN

SEQ ID NO: 396949 - protein, 331 aa, unidentified
MDIKEVIGIDVGKLKNEARLHLAQKVFEFDNTLSGFKQMQKWVIKNTGLQKDQLMFAFEHTGLYSYPLSLFLTENQYNYVVIPGLELKRSMGITRGKDDKIDAKRIALYTYEKRESLSPYQLPQKEIIQIKRLLSLREKLVKQRAGFIGTLGEYKRFLVKKDNQMLFDVHEKMIIELSKQIDKLEKQLDDIIKGDGQLKQMYDLITSIKGIGPQTALFMIAFTNGFSQFQNWRKFASYCGIAPFPNTSGISVRGKTKVSNLANKKIKSLLDLCAKTSIQYNIEMKIYYQKRVEEGKPKMATINIIRNKLLSRIFAVVQRGTPYVNTLAYAS

SEQ ID NO: 396950 - protein, 351 aa, unidentified
MNYIGVDYHKKYSYMVVKDENGNVAGRGTVNNTKEEVQQFLEPYRPGMAVVEATRNWGLIYDWLDEVLDDVALAHPLKVKTIAEARIKTDKISADILADLLRADLLPKSYAPGKETRELKSVLRQRMFIVRVQTMVKNRIHDILDRHPEVLSQAPEVSDLFGAAGLQWLSQIELQGEDNGLLINEMKLFRFLHELISQSDSTVRKLGKIDPRAKLLRSIPGIGPFFSVLILYEIDDISRFRDDKKLCAYAGLVPSTYASGGKVFHGRITKTGNKWLRWAATEAVQKAVRWDPDLRNYYQRIKVKKGTNAAKVATARRLLTIVYRVLSQRRLYERRTITREKKAVPAALISI

SEQ ID NO: 396951 - protein, 433 aa, unidentified
MNSPHPYDLVIGLDRSDKKADLRLIHTATGQRHSQIIDTAPEALWEWLLQLRQQYPQARVGLCLEQPAVHLIAFLESYEWITLYPINPITLQKYREAFVTSRAKDDAKDADYQADLLLTHHAKLKPWAPEDSATRAVQQRVYHRRAVVDERTGLTNRLTALLKQYFPQALMLCGEDLWRPLATRFLLKWPSLQAVQKAKPATLQTFYYLNGSRSAKLLEQRLALIPKAVPVTDETGVIESFVLRVQLICRQLQWVQRSVAVFDQQIAQAYAAHPDHEIFANLPGAGPVFGPRLLTSMGAQRERFTDATQLQHYTGIAPVTKKSGGSCYIHRRYLCPKFHKQSFHEYAGQSILWSRWAAAYYLQQRSKGCPHHIAVRALAYKWQRIIFRCWQNHTPYQEAIYEAALRKHGSPLVALFDKVELGKNPFKNPVKKS

SEQ ID NO: 396952 - protein, 317 aa, unidentified
MSDSTTPLVVGIDVAKDSLEVASSASERWQVSNDPAGQEALRDRLRGERVGLIVLEATGGYEVAVVAVLAQAGLPVVVVNPRQVRQFARSLGRLAKTDAIDAEVLVRFGVQVAPAVRPLPDEQTQVLEALLRRRRQLLGMIQAERNRLLLAVGPVRTDLKLHIAFLVRRLKDIDRELEERLRESPVWREREKLLQAVPGVGRQMLLTVCAALPELGRVPSRQLAALVGVAPYNCDSGTLRGRRHCWGGRAEVRGVLYMATLAATRCNPVIQPHYQRLLAAGKPKKVALVACMRKLLVIMNAMVRDGEPWNPKLATAG

SEQ ID NO: 396953 - protein, 339 aa, unidentified
MKYAPVGVDIAKHLIQVHFIDENTGEVVDKQLRGRDFLEYFSNREPCLIGMEACGGSQHWARELTKLGHKVRLLQARFVKAFVMGNKNDVMDARAIWMAVQQPGKEIAVKTEEQQSVLVLHRTRMQLVKFRTAQINALHGTLLEFGETIHKGRAAMEREFPEALERMKERLPPYLITVLENQYKRLNELDSLIEDIEKQLASVAKQNETCKRLLDIPGVGPLIATAAVATMGEASAFKSGREFAAYVGLVPKQTGSGGKIRLLGISKRGDAYLRTLFIHGARAAALLTKEPGPWITELKKRRPASVAIVAMANKLARTVWAIAAHDRKYDRNHVSIRPY

SEQ ID NO: 396954 - protein, 404 aa, unidentified
MWYAGIDWANDHHDALVINEQGRQVGSLRVDHTPQGITRLNTFLEQIVGAESKEQMACIIETTHGLLIAHLLEAGWPVYPVNPRTVDRRRSASGAKTDTIDAYLLAKTGRADLADLHRLTPDSAKIAELKLLTRDQDALIQMQTRLVNQLTACLKAYYPVALELFTKLPQKSTLRFLQTYPTPQAAMAVSAEQIQEVLRQAKHSNPTPVAATIFERLHQPHLQADAVITRTKSRLMLVLVSQLLPLIEQIAQYDKEIETLFLTHPDREIFESLPRAGQRLAPRLLAEIGDDRSRYQDASSLQALGGTSPVLYQSGMYSKAHRRLGCIKPLRNALHQFAWQTTQSEPWAQEYYQRKRAEGKSHTVAVRALANVWTRILFAMWLHHHCYETATFERAQQQHARRAA

SEQ ID NO: 396955 - protein, 440 aa, unidentified
MAMRKREDVVFPNAAGIDIGASSHWVAVPLERDDTPVREIGVMTDDLNALADWLLACGVDTVALESTGVYWIPVYEVLESRGLDVWLVDARQIKYVPGRKSDVQDCQWLQRLMSYGLLRAAFRPAAEVCAIRAVSRQREVLLNEQASWVQRMQKALVQMNIQLTEVITDVMGQTGQAIIRAIVAGERDAKALARHRHQRVKASEADIERALVGNWREEHLFVLGQALGMYDDIGAHLRTCDMKLRVLLDERSKVRVEVGKMPRAGSKAREAFDLRQQLANWAGVDLTRINGLGPDSVMKILSEIGPDLSHFANVKHFCSWLGLAPATKISGGKVLVSHTKGSANRARQTFRMAAMVLSRSDSALGAFYRRLCQRMDKPRANTATAHKLARMVYFMMTRGEEFVDQGQQRYEAQQRERSVAALKRRAAALGFLVSPVQSAS

SEQ ID NO: 396956 - protein, 455 aa, unidentified
MVDEAIFILFVQEKKKSFLAAMTLINFVAANQKYYAFNLLSVFIMVFWSVQYLLQHLLVQTQLSDQLLQPLILILQLPQTPQFRHARPGKFFLPVNGMDYLLPLRLTVRNVLTRRITMNIVFLGIDLAKNVFQLCGLNQAGKPVYTKRTGRKELLQTLANIPACLIGIEASTGAFYWQREFEKLGHKVKVISPQYVKPFVRGQKNDGNDAQAIAVALMQPTMQFVPPKSPEQQDIQALHRARQRIVNHRTDTVCQIRGLLLDRGIPIGSAVSRARRAIPLILEDAENGLSSRMRKTIAELYDLFNDLGRRIHFFDKEIETVFRQSEACQRIAKVKGIGPETATAVVAAIGKGTEFKNGRHFAAWQGLVPRQHSSGDRQVLMNMTKKGDKHLRTLFIHGARAVVRVTTNNNDGHMNQWVNQLKERRGFNKTTVAVANKNARIIWSMLRNETEYQVV

SEQ ID NO: 396957 - protein, 345 aa, unidentified
MKVTTVGIDLAKAVFQVHGVDERGNAVLRKQLKRKDVLSFFANLEACLIGMEACGSAHWWARKLAELGHTPRLMAPQFVKPYVKTNKSDRNDAEAICEAVARPNMRFVPVKLPEQQAVLALHRARQGFVKARTAQANQIRGLLTEFGIVIPKGIGHIAKRLPEILEEGENGLPGMMRQLLRCLGENLKDMDDHVGEMERQIKLWHRENEQSCKLEAIAGIGPITASAYVASLGDAKSFKNARQVPAWLGMVPRHEGTGGRATLGKISKRGDVYLRTMLIHGARSVIAQIERKPDQADEWLKKLLARRNKNIAAVALAAKNARIAWALLAHERGYQRDYVTPRPVA

SEQ ID NO: 396958 - protein, 465 aa, unidentified
MKNNIQLTKKKKTKIKIHSGMPLLNADAAGIDIGHREHWCAVPADRCAHSVQKFGTFTQDLERLADWFKSCGIKTVAMESTGVYWIPVFQILERRGFQVRLVNARQVKNVSGRKTDVLDCQWIQRLHSCGLLNASFRPDDSMCVLRSYLRYRDELVCARSVQCQHMQKALQQMNVQLHQVLSDITGASGLRIIEAILAGERDGQMMAALADRRVRASPATIAKALHGDYRVEPLFVLKTAFELHAVYEERIHRCDEQIIAQMAQLPSRINPQVQPLPARKPGRKLHHDTVAGVDLRQELYRWTGVDLTAVEGIGVQTAQVVLSEIGTDMHRWRTEKHFTSWLGLCPDNRISGGKVLSCHTRRVVNPVSDVLRIAATTLEHSQTALGAFYRRMKGRLGPPSAVTATAHKLARLIYRLLKHGESYVRQGAEIYEQKYRQRLLHHLQKTAATFGLELTPRQALPAGVS

SEQ ID NO: 396959 - protein, 328 aa, unidentified
MIVKQYIGVDMAKNTFDACFADDKPVKTYPNTISGINALFRAIEAKKDTSLSDRIDKNIQVNIGVESTSHYHMLLCMRANKRGYSPILINPLITNKYSQRNIRKTKTDKIDARIIRYCTIQGEGYLWQETAETLTLKHLVRERDYLANIRNVLLLRKESIDSKSLAAGQVLPTVNNDICDCVEQKMKQLEKELRQYKKAEQKLLQTIPGVGPLTSVACISEIKDITRFKKSKQLIAFIGIDSMVHQSGSSIDKQRHITKRGNKILRTRLYNACSVAVLHNNQFKTYFQIKKDQGKPYRVALVATMNKMARVIHAVWTTNTPYRDKTNE

SEQ ID NO: 396960 - protein, 371 aa, unidentified
MKKSSMFVGLDVHKNSIEIAFAESGRGGDVRGYGKIDGSLIALDKVIRKLVSKSCELHFVYEAGPCGYEIYRHLTSKGFDCAVVAPSRTPRQSGNRLKNDRRDAQMLARLHRAGELTGVYVPGLEDEAMRDLTRAREDAKSLERKAKQRILAFLLRHGFRYSGKTPWSSAHFRWISTLKMSHPAQQIVLQESLDTLSECTYRVERLTEQIQTLLPQWRMFPVAQAVQGLRGVSLIVAATTIAEIGDLTRFERPVELMSYLGLVPSEHSSGESTRHGSITKTGNGHVRRVLVEAAWAYRLPARISLKLHKRQEGLPQNICAISWKAQLRLCARYKRLQAQGKANQLIITAIARELCAFMWAIACEVTVTAEA

SEQ ID NO: 396961 - protein, 331 aa, unidentified
MTSIICGVDVASKSFEARVGQQGAAGCFANDAEGIAALGDFCRAHHVDLVAMEATGGYEQQAFAQLSGQGLAVAILNPRAVRQFAQSMGSLEKTDRIDAGMIAWYAEVKGAQPVCLAPENQQHLRALVTRLRQLTDVRSAQLNQQRLVTDRKVQASFKKLLALLARQIGELEQSIAALLAKDPLWRELDQAFRTIKGVADRTVARLMAEMPEIGTLSNKTISKLAGVAPLANDSGKHQGKRAVRGGRAAVREILFIVASVVGRHEPDFIAFRTRLRAAGKPPKVVRIALAHKLLVRLNAKAREVRQAMASLERGPARGPARGPAVIQIEPA

SEQ ID NO: 396962 - protein, 291 aa, unidentified
MNHYVGIDVSLEASSVCVVDGNGKIVREGKIVSEPDALIAWLGGLKLELTRIGLEAGPLSQWLYAAMRQAGLAVELLETRHVRNALKTMPVKTDRNDARGIAQLMRLGWFRPVHCKSIPAQETRALLTARKLVQVKLHDIEMSLRGILRGFGLKVGPTTPVRFEGRIRELVAGHPSLETIAQGLLAVRVALRREFDRFEKQVLAVARGDTRARLLMSVPGVGAIVSLTFAAAIDNPARFKSSKQVGPYFGLTPTKYQSGETDIDGRISKIGDAWVRAVLYEAANTILTKPL

SEQ ID NO: 396963 - protein, 428 aa, unidentified
MNETELSRVREFRQLKRAIQGSKTHLIVGIDVAKERHHAFLGTADGKTLLKKLIFDNTSAGFSELLARAEEVRAQNGLSDTVFGLEPTSNYHKPLGRYLIDKGCHVVLVGGKAVKNNRELLDERWDKHDTKDAANIADLASRGKCFYYDTPSREIEELRDLLSLRARLKKEEHSLNLRIRNNLLAKHFPELDSFYSACERETLAIVRWCLDPQKIAAMPFDQFFKLVAPNARGIAQKLRVQKIHRLAHESIGCAVGCAVELQGALLVEKIKQVREQISEVEQATQQLCVQFPEYEYLLSIPGFGPYVASKVLATIADPWRFESAKQVIRTAGYDLCAERSGKRSDQAVPVISKKGNSQLRYALYQAAMVASTRHRFFIAYFARMLRGRERERGIRTKMRVKLAAKLLVIAWTLMKKGESFNPEYLYLQ

SEQ ID NO: 396964 - protein, 428 aa, unidentified
MNYNTQNAKIASITEKTLIVGIDVGSETHYARAFDWRNYEYSKKPLEFSNTETGFLTFKAWMEDIAEKHGKTAVIPGMEPTGHYWFALGKFLQDSGMKPVHVNPHHVKKSKELDDNNPNKNDRKDPKTIAALVNEGRFSYPYIPTGIYAEIRSLSNLRFQTQEELTRIKNRIARWFSIYFPEYKNVYGDLKAISGRMVLKVAPLPEDIVKLGVEGVNQIWRNAKLRGAGMKRARTLVSAAEHSIGSKEAPESARIELENLLNDMDVYASRLEELLQNIEEKLKEIPYIDKLMAIKGIGLVTVSGFIAEVGDIGRFDNPKQLQKLAGYAIVANESGKHNGESRISYRGRKRLRYVLYEAAISLIGKNAEFREIHEYYRTRKENPLKKMQSVVAVACKILRVFYTILTKGVDYDAKKLIGDIRRPQMQAA

SEQ ID NO: 396965 - protein, 326 aa, unidentified
MQGKEASEQETKTKSSVGVDVSKDWLDVHVLPTDEQLRVPNTCAGIRQLKRWLMRRDPALIVVEATGKWHRPLRRSLDAAAIPVAVIDPFRVRMFAKAQGVLAKTDRLDARVLAQFAAVMAPPVRAPEPEALEQLRELVVARASAVEQQTALKNQRSAATVKFLQRQLNRRIERADKDIEALDAAILKRIEVDEHLARRYAILISIAGIGFVAAATLLACLPELGKSTVKQIAMLAGLAPIADQSGKREGVRVIWGGRANVRRILYLAALSATRFNLDMKAFYLRLIAAGKPPKLAIIAVARKLAILANTLISQDRIWLPQSPKHA

SEQ ID NO: 396966 - protein, 343 aa, unidentified
MKYFAGLDVSLEETAICVVEESGRIVKEMRAASEPEALIKALRKVGLPLERLGLEACSLTAWLHDGLRAEGLPAICIETRQANAAMKTMPNKTDRNDARALAQIMRTGWYRQVHVKSRQCRLWRALLVARRTVLNEMRSIENVVRAMLRETGVKLGTPSRTAFADRVRELAGTEVMAMVEPLPAILSVTLKEFARLTKQVLHIVRKEEVCRRLMSAPGVGPIAALSFRATVDRPERFGSSRAVGAHLGLTPARYQSGETDVQGKVSRCGDELARTTLYEAAHSLLVRSKKWSSLHAWGMNIARRRGMARARVTVARKLGVILHRMWADATEFRFGKEPAALAA

SEQ ID NO: 396967 - protein, 338 aa, unidentified
MKITTIGLDIAKSIFHLFAVNQVGRYVKKKQLKRKQVLAYMANIEPCLIVMEACGGANYWARAFIALGHQVKLIAPQYVKPYVKGNKNDYNDAEAIAEAGQRPNMRFVPIKSVEQQDIQNFHRQRERIKKERTALINQIRGLLAEYGIVINKGLAAVRRDLPLILEDAENDLNVLSRELFAELFEELRALDKRFVECERRIKSLNQDNEVCQRLDEILGIGPITASATYAAAGDGKDFVNGRHFSAWLGLVPGQHSSGGKAVLLGISKRGNAYLRTLFIHGARAVLRYSATKQDRFSRWAQAVLVRRGHNKACVAVANKMARMAWVIMAKGESYRVPV

SEQ ID NO: 396968 - protein, 310 aa, unidentified
MSQPLFAGIDISKARLQVVLGDDSFSVEYAEENILLLVEKFKAASPKLIALEATGGLEGPLVAHLAEAQLPVVVINPRQVRDFAKARGKLAKTDKIDAETLARFAEAIKPPQRPIKDAERRQLSEEVTRRRQIVGMISQEKNRLSRASAQVRKDIEHHIAYLKERLDQSNKGIEKIIKASSLYQETAELLGTVPGIGPVTIASFIAFCPELGNLNRRQIAKLVGTAPLNRDSGPKSGPRCIWGGRKTVRNQLYMATVSAIRCNCKIKEFYLRLSAAGKKPKVAITACMRKLLTILNAMVKQQKPWQFSAA

SEQ ID NO: 396969 - protein, 352 aa, unidentified
MELYVGGDLSRKRLDWFAVWPDGAECGQGAVSPDGDGLARLAGELGLLGERVCVVIESMTGARFVHDQLEAHGLEVRIADARRAKFAVELLGLARAAKTDRLDARRLAELGRLELVPEIWLADPGTRQARELARFRLHLVRQRTMLKNRIDQTLITHGVARVESDLFGRAGRARLERLRLPEPWQDHVRVSLTLIDHLEEEINTLERSLRRLGGEHPYLPLLISTPGIGWVLGFTIASEIGTIERFPTARKLVGYTGLCPRVDQSGESDRRGPLAKNGPKWLRWALVEAAQNASRHPAYRERYQRTKKRLGRQRGPRVAHLELARTLAEAIWHMLSRGEPFAPTGAKPCLAP

SEQ ID NO: 396970 - protein, 469 aa, unidentified
MKTKQESISRPERAKRRLSKHLEQINLYAAGIDVGSERHYVSVPEGLDDNPVRSFSCFTGDLECLADWLVEIGIQSVVMESTGVYWIPVFEILEERGLLVLLVDARRVKHVAGRKTDVLDCQWLQQLHTYGLLEGAFRPPEQICALRAYLRQRDNLIRQLATHVQHIQKALRQMNLLLDNVITDITGATGMKIIRAIVAGERDPRRLAKHRDPRCKSSEEIIVKSLEGHYRDEHLFALQQAVELYDIFQDKIHACDGAIEQHLGTFEPRADPQDLPRGTKRRKKQGNAALFDVRAHLYRISGVDLTRIEGIDESTALKVISEIGIDMSRWKTEKHFASWLGLSPGSKISGGKVINSRSKRSANRAAAALRMAAFAVSNSKSAVGAYYRRLRARLGAPKAITATAHKLARILYSMLKHGTEYVEQGQEHYEQQYRERVLKNIRRRAADLGYSLVQNGTEGPTAANVLSMT

SEQ ID NO: 396971 - protein, 411 aa, unidentified
MAKKSRRCDQLPVLHPDAAGIDVGASELFVAVAADRDPHPVRSFPTFTRDLNALADWLEQCGIRSVAMESTSVYWIPVYQILESRGFEVYLVNAQHVKNVPGRKTDVSDCQWIQYLHSVGLLRGSFRPPGVICAIRSLWRHRSSFIQMAAEHVLHMQKALDQMNLQIHRVLNDIPGLSGLRILDAILAGERDPVTLARLCHSRVNSSEDTVAKSLEGDYRPEHLFALKQSLAAFRYYQSLISEADQEIQRQLNDLDTAVDAEDAPPKRTKASPYQRRRYEPKNFDLRGELYRIFGVDLTNVPGVSAITAQTILCEIGTDVSQFRNASAFASWLGLCPEKKISGGKVLYTKSRRVRSRVATAVRMGAHSLHHAKDYLGEFFRRITRKLGKPQATTATAHKLAPIVPCERRKP

SEQ ID NO: 396972 - protein, 336 aa, unidentified
MEDYRWFMGIDVSKSKLDITLLEGSEKRHYSVIENKEKSIKLFIKELTAIAGFSLKHCLICMEHTGIYNAHLLTISKAQAWNLCLESAIQIKQSGGLQRGKNDIIDSYRIALYAYKNKSFLKLWEAPREVILKLKKLSGVRERLLQAKVQLERTLKEDKHFQSKHLNTFLGKCCAKSIKAIEGDIKRTEDQIQMVIDADDELSRLFSIIESVPGVGRISATEIVITTNEFKNIHDARKYACYAGVAPFEHTSGSSIRGKTRISKKANLQVKTRLHMASLVAAMHCEELRLYYQRKVAEGKNKMCVLNAVRNKLVHRIFACVKENRLYEKNFAPKLV

SEQ ID NO: 396973 - protein, 323 aa, unidentified
MDGTTVPRWDAFVGIDIAKNTYEVAFGVGGDIVSFDYDAKGFQQLRSRLGDFGRCLMVVEASGGLQRRLVADLLDEGFAVAVVNPRQVRDFAKGHGLLAKTDRLDAAVLARFARDVQPRTVSKTSENQAELVQLLARRRQLLELQTMESNRLPMATSKLTRRSLQRVLKLLEQQIERLNHAIAELIQSHDDYRDQDQILQSVPGLGPVTSSTLLGELPELGKLNRQEISALVGVAPFNRDTGTLKGHRSIGGGRSTVRAVLYMAALAARNCNPVIRRFADRLTQRGKPIKVVLTACMRKLLVILNTLVRNQTPWQLKLDASTP

SEQ ID NO: 396974 - protein, 402 aa, unidentified
MNCVGIDVSKGKSMIAVMRPFGEVVVSPFEVRHTANELSELAGLLKSLDGETRVVMESTGNYHAPVAWLLHDAGLYVSVVNAMLVHDYGNNSLRRAKTDKKDAVKLANYGLDHWLTLPRYVPEEDTRLMLKTCYRQYQQYSKVQTMLKNNLISLLDTTFPDANRLFTSPPRADGSEKWVDFVAAFWHCECVCGLSEKAFTAKYQKWCRKHGYNFSEDKALDIYASACRHFGVIPKTDTAKLLVEQAISQLQTTSSALAALKQEMQSLAASLPEYPVVMGMFGVGPTLGPQLIAEIGDVRRFHSKKALVAFAGIDAPPYQSGQIDVRSRSISKRGSASLRRTLFLVMGVLLQCAPMDEPVYQFMNKKRSEGKPYRVYMMASANKFLRIYYASVKAYLDSLEHD

SEQ ID NO: 396975 - protein, 404 aa, unidentified
MTYRYVIGMDVGKYFHHACVLDEHGTQVLSKQVNQHETSLRDLFASFIGKVDQSHDVLVVVDQPNNIGRLTVAIAQSMGTTVRYLPGLAMRQLSRIHVGNAKTDVRDAYVIAHAGLNLPESLRKVDRVDEVFLKLKILNGIDEDLARAYTRLINQMRSVLVGTYPEFERVLRGQVIHRKWILQLLAKYGGPTKIRRLGKARVNVFARRHRARNPETIVDAMFAAFTSQTVQIPGSEYAELGVAMSAADALAKKEHRKEIEDQVLALIQDIPHTEILLSMPGIGPKSAAQILMTVGDMSDFPSAAHLASYAGLSPRTNQSGTSIMSNSLNRAGNKKLKNALWQSSFASIRFHERSRQFYERKRKEGKRHNAAVIALSRRRLNVLFAMMRNEELYRENAPEVIAAA

SEQ ID NO: 396976 - protein, 430 aa, unidentified
MKSNTQNAKIEAITEKTLVLGIDVGSETHYARAFDYRGIEYSKKPFKFSNTEAGFATFKEWILDLKERHEKDKVVPGMEPTGHYWFNLGKFLQDNEMKPVLVNPHHVKKTKELDDNNPTKNDRKDPKVIAGLVREGRYMIPYLPDGVYADLRTASNIRFQLQAELTRIQNRISRWFNIYFPEYKTVYGKPDAKSGILILKAAPLPEDILTLGIDGVNQIWRDAKLRAVGKARAKTLIEAAEHSVGSKEGAVSARMEIRMLLEDYESRNTRLQEVMVLIEELVRKIPMAEKLLEIKGVGIRTVSGFLAEVGDISRFNNPKELQKLAGLALVENSSGKHKGETTISRRGRKRLRYLLFEVAMSLVSKNQEFRELHNYYTTRRLNPLKKMQSLMAIAAKLIRVFYAMLTKGVDYDPKKMISDIKRPTVYLQAA

SEQ ID NO: 396977 - protein, 442 aa, unidentified
MSNEVAVPAAASEPEWAAFVAIDWADQKHYWKLVAAGSQKPEQGQLDNTPEAVAEWAADLNVRFGGRPVAVCLEQARGALVYMLLQFPHLVLFPVNPKMSARFREAFHPSGSKSDPSDTAVLLTLLLCHRDQLRRLKPDTAETRLLQGLVEQRRRMVHEKTRHSNRLTACLKLYFPQIGKWFEDVTLPLVAALLERWPNLAELQRAHDGTLRKFFHQQNCRSEELIQKRIDAIRQAVPATTDRAVLGAEAMSARGFIAVIATLRANITELDEQIAKAFAAHAEVALWNCLPGAGAALAPRLLVAFGTDRERYATANEVQCYSGIAPVTVASGRSQSIHFRWGCPKFLRQTFHEFASHSIVKSQWARAYYDLQIDRGKSHHAAVRALAFKWIRILFRCWKNRTPYDEQVYLQSLKKRNSPLHALLPSGWKDVAGFQKLSENPS

SEQ ID NO: 396978 - protein, 406 aa, unidentified
MEIEAINRRVIGLDIHQAQITACALVEDEQGGLRKEHRQFGAFKRDRRALAEWCTAIDPTEIVMESTGIYWKSPYAALEKVGIRAKVVNARHVKNVPGRKTDIGDAEWLAMLSRAGLLGGSFVPEADHRELRLVSRQRQKLVGILASEKNRLHKVLTDSGIRLGVIVSDLHGQSARAMVKALIEGKPPEEVIQLASRRLRASRDEMMDALQGELTATHRFVLDELMQHIEDIEERIRRFDQKLLEGLSEAGDALMVLQTIPGVDLIGAAMLLVEIGTDMSVWENEERLSSWVGICPGNNESAGKRKSGRMRKGNPYVRRLLCEFAHAASRTESTFKAKFQGLLVRRGRKRAIVAIAHKLLRTIFFMLKRGQHYRDTTVNYEEMSVKRNAARWIKKLTEFGFLPKPA

SEQ ID NO: 396979 - protein, 370 aa, unidentified
MHKPTTLFVGLDVHKDSISVAHAPEERAAEVTFVGPIGTRQYDIDKLVRRLHSKASRLVFAYEAGPCGYVLYRYLTGKGLDCLVVAPSLIPKKPGDRIKTDRRDAVELARLLRSGDLTPVYVPSIEDEAIRDLSRAREDAVKDLKAARLRLKSFLLRLGLTYEGRADWNDAHLRYLARVVCPTPAQQIVFQEYLHAVTEIADRLKRLESELREHSSSWRLSPLVEAFQALRGVQDTVAITTVAELGDITRFDSPRQLAAFVGLIPSVHATGNSRRLGSITKAGNSHARRVLVEGAWAYRHPAKVSESIRKRLERLPKSIQDIAWKAQVRLCKRFRRLSARGKHPNIIVTAIARELVAFMWAIAREVRLGA

SEQ ID NO: 396980 - protein, 355 aa, unidentified
MSQEKYIGMDVHQATISVAVMDARGKLIMECLLETKAATILELIQGLRGTLALTFEEGTSAAWLHDLLKPHVSRLVVCDPRKNALLKDGNKSDRVDARKLAELLRTNQVKPVYHGKHGTRALKELGRSYLTITKDVTRVMNRIKAVYRSWAIPCAGTSVYTPRHRAEWLAKLVEPGVRIRAEHLYQQLDSLEPVRLEARRQLLLESRKHPAVKLLRQIPSIGPIRAALLVALLQTPHRFRTKRQLWAYSGFAVEIHDSGEYRSVRGKLQRNRERITVRGLNDNHNKDVKSLFKSAAISASTRPGPLHDFYVTRVERGMRPTMARLTLARKIAAITLTMWKKGVSFDPKQLQRQTA

SEQ ID NO: 396981 - protein, 335 aa, unidentified
MEVKTIGLDLAKNIFQVHGVDAAGEVSVTKRLRRSQMLEFFAGLKPCLVGIEACPTAHYWGRELKSLGHDVRLIPPQYVKPYVRRSKNDAADAAAICEAVARPSMRFVPLKDEMQQAALMLHRVRDLLVRQRVQLISAIRAHAAEFGVIEAKGPQNIARLLAAVEASGVPDLARQLIGVLTEQLDAVEDQIAEVDRRIVSWHKSNETSRRLAGVPGIGTMTPTAIAATVPDPSVFRGGREFAAWLGLVPRQNSSGGKARLGKISKQGNEHVRRLLIIGAQAALLCSKEVKANAWVQGMMARRPRMVVVVALANKMARIAWALMARRTQYGVAVAA

SEQ ID NO: 396982 - protein, 347 aa, unidentified
MITIGIDPHKDTHTAAAVEDTTGQLLGELTVPGTEEGHHRLLAWAHELAPAEAKPRFALEDCRHVNGRLERFLLGAGETVLRVGTRMSAHARQGARTYGKSDSIDALAVARAALREPNLPQATNEPKLRELKLLVDHRDDLVGERTAHSMRLRWLLHDLDSGLEPTARTLGEEKVRRGLSQRLGRYGEGVQVRICRELLVRIGELTRAIDALRKEIASMVRPMAPALLAISGVGELVAARILVEAGGPGRFTSDAALARHAGCAPIEVSSGRTRRHRLSRMGNRKLNATLHVVVLTQARVHPPARAYLAKKRAEGKSNKEAFRCLKRHLVRAVFRALQEPQAVAVSP

SEQ ID NO: 396983 - protein, 341 aa, unidentified
MQITTIGLDIAKNVFQVHGIDAAEKVVVRKQLRRGQVMKFFGALPACLVGMEACATAHHWARELTKLGHEVRLMPAKDVKAYVKRNKNDAADAEAICEAVRRPTMRFVRAKSAGQQGRLMQHRTRDLLLRQQTQVINALRAHLAELGIVAAQGREGLKQLLTIIADEKDARLPIDARGSLIVLAAQLQALQTMIGSVEKRLTMQHRANEASKRLESVPGIGTIGASAITATVTDPNAFRSGRDFAAWIGLVPRQDSTGGKQKLGPISKQGDRYLRRILVVGAHSVLRRARQNPEKYPWLTQLLARRPFKVVAIALANKMARVAWVLLARGGTYRVPALAAA

SEQ ID NO: 396984 - protein, 460 aa, unidentified
MSTVQKEAQSSNKSRRKIGRPYQTTQATLERINLKVAGIDVGSEKHFVAVLDLPVKSFLSFTCDINEMILYLKANGIEGVVMEATGIYWLPLYEMLEAAGFKVCLVNGAHSKNVPGRKTDVLDSDWLRELHTYGLLRSSFIPDADIRLLRYYVRLRDDHIGMAASHINHIQKNLDAMNLKLHKVISNIMGKSGLSVLRAILSGERDTEKLMGLCSSDIKNNKKEEVLKSLEGNYRAEYLFGIRQALDLWEYYKQKQLECEKEIESILKRITKDIPMPENLSKPKQIKGNAPKIKDFHLLMTKLTGNLDATAIGGINDYSLLKIISEVGTNLNQKFKTEKNFTAWLGLAPGQNQSGKRNRKKTRKVSNRAGQALRQLAQNVGNGKNSALGGFYKRIRSRSGGVIAVKATARKIAVYLYNLLTKGLAFVEEGIKRYEERYKLQQKRYLEKKAKELGLILVAA

SEQ ID NO: 396985 - protein, 407 aa, unidentified
MSGLLERVPVDRVIVAIDPGKAVHRVWVTTGEGLLGEPVSLPTSRAGLDRLGALVAGDGAPVFALEATGSLHHAWAAELERRWPGSLRLFAPSQTQAARTQLGTRRFKTDDRDCAALVWLARQGAGQPARSCAVDALRAAVSHRRQLVFALTPLRQRLHDQLNALAPGLSAPAGHGRALALETPTGRAVLACAAAFAGRAPSVRSLKARAEGRLSDTTAAFWAQRWQDCLAPPADAELRAARLARELERFEALHADIAFVEEQITPLLADSAGQVLTTLPGVWIVRAAAFSAHTLPVERFATPERLYSATGLAPASYESATVRRRGGIARTGLPEHRDALMSIAWGLGQHAPAFQARRTELAARGKTGIQARVALARHACRLCWQLLHSQQPYDDRRYDRARRDRGR

SEQ ID NO: 396986 - protein, 360 aa, unidentified
MNREKNTTKYVGMDVHRDCVSMMVLNEEGRQMSQCIVPTDGAVILEFIQGLRGSVQITFEETTQSAWLYDLLQPHVSKVVVCNPRKNALLKAGNKNDKLDALKLADLLRSKMLSPVYHGQNSTRRLKELGRAYTVLTEDTTRVMTRLKAVYRGQALSTQGKAIYSQRRREEWLQLLSDKDGLRQYAEYLFQELDGLRGIRRQARQSLVMESSKFKAVEMLRSIPFLGPIRAALLIGVVQTPHRFRTKRQFWTYCGLGLETRSSADYRVVSGQIQRSKKQVLITGLNFHHNHQLKNIFKGAATTASTRSGPLRDYYQGLITKGIRPEMARLTLARKMATMALILWKRGERFDPTELQPQAA

SEQ ID NO: 396987 - protein, 391 aa, unidentified
MVCVGIDVAKDKHDCCILDSEGTTLVDCFTIPNNMDGFKSLLQTIQDRSQKSDKIKVGLEATGHYSYNILGFLLDNDLPVYVMNPLHTNLYRKSLSLRKTKTDRVDAKTIATMLLSDVDLKSYTDTAYHNEELKSLTRYRFDKVQERAKLKQSVSRLVTILFPELEQLVSSIHGTSIYALLSEYPGAKQISEAHLTRLANILVKTSRGHYRKDKATHIRDAARTSIGSVMPAKSLELKHTIKLIQELTSEINEIEDAIRKIMDELKPPILSIPGMGFHSAAMILAEVGDFSNFNSPDKVLAYAGCSPSTYQSGKLTNCYAHMEKRGSRYLRYALYTATKYVCYWNPVFTEYLTKKQAEGKHYNVALSHATKKLVRLIYALQKSGKAYLAVT

SEQ ID NO: 396988 - protein, 406 aa, unidentified
MKTIVGIDWSEKKHCVYIHNERGAEIARMEIEQSVSDFQRLATKLSRVNPRPADCLIAIETHHNLLVDFLGRQGYTIYILAPSLVHSNRGRQGSSGAKDDDRDARLLADILRTDRGTLIPWQPDSAIVQQLRSLLSWVDDLTKQIVQEHNRLRTHLLRYYPQPLVAFSSLQSQYVLRFLASHPAPTDLAELTLAEFGMLCREYGYYQADKYPIIWATLQETSPGTDEAVIPTYRLLTRWLAKQLRKLIGQKKETIAVVQTLFRQHPDAPLFDSLPGAGELLAPKLLVMFGDHRQRYPVRDLLPAIAGTAPVTVASGKSRFVKFRRACNRDYRRTTQQFAQSSIRRSAWAATYFTRLIKRGMSKSHAYRCLANRWLHIIWALWQKNELYDEVYHLRQVSRHRRPQLT

SEQ ID NO: 396989 - protein, 402 aa, unidentified
MNCVGIDVSKGKSMIAVMRPFGEVVVSPFEVLHTDSELSELARLLKSLDGETRVVMEATGNYHAPVAWLLHDAGLYVSVVNAMLVHDYGNNSLRRAKTDKKDAVKLANYGLDHWLTLPRYVPDEDTRLMLKTCYRQYQQYSKVQTMLKNNLISLLDTTFPDANRLFASPPRADGSEKWVDFVDAFWHCECVCGLSEKTFITRYQKWCRKHGYNFNENKALDIYASACGHFGVMPKTDTTKLLVEQAISQLRATSAALAALKQEMQSLAASLPEYPVVMGMFGVGPTLGPQLMAEIGDVRRFHSKKALVAFAGIDAPPYQSGQMDVRSRSISKRGSASLRRTLFLVMGVLLQCAPMDEPVYQFMNKKRSEGKPYRVYMMASANKFLRIYYASVKTYLDSLEHN

SEQ ID NO: 396990 - protein, 339 aa, unidentified
MTLMPVGIDIAKNVFQVHHIDQRTGEVVNKQIKRAKFIEYFANRPPCLIGMEACGGAHHWARQLVKLGHQVKLMPAQFVKAFNIRNKNDAADARAIWLAVQQPSKAIAAKTEMQQAMLALHRLREQLVKVRTMQINSLRGLLTEYGEVMPKGRVAIDREMPTVLERIAERLPAVLIDTFREHWGGLKTLDGQIMQIERRIREWKKEDESVKAIYEIPGVGLLTATAAVAMMGDPKAFSSGREFAAWIGLVPKQTGSGGKTNLHEISKRGDRYLRTLLIHGARSVISNSKKPGHWLIQMQVRRPPNVVVVALANKIARTIWAVLANGRPYQAGYASVRPA

SEQ ID NO: 396991 - protein, 331 aa, unidentified
MFPVGIDVSKDTLDLCMLYDGIKGRVKTRNIKNDRSAVENISRWLRLQHCGPEDVHVVMEATGVYHERLATALHDAGFYLSLANPHRSREFARGMGIMTKTDKVDAYMLACYALLKKPHRWEPPAADIRHLSALLRRRDVILADAVREENRLEKYQSTDTPADVISSCIRMAQLLREEVKNIERQIKAHIKASPDLNRDYALLTSIKSVGPQLGMHMLVVLRSHHFESADQAAAFLGVVPVEKRSGTSVRGRPRMSKIGPPQLRAKLYMSALCGKIHNKRMRNIYEEMCLRGKPKMVAIGALMRKLVHWCYGVLKTGTAFCDGGPRAALNS

SEQ ID NO: 396992 - protein, 429 aa, unidentified
MTNETLIRIMQFRQFKEEIRGSQEYLIVGIDISKDKQHAFFGTANGKTLLRRLIFSNNLEGFSKLLSRADAIKAQNGLSKIVFGLEPTSNYHKPLGMHLIRCDREVVMVSGVAVKRNRELLYGRWDKNDTKCAANVADLISQGKCLFYDSPSSEISGLRELLSLRERIKKNHHSLRMRIRGNLLAKYFPEFDRYFGQCPSESLAIVKYCLDPGKIAGMDFEQFMCTVTTRDRGIAQQRRLRKIYDLAIESIGCSMNRFAEFEATVLVDQVQQTKQLIGQIDDRIDQAASAFIEYHCLLTIPGFGPYVSALVLAKIGDPFRFENRGQVIKMAGYDLSAKRSGKSSNKAIPVISKKGSNSLRYALFQAALIASARNKHFIRYFTNTLKGREKERGIKIKMRVKLASKMLIIAWTLMKKRIDFNPDFLLTEE

SEQ ID NO: 396993 - protein, 350 aa, unidentified
MQKIYIGVDFHARQQTICYLTTDSGEMLFQQLQHQDKAAVRAFYAQFSGDVIVGLEASGYSPWFERLLEELGCQVWLGHATEIRRRARGRHKNDRRDAELILDLMLHDEFPRLYLPPLPSREVLRMLRYRQKLIKIRTIGKNSLQALALQAGLAKGPHLFTKAGLQELRTVAMSPAMQWQREQWLQLLEPLNQRLLETMLWLKQQSQADQRIHRLRTHPGVGLLSALCLVHSLEPVSRFANTRKVTAYAGLDPLERSSAERKRFLGISKGGSRVLRFLLVEAAHTALRKDAELRRFYQRLAARHGRPKAQVAVSRKLLIRAYIMLRDEIDYAEFQRRAVAARPAPPAHGH

SEQ ID NO: 396994 - protein, 400 aa, unidentified
MKYYVGIDIGKYIHQAILCDKEAKPLASPLRFHATYEGYQLFIAYLKKVVDPKDFGDVSVGMEATGSYWFSLYEHLRKLGLQVMVLNPLQVKAYRNEGIRGAKNDRIDAQLIVKVLRFGDYKISDIPKEDIFALRQLTRLRSDLVSMTTDLKLKTISIFDQVFPEYKDLFYDIFATTSKALLDEAVVPQAIGAIPTKKLTQLLDKASRGRQGEKEAKHIKSIAEQSIGVTIGIDAFTLSLKILLAQITHLEEQIQRLDKEIMQRVEIQQTTLTSIPGIGVNTAGTIIAEVGNFERFKDDKNGAEKLVALAGIDPRVKESGKYKGKAKMSKRGSPYLRQAIRQASFVAACGLKHDPMFAALYQKKIKEGKPFEVALSHVENKMLHVIYSLLKSKKEYKPKI

SEQ ID NO: 396995 - protein, 309 aa, unidentified
MKQSVVYIGIDVAKTHLDVAWAGTFRRWPNERSGHAALVRWIKQSATPVQLICEASGGYEQALLESLQKSQVKVTLVQAVRVRQYARAAGILAKTDRIDAKVLAAFGSAMQPQPTPPLSAEQKRLRQYEAQRRHLSRTLVAEENRLAQLSCAELRSLSRSLISKIKTQIKTLDRGISDLIAQDQTLCVKAQKLTAISGVGVRTAALLLAQMPELGQLNRRQAAALAGLAPFNHDSGSVRGKRAIFGGRPALRSGLYMAALSAARFNPILSNFYQRLRAKGKPHKLALTAVMRKLLLALNQTLKPLPCSA

SEQ ID NO: 396996 - protein, 388 aa, unidentified
MQTVADRPEAPTAIRTDLGAIFVSLELSRSTWLITSLSPGGGEKMSKQVVRGGDVAGLLERFARLREKARARTGKVFPFVVIQEAGLDGFWIDRALQNEGIESHVVDPASIATSRRRRRAKTDGIDGEVLVRALLAYKRGEPRVCAMIKAPTPEEEDRRRLCRERKVLIVERVRHVNRVKGLLFSQGISGYEPLRRDRRRRLDTLQTGDGRLLPVHLKAQVCRELDRLELLLEQIKAVEAERDVLLAAQQVAAPAPAAMLLDIKGIGPEFAAILWSEGLFRHFDNRRQVASYAGLAPTPWQSGSVDREQGVSKTGNPRLRTTLIQLAWLWLRHQPQSALTLWFEERVRRNGGRLKKTTIVALARKLLVALWKYVTAGIVIEGAVMKRT

SEQ ID NO: 396997 - protein, 377 aa, unidentified
MKDLSALQHFVGCDVSKDTLDFALYERGVAYTGFKHIRVDNSTEGFQAMRKWLRGLGVGMSDTVIAMEHTGYYSVALSEWCAGKKITFVLLHPLDVKNACGRGRNKTDKADAQFIADYAYTMREKLAPSQPEPPVIGRLRQLRNERHMAVKTRASFLNMARTLTDKSALRRVRKTVETLTAQISAIEENIRQVVESDVLVAENYRLLTSITGIGLVNALATIVATGNFTRFQTARQYAKFVCVSPLRRESGTSVRDADHVSKAGHSELKATLTEAARSAINHDGQMRAYYGRKRSEGKSYGCVMNAVKFKLICRMFAVVKRQTPYVALELFRGTPQNSSVGERRAARGRTTGPDERIRPQQPLSSNVKNIERNICKI

SEQ ID NO: 396998 - protein, 395 aa, unidentified
MYFLGIDIGKRTHVASLMSEEGKVILKGFSFPNTTEGADSLIERLSKYSETPADFIVGMEATGHYWLSIFSYLHESDFLIHVVNPLQTDGWRKGTEIRKRKNDIIDSVLIADLMRYGSFVETVLSDENVFSLKQLSRYRTYLVGTASDFKRKIIAVLDQVFPEYASIFSKQGIFGKASKELLLEFSSPIELEEISAETLAQYLAELSRNRIKPEKADQLKQAASNSFGVKFAQEAFTFQLRSMIEQLKFIESQVKETEKEIKRIMSNLDSVILTIPGIGPINGATILGEIGDIRKFSNPKKLVAYAGIDASVSQSGQYEATHNVMSKRGSPYLRKALFSAALVAYRCDPVFRAFYQKKISEGKYHLTALGAVSRKLCYVIHAILTKNEPYKIVSD

SEQ ID NO: 396999 - protein, 342 aa, unidentified
MNNNITITIDLAKTIFQIAVFNKSGNVIYNKAVKEKGMRQLVDKYPQADIYMEACGSSHYWGRYFKKHGHLVGLLPAQIVAKFRTGNKSDKNDALAIYAVSQSKNNNIHLIPVLTLEQQDISIMHTYREGCKKQRNQIASRIRGLGLEYGVKFPLGINKLCEQMKDVLEDAENELTTKGRNIIDKLYCELKIVIKLVVKATQDIEIIAKENDACQRLVKLPGVAWLGASMLFAKLGNASHFKRGRDASACLGLVPAHTGTGGAVRILGITKRGDTYLRSLLVNGARAVVIHIKDKKDKLSCWIRDLLERKSFNKVVVAVANKMVRMATAMLKSGNEYRQAIA

SEQ ID NO: 397000 - protein, 414 aa, unidentified
MDVLHERCAGLDISKKDAKACVRTPSTKRRGSFTTETTTWGSTTNAVLALRDHLLAAQVTLVVIEATSDYWKPFYYVLSEGLNVILVNARQVKNLPGRKTDVSDAAWLAQLGAHGLVRPSFVPPEPVRELRDLTRARTTATRERGRVVQRLEKLLEDTGIKLSAVASDIMGVSGRAMLEALIRGEADPRVLADLAKRKLRSKIPELTEALTGRFREHHAFLTRLHLDHYDQLTTMIDQLTGRIEEAMAPFRGAIDLLDTIPGINQATAEVIIAETGGDMTRFASAKHLASWAGVCPGHHESAGRTKNTKVRPGNPYLKGALGLAAFGAVRTKDTYLQARYKRLTARRGPLRALVAVEHSIITAIWHMLTDNVAYQELGGTYFTQRDPERATRRAINQLNQLGYTVTLNPRENAA

SEQ ID NO: 397001 - protein, 364 aa, unidentified
MSDLMNVGIDVSKDTLDVCTSANEVFTCANDPEGIESLVKRLKALPIERVVLEATGGFEAAVVAGLAAAALPVIVVNPRQVRAFAKASARLAKTDRIDGETLVRTLMAFKRGEPRVCSMARAPTPQEEDRRRVCRERRTLVGERVQHVNRIKGLLFAQGVFGYEPLRKGRRDRLEDLRTGDGRPLPVHLKAQIIRELDRLEVLLGQLKTVEAERNALLKPATGEVASPAAMLAQLKGIGPETAAVLWSEGLFRQFDNRRHVAAYAGLAPTPWQSGSIDHEQGVSKAGNPRLRTTMVELAWLWLKNQPTSALSLWFHERVRRLGGRMRKTTIVALARKLLIALWRYTTAGVVIEGAVMKAAPATI

SEQ ID NO: 397002 - protein, 343 aa, unidentified
MGIVEVVGGVDTHADFHVAAAVDTNGGLLAVERFQASDDGYQDLLAWLTGFGRVARVGVEGTGSYGVGLARFLIEAAVDVVEVDRQNRQVRRKKGKSDPTDAVTAARAALSGEAAVVPKLRNGPVEQMRVLLVARRSARLQRSQSLNQLRHLVFTAPEPIRVRFKDRPQIGLVKEAAAMRPNPTSDPVTYTTNLMIRNLARRIRALTGEVKDIDRMLKDLVEQAAPELLDIYGVGPDGAATLLVTAGDNPERIRSERSWAHHCGVTPIPASSGKTIRHRLNRGGDRHANSALHRIVLTRTSNHPETRAYVARRRAEGLNSFEIMRCLKRYVARQVFKHLPIAA

SEQ ID NO: 397003 - protein, 353 aa, unidentified
MDLNLGWEIDMTINMLGIDIAKNTFQLHGADNSGKAIHKKRLARRDLAAHVANLPSCTIVMESCGGANYWARVFQRSGHSVKLISPQFVKPFVKTNKNDANDALAIVEAASRPSMNFVPIKQVEQQDIQSIHRVRTRIVRSRTALINEIRGLCLEYGVVLTPGAARVKSSLNAAIGDGANELTVSSRECMQGLYEELVDVEARLKKLDTKIRQLCRDNESCKRILKIPGIGELTATAIVAAVPDPKEFRNGRHMSAWLGLVPRQSSSGDKQVLLGISKRGDRYLRTLLIHGARAVLSHCKDADNDYNRWVTRKKATLSHNKAAVALANKNARIIWSMLNTGKDFNYGAQATAA

SEQ ID NO: 397004 - protein, 368 aa, unidentified
MIVRIITYERSTLVNDEKYIGLDVHQATISVAVMDATGKVVMESILETKAATILEFFAGLRGTLWVTFEEGTWSVWLYDLLNARVDKLVVCNPRKNALLKDGNKSDRIDARKLAELLHGNQLKPVYHGETGVRMLRELSRSYLTIVKDLSRVMNRLKAVYRSWAIPCAGRDVYYRRHRAQWLAKIREAGVRRRAERLYEQLDMLQHLRQQARRELLAEGRKHAITAKLRQIPYLGPIRSVLAVALMQTPHRFRTKRQLWAYSGLALETRTSADYRYVEGQLRRSKKVVSIRGLNKDHNHDLKGLFKGAATMASVRPGPFQDFYQAALAKGIKPTMARLTLARKMAAITLTLWKKGENFDAEKLKSQAA

SEQ ID NO: 397005 - protein, 400 aa, unidentified
MNAVGIDVSKGKSTVAVIQPFGVVIAEPFDVFHTDSGLKELVSFIKSLSGETKVVMEYTGTYYEPVANALHNAGIFVSVVNPLLIDDYDTNRVRKVKTDKLDALKIASYALDKWIKLRKYEPAETVRKTLQIMNRQCIKLNKILVMQKNSLIALLDCCFPNVNTLFTSPRRASDGHEKWVDFVVKFPHVDSVAKLSLSAFKVKYQSWCNKERYKYSESKAEQIHAYARTIVSTLPMTDAVKKMVSEAAKHLNSTLEALGTLQAEMDTLASQLPEYETVMNLYGVGKVSCSQLIAEIGDVTRLKCGKSLVALAGIDPPPDQSGKDDPKSRRISKRGSPALRKTLFLIITVYLQRQPTDEPVYQFLDKKRAEGKPYKVYMIAAVHKFLRIYYARVKEVMPTQ

SEQ ID NO: 397006 - protein, 317 aa, unidentified
MRETNTIAAGIDVAKAKLDVAVAGRRQFWQVPNTPAGFGDLVRLLRRHKVTRIGLEATGGYERDAAEHLRKHGFAVVVLQPIQVRAFAQFTLCRAKNDRIDAALIAACVAHRTKLRPPPDPRLAPFADRLTFIEQTEEDIARIKVRLEHVRDAALRRLMIEDIKRLAARRAAMLAKLEADLRRHDDLTRRLDLLLTIDGIAERTALALLIRMPELGTLSREEAACLAGLAPFDRDSGQRSGERHIAGGRGRLRKSLYSAALPAAFRWNKHLVDLYRRLLADGKAHKLALIACARKLLIFANTVLSRGTPWISKIATT

SEQ ID NO: 397007 - protein, 346 aa, unidentified
MGKSAIDLSSVATVGLDLAKHVFFIHAVDLEGQVVVAREVRRRDLLTFFASLPRCRVGVEACSSAHHWGRELTLLGHDVRLMPPAYVKPYVKRQKNDAADAAAICEAVTRPSMRFVKIRSVDNQAVLMHHKVRETLVRQRTQILNSLRGHLAEIGIIAAQGPSNAYALANLLREGDASIPRAVTAALFPLVNQLDRLDAEIKLADTAIAELAKVDPVASTLMSIPGIGPVTASALVASVGDPSGFSGPRQFAAFLGLVPRQNSSGGKARLGRVSKMGNGYLRKLLVVAGHSILYHRARHNDPLRSWANRLMANKPFKLVAVALANKLARMAYAVMTTGIPYRTAAA

SEQ ID NO: 397008 - protein, 385 aa, unidentified
MQERKVITMITHYIGIDAHTTNYTLSTASDFEEKPYNTSKYAAKLHYILKYANTLCKKDKIQKENILLGYEAGCLGFKLQRDLNKEGFNCIVIAPSSIPGTEMNRKRNKKTDYRDAEAIAKALRNNDYSAVATPDEQDEAIRDYIHEREAQKKTLKAIKQRIGALCNRQGFHYEAGGYWTKKHLDWLKSLIFPNEFFREVLDSLLLEYEHVTEKIETMDKRIEAFAEMDKYRESVHKLVCFKGIKTLTALAVIVEVGDFARFMKAKNFVAFLGLSVGEQSSSTDHNQGGITKQGNCFIRRLLTEAAQCFSRATSSKSKALKERQEGNSEEVIAYADKGNERLRKRYYHLIIHNMKNPNKAKTAVARELACFIWGMMTDNIHTVLS

SEQ ID NO: 397009 - protein, 331 aa, unidentified
MDATLIRYESQSDREQQLAYTTVENNPKGFRSLVSWSKKNAGRGVKTDTMLFCCETTGGYDRALCDWLYGNDLDIWRESALQIKRSMGLRKGKDDKADSEMIAYYALRFRSKATLYKPLDGNMRSLRDLFLYRQSLVAERRAKMVSAKEKQHISSKSKVDDFIYRDAQKAINILTKSIQECECRMLEIIKEDEQMYRNYLHLISCKGVGLVTSIMLIIYTDNFKGWNAKKMASYCGIAPFYESSGSSVFHKANTSGYSNRRLKGILTQAARSAITHNPTLRQYYLRMKAQGKSYGVILNNVNNKLLHILFSLVLHDCDFELDHETKRALRA

SEQ ID NO: 397010 - protein, 337 aa, unidentified
MNDCKVFVGLDYHEDVIQVCVLDASGEVLGQRRLPNDHLDVVTFVENLGQRVHVAVEVCTGSSALADVLVSEAGWIVDLAHPGYVRRLKQSPDKSDHSDARLLADLVRVGYLPRVWLAPPSVRELREMIRYRQQVVNEMRAQKLRIGALLRSHRCGRGPATRWTNAWNQWAQKEANVPGSTRWIVRRHFARINQLLRERAMVERKLSLLTKNDALVARLLGFSGIGPVTAWTIRAEIGRFDRFRNGKQLSRFCGLSPRNASSGMRQADAGLVKACNGPLRAVLIEAAHRLIRHDLRWQMFAARHRQSGKPGSVIAAAVANRWIRWIYHQLQPEMLAA

SEQ ID NO: 397011 - protein, 310 aa, unidentified
MDPMFVGIEVAKDRLDVHVQPSGEAFSVRRDDAGLTDLVRRLHPLAPTLVALEATGGYEVVVAATLAAAGLPVAVINPRQIRDFARATGRLATTDALDAQAIAGFAAAVRPAARAVADADARLLGELVARRRQLVDMLGAEHNRRRLIEQPALQRRLDAHIRWLERALRELEGDIDTTVRASSIWRATEDLLRSVPGIGPVTAYTLIADLPELGRLDRRKIAALVGVAPINRDSGTLRGRRMIAGGRASVRHVLYMATLTAIRHNPIIAAFYQRLVTAGRPGKLALTAAMRKLLVILNAILRDQRPWRPA

SEQ ID NO: 397012 - protein, 378 aa, unidentified
MAPSAPPSKDGVDVFSGIDVPLCGLSDLATGEPPTVSITMIGLDTSKSVFQIHGVNETGKAELKRKVRRSELIAFFEKQESCTVVMEACGAAHHWARILTGLGHTVKLIAPEAVKPFVKKGKKNDAADAAAICEAASRPDAQFVPAKTVAQQGILALHTVRSLLVKQQTMLANAIRGLATEFGHVVPKGLHNLEPLVALVDADEAMPAQARQAIAELHERFGELAKGIQSCEAGIVKHARNDATARRLATIPGIGPITASLTAATVVDISLFKTARQFAAWLGLVPRQHSTAGKTRLGRITKAGNKEIRKLLVLGATSMLGRAEGWHSALGAWLRDILQRRPVRLVTVALANKMARIAWAVMTRNEVYRAQGGVAAKA

SEQ ID NO: 397013 - protein, 390 aa, unidentified
MILVGIDVAKDKHDCCIINSDGEFPEEVFSILNNREGYETLYKRICSLAVDLAKVKVGLESTGHYSSNLLAFLLDKHLTAYVINPLRVNLFRKGQSLRRTKTDKIDSRNIAHLLMTDSSLKPYSLSSYHMEELKSLTRYRASMVRERTKLKTSIARLVTILFPELEQLVSSIHIHSIYAMLEKFPGAAYIAAAHLTRLAALLLKASRGRFGRETAIRIRDTARRSIGAVSPAKSMELQHTIAHLRVYDQEIGEIESEIEKIMDDVNSPITSVPGIGMQMGAVILAEIGSFRRFDSPDKILAYAGMSPSTYQSGKLTGSYSRMEKRGSRYLRYALFNVTRYVCHYDPGFTAYLSKKRKEGKHYYVAISHAVKRLVRVLYAMEISGNRYKTA

SEQ ID NO: 397014 - protein, 340 aa, unidentified
MKKRYIGIDLHRNRFTCCIRLDNDRTYVTEWALEALARLVKKLRATDEVAVEITSNTRLFHEAVLPHVARVVVGDTNQFRVISQSVKKTDPNDARLLSLYLSKNLLPEVRMKDKDLAQLASLTQTRDRLVKQRSALKNKVNNILSARGLNLAKEALSSEKKLAEVLELPFDEIVRIELRVIVEQIRGLNKSIAELEKTIGEEGSKLEGHKGLSSIKGIGKITGAILLSVIGDVNDFADEGRLASYFGIVPRVSNSNQTERSGRIHKRGTKLGRTALVQSALIAANYSPYLKRFYEQVKARKGAGKAIIALAHKFLGIIYRTLKNKWVFEDFPNFVLAEES

SEQ ID NO: 397015 - protein, 386 aa, unidentified
MKRNDLSRSLVAFEQDSTLVAVVELSLKSWLVAGVVPGLARQPLKKQDADEEALLALLYRWQGEAIRAGGAIKRIVVAFEAGRDGFWLARWLRVHGIEAYVIHPTSVPIPREHRRAKSDRLDTALLMRAFLGWLRGEAKHCSMAAIPTLAEEDARRPNREHEHLVGERTRLLSRLKATMARLGIRSFNVKLRTARERLEQLRTPDGEPLPPNTLAELLRELARLRLVRDQIKEIEEQRLKRLQAARQEGTHPMVLLLARVMGIGIETADMLVHEVLSRDLRDERAVGRYAGITGSPDESGSKRREKGLARAGNARVRRGMIQLAWRWLMFQKESALTRWYQARTANARGDIRKTMIVALARKLLIALWRYLTTGEVPAGAKLRPAI

SEQ ID NO: 397016 - protein, 501 aa, unidentified
MKCAATPISKLFPPLVAGPDIFRPNSQGECKMSKLSKSHLSTKAESRPFAGMSQIQPHAAGVDIGAHEILAAIEGSDNTQLVRTFGTYTVDLEALADWLIENNIQSVAMESTGVYWVPIFETLEMRGLKCCLISATAIKRFPGRKSDVLDCQWIQTLHSYGLLADSFRPEADLIALRTLLRHRAQLIEHRSPHILHMQKALVQMNIQLSQALSDITGVTGQIILRAIVAGERDPHKLAAFRNYRCKKDEEEIAKALTGNWRTEHLFVLKQSLEMYDFYTQRIQDCDAEIERTYATIRPDMNNDADPKDLPGETPKRKPGQHCKNAPDDQIVRAHLKRICGVDIAAVLGIGASMAQTILSEVGTDMSRFPDEKHFCSWLGLAPHNDISGGKILKSGTLKNRNRAGQAFRHAATSVMNSNSNFGAFYRRIKGRLGEMQALVATAHKIARVVYYMLKFKQEYRHVRADEYEQRFEERELRYLQRKASRLGFQLTPSTPISQAVS

SEQ ID NO: 397017 - protein, 316 aa, unidentified
MKNQVFIGLDVSKQKLDVAVRPGNRHFITPNDDRGIKQLVKRLAALQPELIVLEASGGYEFMVTAALAEAQLPVALVNPLAVRQFAGATSKLAKTDKIDAQVLAHFAEAVKPEPRPLPDQELQVLKAALQRRQQVVKMIGQEENRLEKTYIPGVRRDIQKHLTWLRRRLDELNRDLDDQIRKSPLWRDRDRLLQSIPGVGPTVSRAIMAQLPEVGTLSGKKAVALVGVAPYNRDSGRFRGKRMIRGGRSHLRHVLYMAAVVAARFNPVIRTFYQRLLAAGKPKKLALTACMRKLVLIINSMVKNKQPWNHFAIQTP

SEQ ID NO: 397018 - protein, 342 aa, unidentified
MQITTIGLDIAKNVFQVHGIDSNEKVVVRKQLRRGQVLAFFKALPPCLVGMEACATAHYWARELTKLGHRVRLMPAKDVKAYVKRNKNDAADAEAICEAVRRPTMRFVQVKSAAQQGQLMLHRTRDLLMRQRTQVINALRAHMAELGIVAAQGREGIKELLKIIAREEDVRLPVDAHTSLVVLAAQLQALQTMIRSIEKRIVVQHRSNEASRRLQTIPGIGIIGATAIAATVPDPKVFRSGRDLAAWIGLVPREGSTGGKHKLGPISKQGDQYLRRILVVGAHAVLKRARLHPEQYPWLTGLLARKPFRVVAVALANKMARIAWALLAKGGTYQAPALMAAA

SEQ ID NO: 397019 - protein, 346 aa, unidentified
MSYSTTVGVDLAKNVIQISVVNGRGKELSNRSLTRKKFAEFLGRQKPSLVAFESCATAHYWARAAERHGHEARIIPAKAVAPFRQGHKTDSNDALAVAEAARRPNIKEAPIKTVEQQGLQAILRARDRLIQECIAQSNHMRGILLEFGIAIPLGFAALLRTLPEVLEDGDNELPDFYRPTLHRLYHRMLELRQDIDAMTREVGQLVKNHSVCSRFTALEGVGPIGAMSLHATIGSGAAFSKGREASAYVGLTPRQYSSGGKANIVGLSKRVGNRKLRSVLIQGALAYVYRMKEPRSAKDRWLKDLIERAGPRRAAVALANKNVRTAWAMVTQGTEYQRRPQLEMAA

SEQ ID NO: 397020 - protein, 384 aa, unidentified
MIYVGIDISKYKHDCFICNDAGEVIVENLSFENNKKGFQQFLDLLKPYDNVRIALEATGHYGLNMKLFLEKNNYSFMEFNPLIIKEFYKSLTLRKTKTDKADAIVITQKLMSVPYKPNSKLFYHKYSIKSLTRLRETLVKQRSKYMVQMTNVLDIVFPEFKPSFNNKFSVTSIFILIKYKTADKIAKIKDFDSLRAVSRGKFTYAKFVNLKELAKNTIGESNEMFELQLELVLNLYREIDSKIALLDNQISTIIKELNPPTLSIPGIGVVSCASIISEFGDITRFSNPSKMLSFAGLEPGIIQSGTSSSKGKMVKRGSGYLRYSLMNVALVVIKFNHVFYDYYYKKRSEGKNHRVALSHVCKKLIRVIYILETKRIQFDSSLLK

SEQ ID NO: 397021 - protein, 371 aa, unidentified
MKSILFVGMDVHKNSYSLCCYDKESGEISREVRCTADAKLIKKYVLDIQKDMKDDVSIKCGYEAGCLGFSLYKSLKTIGIDCDILAPTTMHHSSKNKVVKTDKMDARNIAINLANGTYRPVHIPDEEDLKVKEYIRMTNNFKKELKKVKQQILAYVLRLGYNYEGKSKWTIGHIKWLRNLEMDFIEKEILNEYLAQYDLLVDKIERFTSRIDELSHTERYEEKISKLRCFKGVDTLSAMTIQVETSDFNRFPNAKAYASFTGLTCGEQSSGDKRNTTSITKQGNSTLRTTLVECAQAIVKGSIYAPKSKRLKARQKGQSVEVIAYADKAAERLKKRYDRLIRRSMPHNKAIVAVARELACFIWGMETGNIY

SEQ ID NO: 397022 - protein, 359 aa, unidentified
MRIIGCDLHSRQQTLAMLDTATGEIEKTTLKHEENIVREFYSKLPRPVRVGIEATGSMQWFLNLMEELGIECLVGHPAEIRAAEPRKQKHDRRDADLLLSLLVEERFPSIWLPTKELLDIRALLRHRHQWVGLRVKIQNGLQAIALANGLRRGSSLWTQAGQQAIASLPLSPHAAYRRNELQAMYVKFEAEIEKLNQRVEQQARERSGARLLMTHPGVGPITALATDVFLGDPSRFANSKELASYVGMIPGEYSSGKRQRLGGLSKQGNPLLRFLWSEAVIHAVRRDPQLKHFYRRKLIQKGLGKARAAVARKLGIRMWIMLRDRIEYHEFCRRGQMQQRSGDARAGMPEQRYGAKVTG

SEQ ID NO: 397023 - protein, 407 aa, unidentified
MSITSGIDWAEAHHDVALLDDAGHVLVRARIDTGVPGFTELMGVLTEHAEDPASVPVAVETDKNLLVVALQAAGLTVYPINPRAVARYRERHSQSGKKSDPGGAAVLADVLRTDRHQHRPLPVISDQGLAVKALARQHQEAIWGLHETTGKLRSVLLEFYPQALRAFPNLRHKAALTILAAAFTPELGQRLTSRKVIALLHRCGRRNDPALVERILRELKTPALRQCGPVETALGHTVVALIGILTAMHAAVERLEQALAVELDAHPLAPVLRSAPGLGPVLAARVLAEVGDDAGRFTSAAGLRAFAGTAPVTRASGRSRRVSARRIRNKRLADACHWWAFAMLTKSAGARAHYDRRWAAGDHHNAALRNLANKALGHMWWCLQNGEQWDENSAWDSNTDHRETPAA

SEQ ID NO: 397024 - protein, 338 aa, unidentified
MQVTTIGFDIAKCAFQVHGADLQGRAVLKRKLTRSKVLVFFANLPPCLVGLEACGGAHFWARQLTRLGHEVRLIAPQYVKPYVKTNKHDVADAEAICEAVQRPGMRFVAIKDEHQQSMLLLHRIRDRLVAERTAGINAIRGHMTEFGMVTAKGQAGLVELRSIIADPDDARLTPLARELLTLAVAHLRSLEEKIVDLDRQVGRLAREDANCRRLSKIPGVGPIVATGVLATAGDLRLFDSGRSFAAWLGLTPRQHSTGGKQRLLGISKRGDGYLRRQIMHGARSIVSLARGREGKLWSWLNALLARRPFNTVVAALANKLARVMWALLVHDEPYRAAA

SEQ ID NO: 397025 - protein, 389 aa, unidentified
MIYVGIDVAAEKHACCILAESGKVHKQFTFSNDISGFEKLHKALLTPSETKIGLESTGVYGNNLAEFLRRNGYETHIFNPLLVKKSIQATTLRKTKTDKSDAKHIAQYTKEHSQPNPKISYHTSELKSLSRGRFSLVRERSKVKTQAKGLLVQLFPEFSQIFSDIFGAAASAVLRQLPSARMIAQCPVGVLTDLLRTASHGRLGKVKAELLIDLAEHSVGIQSMALELQMQMLLQQIDLFTIQISRYEAAIKSEMETIQSPITTIPGIGCVLGAAILSEIGDIHRFTTPAKLQAYAGVDPSVGESGTSVSTPGRMVKHGSHYLRWALCQAARCVSLYDPIFAAYMKAKRDEGKHYCVACSHVAKKLTRVIYSILKNNTTYSLTYSQIGA

SEQ ID NO: 397026 - protein, 347 aa, unidentified
MTYYAGIDVSLESSSVCVVDATGKIVREAKVASEPEELIGWFGALGLALERIGLEAGPLSQWLYAAMRQTGLAVELLETRHVRDAFKAMPVKSDRNDARGIAQLMRLGWFRPVHCKSLGAQEVRALLTARKLVQSKLFDVEMSLRGILRGFGLKVGPTTPSRFAGRIRELVAGQATLEVIAAALLAVHEALRREFDGFERRVRSMARADGRVRLLMSAPGVGAIVALTYVSAIDDPARFRSSKDVGAHFGLTPKKYQSGEKDVTGGITKIGDASVRTVLYEAANVILTRPIKGGGLKSWAMRLAKRAGMRKAKVALARKLAVVLHRMWLDATRFVFDRGTGAAAAAA

SEQ ID NO: 397027 - protein, 257 aa, unidentified
MVYIGIDISKSSFVAAYPSVNGYRTQTYPNTVAGARKFIATLSVAEHHCVMEATGNYGFLLLYLLHQSGIAVSLVNPKQIKHFTRMMMTVTKTDEKDACMIAMYGEKMNPPIYKMPSQAILLLKQKKTVIRQLRKQLVASKNLRESLVVLPYRDKACLRAMDKTIDFLTKQIEQLEAELAEIASSEFDKQLKALTSIKGIGITLATALILTTGGFTYFDNAKQLSRFIGICPTYQQSGTSVNIKGHINRNGDEHLRS

SEQ ID NO: 397028 - protein, 312 aa, unidentified
METKFVGIDVNKLTLDFDCLPVSAAQQFANDAVGIAAVVALLQDSGVERIVIEATGGYETAVASALAVASLPVLVVNPKQVRDFAKAMGHFAKTDRLDAKVLALFGERIKPPLRAIPDEAQRALADVLGRRTQLVVMRAQEKARLATVAAVARKNVEQHIAWLDKCIAKLDADLGNRLRKSPVWCNKASLLDSVPGVGEVTTFSLLAKLPELGTLNRQKISALVGLAPFSDDSGKRRGARYIRGGRAEVRCVLYMATLSAIKHNPPIKAMYERLTKAGKPFKLAMTACMRKLLTILNAMLKKNQTWKIQPSS

SEQ ID NO: 397029 - protein, 453 aa, unidentified
MSLMIAVRCPRARSVPRHRGIGTSHNGARNVMRAEHLWFEHSLETGGLPMTSDDRPLIFLGLDIGKSAHYAVGVDRAGQTVYSEPVANEESALRLLVLWARAHQATVIVDQPGGTAALLLKLCWDAAIDIGYVPGLAMARARDFYAGDAKTDPKDAFVLADVARAHPNRVVWLRETSAARTQLELLNSYDADLREDAHRLTNRIRALLATYWPAFERAFGDRLDTIGGTALLKLYPSAPQLRQAGAKRLVTLLRATHRVHQPEPWVEQLLVAAKSQTVVVAGADTAAGLIAELAEQLHRVLARRQRLEKEIERAFFNLPEASILRSMPGIGPRLGARILIEIGDIRQFRTSAQLAAYAGLGPTPHQSGTSIRGNRATRFGNHRLKDAFFLAAFSSLKHPPSRTYYDRKRKEGKRHSQAVLCLARRRVDVLHAMLMTNTHYQVPSHPSDLKTAA

SEQ ID NO: 397030 - protein, 486 aa, unidentified
MKTTRERTQERAKAAAGSAPSKSQRMNRKQRRELARKIQADDVNLEVVHPDAAGIDIGNECHYVAVPSKRDSEQPVRRFECVTAELKAMAEWLKQCGIRTVAMQSTGVYWIPVYDILEAAGLEVYLVNARETKNLPGKKTDVQESQWLMKLHTYGLLRNSFRPTAEIRRMRNYWRQRNDLIQSAARHIQRMQKVLTQMNVQLANVISDVSGVTGQAIVKAILDGERDPYQLAELRDPRVRATKEQIARSLEGNWQEDLLFILRQEHEAHGFCEKQIAACDQELKEYLNEREDRSQGAHLEEEKRRNRRMKKKGHKPQQFDMREALFRMTGVDLTRIDGIDVMTASTVISEAGWDMSKWRTEDHFVSWLRLCPDNKVSGEKVIGKGRLPTNNRLTTALKIAATSLKQSETYLGAQFRRLRTRLGSPVAIKAMAAKLARLVYRMLRYGMRYVDRGAQIYEEQHRQRQIIFLKRKAAELGLKFVETAAA

SEQ ID NO: 397031 - protein, 422 aa, unidentified
MRSVALDVHLDFCEVAIVEDGEVRSAGRIETKPEQLELFASSLGPDDRVALEVTGNAWEIARIIEPHVAQVLVVSPSDTGIRQARAKTDRLDARTLARLLAAGSLDGVWMPDRWTWVMRRRLSRRSQLVWARSRSKNQIHAVLMRQLVGRPPVSDLFGVNGREWLKSLELAEEERETVDAHIRQIEFLEGELAEVERLIAGAALESAQIKRLMSVPGVNVIVAASFLAAIGDIHRFESPRKLVGYLGLDPLVRQSGVGPATHGHISKQGSVRARHALVEACWTTVRAPGPLHAFYQRIRARRGHSVAIVAAARKLASLFWCLLTREEDYAYQQPSLTKKKLRRLQITAGAKRYTPEAAGIWSANDAVRKAERELARQAEVAYARTVRDWHAAQAVKVGASVTPGRASKKPLKGEAARQTTSP

SEQ ID NO: 397032 - protein, 428 aa, unidentified
MSGRGTVEQEPEFVALVGIDWADQKHVWCLQAANSARRENGELEHKPEVVEAWVSELCQRFGQGPIAVAVEQVKGALVYMLRKYECLHLYPVPSTMTAKMREALYPSGAKDDPRDADLLLDLLLQHRDKLRRLTPDNEATRRVQNLVEERRKLVEEKTAQLNRLIGYLKVYFPQMLGWFAKLDTRLVCDLLERWPSLEELQAVPPGEVKKFFRHRRGRHGELTEWRMQEIGQAMPAIRDGAVIEAKRTVVQVIAQLLRTLLEGIATLDRKIAEAAEVHPDYFIFQSLPGAGAALAPRLLAALGSQRDRYASAEEVQKYSGIAPVTERSGKKKWVHFRWACPKFLRQSFHEWAGHSIAQSVWARAYYQQQRQRGKDHHAVVRALAFKWIRIVFRCWQDRVAYDETRYLRTLATRGSHLTSAFAATAASL

SEQ ID NO: 397033 - protein, 339 aa, unidentified
MEHYAGIDVSLEQSSVCVVDAQGRILREAKIASEPEALIDWFRGLGLALSGIGLEAGPLSQWLYAAMVREGLAAVLLETRHVDDAFKSMPVKTDRSDARGIAQLMRLGWFRPVHCKSLAAQEVRALLTARKLLQSKLHDIEMSLRGILRGFGLKAGRTTPRSFEARIKELVCGHPVLTSIAEALLEIRGVLFEEFKAFEKRLLAIARSDHRVKLLMSAPGVGALVALSFVSAIDDPSRFKSSKMVGPHFGLTPKKYQSGETDYDGRISKKGDERVRAMLYEAAQTILTRPVKGSALKSWAMRVAKRCGMKKAKVALARKLAVILHRMWVDGTTFQLAKA

SEQ ID NO: 397034 - protein, 411 aa, unidentified
MTKEDFSYVGIDLHKETHTAVMIDCYNNKLGEITFPNRPADFPKLVTKVKKCNTDAKEVVYGLENAYGYGRALAVWLIDKGYLVKDVNTAISHRQAKHRGAMYRKSDSDDAKAIALATLNMLDKLPDACPNDAYWSLGQLVHRRDNIMKQRTRLVNQLHEQLHISYPSYKSFFNDISRPTALYFWENYPSRKYLKGKSVEDLREELVPVSHNKCSTKTCQAILDAVAGDKVKNIDYQDARDMVTLSIVSDLRHYDSQLTEVDKMLEQMYKMLGCTLTTIPGVNVITAVKILAETGDIKRFSNANKLAQFAGIAPLHLSSSGKGKDVATKQGNRRLQATIYFLAIQMVQLSSKGTPRNPVVRAYYEKRKAEGKTSQQALICISRRLISIIYGMLKNGTEYRMPVVENAGENR

SEQ ID NO: 397035 - protein, 355 aa, unidentified
MNSTKYIGLDVHKESISIAVLNSAGKVVMECVIETKASTILQFIHGLGGDVHLTFEEGTWAGWLYDLLKPHVTELVVCNPRKNALLKEGSKSDRIDARKLAELLYMSKLSSVYHGEHGLRMLKELSRSYLTITKDLGRVMNRLKALYRGWAIPCAGTQVYASHYRSEWLAKIHEAGVRRRAELYYLQLDALRLVRQQARKELLAEARKHRAAKLLRQIPGIGPLRAAHLVAVMQTPHRFRTKRQLWAYSGLGLETHDSAQYRVVEGQLQRSTKPVTLRGLNDNHNHDLKDIFKGAAMRASTAAGPLRDFYEALLAKGRKPTMARLTLARKIAAITLIVWKKEVRFDANYLKQQAA

SEQ ID NO: 397036 - protein, 348 aa, unidentified
MTIVPQHFSHVIGVDTHAKTHTLVILDHLGVRHRPPQTFPTSPAGLKRAHAWIQRETTGPILVAMEGTGSYGAQFCDLLTTAGVRVTETKPPKHGVRRAGKSDPIDAEHAARHALTLPIDRLITPRNHAGSHAALTVLLTARAALRKSRSASNNRLTALLRGYGFGLDVRKALTEEQLRLVAGWRAHPTDDLGMATIRAEATREAQDIHRRDGELKANEKGLLQHAKLLAPQLLAELGVGPVVAAQLIVSWSHSGRIRSEAAFARFAGIAPIPASSGNTTRHRYHRGGDRALNNAIWVTAFHRFHHDPRTAAYVAKKSAEGKTQIEIQRLLKRYIIRQLFRVLERTTA

SEQ ID NO: 397037 - protein, 491 aa, unidentified
MAQKKTSIQERLRSGKLNRKQRKELVRRVYADDPGLEVVHRNVAGIDVGNESHFVAVPPGRDPQPVREFGCWTADLLRMAEWLKSCGIETVVMQSTGVYWIAVYDVLEKAGFKVWLSNARETKNLPGRKSDVQESQWLMKLHTYGLLRNSFRPPEQIRAVRTIWRLRDRNVRDAAREIQHMQKAMTTMNVQLANVLSDVAGVSGQAIIRAILGGERDPHVLAKLRDYRVKASQEEVARSLEGNWQADLLFELQQAVDRYDFCQQQIAKCDQQLEKYLAALPSRKGAVQAPVAKAEAGDAPHARPAAKKSKNRKKKRGKPRGNEPRLDLEAELRRICGVDVTTLDGVYVMTVLTFVSELGTDMSPWRTEDHFVSWLKLAPSRQISGGKVIKQERNRTRNRVANAMRMAASGLKDSDSYLGARFRQLRARLGPGKATKAMAAQLARLFYRMLTNGQEWVDRGTQEHEKRRVEREKQFLLRKAASLGYRLEPAA

SEQ ID NO: 397038 - protein, 388 aa, unidentified
MIKYSLGIDISMKMFHVCLSVIDNQQQIKVKACRKFANNVAGFKELCDWIKKHYKQQDIPLHIIMEATGVYYEQCAMYLYKKGFTVIVVLPNKAKKYLQATGLKSKNDKIDAKGLAQMGAEKKLNPWQPMDDFYYILRSLTRHHESLQNIKTNINNQLHADNAGMYANKQVGKQLKNLIETIDKQIAEIEKSIEDHIASDSAVQQKVDGIIKIKGVGLMTVATLLAETNGFLLFENIPQIVSYSGYDVVEDQSGKHIGKTKISKKGNSHIRRILHMPAFNVVRYKVSPFLQLFNRTLQKHNIKMKSYVAVQKKILIIIYSLWKRDHAFNEEYYKGTTTRDEELVQPSRLSFTEAVQVAQKNSPETNQGYTRCTTVEVSSFAPSRLLQK

SEQ ID NO: 397039 - protein, 342 aa, unidentified
MEHVAIDLGGRESQICIRNGEGGIVSEARVPTAGLAQTLDRPKSRVVMETCAEAFAVADLALGYGHEVRVVPASLVRSLGVGARRTKTDRRDAQVLSDVSCRVDLPSVHVPSQWSREAKSLCGMRDVLVSSKTCLVNSVRGYLRQKLKRFPGGTAATLGARVRKRYEEIGEAVPPYLERQLEVIAQLHAAAKAATSEVGAWAEKNPVCVRLMTVPGVATITATRFVAAIDRLDRFTDAHQLESYLGLTPGEDSSSDRRRITSITKAGPSAVRWVLVQAAWAAMRTRPDDPMCRWALNIARRRGGRIATIALARKLAGILFAMWRDGTTYQPRRGASTLPERQ

SEQ ID NO: 397040 - protein, 349 aa, unidentified
MDRTTYGLDIAKNVMQLHWVEAETGEIGRKKLARAKLSAYFAELQPVRIVMEACGSAHHWARVLTGLGHQVELLPAAQVRPFVRSNKDDAADARAIWLAAQQSDIRRVPQKSVEQQGVLALHRTRSHWISVRTATVNSLRGLLYEFGVVLRGGRKAGLKALAEQRAAVDEQIPVTMRALVDGQLQTLGQIGERIEALEHQIAALQKQLKGARELDQVPGIGVLGSTALAATLGDGKAWRSGREFSASLGLVPAHAGTGGKVRIGHLSKRGDPYLRTLLIHGARAVIEHAKDKPKWLEQLLARRPVNVVVVALANKMARTAWAMVAHGRAYQRDWQSAKPGSAAAQAAGA

SEQ ID NO: 397041 - protein, 395 aa, unidentified
MNAPTPIAAWVGWDWADQHHDIFLESADGKTERHRLPHRPEKLHAWLKELGQRFQQRPVALCLEACRSALLPILLEHPFLRLYLVNPKSLTRFRQALRPSGSKSDELDCQLACQLIKSHAGLLAPFVAQDPVTQELARWVGYRRDLVHQRTALANQLTGLLKLYHPLALELLQNDTTTGLAANFLLKYPTLAALQEAPLHRVRQFFLGHSSRLTEGLQDRLRHIATTAPVTTQPHWNHPHSFMACALADQLKALVHRIDQIEERIAVVAAQHPNQPLAKSVPGAGPALEPRLMVALGTQPEHCASALALAIRSGVAPRRVQSGNTCVIRRRWAKPQFEHQTWIEFAQYSTFRCSWAKAFVEAKTKGGKSYYTAIRALAYKWMRILYACWEKGAVV

SEQ ID NO: 397042 - protein, 362 aa, unidentified
MAEYIRKMGERTMGLDLGDKNSHYCVLDREGEEIETGRVATRAGALEEKFRSMGPTRVVMETGTHSPWVSRLAEGCGHEVIVANARKVQLISQNRKKRDKVDAELLARLGRSEPELLYRVRHRGEEAQRGLVLLKSREALVKARTELITHLRGAVKSLGSRLEPCSPECFHRRMVGKLPRGLAGLEGWMLEMIGKLTEQIQQLDRAVERLGEEKYPETELLRQVKGVGPLTSLAYVLVLEDTERFERARAVGSYLGLCPALDESGEQSPQLRISKEGDQMLRRLLVSCAQYILGPKGQDSDLRRWGKKLEGRGGKHAKKRAVVAVARKLAVLLYVLWSRGEVYEPLRGSWMKSLEAAPAGTV

SEQ ID NO: 397043 - protein, 348 aa, unidentified
MAHFVGLDVSVKETSVCVVDDTGKVILEQKVPTEPADIITLLSSLGVSYGRIGIEAGPLSQWLVNALTVAELPVICVETRHMKALLTAQQINKTDRNDARGIAQMMRVGLFKPVHVKTLVAQEQRMLLTSRKLLQRKLLDLESDLRGTLRNFGLKVGVVSGGRYEGRVRELIAGFPRLAAIAEPLLKVRQVMRQQLAVLHKMLLDTVRDDPVCRRLMTAPGVGAVVALTYRATVDQPQRFVHSRAVGAHVGLTPKRYQSGEIDYDGGVSKCGDALLRTMLYEAAQVLLTHGSKWSWLKAWGVRVVQRRGMRRAIVAVARRLAVVLHRMWVDGSEFRWSKDSAAVPTAA

SEQ ID NO: 397044 - protein, 343 aa, unidentified
MDYYVGIDVSLELSSVCILDAAGQIVKEAKVASEPEALTTFLTRLGLPLTRIGLEAGPLSQWLHAALVKAGFETVLLETRHVKAALSAMIVKTDRRDARGIAQLLRMGWFRPVHCKSAPAQEVRALLVARKQLQAKMRDVELSLRGLLRGFGLKVGEISKGQYAARVRSLVVGHAMLEQIAEAMLQAREALRTEFGKLHRTMLAIVRADEVCRRLMSVPGVGALVAVTFTSGVDAPERFARSRAVGAHFGLTPKKYQSGETDITGAVSRVGDVMVRTALYEAAHIMLTRAVRFSTLKRWALEVARRRGMRRAKVALARKLAVILHRMWVEGTTFRWGREVGAA

SEQ ID NO: 397045 - protein, 333 aa, unidentified
MSARFIGVDLHKRFCVFTELDIEGNILRRGKFGNNLGEISNFISTLKPNTKLTVEPVLNYLWFLDQVEPYVESVHPAHPQKVRIIAEAKNKTDKYDSHMLAELLRTNFLPESYYVPQEIRKLRDLVRQRSHLVSARTSFKCRIRHLLLLNGSKITAADVSSPKAKKQLKSLCLTDTIIKSVYQCLSIIKELDKTIEALNTELEKNCPDNEDIALLDTIPGIGIIRATIIYAEIGDISRFRSKKAFCSYTGLVPIVRESGEKRYTGSITKAGSRALRTALIEAAINASVKSRHLYRLHKRLEYRGNKFKARTAVAHRLAAIIYVMLKKREPFRC

SEQ ID NO: 397046 - protein, 357 aa, unidentified
MEKLYLGVDLHKRSCWVTVLDADGHLVESRKLGTEKWELEEFFGKVAKPAALAVEATFNWYYFLNVIEPLGLELHLVHPWKTRAIASARIKHDKLDSRVLAELLRTGFLAEAWIAPRAVREQRQLLRYRVHTVQWATRAKNSIHGVLNRNGIRLPLGSPFGPRGREFLSEVELPETDRWEVSGQLVRLDLLRHQLGELDREIRKRSKTSPIAQALEQIPGIGPFIASLLIAEIGDIWRFPTAKHLASYTGLVPSLYASGEHRWGGAITKQGSTVLRWALVQAAHRAALSPRFQDFYQRQRARHGAGKATVALARKLAVIAYYRWRQALHAAGPPKVEKVRECSWGSAWSDDRPLNSD

SEQ ID NO: 397047 - protein, 318 aa, unidentified
MPEPIHVGIDVAKDSLEVAFGAEAATRSFANEDDGHEALIIALNAHSVELIVMEATGGYETPCACALQAGGFAVAVVNPRQARDFAKAMGHLAKTDRIDAQVLAAFAAVLAKRPDREKVARALPSEEQQRLHAMVLRRRQLVQMLVAERNHLASSHRAARRSIEALIKAIRKQIVEIEGDLASHVARHHAEVAKLLQSAKGVGPNTCMVLIADLPELGKLSSREITALVGLAPFNRDSGTMRGKRTIFGGRAQVRCALYMATIVAMRHNRVIRTFYERLLVAGKPKKVAIVACMRKLLTILNAMVRTGKKWNETYHFA

SEQ ID NO: 397048 - protein, 416 aa, unidentified
MNAAGIDVSSRKSTVAVLRPFGEVVRLPFDVAHNTEGLASLAEQLKALDGETRVVLEHTGRYYEPVAKALHEAGLYVSAVNPLLIKKYGANSLRRVKTDKADAVKIARYALDNWADLRDYTPMDTIRYDLKTLNRQFQLASKQRTASANNLIALLEQSFPGIRKCFDSPVRSDGTQKWVDFVHTFWHVECVRKQSLNAFSERYRKWCKRHGYIFKQGNAVEVYSLAKNAVVLVPKSEVTKVLVQEAANQLTSISRSVETYRAEMERLASTLPEYPVVMAMYGVGKSFGPQLMAEIGDVRRFERKQSLVAFAGIDPMPNQSGDKNVRSNKSSKRGSPYLRKTLFNIMGIYLKCSPQDEPVYQFLDHKRSEGKPFYVYMTAASNKFLRRYYAQVRDYLSTLDDLPPVDMDSTGLKTSD

SEQ ID NO: 397049 - protein, 318 aa, unidentified
MQAQTTAVYVGIDISKTSVDVDSYPVAQPTCFTNDEPGRTAAASFLRGLQPALIVVEATGGLEAPLVGQLATAGLSVAVVNPRQARDFAKAIGVLAKTDRVDAQILARFGQAVQPPVRPLKPEETLALEAILTRRRQIIEMIAAESNRLSSAAPRIAKQIRQHIAWLEKRLNEANQDLDGMLRQSPVWQHKAQLMTSVPGVGRVTAATLLAELPELGALPRREISALVGVCPYSRDSGKHRGRRTIWGGRAVVRATLYMAAIVASRYNPVIRAFYQKLVAAGKLKKVALVACMRKLLVILNAMLKHDTPWHHQPQSAA

SEQ ID NO: 397050 - protein, 386 aa, unidentified
MKTVAGLDVHKGSVYLCILQENGEKIERVYGVLTPQLDSMRDFMAKNKVSEVAMESTSVYWIPIWRVLVDSFELKLVNPYFIRQLPGRKSDVKDAQWIAECVMKELIRGSFIPSPLVQRLRLYDRRIFEINAELVRKYSKIDAILQRCNIRLSNYVSNTDCKSYKAVVKQISEGVTSPQELLRHVHKRIINKHGEDTILAALTGVVSDSEIDMLAQYVAESAILEDNKNKCIEKMREICNSEFKEQMKNLQEIPGVSERSALTVLAEIGPDVNAFPSAKHLVSWCGFNPRNDESNKKIKSNKITHGNRFIRIASVQCAWAASRTKDCYFSKFYAFHTQVRKKFKLKVVVAVARKVLVCIWHILKFNVPYKDFEPQKSVTKDCIQFA

SEQ ID NO: 397051 - protein, 340 aa, unidentified
MQITTVGLDLAKSIFQVHAINAAGEVVVRRALRRAQVLPFFEKFAPCLVGIEACGTSHHWARELVRLGHEVRLMPPAYVKAYVKRGKTDAADAEAICEAVSRPTMRFVAIKSVDQQAALSLHRARDLLVRQRTQLVNLIRGLLAEFGVTIPRGITHALAFARRLAAGEAQELPDLATRVVGALAGQALAVQDQVHGLERELMAWYRSSALARRIATVPGVGLLGATALAATVTDPGQFRSGRQFAAWLGLTPRLNSSGGKERLGGISKMGDRYLRRLLIVGMTSLVRQARRGPGTTDPRLAQLLARKPARVATVAMANKAARVIWAIMTRGGVYRAPATV

SEQ ID NO: 397052 - protein, 389 aa, unidentified
MKIYVGIDIAKLNHFAAAISSDGEIIIEPFKFTNDADGFQLLVSKLESFDKNSIIIGLESTAHYGDNLVRYLVTELYQVCVLNPIKTCQMRKNNVRKTKTDKVDTYVIAKTLMMQDNLRFVSFFDLDMMDLKALGRFRQKTIKQRTRLKIQLTTYVDQVFPEIQYFFKSGLHQNAVYALLKEAPSPKEIASMHMTHLANLLKVNSHGHFTKEQAKELRVLAQKSVGANDSAISIQITQTIQQIELLDSQLDKIEAEMTDIMKFNDSVIMTIPGIGYINGGMILGEIGDIHRFSNPNKLLAFAGLDPSVYQSGNFQAKTTRMSKRGSRVLRYALVNAAWNVVRNNATFKAYYDAKRAEGRSHYNALGHCAGKLVRVIWKMLTDEVEFNLE

SEQ ID NO: 397053 - protein, 340 aa, unidentified
MKITTVGIDLAKSVFSMHGIDEHGKAALKRTVSRGKVMEVMAGIGPCLVGVEACSGAHHWARELGKLGHQVRIMAPRFVAPYRKSGKNDGNDAEAICEAVGRPSMRFVAVKSAEQQALLVVHRVRNGLTAERTALINQLRGLLSEFGIVIAKGRYQARHQLPVVLDDPDNGIPVLARQVLLEVNERIRELDARILAYDRRIEALARESEAAQRLLSVPRFGPVTDSAIVATVGPATAFKNGRQFAAWLGLVPRQYSTGGKVRLGRITKQGNVYLRTLLIHGTRAVLARVHERTDRASSWVRSLIERRGYKRAAVALAAKNARTIWAMLAKGQPYCPAATV

SEQ ID NO: 397054 - protein, 349 aa, unidentified
MSQTAQTAVAVIGIDIGKNSFHIVGHDERGAIVLRQKWSRGQVEARFANLPPCLIGMEACVGAHYLSRKLNGLGHDARLMPAKYVRPYSKGQKNDFRDAEAIAEAVQRPTMKFVATKTADQLDLQALHRVRERLVSQRTGIVNQIRAFLLERGIAVRQGQRFLRAELPRILATPPDVLSPRMARVIEDLAGDWRRLDERIEGLSAEIGVLARADSGCERLMSVPGIGPIISSAMVAAIGTGDAFTKGRDFAAWLGLVPKQMSTGDRTILGKISKRGNRYLRVLFVQAAWVVLIKPQSWERHGLKTWIEAAKKRLHHNVLAIALANKLARIAWSVLARGRGFEASRLQVA

SEQ ID NO: 397055 - protein, 432 aa, unidentified
MEKIRENAAGIDIGAKKVFVSIEGQEVRYFFTFTEDFEKLRDYLCEHKIKTVAMEATGVYWNILYEILEESGIDVWLVDGRQTKQVPGRKTDVKDCQWIQQLHSYGLLNRCFVAEADIKELRTYQRLREDHIRSASMHINHMQKALTEMNIRLSEVLSQIHGVSGIAIIEAILKGERNKEKLLRLCDKRIIKNKKEDVLKSLNGRYTKHGLFALQQAFDSYLFYQNQIGQCDQMLSEVIGKIGKGKPDQNPQGTRKPIRHNKPDINDLGGSLLKIFDGKDATALSGITDYSWMQLLSETGTDLSRWPSEKHYTSWLGLAPGQHSSGKMKRTKRKKGHPQAGQIFRQIAQSLITSKHIALGAFGRRLRARKGSQIAIKSVARKLAILYWRIMVKGMAFVEEGIKKYEEQLLVQKHKSLERLAKDLNVQIAYNV

SEQ ID NO: 397056 - protein, 345 aa, unidentified
MDIKILGIDLAKNVFQLCALSPHGKVLFNRAVKRPRLLDEMRQLPPTLIAMEVCGGAHYWGRLFQTLGHQVRLIPPQHVKPFVRVNKNDAGDALAICEAATRPGIHFVPVKPLAQQDLMLLHTERQRYVQQRTAIGNQIRGLASEYGVIFPIGLSALRSALPGALEDAENGLSPVARQCLARLYDELKHWDHLIRQVTRELNALARQQPAWLALQAIPGVGPLVASALIGRIGNGHQFRTGRQCAAWIGLVPRQRSSGGHQQLLGITKNGDRYLRTQLIHGARAITTGCSRWGWDHPLARWVNQLRERRGFNKAVVALANKLARLAWAVLSKGEAFDMRKAFATP

SEQ ID NO: 397057 - protein, 347 aa, unidentified
MDHIGIDLHKRESQICLLAEGGELIERRIRTEPQRFAEALGGRAPAQVLLESSTESEWVARCLEALGHHVVVADPNFAPMYATRTRKVKTDRRDARALAEACLLGAYRPAHRLSDAQRHVRARLTVRDALVRTRTRYISLIRALLRQHGWRVPSGSAEGFPRRVLALPLPGRLRSEVAPLLAVMRHLQPPLAYSDERIAAVTATDERVRRLQSMPNIGPVTAAAFVAAIDEASRFRRGHEVEAYLGLVPRELSSGETQRRGRITKAGSSRVRWLLIQAAVSMLRLRDPRTAALREWAGRIAARRGKGIAVVALARRLAGILFALLRDGTVYEPRQRPACPVTQAVPA

SEQ ID NO: 397058 - protein, 344 aa, unidentified
MIYIGMDVHQKSTTFCLFDPSAKKKDQYRTVTRPTTVQGLKEVLHPHDGACQVAFEVGTQAQWVARIVRPLASDVQVANPSRIPWLFRDGRKNDRLDARKLATLLYLDQLPQVHLPAADVSAWRALINHRRTLVKRRTMAKLQIRAILRAFQTPCRYKNCWTKRGMAWLRSLTFDAARDLMVKTLLEELDFLNGKIVEIEGQLDDIAKARWEIPLLRTIPGVGPRTAEAIAAFADGTDRFGNGREFASYFGMTPTLDASGGVVRHGHISKRGPSVVRWVLVEAAHQTVRRCPALRAFYERVRHGKKDRNKKAIVAVGRKVLTIAYAMMRHNAAFDATKLGCSAA

SEQ ID NO: 397059 - protein, 355 aa, unidentified
MSSEKYIGLDVHQATISVAVIDSQGKVVMESILETKASTILEFFAGLRGSLFVTFEEGTWAAWLYDLLKPHVTEVLVCNPRKLAVLKQGNKSDKIDARKLAERLRLHDLKPVYHGQTGTRMLRELARSYLTVVKDLSPVMNRLKALYRSWAIPCAGRDVYYKRHRSQWLEKIPEAGTRRRAEQLYQQLDLLRNLRQQARRELLAESRKHTITAKLRQIPSLGPIRSALAVALIQTPHRFRSKRQLWTYSGLGLETRDSGEYQYVHGQVRRRKKQATIRGLNKDYNHDLKGLFKGAATRASVKPGPLKDFYERSLAKGIKPTMVRLTLARKIAAITLTLWKKGEDFDINKLNSQAA

SEQ ID NO: 397060 - protein, 324 aa, unidentified
MAIVCVGVDLAKNVFAIHGVDDVGKAVCVQARVPRAQLLAAFSHLPPCLIGMEACSGAHHWARQLLAMGHKVRLIAPKFVTPYRLSGKRGKNDAADAAAICEAVQRPHLRFVPIKSVEQQARLAVHRMRQGFVEQRTALINRLRGLLSEFGIVMAQKAATVRRLASEQVDSLPGWMRVATRDALDELARLDERISDYDAHLRHIARDDPRCQQLQQLPGIGDTTATALVSQIGNGQDFHCGRQLAAWLGLVPGQHSSGGKARLGRITKAGDAYLRSLLVMGARAVLASAKGKNDAISRWILALEARRGYWRAVVAMAAKNARMA

SEQ ID NO: 397061 - protein, 328 aa, unidentified
MISISTEIDVLGIDISKAKFDVALLRGQEKIKSQVFTNDLEGFTELQAWLISQGVTNLHACMEATSIYGNALARFLVAAGYKVSIVNPSRTKSFGRSELSRTKTDRADAKVIARFCVALQPAPWTPPALEVEQLQALVHRLDHLNAMRQQEQNRLETVDPILVEAITAHVDFLHEQIQTTRNLIRDHFHNHPHLKAQRDLLTSIPGIAELTATVILAEIRDISAFDSADQLAAFAGLTPQEFSSGSSVHGKPRLSKIGNSRLRQALFMPAIVARRYNPLIHSFCERLLAKGKSKKSVIGAAMHKLLRQVFGVLKSQTAFDPNFLSPTT

SEQ ID NO: 397062 - protein, 414 aa, unidentified
MKVIYPICCGIDVHKTFLVGTIISTTDGVQPHYQKKRFSTYNSDLNRFADWLHSNNCLDVCMESTGKYWVPVYNILEERKIRVTIANPKWVKAVKGNKDDTKDSKWIGDLFRLGLVPGSFIPTKDIRILREFTRYSYKLTSMKSSEKNRFQNAFTVCNVALDSVVSDMFGKSATAITDYLISEDTFNPEYCVSLLKHSLKKKSESVLESIEGYSITQEQKLRIRIVRSHLNYIESLISQIDSAIDVMVAKHESLISLLCTIPGVDRNSAITIISEIGNDMSQFGSSKRLCCWAGLTPGNNESAGKKKSVRITRAGVYLKPALVQVAHAAVKAKDNSYYRLKYEQISKRRGKKRAIIAIARMILTAIYQMMSTGEVWNHTDLFKVDMPETLKEKQLSKAVKQATKFLEKQGLTVA

SEQ ID NO: 397063 - protein, 456 aa, unidentified
MKKSKRKKEQKVLDLDVLEQLNLNAAGIDVGASEMYVCVPVDRDEEIVKVFSTFTVDLHRLADWLESCEVDTVAMESTGIYWIPLYEILEDRGLEVNLVNARHLKNVAAQKTDVLDCQWIQQLHTYGLLRGSFRPEEDVCAIRSVVRHREMLVSYRSAHIQHMQKALHMMNVQLTNVLSDITGVTGMKIVRGIVSGNHDPQKLAEYRDYRCGKSKEEIALALEGNYRTEHLFALKQSLELFDLYSQKIKDCDFEIELMYSDFEPQVDIAEKPLKDRKRKRNKPVGNEPDFNLRLYLYQMTGVDLTQIDGINALTVQTVLSEIGLDMSKWKTVKHFSSWLSVCPYNDITGGKVIKSGTKKSQNRAAKSLRLAARSLTYSDSYLGAFLRRIKARSDAPTAITATAHKLARIIYAMLRDQSAYIDPGADFFEEQYRQRAVKNLQRKAKKLGFTVVPVAA

SEQ ID NO: 397064 - protein, 345 aa, unidentified
MSTTEVDTFAGIDVSARELSVALRREKGEDKPAMAKFSNRPSGHRALIAHLLGGGRRVRVCLEASGNYSLDLALTLRAHRQVEISVINPRRARRFAESLGQRSKTDPVDARVLCEYAARMPWVAWQPPSSVALHLRAVTRAIADLGVIHTQQNNRAHASAASQALPVLVVKEMQRHQKYLEQRMTRLRREALRLIAGDSELDRRFRLMLTTTGIAETSALQILGELAVLPDMLDARQWVAFSGLDPRLFKSGKSVEKRPRISRGGSRHLRRALYMPALVALRRDPYLRGFYQNLLARGKARMQAVVAIMRKLLHALFAMFRTNQPYDGSKLCALHLPACAVAACA

SEQ ID NO: 397065 - protein, 454 aa, unidentified
MAQRNRNIPVKPGKSRQQPLTITHPNAAGIDIGNSSHYVAVPPDRDDDPVREFPSFTVDLNALADWLKACGVDTVAMESTGVYWIPLFELLESRGFTVLLVNARHVKNVSGRKSDVLDCQWLQQLMSYGLLGGAFRPVEAVCVLRSLWRQRGMLLRGQGRQVQHMQKALTQMNIQLANVISDVVGETGQRILRAIVAGERDGQVLAALKDIRIHASNDDIAKSLQGNWRAEHLFALKQALGMFDFIGAQLDECDKEIEQQMQGMQKHDGDPAKSKRRGRARNAPKFDLRTQLYKICGADLTRIDGIDVTTALAVISETGADMSRFPTVGHFASWLGLCPGTKITGGKVMSSKTKRCANRAAQALRMAAAALRTSQSSLGAYFRRMCGRMDKPKAITAAAHKLARLIYIMLTKGEEYTDRGQDYYEERYRESVLRNLAKRAEKMGMKLVAGEQIG

SEQ ID NO: 397066 - protein, 329 aa, unidentified
MIELGIDVSKAKLDCTLLLDVNTLRCRSKSVPNTLEGVKALLQWTERHSGGGPEQVRAALEPTGVYHEAAALALHEAGVHVFVVNPAQLRDFAKGHAVRTKTDAKDSLVLALCAAQVKLIPWQPAPVEIRELRALMSRLDAVEGELRAELNRQEKAQIAADPALVLRSIAQAISFWQAERERLQRAIEEHIDRHPGLKSEQERLLSIPAVGEKTANRMLCMLHSGQFRSASQLAAYLGLVPVEHQSGTSIRGRPRLSKAGNARVRAALYMAAVTAIRHNPDVRALYERLLTRGKAKMSALCAAMRKLVHICFGVFKNAQPYRPQIDRLA

SEQ ID NO: 397067 - protein, 387 aa, unidentified
MPPPNDLSRSLVALDHNSTIIAVVELSQSSWLVGGVVPGIERQPRKKLEPSPERLLAVLHRWRDEAIKAGRNITRIALAFEAGRDGFWLARWLAARGVEAHVIHPSSVAVSREHRRAKTDRLDTELLKRGFLGWLRGERGHCSMVRVPTLAEEDAKRPNRERECLVKERTRLVNRMKGALARLGIRHFRPALRNAAEHLAGLYTPEGSPLPPNVAAELERDIARLGLVIGQIKQIEQARRQRLEEQPESRPHAMVRLLVRVVGIGTETADMLVNEVLSRPMRDRRAVARYAGLTGAPDESGAKRREQGLAKAGNARVRRGMIPLAWRFLRFQKDSALARWYQARTADHRAGTRKTMIVALARKLLIALWRFATTGETLEGVVLRPAA

SEQ ID NO: 397068 - protein, 318 aa, unidentified
MSNPIAVGIDIAKETFDVAFGSTGFVEQFSNDTEGHDSLIARLSSVSVELIVLEATGGHEFAVASALQAAGLPVAIINPRQARDFAKAMGYLAKTDRIDARMLAQLADVLTRHPDRDKIVKPLPSTELQCLQALVVRRRQIVAMLVAERQRLSLAHSAARTSIETIIKALKKELGRTEVALEKHVIKHHADLAALLGSVKGVGNATLSTLIAEVPELGHLSRREISALVGVAPINRDSGQMRGKRAIFGGRASVRRALYMSTLVAVRFNPVLRAFYERLVKSGKPKKVALVACMRKLLTILNAMVKYGNIWDESLHFA

SEQ ID NO: 397069 - protein, 370 aa, unidentified
MKTNTTVSVVLTNPPASVVPGGFTLGLDLGDRSHHVCVLDAAGQIVREGALLNTRPAMAKLLAEFPRATVALEAGTHSPWISRYLTELGATVLVANPRKLHAISRSERKCDQRDAQMLARLARVDPALLHPIQHGTAQSQHDLLGLKLRDALVRSRVNLINAVRFTLKSLGHTVRNPSSESFHKTVLADVPADCLPVVQPLLTVLAQVTEQIKGMERGLVQRSKKDYPVTQRLQQIAGVGPLTALCFVLKIGDPQRFGRSRDVGAYLGLCPRRDQSGGTDKQLRISKCGDGLLRRLLVSAAHYVLGPFGPACALRAHGQRLTGTGSAREKKRAVVAVARKLAVLLLSLWKHGTDYEPRVTASPVLVMTPA

SEQ ID NO: 397070 - protein, 346 aa, unidentified
MKILALDLGKYKTVACEYEAESGRHRFATVLTTPKALHDLIVDREPQRVVIEICSIAGWVGDLVRSLGIELQVANTSDERWQWRKVKQKNDRRDALKAAQLSAVNQLCPVHVPERTMRQWRALIAYRSKLVQRRTKVKNHIRDLLLREGQLLPRGRTAWTQAGMATLTAMAQPFAVLDSEQLWRGELGIELAQLTELQQQIMTVHAKLDELAAADPRVQLLRTIPGVGPRLAEAIVTMFDDVTRFTTAGQVGAYIGMVPKQFDSGETARSGRITRHGNRLVRSLLVEIAWASLRHNPWARQTFQRISGGKKSRRKIAIVAVGRKLLVRCWGMLRHQTPWHWRPGVA

SEQ ID NO: 397071 - protein, 307 aa, unidentified
MNKAVVYVGVDVSKAYLDVAWAEPSRRFANNKSGLSALMKWIQQSPVHLICEASGGYERGLLEAAEQNAIKLSLVQANRVRQYARAAGILAKTDKVDARVLCAFGSALQPKPLAPLSAQQKQLRELETQRRHYSRMLTAEQNRLAQLNDKELRRLTRSLLAALKKQMAAIDARIATLIAQDRALDEKAQKLTSIVGVGTRTAVLLLAQMPELGTLNRAQVAALAGLAPFNRDSGTLRGKRTIFGGRRALRSGMYMAALVAARRNRILRDFYQRLRTRGKPHKVALTAVMRKLLLALNHTLKPTACFA

SEQ ID NO: 397072 - protein, 427 aa, unidentified
MNPNNQNQSFAAFIGLDKSDKKINVSLQRYGTAKIERSIIKGGAEALHAWVATLCTRFAHRQVAICLEQPAAGLIHGLMGYHFIVLFPINPMTLARYREAFTPSRAKDDPTDADFLCELVALHREQLKAWQPDDVCTRKLRHLTQARRRSVNMRTRFSNQLKALLKGYFPQALELCGDDLTTPMACALLQKWPSLQQLKKARAETIRRFYYVQNARRGDVIEKRLALIAQAAPLTNDPALIESSIITVQALTLGLRAVHTAISRYDREIARTFAQHPDASLFAALPGSGTAYSARLLAAFGSRRELFESAEVMLNFSGVAPVLKRSGQATLIHRRYARPLFVHQSFIEYANESIRHSLWARAFYQMHKAAQKSHWVIIRALAYKWIRILFRCWQERTPYDEIRYLRSLQKSRSPLLQYLAQPAIQTA

SEQ ID NO: 397073 - protein, 387 aa, unidentified
MSASALGPAQTAIDVKLAAIFVSLELSRSTWLVTSLSPGGGEKMSKHSVRGGDVTGLLDLLARLRARAQVRTGKIFPVIIIQEAGLDGFWIHRVLEREGTESHVVDAASILTSRRRRRAKTDRIDGEALLRTLLAYKRGEPRVCSMVKAPSSEEEDRRRLCRERKTLVAERVEHVNRIKGLLFAQGISDYEPISRDRRQRLEALTTGDGRPLPAHLEAQIGRELDRLELLLEQLKAVEAERDALIAPVADAAPAAVAALAGLRGIGSEFAAMFWVECFYRPFSNRRQVAAYAGLAPTPWQSGSVRHEQGVSKSGNPRLRTTMIQLAWLWLRNQPTSALSLWFKDRVKRDGGRGKKTTVVALARKLLVALWKFASDGTAIEGAAMKPA

SEQ ID NO: 397074 - protein, 430 aa, unidentified
MINRLQVGIDFGQKRADFCLLFPDGRPLEMHQSFANSCTGYSLAKQLLLDALDSYSFDGIDLSGEATGYFWLPFFLQLDADPDLAAHDLNLFLLNPRWVKWFKKCFAQDHKCDEKDPFYIAERTRTRRPDVVWSPLDSLPLRFYTRLRFHLVQSLAREKCYFSSFLFLKASSYRCLKPFSDVFGVTSRIVLTQQPSLDELAELPVEDLAMHLHELSGHHLRDPFDNARKLKRVAQESFLLNETLALPVQRILDLTLEHIRFLEGQVEQVNTWIATELEFYPVIAQLATIPGIGPVFSSGIGAEIGDTQRFLQGSKWDQKRKRYRPRNLRDAEDAVAKIAGLWWPRSASGDFEAEDRRMAKTGNRYLRYYLIQAADHMRKRIPEYTAYYARKFKESAKHHHKRAMVMTARKSVGLVVGLLHRNEPYRSKGR

SEQ ID NO: 397075 - protein, 348 aa, unidentified
MVTIGVDPHKQTHTAAAVDPLGVELEHRTAPARPTGNGQLLEWARTLDGERVWAVEDVRNVSGSLERFLIDRGEVVVRLAPQLMAGARRGARTRGKSDPIDALAIARAALREGVENLPTARLAGPEREIRQLALYRERLVDMRTRLSNELRWQLHDLWSDWEIPTKAFAQPGWQTKIKTRLARTEQTIQVRVARDMIRRITELTQSAKDLYDQIAGLVRQVAPQLLAERGIGVLLAAKFIGEIAGIDRFTTDAQLARMAGCAPIPVSSGRSDRHRLDPGGNRRLNSAFYMLAVIRIAHDPRTAIYLARQRANGKTKREAIRCLKRHLVRRVYHLLHDPTSVPTTICLT

SEQ ID NO: 397076 - protein, 319 aa, unidentified
MTQNDLVVVGIDVAKDKVDACIRTVTERRTFPTTASGRRSLIAWLRKHQVGKAVMEASGGYERVWAKALRQTALEVRIVDPKRVRSFAESAGRLAKNDKIDAEMIAWFAETFSEAPSQVEDPAHEEIKALVKGRKSLIDLRARLEMQKEHEVPALVGKAHARLLKKLAREITAIETAIGAKIKATPAFAVRAEIIQSVPGFAEATALTLLAGLPELGQVSNEVAAALVGVAPYDDDSGKRHGQRCIKGGRRWVRNALYMPCVGAATLNNLVFKAFYQRLIAKGKKPKAALIACMRKLIVILNTMIARGEKWDPKRYQVA

SEQ ID NO: 397077 - protein, 336 aa, unidentified
MGQYVGIDLHRRSTTVVRMAEDGEVLGTERFVSQPFELAQAMAAAGPEPEVVLESTYGWYWAADVLQDLGAHVHLAHALGNNWGNRRVKNDVRDAQDLAAMLALGRLAEGWIAPPEVRELRELVRYRYSLIRHRTSAKAQIHGVMAKNGVLPVVGELWGPTGQAQLDRLELPEAYAMRLDSLRNLLDVYEHSIAELDAHIHAQLKADPGYRAVMTLPGVGKVIAAIFVAEIGDITRFDSAKKLCSWAGLTPKHRESDEVVHRGEITKQGSPLVRWAAIEAVGNYRAKGNEKLRADYTRIAEHAGKYKARVAVARKLLTLVFYALRDGEVRCLETAA

SEQ ID NO: 397078 - protein, 339 aa, unidentified
MQHVAIDLGSKESQVCIRREDGTILLEKKHPTRKLGELMRTWPTSRVVLETSSESFRIADAAREANHEVRVVPATLVKQLGVGERGVKTDQRDARKLSEVSCRIDLPSVHIPTTDARELRSMLRSRETLVSTRTKLVNHVKGWMRTQLLRMRSGATATLPERLRAHAVAAQLTLPVHIEETLLVLEVLTVQIAASNRRVRKQAVEHVVARRLMTIPGVGPVTALTFIAAVDRVERFERTHQLQSYLGLTPGENSSSERERRTAITKAGSTSVRRTVVQAAWAAMRVAKKAPMVRWAAQIADRRGRFIAVVALARKITGIMFALWRDNSTYSPLRSAMPT

SEQ ID NO: 397079 - protein, 416 aa, unidentified
MTEERRWYAGVDWASESHHVFLTDDRGAKVGERIFRHSGEGLAEMAAWLLSASGAAAPGRINVAIEVPHGPVVETLLERGFSAHAINPKQMDRFRDRFTLAGAKDDSRDAEVMASALRTDPRCFRELAIADPVVIELREWSRIAEDLGAERNRLTNRMREQLWRYFPAMLEFESDLGAEWLLDLWEAAPTPAKAARIRETTIANILKRHRIRRFDAAQLLDALRKPPVQVAAGTTEAASAHIATLVARIRLVNRQLKDAHQRLDVLTARLIPTAEIEPGQRKQHDVEILASLPGVGRTVLATLLAEAFDALQRRDYAALRSLTGVAPVTKRSGKSCIVIRRQACHDRLGNAMYHWARVAVQHDTKSRAKYAARRSRGHSHGRALRSVADRLLNVACAMLKTGTTFNPALAVQKPSC

SEQ ID NO: 397080 - protein, 327 aa, unidentified
MRQAKSLTEKAKTTVAFDVCKAALDVHIRVDGKAFQVPNTYEGFDQIALVLADYDVSLVLMESTGGYEDAAACYFQSVGYDVAVINPRHGRNFAMAMGKFAKTDRIDAAILADFAAVIDTRPDRARFIKPPTDEERKFLSQMVARRRQVVDLLSTEKQRLSHADDYAKQSINKVIAFIESQLAEINKDVSFYLKKNYSGLSKMLSEIPGIGELSVGLLVGDVPELGQIGNRQLSAVIGVAPFNHDSGKMRGKRCISGGRQNVRNVLFMGVMSATRYNPVIKAFYDRLINKGKPKRVAYIACVHKLLRIINAMVRDGTSFNPDLHAVS

SEQ ID NO: 397081 - protein, 354 aa, unidentified
MAKYAVGLDISSKKINACLSFIDDVQMVKVISSKVINNTKKGFEELIVWIKKHKKDEKYQLIIGMEATGVYYEECAYYLFEQNFSVVVVLPNKAKKYMQAMGVKSKNDIIDAKSLAQMFAERHFKLWQPMGKFFYILRSMTRHQEALKSIKNVFSNQLHALKRGVYVDKTIVKQIQKQIDLTDKQITAIEAKISLHIKSDPEVEKKVTNIAFIKGVGILTIAVLIAETNGFILFENASQLVSYAGYDVVENQSGKHTGKTRISKKGNSHIRRILHLPAFCVVRNKVAPFENLYKRTFENHKVKMKSYVAVQKKLLVIIYALWKNEVEFEKDFLKTNTREVKLDFPSLVNLSLAS

SEQ ID NO: 397082 - protein, 355 aa, unidentified
MTSVKYIGLDVHKESISICVRNSVGKVVMESVIETKASTILQFIDGLRGDLRVTFEEGTWAAWLYDLLKPRVAGVEVCNPRKNALLKDGSKSDRIDANKLSEQLYMNNIKSVYHGEHGLRTLKELARSYLTISKDLTRVMNRLKASYRSWAIPCAGKEVYAPRHRAEWLGKISEPGVRRRAEFYYQQLDALRLLHQEVRRDLLLEVKKHKAWKLLRQIPGIGPIRASLLMAVMQTPHRFRTKRQLWNYCGLGLETHDSGEYRAVAGQLQRAKKQATVRGLNRDHNHDLKDIFKGAAMRASTAAGPLHDFYENLLAKGRKPTMARLTLARKIAAITLIVWKKEVRFDANYLKPQAA

SEQ ID NO: 397083 - protein, 400 aa, unidentified
MECVFGIDVSKENANVAVLVDNVVIKQFKIGLDQLGFSLLSDELNSFNAPLIIYEATAMYSRRLRAFLQRDGWKYTELNPLAAKKVMEEFRHTKTDALDAVGLARAMIKNHFRPTYQESPVYTELHDLERTYQQFNKDIVTNKNRLHRALQLTFPEIEHFMSSTDGVLYWHIVQRFPHPAIVLSHEENELTEIILTETSKKIGLKRAIKLANRLLALAQNSAPAKEPQSHAVRAVIALAKEVERINQLKAQIIVEMTTLGENLSEVPLLVSIPGIGIKTALCLIAELGDVRRFHSANAINAYIGIDLIRYESGQYEAKMHIRKRGNPYARKILYRAILNIISVSQYQPTLISANYKRKKQSAQSHGTKKIAIAAMSQFNRLMHHLILNNELYDSTTFIPE

SEQ ID NO: 397084 - protein, 377 aa, unidentified
MHSENIAAYIGLDVHKETLAVAIAAPERLGEVRYYGTINNEAQAVRRLFQKLQGLYGNILSCYEAGPCGFGLYHQLTAMNIKCQVIAPSRIPKSPTDRIKNDHRDAISLARLLRAGELTPVWIPDLTHEAMRDLIRARAAAKRDSRVARQRILSMLLRTDKRYAGKHWTGKHRTWLANQSFSQPSQQIAFQHYCQSLEQIEDRILQLDQEISRLLPEWSLCNLVCQLQALKGVGQLTAITLVAELGDFSRFSSPKQLMAFLGLVPGEYSSGNSIRPRGITKVGNSELRRLLYEAAWSYRTPAKVGAWLIYYRPDSVTQYSKDIAWKAQQRLCSRYRSLTAKGKKSQVAITAVARELTGFMWDIALAAQSSFSQQKQN

SEQ ID NO: 397085 - protein, 339 aa, unidentified
MQVKTIGLDLAKDVFQVHGVSVTGDKVFNKKIKRAKLLEFFEGLPPCVVGMEACGSAHHWGRELSKLGHDVRLMPATYVKPYVKRGKTDAVDAEAICEAVGRPTMRFVEIKTEDQQALLTAHRTRELIVRQRTQVSNMIRGMLREFGYVLPTGVEAVVRFSKSHLEGDQPKIPELANGVLGTLCYQLLGLSARIEGFSKLIESHARRDANARRLMQVPGIGPITASAIVATVGDAKQFKTGRDLAAWLGLTPLNKSSGGKERLGRITKKGDHYLRKLLIVGMTSRALMAKLHPEKVDIWTARMLAGKPVRLATVAMANKTARVIWAMLTRQENYRQPVT

SEQ ID NO: 397086 - protein, 387 aa, unidentified
MQKPHDNSKVCRAAFVQDSTLVVVIEMALTSWLVAGMIPGVDREPLKKIAPDPEELLQLLYRWRDEAIKAGREITRIAVAYETGRDSFWLARWLRARGIDAHVIHATSVAISREHRRAKTDRIDTAMLRRGFLGWLRGEPGHCSLAIVPTVAEEDAKRPHRERESLVQERTSTVNRMKSILIQFGVRNFNPVLRKASEKLDAVRTPEGIPLPPNAAAALRRHMERLRVIKEQIKAIERTRLQRLQRDPADKMNAMVFLLVRIIGFGVETAEQLVHEILFRDLRDRKAVARYAGLTGSPDESGSKRREKGLSRSGNGRVRTILIQLSWRLLKLQPGSELVHWYQKRTADAKGSRKPMIVAFARKLIIALWRYVNTGLLPEGFELKPAA

SEQ ID NO: 397087 - protein, 399 aa, unidentified
MDPVIGLDIAKGKSQVQAFLQKKDPYKKSFVFEHNVLGLHDFHRLWLEMEEITGRPPVVVFESTGHYHEPVLQFLEEHQIVYYLVNPVLSHEAKKMSLRKVKTDAIDAFRLGELYYLYDDLQPFKKKAVKIMNLRNLTRQHDALTGTYVQIKLQFQTVLDQVFPEYKTVLGSLYSPTSLQTLLHYQTPQGVREDTKEKIAEVILQQGVKRSYGWALDKAHQLKEAAGRDPFKRNLYSSHVVSLTMFIQLLLQYQRHLSKLLKEIDALAEEFDEYKIIRSIPGIGGKIAATILSEIGEIDQFNHPKKLVAYAGIDPCVHESGQFKATINRITKRGSSSLRKSLYNAVQCGITKNRNPKLRAYYDKKREEGKPHKVAIIACANKLIHWIYAILKSKMAFVI

SEQ ID NO: 397088 - protein, 427 aa, unidentified
MTVSRTDLRRSNRLPWRRHANSVERGCGLDVHQGTVVACLLIVLKDGKVRKQMRTFGTTTRELLSLREWLLSEGCTHVAMESTGVYWKPVYAILEGALEIVVANAQHVKKVPGRKTDVKDADWIADLLCNGLLRSSFVPPQPIRELRDLMRYRRKLVESQTAERNRLLKLLETANIKLASVASDVFGVSGRLMLQALAEGKATPQEIAQLAKGLLRKKIPELEPALEGRLEEHHRFLLELQLRRLQAVEDLVVLERRIQEKLKPYAAQLALLQEIPGVDWTLAAVIIAELGVDMKVFQSVSQAASWAGVCPGNNESAGKRKSSRIPKGNVYLKTALVEAAQSAAKAKGTYLRDKFYRLKARRGYKRAVVAVAHKILVAIYHMLSQEVSYQDLGDVYLDKLNKHHLTRNLVHRLERLGYTVTLEQKAA

SEQ ID NO: 397089 - protein, 354 aa, unidentified
MMVFVAVDVGKRRCVTCVMGEDGSILDTSSYPNTFLDASLYAKQIVDRYGSECKAVVESTGNMCMKTYEAFESNGVEVKLANPVKTRAIAEARVKTDKLDSKILAHLLRADLIAECYVPSRDVRLSRALLSHRVNITREQTRMKNRIHSLLDKYDLECKYDDIFGAHGMRWLHTIQLNGHDHEILQSLLRELIFLQDEEETANSSIAKDALHSQYVPIIMSMTGFNYYSASVLAAYIADISRFPSPSHLVSWVGLCPSVYQTGESLYMGRMKGGSRKVKWIMTQAANTAIRSDPRMKAYHERKLRRHHHNVAVTHVANKMLRIIWHMLRENRLYNERKERLYESKLKRMTHTAQ

SEQ ID NO: 397090 - protein, 426 aa, unidentified
MKESVSEQPLGPEVAAFVGIDWADQKHDVVLRSAADQAKAEHQVIKSEINALNDWIAQMHERFSAKGKVLVCLEQSRGALIYQLMAYELFELYPINPSQLANYRKTFFSSGAKDDRPDADLLCELIKCHRDRLKAWKPDDQLTRELAILNEGRRNAVDRRTELANEIKSQLKLYFPVALQILENDITTPLAADLLVQWPTLAELQKVSPGKLRKFFYGHNSRQEKKILERLTLINQAKPLTTDAAIIRPTALRVKLLAQQLKSLLPFIAEYEKRIAELFGSHPDSFLFDNLPGAGPALAPRLLTAFGTDRDRFELASDVSTLNGIAPVRIASGKRSSVHFRWACPKFQRQSFHEFATHSIRFCPWAQTYYQTQIARGKTHHVAVRALAFKWIRILFACWKNRVPYDPDRYLQALQTRGSEYAKIGA

SEQ ID NO: 397091 - protein, 346 aa, unidentified
MALTISVLGVDLGKNICSVVGLDASGAVVMRRRMRRETLVSLAERLPPCVVGMEACCGAHHLGRAFATHGHNVRLMSPEYVRPYVKAQKNDDRDAEGIAEAATRPTMRFVELKSQDQLDMQTVHRSRSRLVGERTALINQLRAILLERGLVAPQGKRKLEQFLVALMDGQGRAGLSPRIVLLVADARAQWAELDRRITAFDAELVRWAKESEEARRLTTIPGFGAIVASALVAAVGHAESFDHGRDLAAWLGLVPRQFTTGGKPKLLGISKRGNKYLRTLLIHGARAALPYVAERDTPLGRWAKGLLDRVHRNVAIVAFANKLARIAWAVLRRGERFAAGGMSMAA

SEQ ID NO: 397092 - protein, 377 aa, unidentified
MTKIRFVGLDVHAETIAVAVAEKDGEVRSHGIIPNRLESIRKTMAKLGPSKDLKCCYEAGPTGYVLYWQLTQLGVACEVIAPTLVPVKAGDRVKTDRRDAEKLARCYRAGELTPVWVPDAEHEALRDLVRAREAAKKDQLRARHRLGKFLLRHGKRPIDAGKAWTKKYLEWIKTHVRFAQAALEATLQDYLDEVDHVAERIGKLEKAIDEAVSEAGPEIRAVIEALQALRGVAQISAATIVCELGSLSRFESPRQLMGYSGLVSREHSSGGKIQRGAITKTGNAHLRRVLVEAAWAYQHRPNVTGYLLRRQKSLELADETKHMAWKAQHRLHKRYKALAARGKNKNQIVTALGRELLGFVWAIAVHTEAQYRQAQAA

SEQ ID NO: 397093 - protein, 338 aa, unidentified
MKLYAGIDLHSSNNYISIIDEEDQRLFQKRLPNNLEIILPALEPFKESLEGVVVESTFNWYWLVDALQDHGYKVHLANPAAIKQYEGMKVIDDKYDAFWLAHLKRLDLLPEGYIYPKEERQVRDLLRRRLLFVRHRTSHILSLKSSISRNLGVSMSVREIKKLECKDTEKLFDDAYLALAAKNSISLIRFLTGRVKEIEKEVLFHVKVRPEFRSLLTMPGIGKILGLTIMLEVGDIKRFPTVGDYSSYCRCVKSERSSNKKKKGEGNRKNGNKYLAWAYVEAANFAVRSYSEFQSFYNRKKSKRNGIVAIKALSNKLARGSYYVMRDKVPYEASKMFR

SEQ ID NO: 397094 - protein, 421 aa, unidentified
MNQLADTEYSAYVGIDWASAKHDICVQAADGGAREFACISSQPEAIETWAQDLYGRFGGLIAVALELSKGPIVSALQKYDFFVLYPINPSTLAMYRETFTPSGAKDDPTDAELAVDLITRHPERFTPLKPQSTTMRKLIGLVEQRDKFLSDQGRVVNRLGHALQQYYPQVLEWFNEHNTVVFCDFVSQWPTLNQAKRARKASLERFFKSHHVNSAELIEKRITAIKAAMPLTLDAAVIEPHCLQVEILVEQLRITIKALQRFDDEIAVTAQKLPDYDLLFSPLPGAAKVLAPRLLAAFGEDRQRYPQAAALQKYSGIAPVTKRSGKSTWVHWRWQCPTFVRQTFIDWSAQTINKSAWAGAYYRQQRAKGCSYQVAVRALAFKWIRILHSCWQHRIPYDESKYLEALRRKGSPLLKYLAETA

SEQ ID NO: 397095 - protein, 459 aa, unidentified
MERKMKLGMDVVNFNASGIDVGSRSHYVAIGQELEDVREFGVYAEDLTELCQWLSDSGVTTVAMESTGDYWQNLYVELISFGFEVVLANGKFTKNAKGKKTDVKDCRWIQKLHTLGLLTGSFLPDLTTEQLRTFCRQRGNWIDLAASATHKMQKYLKLLNFRLDVVVKDVCGLTGMKIIEDICKGNLDPQSLAEHRHFNCRKPKEEIARALHGNNRTDYLFGLQQEFECYKFFQKKIMDCDKKIEHFIKQELKRHPERKKMKTTEKPHKRINKNAPQIKNLNQIAFRYFDGVDLFAIEGLSHSTVLSIMSEIGPEGFYRFGSSKQFSSWLRLAPNNKISGGKILSNRVPKGSNRLKIALRQAANAIGNLKDTHLSDFFRRVAYRKGRPSAVSATARKLAVIIWNMVTKKIEYQPPKQYLFLDQKRRLGLVNRIKKQIDKFELKPEDLGFANNLNTNNLT

SEQ ID NO: 397096 - protein, 317 aa, unidentified
MLQEAELSAEADSENNLGGSSETMYFIGLDVHKRTISYCVKDAAGRVYQEGKIGSTRRELDCWIWKMPQPRMIAMEATIFSGWIYDHLLPHAEKVKVAHPLMLRAIAAAKKKNDKIDAGKIADCLRCDFLPECHMASTEIRNRRRTLRYRNLVIKQMVQIKNRVSGLLMETGVSYNKQRLHKVSYFAELMSTNEEVNESIRPLLKLSREMICRSQKLEYALVSSLERDPLLKERLRRLRTVPGVGSITALTWALEIGDFTRFTSIKQAISYCGLCGDEKSSADKVMRMPISKQRNKHIQRVLIEAAKLAPRECHELG

SEQ ID NO: 397097 - protein, 314 aa, unidentified
MICGVDVSSKSLDARIGRDGATASFTNNPKGIAELAEFCQCHKVHLVAMEATGGYEKKPFALLWAAGIQVAVVNPRAVRSFAQGMGLLEKTDRIDAGVIAWYADTKGCVAVSPASAQQQQLKAMVTRLRQLTELRTAQRNQRLLVTDKVVLKSFRKLLDLVQRQIRDLEVAIAGLIDADAVWQKLDQSFRSIKGVADRTVARLMAEMPEIGTLSNKRISKLAGLAPLACDSGQMKGKRTVRGGRRTIREILFVVAAGVSRHNPDFRAFRERLAAAGKAKKVIRIALAHKLLVRLNAKAREVRQLQAACAPALLS

SEQ ID NO: 397098 - protein, 368 aa, unidentified
MYRKQYETLSYATQSENKLPNIQKAYIMNMSILKRLGMFRYLIESGEYMEAMVKRCAGLDVHQETIVACVLTGELDKKPESEIRTYGTYTKDLEELHEWLLEKEVEQIAMESTGIFWKCVWNIIEDEKYEIKLANAKEIKNMPGRKTDVKDSQWIAELLRCGLIKSSFVPNVEIRELRDLTRYRRKIVQEASAEKNRIHKILQDANIKMTTDISDIFGDTGRKLLEKIIEGKEISNEDLIEVTAGRGKASLREKIPQIKEGLKGTTRAHHRKMIKLIYEHLKYLEKEQEEIDKMINEACEKYKKEINLLDSIPGINEESAKAIIAEIGIDMNQFPTVKHLTSWAGMSPGNNESAGIKKKEKRQKEIET

SEQ ID NO: 397099 - protein, 331 aa, unidentified
MLPSDNSYIGVIDKKDSRIFGKKLPNDLEVILKTLEPFQKKIQGIVVESTHNWYWLVDGLQEARYKVHLANPAEMQQYSGMKYTDDTWDSYWLAHLLRLGILPEGYIYPKEIRPVRDLLRKRTMLVRHRTAHILSLQNMVNRNTGRKVNVNDAKRLSEEKISEQLTDEHHKMAVQSDKAVIDFFHEQIDRIEKAVLKEVKLRYPFEELLTVPGIGKILGITIMLETGDINWFPTVSDYSSYCRCVSSKKVSNGKKKGEGNKKNGNKYLAWAYVEAANFMVRYSEPARRGYQRKAAKTNKIVAIKALSNKIARACYFIIKDQTPFDPRKLFQ

SEQ ID NO: 397100 - protein, 357 aa, unidentified
MERSKQIRRFKYFMGIDQHKRYSHITVIDEVGDVVEERKLYHHDKEGMLNYFKSFNPRQTKVVLEATGNWYWLADLLESANLPHILAHPYKTRIIAESKIKTDSISSFILAQLLRAGLIPQSYLASRKTRSLRELLRYRISLVKVRSSLKCRVHSILDREGIDTPKFSDLFGRKGLIWLKNLTLAYPLSQTLEGYLNLIERLNSLIDETEKSIKLTIKENPLAQLLLTIPGIGFFTAYLILCEVVDINRFLTPKKLSSYIGIVPSIHQSGNFSHTGKITKQGNKYLRWALIEASQKAIIKDPYLKAIYDKISYKKGKQKAKVAVANKLAHIIWGVLKYRQPYRPKKRLIYSCPGQAR

SEQ ID NO: 397101 - protein, 359 aa, unidentified
MKQHQTTKLDFTGQEFFIGIDVHKHQWKVTIINNSLELRTISMNASSMELVHYMHKNYPKGIYRSVYEAGFSGFGTHRELEALGFDNIVVNPAHVPVHHKDSMRKSDSIDSRRLARALASQSINGCYVPSREEEGFRAICRFRVQLVRDQARVKNRIKSLLDFQGVKIPANDELTHWSGAFIKYLRELPQGNEHIRETLRRLIEELLELRRQLADLMKHLKTVVLKDQKKTAIIKRLASIPGIGFTSAVIIYSELIDIGRFSRFDKLCSYVGLVPDIRTSGDKQTTLGITMMQLQYLRYVLIEAAWIAVRKDPALTAAFNEFTKRMKKQAAIIRISKKLLNRIMYVWRNDKEYVCSVVS

SEQ ID NO: 397102 - protein, 392 aa, unidentified
MYIVGIDIGKNHHEASIVSPKGKQIGRSLRFATTHKGADSLMSFIFKNIGNSPCVFGMEATGHYWYPIYSFLKAKGYTIYVINPIQSDSLRKMYIRQTKNDSIDSFLIAEVIRFGQFGTTSMADENILAMRQLCRYRDSVISSRTEIKLRIGTIMEQIFPEYEKQFSSLWVSTSMGILEKYLTPENIENAPIDELFEIIKDKSHNRLTRAKAISIKEAAADTFGIKIAQDAFSFQLKQLIDRMNFLDKQIEALDCQILEYYEKFDCYLHTIPGIGIIGAATILAEIGDISRFKNSSSLIAFAGIDPTVRQSGEFNSTHNHMSKRGSPYLRHAIFLAATTCSFHNSPLNAYYKKKRDQGKHHLTATGAVARKLTTVIYAVLRDSKPYEPKKFC

SEQ ID NO: 397103 - protein, 353 aa, unidentified
MPATHILGIDISKDKFDVCLRPAADEGPRQAATFPNHAKGFKALDKWLGQQPVPHLHACLEATSRYGDALAHHLHQQGHTVSVVNPLRTRRYADSRLVRTQNDAIDAALIADFCAKENPRAWQPAPAGKRKLQDLVRTRGFFLQQKQQCGNRLETADPLSARHLRRHIRQCDATLGKLEAQIAALLKTEPDLARQVALADSIPGIGTLTAVVAVAELPPIAHLKHAGQAVALAGLDPRQKDSGTSVHAVPRISRMGSRLLRQTLYMAALAAQRSNPVTQALTERLKAKGKGGKRAVVASMRKLVRLIYGVIKHNQPFDPNWHDRPRAVGLNGRASDGDEPSSPELASPSVATA

SEQ ID NO: 397104 - protein, 335 aa, unidentified
MDRQYVGIDFHRRRSVIVRKNAAGQKLSSVRVPNDPLVIAAVVADAGPEPEVVIEATYGWYWIVDWLQAQGARVHLANPSGLNWGTRRVKNDERDAIDLVDMLRLGRLPEAWIAPPVTRELRELVRYRAKLVALRSGLKAQVHAVMAKEGVLPAVIDMFGPGGNAQLDQMALGDAYTIRVESLRDLIEVYDREVAMLERNIHQRLRGDTGYRAIQAINGIGPTMAAILVAEIGDVRRFRSAAALCSWAGLTPKHKESDTTVHRGQLTKQGSRLVRWAVVEGTVRYHGGGKLAADFRKITERRGKHKATVAIARKVLTLVYYGLRDGEIRCLANAA

SEQ ID NO: 397105 - protein, 384 aa, unidentified
MNKHSIVFLGLDTHKEFHEVAYCEEQRGATPVHYGRIPSSKVSVKKLLRQFESKYPGATLHVVYEAGPCGYWIYRLITSLGHCCYVVAPSLIPKKPGERIKTDRRDALKLVRSLKSEDLTPIYVPEPEDEAVRDLSRAREAAMKDLKEAKYQLKALLLRNNIRYEGTANWSKKHLRWLTELILPHPAQQIVLQEQLQTIEERIRRLERLDNELTHHVHQWRYYPVVKSIQAMRGVRLLVAVGVVAELGDLHRFDHPRKLMAYLGLVPSEQSSGGKRHLGAITKAGNGRARRLLIEGAHSYRYPANVSTELQLRQEGLPEDIVDIAWKAQLRLCKRYQRMSKKGKHYNLIITAIAREMAAYIWAIAKEVVLTPVNPKLRLSRVPA

SEQ ID NO: 397106 - protein, 313 aa, unidentified
MKVEGRILESQRIGTERERLLSYFGKVEKPAAVAATFNGYYFLDLIEPLGLELHLVHPWKTRAIASARIKHDKLDSRILAELLRTGFLAEAWIAPREVRQQRQLLRYRAHTVRWATRAKNAVHGIVNRNGVPAPVESLFGPKGRAFLKDVVLPEMDRWEVEGQLARLDLLEQQIRELDREIRERVKADPVALALEMIPGIGPFIALLLVAEMGDIRRFPTAKHLASCTGLVPSLYASAEHRWGGTQRAIFGILRRPQSASRSGQSGCCSGPQAGGDQLLPVAGGASTVMSKLKQVRECTWGGAWSEDRPFMCD

SEQ ID NO: 397107 - protein, 455 aa, unidentified
MVKQKRQMKIKVKVNALEQINPNAAGIDIGAEEIYVAVPPDRDTESVRSFPTFTADLRRLVEWLKACRIETVAMEATGVYLIPLYELLEEEGFEVCLVNARHLKNVSGRKTDVLDCQWIQQLHTYGLLNPSFRPPEQIVAIRCLVRHREMLVQYRTAHIQHMQKALTLMNVRLTNVLSDITGVTGLKIIRSILGGEHNPLCLAALREPGCKKSAAEIAKSLEGHYKREHLFALKQALELYEFYDQKLMACDAELEAMYQEFDPPDNPGTPPPTPRTQKRRKNQAHFDLAPALFRLTGVDLTRIDGVDELTVQKVLAEIGTDMSKWPTVKHFTSWLHLCPNNKITGGKVFQTGVQPTKNRASAALRVAAASLKTSDSALGAYFRRMCARLGTPAAITATAHKLARIIYFMLKYRKPFHDLGANYYEQQFRARVLRNLTRRAAVLGFRLEPAAQSVS

SEQ ID NO: 397108 - protein, 384 aa, unidentified
MSTTNDQQGSTPRAAPITIFVSLELSRVQWLVTWTFHGSTKMSKASVTASDGNALLALLAQIKTRAERSQRLAGKIIVIQEAGLDGFWIHRLLESHGMESHIVDPASVAVPRRQRRAKTDAIDGQTLLRVLMAWKRGEPRVCSMVVPLRPEDEEQRRLVRERKMLVAERVRETNRIRGLLASQGISNYDPLRRDRRDRLAMLQTGDGRPLPERFNAEISRGLDRIALIERQIKELEEERDALVQSTSESSIPAARLFAIKGIGPEFATVLSLECFFRRFDNRRQLAAYAGLVPTPWQSGQVDHSQGISKAGNPRLRTAMVELAWLWLRYQPGSALAAWFRQRVRAQRGRARRIAIVALARKLLVALWRYITAGVVPEGAVLKEV

SEQ ID NO: 397109 - protein, 342 aa, unidentified
MLLTEIKHNKVMVFNHYLGIDISKKTLDAALIIKEGEIVGQTKVANNQQGFKELFSWAKKKGAKNVETLVCAEHTGIYGYDLQVWLDDNRLSFSFVPALEIKKSLGIRRGKNDSVDAVRIAEYAYLRRETIALSHKPSDSIFALKALLGERKQYVRTRAGLLARKDALDQYESQESRDRRDNIIQMLTQNVESLEKQMMQIIKTDESIYNSYKLITSVKGIGLVNAVNTIVYTNNFTSFQTARQYACYCGIAPFEHKSGTSIKGRTMVSSLGCHQLKAELSMAARSAIINDPWLRKYYKRKMEEKGNVSGAHGVVLNAIKFKLVVRMFSVIKSGVPYKVMAY

SEQ ID NO: 397110 - protein, 394 aa, unidentified
MIIIGIDIGKNKHEATLIDEKGNIIGKSIKFENSTAGFNKLISSINNYNISNDKFVFSMEATGHYWLALFSKLVESDYNVQVINPIQTDACRKFYIRETKNDSKDSFLIAQVTRFNGYSKTTLPDEVMISLKELTRFRTFLVDDISDYKRKATVVLDKIFPEYTQIFSDTFGKTSKEILTKYPLPKDILNEDLESLAKVLSTSSKGRLGYSKAEQLQNLAKESFCIKFATEALVMEIKSILSTIEHLQNQVSKLDEKIAVLLRSLGTTIETIPGIGPILGAIIVSEIGDINRFSHASKLVAYAGIDPTVKQSGEFNATKNRMSKRGTPYLRRALWTASIVAAFNDPNLHEYYLKKKNEGKHHGTIIGAIARKLIYRIFIVLKDNIPYQCNKCEA

SEQ ID NO: 397111 - protein, 385 aa, unidentified
METILQNKTMYLNLEMLTNSLYVGIDPHKYEHHIIIANRHMDVLRELKVKNSSSDINLLIKEINKIKTKGYFNNVIIGIEGYHGNGDFLTRNLLISFDYVYEVPVCMTSRYRKSNVYREKTDRIDAMGVINGLTQHLSELSVINSESSNETSMMIKDLNMSRERLVEFRIGQKNAVHHLMQHLDPEYIKVVKHFDSKKARKQTKEFCSKVMTKKDVSNELKLRAKLIISHIDMIDNIVEQINMLEKEMENLLSTSKYMKIIESYKGISFVLMSQLLSHIYTIDRFATPEKFCKYCGITPVSFSSGNSTKFHNTKFGVKSLRTVLRTISIVRIRRVPEDGEYYQKQLARGKNPKQAMKLVMRRNALTIYALLRKDQAYITPVLRAN

SEQ ID NO: 397112 - protein, 383 aa, unidentified
MTGTEPQAWETGLMENITYVGLDVHKATVCVAIAEGGRSGEVRQLGVFENRPELLLKLVARLGKGGRRLSFCYEAGPCGYGLHRFLSGCGHDCVVVAPSLIPMKAGDRVKTDRRDAVMLAKLHRAGELTPIWIPDAAHEAMRDLVRARATAGRVLSKARQHLQSFLLRHDQIYRGVRAWTLAYRRWLTTVRFAHPAQQIVLQDYIHAVQDAEARLDRLTRQIEELLPSWSMAPVVTALQAMRGIALVVAVTVVAEVGDFRRFANARQLMAYLGLVPSEHSSGASIRRGGITKAGNVLARRVLIEGAWTYRMPARVSRKLHDRNEKLSPAIRDIAWKGQIRLCSRYRRLAAAGKPKVVVTTAIAREMVGFIWAIARIAQPTLQG

SEQ ID NO: 397113 - protein, 310 aa, unidentified
MNDTIGVDISKATLEVWRLSDRRHMRFSNDTDGLKALCKWLGADPVHVIYEATGRFHRDLEAALSKAGHGPVKVNPSRARRYAQATGNIAKTDRVDAKMLARMGSTLALEPTPVRSKSMHEIKELHVARVALIKDRTACRNRLDTARNKMVVRQLKARERQIDRQIAQIDAELVRLIKADPELARRYEILMSIRGIGPVAATAMIVDMPELGTMTPKEAASLAGLAPITRQSGSWKGKARIFGGRSGLRTLLFMPAVIATRYNAPLRKIYLTLYEGGKPWKVAITAVMRKLIVLANALIRDDRKWAEIAP

SEQ ID NO: 397114 - protein, 376 aa, unidentified
MDVVNERCAGLDIHRDTVVASVITPTGRELRTFGTVTDELLALADWLLGLGVTQVAMESTGVYWKPIYNLLEGTDLGLLVVNARHIKAVPGRKTDVRDAEWIADLLRHGLLRGSFIPDRPQRELRELVRYRRRLIEERSREAERLHKTLEGANVKLGAVASDILGVSGRAMLEALVAGRDDPEALAGLAKGRLRDKHDRLVAALRGLVGPHQRHLLATQLRHIDYLDAEIAALSGEIEERMRPFDPAIALADTIPGVGRRTAEAILAEIGADMTRFPSDAHLASWARMCPGTDESAGKRRSGATGSGNVWLRSALSKGTASPVGSDLRALLDRPYHRPFIDGLIRGKVHWSRVWALYVLERFKRREGRGWIFPSSS

SEQ ID NO: 397115 - protein, 472 aa, unidentified
MVLPPKKCKPLAEPKKKPLAVACEAALDEWQAQTQIERLNGDAAGIDIGATSHFVAVPADRDEQPVREFPAFTADLERLADWLKQCGIRTVAMESTGVYWIPLFELLESRGFEVLLVNAHHVKNVPGRKTDVLDCQWLQQLHSFGLLRGAFRPEESMCVLRAYLRQRANLVRYAGMHVQHMQKALNQMNLHLHHVVSDITGVTGMKIIRAILDGERDPQVLAKHRDRRCRQSSEMIAKALQGHWREEHLFALRQAVELFDFYQQQRACCDEEIARVLAGLESTTDAQAPPPLRKHKVDRNTPAIDDLHEQLFRLVGVDLTRIDGLNAHSVLKILAEIGTDMSRWPSVKQFCSWLGLSPGNKISGGKRIGKSKTTPSANRAAAALRIAAQGLSNSHSALGGYLRRQKARLGAPKAITATAHKLATILYSMIANQTEYAPPDANDYEVQYRKRVLSNLRRRADQLGFDLIERPA

SEQ ID NO: 397116 - protein, 353 aa, unidentified
MRRPKDKLIAGLDLHSNNVMIGIINQDGKRVAHRKLDCDLKQVTEFLEPLKPQLQSMAVESTFNWYWLVDGLRAQSYRIDLANPAKIEQYSGMKHADDKDDAFHLADLQRLNILPKAHVYDPQLRPVRDLLRRRTNLVHQHTALLLSFSSLYTRTTGQKLDMSEAKKMEPKQAPKLYEHPANQLIAQVQAEHIQALAKSIRRVEKAVLGCAREIPLYERLLTIPGIGRILGMTITMEVGDIKRFRSDGDFASYCRLVDAKRLSNGKCKAENNVKCGNKYLAWAFVEAANFARRYDENCRRWYDRKAARTNKILATKALACKLAKAAWHVMARQCNYDEQRMFAELATKPMNKN

SEQ ID NO: 397117 - protein, 349 aa, unidentified
MSQGLNCAVAVIGIDIGKNTFHVVGLDHRGAIVLRQKWSRGQIEARLANMPPCLIGMEACVGAHHLSRKLKALGHDARLMPAKYVRPYSKGQKNDFRDAEAIAEAVQRPTMKFVATKTADQLDLQALHRVRERLVSQRTGIINQIRAFLLERGVAVRQGLRFLRAELPRLLATPPDVLSARMVQVISDLAEDWRRLDHRIDDLSNEITLLARQDAGCERLMSVPGIGPIISSAMVAAIGAGEAFSKGRDFAAWLGLVPKQISTGDRTILGKISKRGNRYLRVLFVQAAWVVLIKPMSWERHGLKHWIDAARKRLHRNVLAIALANKLARIAWGVLAGSRTFEASKLQTA

SEQ ID NO: 397118 - protein, 339 aa, unidentified
MNRIVVGVDIAKRVFQLHWVQPETGEIVALQLKREKFLEHFANRSNCLIGMEACGGSQHWARSLQKLGHEVKLLSGRMVKPFVVGNKNDAADARGIWMAVQHPGIKAVAVKSEEQQAVLALHRMREQLVKFRTAQINGLRGLLSEYGEVMPQGRAGIKRDIPSALGRLSDRLPAMVIEALREQNARLGELDEQISQIERRLRQWQRGDSATQRIAAIPGVGLLGATAAVATMGDPKAFKSGREFAAWLGLVPRQTGTGGRVQLLGISKRGDKYLRTLLIHGARSVLTHSKSPPEWLTELLKRRPKNVVVVAMANKMARTIWALTAHERAYQSGYVSRPA

SEQ ID NO: 397119 - protein, 360 aa, unidentified
MMSIAHVGLDVHKEQTRVALLPQDSREPLDECTLPTTARHLCRYMRRWGDRFELRCYYEAGPLGYVPHRWLTGMGVACQVIAPSKTPRAPGDRVKTDRRDARLLARQGRAGALVRVWVPTEQQEQVRGVVRQRETVVRDVVAAKQRVLKFVGLRGMVYQSKGSHWTQRHMQWLRGLRFEGVDAWTAEQLLGDLQYRLNRLAEAERQVVELAQRDPYRELVGRVCCFRGLDVVSAMVVVTETIDFRRFAEAGQYMSYWGLTCSEDSSGPTRRRGAITKCGSARARRVWVEAGWHYRHKPAVGDRLRRRQEGQPAQVIAHAWKAQQRLCKKFWRIAMVKDTRTAAVAVARELAGFVWGAMQL

SEQ ID NO: 397120 - protein, 447 aa, unidentified
MESYAGVDWASDKHDVLVADAAGERLLAATFAHDESGLRSLCRQLLRLNVALVAIERPDGLLVERLLDAGLRVLALHPNQVAAARDRFRVSGGKSDRFDAFVLCELARTDHHRFRVLEPDSDQTKALRALTRGREDLVGTRTALCNQLRAELERFWPGPLHLFTDPDSQISLAFLERYPSPADTRGLGEARLAAFLARERYSGRQSPAQLLNKLKRAPTGRVGEQELATRSQLVLTLVSMIKLVNGQVKELERQIAVAIREHPDGDIFLSLFKGTALTAAVLLAEIGDCRARYPARDALAADAGQAAVAKESGKRKTATFRWGCNKRLRQAFHTLADSTRHWHPWAQDLYADARARGHDHPRALRTVGRAWSRILWRCWQDRVPYDPDRHRALQRHITVTIPSSSGPRPDLAATERMAGAAVTGTAARRAEREALDGEPTSANTLRG

SEQ ID NO: 397121 - protein, 400 aa, unidentified
MKYVGIDLHKKTISACVVVKESGQRAVAARKRLECRDEAGIAAWFAELGKFEVVVEATASYEWFVKLVEPLAHRVLLAHPKKLRVIAESKRKSDKLDAQVLAEFLASDEIPLAYRPGPRVREHRTLVRYRHYTQRRITSVKNKLRHILAAYNTDVPHLFTAKGQEHLAAVKLSAADRFVADELSSELHRHQKRQAKASRELRRFATKAPLAEKEARAVLDSIPNVGPVTTDVILAELGDWRRFRSQADVACYAGLAPGFRESAGKAKQLGITKEGSRLLRWAMIELAWRMIRTSRKWGRHFTHLEVRIGAKKAIVAIARRLVGMIFTLLRTGQKYALALESSQPASCRSNSPRDTHPSDPACLRGQPRQASSLGAGVDYGGPLSVPRKRGSRSRKLHDLK

SEQ ID NO: 397122 - protein, 371 aa, unidentified
MKKSSMFVGLDIHKSSIEIAIAEAGRDGEVRSYGAIDGTLDALDKVVRKLVSKGSELHFVYEAGPCGYDVYRHLTAQGFDCAVVAPSKIPRQSGNRIKNDRRDAQMLARLHRAGELTAVYVPCVEDEAMRDLTRAREDAKAMERNAKQRILAFLLRHGHCYSGKSPWSRAHFRWISLLKMSHPAQQIVLQESLDTLAECTRRVDRLTEQIQTLSPQWRLFPVTQALQALRGVSLIVATTTIAEIGDLTRFKKSTELMSYLGLVPSEHSRGRTTRRGSITKTGNGHVRRVLVEAAWAYRLPARVSRKLLIRQEGVSPEVCAISWKAQLRLCTRYKRFTTKGKPHQLVVTAIARELCAFMWAIANEVQGPVKV

SEQ ID NO: 397123 - protein, 341 aa, unidentified
MERNIIAVDIAKKVFQLHWVETDTGCIERLQLKRAKMLEWFANRTAALVVMEACGGAHDWGRALMKLGHEVRLISPRKVRPFVQRNKTDAADAQAIWTACQQPGMRFVPVKGEAQQIVLSLHRMRAQLMKIRIMQTNELRGLLYEFGIVLPEGRAALLKALPEAMCDAKARLPAMLMDSLDEQFRRVQQLQADIGLIERRLSQQMQEMPACKAVAEIPGVGLLTATAVVASMGAPTAFKDAREFAAWVGLVPRQSGTGGRIRQLGISKRGDAYLRTLLMHGARAIVIRSKDGPTWPWLTALLRRRPYSVAVAAVANKLARTIWAVLARGQAWRPEAWQVMP

SEQ ID NO: 397124 - protein, 333 aa, unidentified
MQYYFLTPHPMGNGSFFIGIDVSKAKLDVAVIASCDRKAVLECRAENSPAACEGLAARLAPYAGSTVVIEATAGYHYAPAFALRDAGFRVKVINPIITGKFVSSGIRKTKTDKVDALLLARIGILEPGLMDWAESERQIRLKQLSKAIVGLKGQRRSLTQKANHLGDLGVAGSADVIRSLEGIAKAFGKEIERLSGKLAELASPEVKTISSIVGVGEATAAVIAAELGDVARFAGKSQAVAFSGLDPTVRESGTSVRGRSRISKRGSGTLRHVLFQGAWGLMMHNPLYREYYEKKKAEGKHYFAILCAMARKLLILIYTMLKNNTPYDPIKFA

SEQ ID NO: 397125 - protein, 426 aa, unidentified
MRVMFERVAGIDVHKDMIKVGIRGPGHRAWTRTWEVPEYRTFYGVLLTMAADLRKRGVTHVVMEASGVYTEPVCYALAGQGFEQVAVTSPAHARALKGHKTDAKDCPRPAELFECGLLRGSYIPAPDLKGLRDLTRYRTKTVQARTSEIQRLAKALESAGIKLDSVVSDLTGKSARLMVEALVDGERRGQVLADLAIGRMRTAGKLADLSRALTGRFTDHHAALCRLHLDRIALSGTAVGGLEAKIAVKADPYRRELGLLKSIDGFGDTVAQAWLAEIGPAPHEYFAGYEKLASWVTLCPGNYMSAGKRSHGRTGKAGTYIKPMLVQAAWSAIRTQGRLQARYHRLVRRFGGPKNRAAVKKAITSIAHTLLKIAYQVLSSGKPYEDLGADFYTRRESPEQRRACLLRQLEKLSPGCVVTITPAGAA

SEQ ID NO: 397126 - protein, 403 aa, unidentified
MRSFAGLDWGSVQHAVCVVDDAGAVRLRLEVAHDAEGLTAMFKQLAKLAPAAELPIAIERPSGILVDTLIAAGHPVVPIHPNVVKACRPRYRAAGGKHDLGDAYLLADVLRTDGHRFKSLSPQSDDIKALRALVRTRDDLVAERVSLANQLRSLLEGFWPGAAAVFADIDSPIALAFVRRYPTPQSAAHLGEKRLASFLAQERYSGRRPIPDLLVRLHEAAAAVCSETEAEAKGELVKALARILGTLVAEIVKLTSRIEHEVEQLPDGKLVMSFPRAGKINAAQILAELGDVRERFQTEDQLAAEAGVCPVTYESGKSRSVCFRWACNHRLRAAITTWADNSRHGSPWAAAVYARARGRGCDHPHAVRILARAWVRVLWRAWTSRSTYDPKLHGGAKGLPPAA

SEQ ID NO: 397127 - protein, 346 aa, unidentified
MNLYQTQHQFYCGIDLHANKMYACVVDSSGKKQLHQNFHTRDTDTFLSRIKPFTRDLVVGCESTFNWYWLCDLCEGRQIPFVLGHALYLKAIHGGKVKNDKVDSEKLAYLLRGGNFAVAYAYPNTWRSTRDLLRRRTHYVRRRGQTLTHITNVHHQYNLPATKKLQYESNRPGVAEGFSDPAVRYSIETDIEMLRSYDTRIRQLEKFLEQSAKVHDANNFFRLQTIPGVGRIIAMTMLYEIHDIRRFPQVGDFLSYARLVRGEHTSNGKSYGSPGKKIGNAYLKWAFSEAVPLLKRQSPQAKAFCQRIENKHGKARANSLLAVKLGRAVYFMLRRGDVFDLGRMIR

SEQ ID NO: 397128 - protein, 408 aa, unidentified
MNPLYVGIDVSSKSNVVYFMLPNGDKHSNFSVANSHDGSTQLVKRICSALTSESLDTVSIGLEATSVYCDNLVYFLREDASLASFNRKIHVLNPKQVNKFKGSYNDLPKNDWVDSFVIADCLRFGRINKEVYIGDYHYKALQNLTRARYFAVCNLTREKQRFMNVLFKKYSTMTQEKVFSDTFSTTALAVYDEFESAEALAYMALQELTAFIIEKGKNRFPDPDAVAKAIQKAARSSYRLPKTVNDSVNQVLSISITSMKALETQIKEFDKAIAAQMELLPNVLISIPGIGPVYSAGIMAEIGDINRFDNQAALSKYAGLAWTQHQSGDFEAQNTRLIRSGNRFLKYYLCEAAFSLVRCDKEYSNFYHLKYKEVNRYQHKRALALTARKFVRLVFTLLKDNRLYRPAE

SEQ ID NO: 397129 - protein, 428 aa, unidentified
MTNRQPIPTDALLVAIDIAKVRNEVLIEAPNHKRRRRLSVLNTRAEHDRLIETLRAYGKPVICAFEATGNYHRPIAWRLIEAGFDVRLVSSMALARTREALHNGWDKNDPRDAQVILQMLRIGATQRYHDPLRAGINDVQELSKTHEAIAKAKTEIQHRILTHYLPLYFPEIERFRGNSRSDWFFAFLDAFPTPASITALSKEAFIEAAWDVVGRKVSKERLLADIYETARTSIGLPLPIDAPAIRMFRMVIAEARSLIRQRNEIEDMADAMLRDSADYKALRKVPGIGPVIALTILAEGGDLRRFRHHRQFLKFCGLDLSTQQSGQHRGQTRLSKFGNARLRRTLWIAGQVAIRQRENGFRHKFERYIAKDRDNPDLRRKALTAITAKMARVVHAIIKSGSDYRPFVEGRVPGGRISFCGAVRAPKG

SEQ ID NO: 397130 - protein, 352 aa, unidentified
MEQSRTSWTGLTLFAGIDLHKAKWVVTVRTKETALKTFVTGADKQALLRSFQHLFPGAAIEAVYEAGCFGYHLAQFLNGNGVKTMIVAPHTIPVAPGQFVKTDVLDSRKLASELSKGSLTGIYLRPPEDLYDRSLLRKRRQLVKRRIQLQHQIASDLRFFGRDAEVTMRAYWSRWLVADLKAMQFPSEQYRAAFQMLIDDSLTIRSQIREVDRLLVAVADSDKHRAHIGLLRTIPGLGRLAALTFLVELGDIRRFSSAEKFVSYLGLSPSEYSSGEHIRKGALTGMGHSVLRALLVQVAWLAIKRDPVLLTKFERFCVGKSKCQAIIPIARSLAKRLRRVLLAQEPYVIGVA

SEQ ID NO: 397131 - protein, 340 aa, unidentified
MKKFFIGIDFSKLTLDASLVARNRSTPVGLGKFENSAQGFEALIAWILEKTQCTPDSWLICGEHTGLYSYGLAQCTLDKGIDFWLESALQIKLSKGMSREKTDPVDATAIARYAMRFEDRAKLYRPSSGILEEVKDLLSYRDRLIKVKGSLSKAAKELARVKQSSTSARFIDEDSQRLVAEMEKQVKSVEGRMNELLLQDASLMESYQLLTSIKGIGTVNALMVIVLTGNFTLFDTARKFGCYCGVVPFEHKSGTSVRGKTRVSHLANKQMKVLLTQAARTAVTYNPVLKAYFERKKKEGKHGRLIINNVRNKLIHTMFALVKKHQQYDINFKHPLAEAA

SEQ ID NO: 397132 - protein, 412 aa, unidentified
MDVVYTHCCGLDVHKKTVVACLITNTAGPEPLKTTRTFRTMTADLLALADWLQQAGCTHVAMESTGGYWRPVYNLLEGQFELLVVNAQHIKAVPGRKTDAKDAAWIAELLRHGLLRGSFIPSKPQRQLRELTRYRSTLVQERAQTLNRLQAVLEDANLKLASVVTDIYGVSARAMLEAILAGERDVETLADLARGRLRTKRDQLKDALEGRVTAHHSFLLTEHLRTLEYLDEAIERVSGEIDQRLTADQEAIALLDTIPGVGQRAAEILIAEIGTDMSRFPSAKHLASWAGMCPGNHESGGKRLSGKTSKGSRWLRQILVEIAHVASKTNNTYLAAQYKRIAARRGKKRALMAVGHTLLTIVSMMLTRRQPYQDLGAAYVDQREQHRVERRLVQRVERLGYKVSLQPQALAS

SEQ ID NO: 397133 - protein, 423 aa, unidentified
MSYRIAGIDVHKKMLAVVVSDVEVDGEYQFERVRYSSSPEHLRLLAEWLITQQVEEVVMESTAQYWKPVWGALERYWKPICQEREGAGPKSGTLHLAQAQSNRGRRGRKKDFPDAERLVKRLVADELVLSFVPDTEQRLWRTVTRRKYQLTRNHVRLQNQLEALLEECHIKLSSLVSDLLGASARRMLKALAEGETNPATLAAMADKNLRATQAQLCDALGACTELKPIYRRLLKMFLEELQFIDQQISKLDQELASLLSQHHDAVVHLAEIPGLGVDSAQQIIAEVGAGAATFPSAKQLSSWVGACPGEEESAEVSKSHRSPKGNRHMRRILNQAANASAKSKGTIFEIVYRRLVSRLGHNQTIGAIAHRLCRLIWIILHRGVRYEERGPSVNAKTRRHRTNRMIRELRNLGYRVEPLVNTV

SEQ ID NO: 397134 - protein, 422 aa, unidentified
MSKKKKSSLAGLQALFARVCGLDVHKKLVVACVRILNAKDGTVQSTLRKFGTMTADLLELRGWLAEQKVTHVAMESTGVYWQPVFNLLEGHFEVWVVNAQHIKKVAGRKTDMKDAEWIAQLLQCGLLRPSFVPDRQQRELRDLTRQQTKLVQQRNAVDNRIQKVLETANIKLGSVASDVLGVSGRKMIEALIAGEKDVTVLADLAQRQLRGKIPELERALEGELTEHHCFLLRQLLGQYDFLEKEIARVSERLGAVAPPSFRAAVEQLDAMAGVGERGARALLAETGTDMSRFPSHKHFASWAGRCPGNHESAGKRRSGKTPAANRHLDAVLTEMAHAAVRTKNSYFKAQYHRLAGRRGKKRAIGAVKHSLLVTVYFMLRDNKPYKDLGVDYFDKLNPQQRIRYHVRRLQELGQEVELKPAA

SEQ ID NO: 397135 - protein, 420 aa, unidentified
MKSKDNVEIVAFVSLDWADQKHAVALQESGSNQRHHFTLDHTPEALQGWIQSLRDRFGGRAVAIAVEQKRGALIYALMHVEFLHLYPVNPVTVAKMREAFHPSGAKDDPGDADLLLDILISHRHHLRVWTPDDALTRSIQLLTEDRRGVVDERTALTNQLTSALKIYFPQALDWFGELHTARACAFLQRWPTLQQLKQASLSSIRKFYKAQGYRGDDKLEQLLANIKKAQPLTQDSAVLLSCSMKVDILVQQIPLLTEAIHRYDEKIAALFEQHDDSTLFGSFPGAGPALAPRLLAAFGSNRDRFECASQMQELSGIAPVTEKSGQGIWIHWRLACSKFLRQTFHEFAGCSIVQSDWARACYDQLRKRGKSHHAALRALAFKWIRIMFRCWKNRTPYDEAVYCNSLKIRRSHLADELPAS

SEQ ID NO: 397136 - protein, 348 aa, unidentified
MTRLARIGIDTSKSVFQLHGVDEKEQVVLRKQLRRRQLLMFFAKLEPTLVGLEACGASHHWARELQKLGHLVVLIPPQYVKPYVGRNKNDRADAEAVCEAMSRPKVQERFVPIKSVEQSAAQMLLGVRESLLKRRTQLTNTIRGHAAEFGLVAAKGLDKIEPLLARIATDDSLPALTKEMFAVLGREYAELGPRIAKLDKQMLAFHRSNEVTRRLMEVPTIGPIGACLLVTKIVDPHAFRSGRRCAAWIGLTPKDHSSGGKQRLGSITRAGDERLRAVLVSGAMACIRHAKNRRSNSSPWLVELLKRKPPKVAAVALANKTARIAWKLMTSGERYDPNRSVARQGLAA

SEQ ID NO: 397137 - protein, 343 aa, unidentified
MTVYVGMDVHRKRSQVAIIDAAGAQQRNRNLANDPAKLVPVLGALPPGTPVAFEAAYGWGWLVDLLEELELEPHLVHPSRCKAIASARLKNDKVDAATLAQLLRADLLPEAWIAPQQVRDLRALLRHRASLVRLSTSCKNRIHAVLADRGIPDHSSLWTGPGRAWLADLELPATPRGIIQDCCGLLDALATPIARLEREITTLAKPDPRVQALMALPGVGKLTAMTLVAEIGDIARFPTARKLCAWAGLTPQVRNSDRKVRHGHITKQGSPWVRGILQEAAQTAKRHPMFASTYAQLARRRGSHIATTAIARRLLARSFHILTQLETAPAPEKASTGRARVSA

SEQ ID NO: 397138 - protein, 332 aa, unidentified
MFVGMDVHRNRTQVCVLDRKGNEVRNRNVANDRQALRKELAGLRRGTPVAFEAAYGTGWIAELLGDLGFEPHLAHPAGCRAIADAKLKNDRVDARTLANLLRTGYLAEAWLAPKEVREQRLLLRERARLVRIRTSAKNRIRAQIADEGVPAPNHGLWTKDGAAFLDALDLSPMHRWVVSDCQVLIEVLQSRITLLEAEIRRQAKPDKRVDALMAIPGIGLLSAMTLVAEIGDVTRFATSRKLCAWAGIIPSMRNSDRTLHHGHITRAGPAAVRHVLSEAAQTAIRKEPYHSDYLATKRRRGTGIALIRVARKLLTESFHALWALEDEQRQCS

SEQ ID NO: 397139 - protein, 382 aa, unidentified
MQTIDTINPTILLAIELSASTWLVAARVPGLEKPHLHRIDGGDTAALRALISSLQARAARGLDATIGVVCCFEAGRDGFWLHRLLTAHGVVCHVLEPTSILVNRRARRAKTDRLDAEGMLRVLAAYLRGDHQACSMVRVPTPEEEDAKRTHREREKLVQERLRIENRIEALLFTQGIRKRPSLRSWERDLAVLRTGDGREIPRHLRAELDRLRRRLVMTLELIREVEAERDQAAKTKPQDRACHKIAALSRIRGIGENFAAVLTREVFYRSFDNRRQIASYVGITPMPYQSGGMDRDRRISRAGNPRARTTMIQLAWLWLRYQPGSELAEWFRERVGTLAGRTRRIAIMAMARKLLIALWRYAETGVIPAGAEIRAETTVAA

SEQ ID NO: 397140 - protein, 313 aa, unidentified
MDQAEWVIGIDVSKASLDVAVLHTKQAFQVANDEAGWADLIGRLKGRAVKAIGLEPTGGYERGVASALCKAGLPVRLVNPYRARLYARSLGYLAKNDKIDAALIAQFAAKLPPRAPRRDPLAEQMAELVVARRQLTDDKVRLGNQLEQVRDAALRRMTSQRLRRIEAEILMLGKRLAQLVAGDAAAAAKDRLIQSFKGAGPVLSHTLLALAPEIAEADRREIAALIGLAPFDDDSGKRAGKRAIWGGRAEVRHVVYMAALAAARCNPTLKAFRQRLIAKGKSPKVAIIAVARRMLGIIVALLRTGQEWNPAHA

SEQ ID NO: 397141 - protein, 421 aa, unidentified
MFKIIKFNCCGLDVHKTWIYACIGITDSNFRTEYYEARFSSFPKDLRRLSSWLQEHKCEEVCMESSGKYWIPVFNVLEQTCKVTLAHPKYTKPQKGNKTDRKDARWICDLFMCGMIKPSFIPPPAIRHLRDLIRYRTKLTNMLTSEKNRALNCLTVSNMKLDDVFADVFGKSSRSITEYILAHPGEKFDVTPFVDRRCKTPIDVIQDAVDGAISPEQAVKLRECLNHIDELKAHKDRIEKEIFDLVEPFSGCLNLIRTVPGMDKNPMTAITILSEIGSDMSVFPTAKHLVSWAGCCPRNDRSAKHVKSTRISKAGSCLKPLLVQVANAVIKSDKHPEFHERYRRIKSHRGHKKAIIAVCKMFLTAIWNMLSTGEVYNPSGYLIQTPRPTPETKVLTQKQALELLRLRGYVIKDNPSEPSFA

SEQ ID NO: 397142 - protein, 343 aa, unidentified
MQVSTIGVDLAKNVFQVHGVDSAGKVVIIRQLRRKQVIDFFSKIPPCLVGMEACGTAHHWAREVSKLGHTVRLMPPSYVKGYVKRSKNDAADAAAICEAATRPSMRFVPIKSADQQALLMLHRTRDLLIRQRTQLINALRAHLAEFGLVAETGREGLAQLAAIITDESNREALPSAMKQALQAIVDQLAALELQIGTLDRAIHAHHRANDMSCRLETVPGIGVIGATAIASTVTDPSDFKSGRDFAAWIGLVPRQHSTGGKERLGGISKQGDRYLRRLLVIGATAVVRHARQHPQKHPWIMRLLAKKPAKLVAVAVANKMARIAWAIMAKGGYYRAPELAAAA

SEQ ID NO: 397143 - protein, 345 aa, unidentified
MPIVGGLDIHRKQITFDYLDTATGEVRRGQIAPADRAHLRAWLARFAGRDDVAFALEGCTGWRYVAEELATAGVAAHVAEPADTAFARGRKRHAKTDKTDARHLRVLLEQGRLPECWIPPAQILECRALLEAYHDLRREHTAWIERIHAVFFHQGAPRLGEGALRTDRGLAALRQAAAIHLSPAGQLQVATALDMLAAIEARMDTLRQQLLHAARHLAGARALQARLYGVGPLAGLAMTCWLGGAGRFSSSRKAVRFAGLDVTVYSSDGKRSPGHLSRQGPEILRWVAYEAGKTHARGSAPGHDYYAAVKDRTDGKIAALAQARKLIRQACHILAELGDDALTAA

SEQ ID NO: 397144 - protein, 343 aa, unidentified
MNQYIGLDVSLKDTAISIREDGKRIWRGKCPSDPNLLAQMIRKKAPRAQRVVFETGPLSTWFYHALTSEGLPAICIEARHAQKVLSETLNKTDANDADGLAQLAEAGFYKAVRVKSFDAMMTRTLVAAREQLLNISTQLGNQIRGLMKTFGLIIPKTKGRVFDGDVRKLLDGNNELAKIILPLLEAWHDIRKRAADLGRQLLIVARESEATKLLMTIPGIGAVTAVSYVTAIEDPGNFRTSRSVGAWLGLTTRRYQSGEVDCDGHISRRGDNRLRGLLYEAATALLTRTSARTESSLKSWGLKLRERLGFKRAAVAVARKLAVIMHSMLKTGEVFNASAGATI

SEQ ID NO: 397145 - protein, 305 aa, unidentified
MAQQLWIGIDVCAQWLDVATWPATENKRFPYTDAGLAALLAWLASRAVAGVAMEATGGIERRLAYVLADGGRAVRILNPKRVRDFASSITAAKNDRIDAMMIARFASVVPGAPLQRDASREALAEMVALRQLLSDHITALRNHGRLLRHPAMRAQIASQIKALRVRMQQIGRDIEAAIKASAPLAEQCALLRSMPGVGPVVSAAVLAWLPELGRLSPAKVAALVGVAPYDDDSGARSGKRHISGGRMDLRNLLYMAALVASRRNPVMQRFYQRLLARGKPAKVALVAVMHKMLNRLNAMVHTGQP

SEQ ID NO: 397146 - protein, 342 aa, unidentified
MEINTIGLDLAKSIFQVHAIDAAGTAVVRKALRRAQVVPFFAKLPRCLIGMEACGTSHHWARELARLGHEVRLMPPAYVKPYVKRGKTDAADAEAICEAVTRPSMRFVPVKSAEQQAALALHRTRDLLVKQRTQLVNMVRGLLAEFGIETARGLHHALSLAARLSAGDAPEVPALAQRVVKGLADQIGALQVQLDLLEKDLLAWHRSNELSQRLATIPGVGVISATALAASVTEPERFRSGRQFAASLGLTPLQNCSGGKERMGRISRMGDRYLRRLLVLGMTSLVRRARATPDSVDPRFVAMLQHKPVRVVTVAAANRTARVAWAIMTHGGTYRTPPAAAA

SEQ ID NO: 397147 - protein, 419 aa, unidentified
MAFKILRKNCCGLDIHKTWIFACIGITDSNGRTEYKQARFSSFSNGLRDLADWLSKYSCSGVCMESTGKYWIPVFNILEKTCWVTLAHPKYTKPQKGNKTDRKDAKWICDLYMCGMVKPSFIPPPDIRQLRDLMRYRVKLTNMLTGEKNRAQNCLTVSNLKLDDVFSDVFGKSSRSIIQYILEHPGEQFDVTPFIHRRCKHPVEEIQAAVDGVVSREQAAKLKECLLHIDQLNAHRERIEAEILRLAEPYPYQLELIRTVPGFAAAPLTAVALISEIGVDMSVFPSAKHLASWAGCCPRNDQSNKKVKSTRISRAGCYLKPLLVQIANAVIKSDRHPECRERYRRIKARRGHKKAIIAVCRMLLTAIWNVLSKLEPYSAKGYLADKLTEHSVVISKAEGLALLRKRGYIFKDELAVESG

SEQ ID NO: 397148 - protein, 328 aa, unidentified
MPSTQVGIDVAAKTLEVRLQEPSGEEEALEIPNEPKGHRMLIRRLTRRRGHARVVLEASGIYHLELALALHRANRVEVMVVNPRAARDFARASMQRSKTDTLDAAVLLEFVRRMPFQAWMPPSSEELELRTQARRLTSLTKTRTQEKNRRHATEYVGSQVVCHDIDLHVRYLDRRIIALEAKALDLIWRSPRLRKQLAHLTSVRGIGRSSAIRILGEICVLPKDMTPRQWVALAGLDPRILQSGVSLNAPARISRMGNRALRAALFLPALVATRYEPNVKAYYEKLLGRQKARLQAIVAVMRKLLHAIYGMLRTGTDFDGEKFYALGR

SEQ ID NO: 397149 - protein, 340 aa, unidentified
MVYGAIDLHMRSSQIRIVDEGGGVVRDRRVVTTRERLVAAFEGYGAMRILIEASTESEWVAQALEDAGHEVVVADPNFGPMYGTLRRCVKTDGRDTAALAEANRCGWFRPAHRVSRAQRTLRQQLGVRRQLVRLRTGLISHVRALLRQEGLRLPRGSSTTVAPRVNQLSMPEPLRAVLAPLVEVLQALTPVIGRTDRDLERQAATDPVTVRLQSVPGVGPIVALTYRATVDDVQRFPTAGHVSSSLGLVPREDSSAERRQRGHLTKVGSSEARAMLIQAAWSCWRSRSIRPTPLRTWTDALAARRGKRIAVVGLARRLSRILYALWRDETVFRSPVASAA

SEQ ID NO: 397150 - protein, 318 aa, unidentified
MRNAAGLDISKDTIDVAVIIGDSVQTKKYRNDETGIKQLQSWLQTFEDLTVCMEATGNYYEAAADYLAESFIVYVVNPLKISKYAESRFARTKTDKQDAKLIAEYCQTAKEKDLIHRQKPTDDEYRLNRLTAAYAQISQECTAMKNRCEAAKDREVRKIFKNIIEHLQKQLKTLKTQIQEQTKKPKYQTQIKRLETIPAIGKMTAAVLLRYLTSADFATSNKFAAFAGLNPQQKQSGTSVKGKEKLTRYGNRKLRTALFMPAMVAYRMKAFPAFIARLEDKNKPKKVIIAALMRKLAVIAYHVHKKGEDYDPTRYAAA

SEQ ID NO: 397151 - protein, 341 aa, unidentified
MSSVTVFVGLDYHQSGVQVCILNEAGDVLVNRKVPDDWQAIVALVASFGESVHAAVEACNGAANLADQLVEQAKWSVSLAHPGYVARIKQSPDKTDWGDARLLADLIRVGYLPKVWHAPDRVRELRRLVRYRQQLAARRRNTKLRIRALLRDHRVKITECNAWTKAWIDYVRETTELSGESRWIMNQHLDDLEHIIQKIKAAEARMKQAVTDDDLVKELLGKSGIGLITAVTIRAEIGRFDRFRNGKQLSRFCGLSPRNASSGQRQADAGIIKAGNPELRRVLMQSAQRLIRYDIHWSKLAAQLADRGKKKPVIVAAVANRWMRKLYHQMATYGLGYESRN

SEQ ID NO: 397152 - protein, 362 aa, unidentified
MLVDERTTVGLDVHARSVVAEAVDWSTGRVFSRRLVPAPDQVLAWVGGLPGPVAVTYEAGPTGFGLARACAAAGIRCVVVAPSKVERPPGDRVKTDRRDARRAARLLHIGEITGIRVPTEAEEDARDLFRARDDARVDVMRARHRCSKLLLRHGIVYSGGKTWNGVHEQWLRSQRFPLPGTQAAFEEAFDAVLTTTARRDRLDEAITAMAATPAWAPMVARLGAVRGIATLTGFGLAVEIGDWDRFTGASIGAYLGLVPCEFSSGPHRRQGSITKAGNTHARRLLVEAAWHHQRLLRPDSKAVTARRAGLPPAVRARGRAADQRLHHRWTTLAARGKEPGVIAVAVARELAGWCWSLATMND

SEQ ID NO: 397153 - protein, 351 aa, unidentified
MEHYAGIDVSLEQSSVCVVDSAGKIIREGRVASEPAALIGYFGSLGLTASRIGLEAGPLSQWLYTPMKKAGLAVELLETRHVHDAFKAMPVKSDRNDARGIAQLMRLGWFRPVHCKSIGAQELRAVLTARKLVQSKLRDVENSLRGILRGFGLKVGKTTAKSFAGRIRELVAGQANLEAIAQALLAVHAVLVREFNSVEKRVRIMAREHVQARLLMTTPAVGPIVALTYAGAIDDPARFKSSKQTGAHFGLTPKKYQSGETDITGRISKIGDAAVREALYQAAHVMLTKPVKGATELKSWAMRIARRAGMRKAKVALARKLAVVMHRMLADHKPFNPSATTAAVAITAAPA

SEQ ID NO: 397154 - protein, 410 aa, unidentified
MQTLVERGCGLDVHQATVVACLLIVLKNGQVQKQVRTFGTTTRELMGLREWLLSGGCTHVAMESTGVYWKPIYAILEGAFEIVVANAQHVKKVPGRKTDVKDAEWIADLLCHGLLRPSFVPPSPIRELRDLTRYRRKLVESRTAERNRLLKLLETANIKLASVATDVFGVSGLLMLHALVEGKATAQEMAELAKKQLRKKIPELELALEGKVEEHHRFLLRVQLRRLRTVEEDLGILEQRIQEKLKPYAAQFTLLQEIPGIDETLAAAIIAELGVDMGVFENVSQLSSWAGVCPGNNESAGKRRSSRIPKGNVYLKTALVEAANSAAKAKGTYLRDKFYRLKARRGYKRAAVAVGHKILVAIYHMLSHQVCYNELGDVYLDNLNKHHVTRNLVNRLERLGYAVTLQQKAA

SEQ ID NO: 397155 - protein, 361 aa, unidentified
MFEPGPKHRKPFWETAPVNHYAAIDVSLELSSVCIVDATGKVVRETKVETRPEALVKFFRDFAHPLTRVGLEAGPLSQWLYAGLTEAGFETTLMETRHDKAGLSATTVKTDRRDARGMAQLLRMGWFRPVHAKSPGSQEMRALLVARKQLQHKLRDIELSIRGILRGFGLKVGHVTDKSFEARIRKLVTGHAMLEQIAEAMLAARATLLNQFNKLHKAVLNIVRHDEVCRRFMTTPSVGAIVAITYKSALDDPGRIKKSRNAGPLFGLTPRRYQSGETDVTGGITRVGDEMVRTALYEAANVLLSRVTRFSALKRWGLEVAKRRGLKRAKVAVARKLAVILHRMWIDGSTFRWTKTEAAHA

SEQ ID NO: 397156 - protein, 325 aa, unidentified
MMEQGSVYVGIDVAKAWLDVGTWPQSESLRVGNDAAGAAQLVQRLLASNPRAVVLEASGGLEALVASELHAAGLTVAVVNPRQVREFARSLGRLAKTDRLDALVLAQFAQSAHSNGRLQPLEFQDEAQLELKALVARRRQLIGFLVAETNLRERAPKVVRRSIVQSIKGLKKALAEVEQQLRQVVQSAPAQQAKAKLMTAVPGVGPQLSVTLLAELPELGRLGRREIAALVGVAPHAHESGKFKGRRMIWGGRARVRTMLYMAALSAVRHNPVLRASYQGLLDRGKAKKLALVACMRKLLVILNAILRDQLPWNPSYLLDLQHSR

SEQ ID NO: 397157 - protein, 418 aa, unidentified
MSTEGNARPPQRYVALDIHKHYCVVAGVDRDGRILLQPVRVEHADLEKWLKKKLLSSDQVVIESTTNAWHVYDLLEPLVERAVVANPIKVKQIATARVKTDVRDTLILARLLAANLVPTVWVPPVHVRQMRQLLSQRRQLVETHTQILNRMHSVAHRHHLKHERGKRFNEKNTGWQKDGRLSQMEQFQLSLEMENKVYIEKQIERMSGVVRKLCHQKPWADDMTYLMQLPGFGVITAMTVLAAIGEIERFETPKHLASYSGLTPGLEQSGTKYRGKGITKEGRRELRWALVEAAQMAVRSDPILKMRFEALQRRMHRNQAIVAIARHLLELVWYVLVRRQPYRRFSHERIAYKYLTWSWQMDEAARDGLTRQQFARYYLMKLGIGHELTRIALDLKHPRRLASEAEVLAIHPELTQIE

SEQ ID NO: 397158 - protein, 343 aa, unidentified
MDHFGGLDVSVKESSVCIVDETGKIVREVKVASEPAALLAVLKSPTYHFKRIGLEAGPLSQWLFSALAEAGLPVICVETRHMRAVLKAQINKTDRNDARGIAQMMRAGLYRPVHVKTLRSQKLRMLLTHRKLLQSKAIAIENDLRATLRNFGLKVGVVGTVKFEARIKELVENLPDLVVLVEPLLIVRQVLREQLSILHRRLLAIVRDDDVCRRLMTVPGVGPVVALTYRATVDVPARFRNSKAVGAVFGLTPSKYQSGENDRTGGISRCGDEMMRAMLYEAAQILLVRSTKWSWLKAWAMKIARHRGLKKAIVALARRLAVIMHRIWVDGTEFRWTREAAAA

SEQ ID NO: 397159 - protein, 381 aa, unidentified
MSEMIVGLDPHKASNTIAVLDRDETLEMRRRFDNTAEGMVAMLDAVAGFTTRVWAVEGANGIGRSIAQRLVAAGETVLDVPAKLAARVRVYSTGHGNKTDRTDAVAIARAALHSKHLRMVRPDDENVALKLLSDRRHQLIASRTQSVCRLHRLIRELVPGGTPRALTAERAEALVNALDVADAAGLMRIELALDHIDDIKRFDRRIDQVTLKIHAAVNDSGTTLTRIYGVGPVGAGLILGEVGDVSRFPTRNHFASYTGTAPIAVSSGDHNRHRLSRSGNRQLNHAIHIASIAQIRYDTPGRAYYRRKLDEGKTRREALRCLKRRISDAVWRQLQLDRQLDQQQDQTWPRWPSSRGGHPSYRSPDTLRHDGQPMKPRTAGV

SEQ ID NO: 397160 - protein, 360 aa, unidentified
MDKHKYVALDVDSANIVAGVYDRKGVALMQCCLRNNGQVIREFFKTMTGTVQVTFEEGTQAVWLYELIRPLVAEVIVCNPRQNKLMKAGNKSDRIDVAKLGKLLRLGELRPVYQGPSAAQGLKQLVHGYEALVDDTTRVKNRLKALYRGRGLSCKGETIYGREQRQQWLAQLEMKELQSRATYLYEELDCVLRLRAEAEKVMCRAARKHEAYQWISSAPGLGAIRTAQLLATAITPHRFRGKRQFWPYCGLAVVTRSSSDYEWVDGGARRKRKPIQTRGLNQNHNRTMKVVFKGAAVSALRQHPEFQEFYQRLCAKGMRPEMAQLTVARKLAAIVLSLWKKGERYDSERLNQAAPGAGQQ

SEQ ID NO: 397161 - protein, 333 aa, unidentified
MVYAAIDIHKRVFQAAVLDAETGELVQERLPATREALADWATRWAEKLEAVALEATTGWRWVWRELSSRGFEVRLCDPGQARALRGSKRRPKTDRLDAAWLARLLAKEMLPTCWLPPEDIQYLRDRTRLRRALAQDRMRFAQRLHALLTHEGWPCSRGRLLSVSGQRWARSLALPPAALANVEAMFALIAVLDEQLAVIDAELRQRARSDPRLKALCTIFGVGPVLAAHLLAEIGQADRFRRARQVVRVAGLDPVVSESAETRRRGKLSKQGSPELRWALVEAAHHACQRRSPDHSLYLAGKERSGSKRAALTVARKIARRAHHVLAELEQAA

SEQ ID NO: 397162 - protein, 340 aa, unidentified
MGVFVGIDVSLENSAVCAVDEHGKLVKETKVASDPGALSDCIRGMPGVVEAIGIEAGPLSQWLHKSLTDLGLPVVLMETRQVKAALKAAPVKTDRRDAAGLARLLQMGWFRPVHCKSLSAQELRVLLGARRCVQGAAVNIELSIRGMLRNFGLRLGRIGKVSFEDRVRELTDGNKLIQLSIEPMLRARAALRSELVRLERMARDITREDPVCRLLMTMPGVGSVVALTVRSSIDDPGRFRRSKDVGPAIGLTPRRYQSGETDIVGGITKAGDLDMRTALYQAATVVIHRSKKQTWLRAWAERVVRRRGAKRAAVALARRMGVILHRMWVDNTEFQAVRQV

SEQ ID NO: 397163 - protein, 406 aa, unidentified
MVDGTWMASTPTPSIHGSPSTGTTWMAVRCNGILLDGVDAPPGGIAMCQTGDRNIAQETKEASMTEVSIIGVDLAKRFFQVHGAGTKGEVVFRKKLTRAQFLPFLRKQPTCTVAMEACATAHEWGRQIQKLGHRVRLIAPIYVKPFVKRQKNDANDAEAIAEAASRPTMRFVTVKSREQQSRAIVFRTRDLLVRQRTQLINALRGHLAEFGIVAPQGAVSVRKLAVALDIQGDALPEPVREVGKIYLDQIETSNLRIAELEKQVRRSAAESDVATRLQTMPGVGPITAMAFEAFAPAMETFKRGRDLAAWLGLTPRQNSTGGKSKLGRVSKMGQRDIRRLLIIGAASVIRWAIRKGAPKGSWLDRMLAKKPRMLVTVALANKMARGIWAMVTKKEDYREPTMAAAA

SEQ ID NO: 397164 - protein, 483 aa, unidentified
MKSKPRDKTNKTTNHPTQRHWHEMNRKQRREMTRQIQSEDLSLEVVHPDAAGIDIGNELHYVAVPLSRDTQPVRRFGCTTAELKAMADWLKQCRIRTVAMQSTGVYWIAVFDILEEAGLEVYLVNARDTKNLPGRKSDVQESQWLMKLHTYGLLRNSLRPSQEIRTMRTYWRQRNDLVQSAGWHIQRMQKAMTQMNIQLANVLSDVSGVTGQAIIKAILAGERDPHKLAEFRDPRVKASEEQVAQSLEGNWQQDLLFVLKQEQDGYEFCQKQMAECDRQLNQYLEHREDRSHGASLPEEKRKGRLKKKRPNKPRFDLREGLFRMTGTDLTRIDSIDVMTATTVLSETGYDMSKWETENHFVSWLRLCPDNRISGDKLIGKGRLPTNNRATIALKMAASTLRQSDTYLGAQFRRFRTKLGAPCAIKAMAAKLARLVYRMLRYDMKYVDQGAAFYELRHRQLQIKHLRAKAEKLGYRVTPIPAAA

SEQ ID NO: 397165 - protein, 525 aa, unidentified
MPYQVKANRRRQSKSKPRPRLSLQKANGVISPRVQKVGGERFAIVCVDPAKHRSEWMMADYFGNLFIEPQTVEHQASSFKLAIDLIRQTKQQHNIRDMIVVVERTGNYYLPPKRAFASGGFETRVVHPFATKQYRMPADPGNKTDETDLYAQHRAAVAGFGLCEYELEPPYRELQLRERHRRNLVEKAAAIACQIREHLHLAMPGYANLFDRLFERQTPLAIASQCDSPAKLLQLGQTKLSRYLQKRKIRHQVRTIDKALAWAAQVANNPLQDGPMHHAIWTDLYELYQHFRQQIFALESLLASDLVQTPYVRLLAISGINVVSAADLAGEMGPISCYANANAITGRAGLYPSRHQSDQTDHDSGSIIRHANRRLRCVLMRIADNLACHCNYYRGQADADLARGIDKRASRVKIANRFSRLILACVGGDQPMRHPCFQKPDSILEKLREFHYLHETPLDRVLADLETTVEQLPYNTCGREAAIVAKVLEKHTPRHRGGVAIGELLPAVLARLNIRTTEDENRDRS

SEQ ID NO: 397166 - protein, 376 aa, unidentified
MESQVSFNQVVSRGCGIDVHKKMLVATISGEGLNTETREFGTVTRSLTELKDWLLENRVTHVVMESTGVYWKPVYHVLEPSGLTVWIVNARHVKNVPGHKTDKQDSRWLCKLLLAGLLKPSYIPPREQRELRDLTRYRTKLVQDISSNKNRIIRILEDCNVKLSSVLSDTSGVTATRLIDKLCQGKEVTMGDIEEVYHKKIEATKEELFEACNGYITDHHIYLLGTIRGDNHHLESLIRDLDEKIKHALAPYENALERLREIPGLNRKSVEDLIAEIGLDMDVFPNENHLSSWVGVSPGNNESAGKKKRTHHPREQAGQIHPEPIGMGGVADKRHVLPRPVPSPGSPTRQEKGHCGCCTLHPQIGVSCLERRGPLR

SEQ ID NO: 397167 - protein, 315 aa, unidentified
MIQMKDKVKYLGVDCAKATFDSNLEDSSMTQSWENTPEGVDSFITWIKKHCGKVMVIVESTGGYERLLLRSLYKKTIAVARVDALRARRFAQSEGLRCKTDPIDAEMLTRFGREKNPALWQPPARSVEVLRQLVSRRRQISDMIKQEKTRLEHAEGFARKDILSMIASLKKRECKIEQRIEAHLQTDEQLYERYEKLMAPKGIGPVTAYTVLAFMPELDSITAKRASSLAGVAPYTQISGTYTGKAKTAGGRKEIRRPLHMAAKSAIRFNPTIRAFYLGLKKRGKEDRVAVVAVMRKLITLMHRIDNDPEFILST

SEQ ID NO: 397168 - protein, 372 aa, unidentified
MTSIIYVGMDVHTTNYTLCCYSMEDDRFFAEVQVEPEAKNILKYLARIEKQQSRDCRIVCGYEAGCLGYSLYHQLHAHGIDCVILAPTTMMTKPGKRIKTDRRDARLISKCLAFHTYSPVYIPTEVDDAVKEYIRMRDDANSALARVKQQIIAFCIRHGKIHDGKSYWTNKHLEWLSSLDLGNKILSEVLQEYLIRYYQLREQVDMYDMRINELAQAEPYRQKVEKLGCFRGIAAHTVLPFCVEVGDFRRFATAQQFASYLGLVPGECSSGDKQQYTGITKAGNSHLRKLLVETAQVFGRSATKSGKSVALKERQAKCDSLTVAYADKANARLKKKYFKIAMRSKVNIAKTAVAREMACFIWGMMTDNISCA

SEQ ID NO: 397169 - protein, 458 aa, unidentified
MKVRIIGIDLAVTAQHKAIVLEQADNAYVSKLHKFHSNPAEIDNVLAAAQEGATVDTQYQAVMEATGMSWFVVGQYLERQDVAVYRVNGQQVSELRRIYKRRAKSDRIDSRVLARLPLLYPERLHRCFFPSAQQISLQRACREVARLTEQITASKNRLLATDQFVWLGLSDILPPYEQAAFWIREQWYDPWRVCQAGEAEIAQAWQETSATQPADTSWIPLLLERAQKMIVLYGDPHRLDYDQLQASLQREQRRLLRTQQEVHHLRLKTVRPVYRKLHPQRHLESLRGVGQDSAAIYIAFIGDIARFPSLSEFRGWSGMIPYSNQSGYAEVKGLHITKSGPDLIKTTLFQNADVARLWDPQIAAIYYTQMMDFGKHHLQAVCTCATHLLDRIYAILKENRPYQLRDVDGTPLDKYQARRICREQYKVPEEVRRRNNQRARKARAEARLERKLRRRHRR

SEQ ID NO: 397170 - protein, 395 aa, unidentified
MRFVGIDIGAERHVVAIVDDSGAILQRPVSFGEEAAGYRRLRELLSDPADCRVAMEATGHYWRNLFAWLTNEGFSVALINPLRTRRFAEEELERTKTDKVDAVGIARFAAQKHPTPTELAEPAIDELRQLVRLRETTVQHLGDRVRNLHQAVDLTFPEFTRHVRGLDTELATAILSRYPTAAALREMSIPSLARLCCDGYRRVGSTLARRVIEAAKISIGRHHTEAYELQVRYACKDIIELRARERELKVEIEHRLKDHEVGKLLTTIDGVGTLTAACIIAETGDPACFRSAAALASYVGVVPRLHHSGKRKFSGKPAIPLGNARLRRALWMPVVVAVRHNPWLSAYYQRLRAAGKRPKVAMIAAMHKLLAAIYSVAKHRRPFVAKLPLSIVADT

SEQ ID NO: 397171 - protein, 408 aa, unidentified
MQVAHPVCCGIDVHKDTLTACLRCVDTNGQVRKERREFATTYTSLLTLSDWLVEQHCPIVAMESTGVYWKPVYHVLVGTVEVYIGNAHELRSRPGKKTDKRDAAWIAELLAHGLIQPSFVPPPEIGALRDVTRTRVAFVQTRSQSKNRVHKLLEDTNLKVGSVVSDLFGATGRRMLAALVAGERDPQVLASLALGALKHKRPQLELALTGQFTAHHGTLLGLLLELIEVLDRQIATLDQEIGALVAPLQAQIAQLDSIPGVDIIAARDILAEIGTDMSRFGDAARLASWAGVCPGNHESAGKRYRGKTRKGNRYLRRILVQCAWGARKTPTFLGRTFRRLEVRIGKKKAALAIAHKILVIVYHLLTLGTSYEEARYGQDNPRQEARERQRALKALERLGYTVTLERAA

SEQ ID NO: 397172 - protein, 320 aa, unidentified
MSPLSTPPTRVVGCDVGKTTITVFDSATGSCRDLPNRKPDLRRLARDLGPDTLVVCEATGGYEARLLEVMVSAEVPVHRADARKVKMFIRSLGTLGKSDAIDARALACYGAERWSRLPVWEQPDPVRDELQTLVLARMDLVKLLQAQKNRLAAPQAARVATTWRALAGEIRKQLRALEARIRALVSAHPVLMRDAQLARQLQGIADVTANALLALMPELGTLAGAQAASLAGVAPHPHESGRRVGYRKTRGGRPEVKRALFMAALSASRAEGPLRDFYRRLVARGQKPILAITAVMRKLIVILNARLRDARRTTIAAQLS

SEQ ID NO: 397173 - protein, 345 aa, unidentified
MTIVETRAVTGGVDTHLDVHVAAALDSIGGLLGVESFPTTVTGYSELLGWLAGFGPVERVGIEGTGSYGAGLARHLHAAGVAVVEVNRADRQSRRQQGKSDPLDAVSAARAAQSGKAAGASKGRDGMVEAIRTLMVTRRSARRHRTATINQIRALVSTAPDDLRARFAHHSTVSLVSESAGMRPRPGDTVGYATRIALRELGRRAVYLADEIDRVDALIAPLLAARAPSLLAVPGVGPDTAAILLIAAGDHPDRLRSEAAWAHLCGAAPIPASSGKITRRRLNPAGDRQANHALWRVVFSRMSFEPRTRAYVERRTDEGLSKLEIIRCLKRYVAREVYPHLLRGD

SEQ ID NO: 397174 - protein, 344 aa, unidentified
MEAYAGQQFVGIDLHRRRSVIVRTTASGEPLETVRISNDVDSLSKVMARAGESPEVVLEATYGWYWAADALADLGAMVHLAHPLGVKAFSYRRVKNDLRDATDLADLLRMGRLPQAWIAPPATRELRELVRHRAKLVAIRSGCKCEIHAVLAKCGIQVLMSDLFADAGTALLERLDAPAPYLARVGSLRRLIDDLDVEIDLFARLIRGRLAADPGYRAVQTIPGIGPTLGAVFVAEIGDVTRFPGPAQLASWAGLTPKHHESDTHVHRGRITKQGSRLVRWAAIESVQALGPANGAGRLKHRVGDRRGRNIGKTAAARQQLGYVYYALRDGHVRSLTRRPRVAA

SEQ ID NO: 397175 - protein, 318 aa, unidentified
MLNESFVGIDVSKDWLDVGWEPAQQTERLVHDEVAMVGLCERLVQERPCLIVLEATGGLETHLASALAAAGLPVAVVNPRQVRDYARACGRLAKTDRIDALVLAAFARAIRPQVRAPKDDETLELGALLARRRQLIDMRVQEKLRLERASPVQRDSIKEHIAWLTERIARLDTDLTHRLRSSSLWRDKEDLLKAIPGVGTITRVTLIALLPELGKLNRREIAALVGVAPFNRDSGQHRGERVIWGGRAQVRRVLYMAAVAAIRSNPVIRAFYQRLRAQGKPGKVALVACMRKLLTIMNAMLKHNTPWNPNALDLEHSC

SEQ ID NO: 397176 - protein, 444 aa, unidentified
MARKRSKQRLRVVHPQCAGIDIGSREHWVAVDPDQSEEPVRCFSAFTDDLQALADWLESLNVRVVAMEATGVYWIPLFEVLDARGFEVHLVNARATRQVSGRKSDVLDCQWIWQLMSYGLLRGAFRPRDEVCALRSLVRQRAGKVREHSRCICHMQKALTQMNIQLDNVVSDLMGKTGRTIVRAIIAGERDPQVLAKHRDRRLRADEETVARALRGNWRSEHLFALAQAIEHYDFLAQQIGACDQAIAEALARLPSLCEHTEVPIKSIRSANRSAAAQRHLHQALQQVMGVDLTAIPTLGVDTVLVLAAEIGPDLSRFPSSGHFCSWLALAPPTRISGGKPLPGSAPKVINRAGQALRHAASTARRSESFIGASHRARLARMDAAKAIKATAHQLARLIYAMLTKGQPYVEQGIEAFELRRQDRQLRALQRKAHKLGLTLVEAA

SEQ ID NO: 397177 - protein, 456 aa, unidentified
MAKQASKKRDREIKQLNPHAAGIDIGSQKHYVAVPTDRDNEPVRNFGCLTPDLHQMAKWLKSCGIETIAMESTGVYWVPVVAVLESYGFDVKLVDAYKVKNVPGRKTDVKDCQWLAELHRFGLLSGAFRPDKQIQVLRSYWRHRSTLVEACSTQIHLMQKALEQMNIQLHKVITDITGVTGMKIIRAIVAGERDAVKLAGMKHPLIKSSTETIAKALTGEYRQEHLFTLKQALEIYDVYQNKIADCDRQIEEYMKTFEHKAEANDLDSKSSKNNRTKRRKNQPNFDLRTRLFEMTGVDLTQIDGIETMTAQTVISECGFDMSVFPTEKHFTSWLGLCPNNQITGGKVRKRSTRKVQNRAARALRLAAQSLHSSKSALGAFYRRMRARLGAPKAITATAHKLAKLVYRMLKYGMDYVDSGQQYYEDQYRERVIKNLTKRAREMGYVVVCTNTGELVS

SEQ ID NO: 397178 - protein, 459 aa, unidentified
MKKKKRKRTKGKEEARPFEGLSKVNQNAAGVDIGATEIVACVSDGDEVQLVKAFGNYTVDLHATCEWFRKHKIKTVAMESTGVYWIPLFEELERQGFECLLISSRSLRKVAGQKTDVEDAQWIQTLHSYGLLKGSFRPQADLVALRTLLRHRAQLLEHRAPHIQHMQKALLQMNIQLSQAVTDVMGVTGQKIIRAMVAGMRKPEELATFREPGCKHSREEIAKALTGTWREEHLYVLMQSLELYDFYTEKIEACDAEINRQYGMTRSDWGDGELPVVPDKKRHAHSKNAPKESREIRKHLYRLNGVDLSLVDGMGVSLAQTVTMEVGSNVGEKFPTEKHFCSWLGLAPKHDISGGKVLNNKTLKTKNRAGQAFRMAANSVKKADCPFGVLYRRLRSRLGPAQATVATAHAIARVVYKMLTYKVEYDPLSVNEYQKQYEEQQVKYMKKRAAKFGYQLVPA

SEQ ID NO: 397179 - protein, 391 aa, unidentified
MFYLGIDVGRYHHAAALVDPRGATVALLPQFPATAEGLLTLRAFVHRHLPPEEQLRVGIEATGPYWQPVARWLSLQGWPCVVDNPIKTSSLRNYGVRGAKTDRIDAVLIAQALRWEDQAPRERLHPSALELRQLTRLHTSLVKDRTRATLRIDSLLSSLFPELPPLLPKKRSSPTTLALLEAAPSPAKILALGPNALTALLRRASRGKLGQARARRILDAAASSVGVPSPAAEIALALLLAQVRLLNEQIDSLDKHIAHAYSHLDLPLHTLPGVGVLLAAILAAELGSARRFARPQQMVAFAGIDPKLRQSGSLQGQVRMSKRGSRHLRRAIYLACQKAVRTDAQFKALYERHLARSKPHRRALGAVMNHFVHVLFAIWRDNRPYVPLTSS

SEQ ID NO: 397180 - protein, 485 aa, unidentified
MWKGDDAAMLAESHDEEQIIARVAALDIGKAELVCCVRLPAPRGRRKRLQEVSTHSTMTRSLTELANRLVELRVQRVVMEATSDYWKPVFYLLEAHGLDPWLVNARDVKHLPGRPKSDVIDAVWLCKLAERQMLRPSFVPPVPIRRLRDLTRYRVDLVAARTAEKNRVEKLLEDAGIKLSVVASDIFGVSGRAMMAALIAGERDPQVLAQLARARMRAKIARLEDAFDGHFDDHHRFLLARMLDRIDSTNADIAALDEQIQAHLAPFAAAAERLDEIPGIGAVAAAVIIAEVGVDMSRFPTAAHLCSWAKFSPGLHSSAGKTKGNASTGHGNRYLASILGEAALVAGGTNTFLGQRYRRIARRRGKKRALVAVGRSILVIVWHLLADDDARFTDLGADHFTKHINPDTKRRSHIRQLEALGYTVTLTRPPEPPPTSTPDQRRPVNPTRPHPTAGHHHFRIRWSGRCGPPTVKECRAIRPGALTRG

SEQ ID NO: 397181 - protein, 389 aa, unidentified
MIYVGIDVAKDKHDCCILGSEADNLYPVFTIPNNKTGFDELYEKIFSVTDDRTEIKVGLEATGHYSLNLLGSLIDKGLPTYVINPLHTNLYRKGLSLRKTKTDKVDASSIAMMLMTDKTLKPYSDTSYHSEELKSLTRYRFDKVQERAKLKSSVARLVNILFPELEKLVPSLHMASVYALLSEFPGASLIADCHLTHLKNLLETASKGRYGRDMAIIIRDAARGSIGSVMPAKSMELKHTIHLIEVMTDEIDEIESSIKSIMDASGSPITTIPGINYRMGAMILAEVGDFSKFSNADQILAFAGLSPSTYQSGQLESSYSHMEKRGSRYLRYALFNATKYVCHWDEEFGQYLSKKIGEGKHYNVAVSHAAKKLIRTIYRMELTGEAYRK

SEQ ID NO: 397182 - protein, 408 aa, unidentified
MQVLYTRCAGLDVHKDSIVACVRCVSPPMHQEVRSFGTTTSELLALADWLAEHSCTHVAMEATGVYWKPVWHVLEGEFELVLANAAHIRNVPGRKTDVNDAMWIADLLAHGLIRASFVPPQAIQQLRDLTRTRKQLVREVSQHSLRIQKVLEDANLKLGSVLSDVLGKSGRAMLDAIVAGQTDPAALAALAQGTARNKSAELREALRGRITEHHRTMLRLHLQVVDALQRTLAELDAAVGKALAPIRQRARLLTTMPGISDLTANVVLAEIGVDMSRFPTAGQLVSWAGLCPRSDESAGKRRSTRVRKSGTWIKTTLVTAAWAAVRVKTSYLRAQFLRIKARRGAKKAILAVAASMLTAAYHMLRDGVEYTDLGADFLDRQDRSKTIRRLLKRLHDLGFDVPVAAHAA

SEQ ID NO: 397183 - protein, 315 aa, unidentified
MIVGIDISKDSFDTSWMESGKEVHKKYDYTESGIQLFLDDTPEDALFLMEATGVYHTYLALKLYESKRQVSVCNPLVIKRYSQMKLIRAKTDKADARLVRMFGEENKASVWSPNSEEINELKQAHGWLNDQIQERTRLLNRQEAHHHQAQKSAFVDKQMKRQFKHLNQQIKECEKHLEVVVKKYFADLYSRLMTIPSIGPKTALELIIITGGFSRFEDIKSLSAYVGVSPTNHDSGTSVKGKGCIAKMGNGRIRQLLYICSWTAKTCNPSCKELNARMKEKGKPAKVINIAIAHKLLRQAFAIATNNVEYSVSYS

SEQ ID NO: 397184 - protein, 408 aa, unidentified
MRIIGLDIHRAFAEVAALDDGVYRRLGRVGMTRDHLEAFAATLRPTDHVVVEATGNATAVLEILASRVERVAVANPFQVHLIARAKTKTDKIDARVLAQLYAAGFLPEVWIPDEATQARRRQVTRRNQLVKSRVRLKSIVQSILHANLVPRCPHADLFGGKGRSWLRAQKLPADERAAIERHLADYDRQTEAQTEVERDIAGVALDDANVTRLMTIPGIDMVVAVGVMAAIGRADRFASPEKLVAYLGLNPSVRQSGDGPAHHGRISKRGRSHARHLLVEAAWQTVRSPGPMRAFYERVRARRGTHVAAVAVARKLVVLIWHMLSRGEDYAWGRPALLARKMRSLELAAGHESRRGQKGRAYDYNHPELRHADRQRAERAEQAYRRLTAYWRRSGKRADAGAADGAQH

SEQ ID NO: 397185 - protein, 367 aa, unidentified
MSSIAHQGFVHLGMDVSKDSISVAILPPNRDIAAVERIFHDEESVRRLIKRLGRPNSLWACYEAGPTGYELQRLLSSLRVRCDVVAPSLIPKGSGDRVKTDRRDARRLAGLHRAGELTPIAIPSPGQEAVRDLCRTRGDMVEDLTRARNRIQGFLLRHSVVWRGGSTWTQRHERWLATRSFDDPALATTYAHYLSTVRLRDSALEAVERDLEAWCGTSPFGDQVGRLAAYRGVTRIGALCLAAEVFDWRRFPRARTFMSFTGLVPSEKSTGQSQHRGSITRAGNAHLRAQLCEAAWAYQHHPSVGAGIRQRQVGAPPATVARSWKAQSRLSSRFRQLCAHKNVRSVVAAAIARELAGFLWAEMVAEN

SEQ ID NO: 397186 - protein, 360 aa, unidentified
MSVTEVKPLSFKDQDFYIGIDVHKKQWTISVITMNMLVVKNLSIEPFPKALLNYMQRRFPEGNYYAAYEAGFCGFWIARQLKALGLNCQVIHPADVPTSQKERLGKNDRIDSIKIARSLSSNRLTAIYIPERLAEEYRYLNRYRKRLVQDQTRIQNRIKSTLAYFGFAIPLAYRNRRWSGAFIQWLSTVEFESEFGKIAFEELLDQLQQTRSRISRVLKKIRQLAKEVSPFNIIVPLLQSVPGIGFIGAMILATEIIDMRRFKTLEALAALVGLIPTIQSSDEKEKNLGISQRRNQYLRTLLIEAAWIAVKVDPALLMKFKDLCCRMNKNKAIVRIAKILLNRIRRVWNTQTPYVKAMVA

SEQ ID NO: 397187 - protein, 407 aa, unidentified
MVVADVEVEDEYQFERRWYGSNPEQLQVLAEWLIQQQVEEVVMESTAQYWKPVWGALEQYWKPSCEKREGAGRMSGTLHLAQALSNRGRRGRKKDFRDAERLLKRLVSQELTLSFVPHAEQRLWRTVTRTKYQLRRNKVRLHNQLEALLEEAHIKLSSLVSDLLGASARRMLQALAEGETDPAALAALADQRLRATSAQLRDALGACTELNPIYRRLVKMALEELQRIEQQIGQLDQEMASLLRQHQDAVQRLAEVPGLGVDSAQQIIAEVGAKAATFASAKNLSSWVGACPGEEESAGVNSSPRSPKGNRHMRRLLNQAANAAVKRKGSIFEMVYRRLVPRLGHNKTIGAIAHRICQLIWMILHKGVRYEERGPAVCEQSKRVRTGRMIRTLRKLGYRVELQADPA

SEQ ID NO: 397188 - protein, 323 aa, unidentified
MSTKATKKRRSFIGIDVSKKLLEVGVHQSDYHFRCPNDPKNFPALITELISLRPARILLEATGGLERALLQALHAAGLPVVVVNPRQVRDFAKALGLLAKTDRLDARVLAHFAAATQPAIRPVKAQQETELDALMGRRTQLSEMLTQEKNRRGSAATKATRDDIEEHIEWLEDRIKELDEQLKKQLECSAIWQQKDQILQSVTGIGFVTSLALLADCPELGQLNRHQIAKLAGVAPLNRDSGQQRGTRHIYGGRAQLRCKLYMATLAAIRFNPVIKSFYQRLLTKDKPKKVAIVACMRKLLVIVNVMIRENQLWNVEAHQLSA

SEQ ID NO: 397189 - protein, 301 aa, unidentified
MEHYVGLDVSLKRTSICVVNHTGSVVRGGVVDSDPEAIASFVRSNAPGAVRIGLETGATATWLWNELKRLGLPVICIDARHAKAVLKMQINKSDRNDAAGIARIMQTGWFKEVRVKDLDSHAVRALLASRALLVKIKRDLENQVRGLLKNLGLVISRATFNVFSARAGELIEDRPDLVAAIGPLLEERKAIEQQVRDLDRKVLKLARHDVQVRRFMTATGVGPITALCFKATIDDPTRFRRSRSVGAYVGLTTRRHASGEVDWSGRISKCGDAMLRTYLFEAANVLLTRVPKWSALKAWGA

SEQ ID NO: 397190 - protein, 412 aa, unidentified
MQVLHQTCAGMDVHKKDVKVCLVTRDSQGQRQEEVRTFRTMTHDLLAMRAWLQTHGCTLIAMESTGVYWKPIFNLLEGDFTVLLVNPAHIKQVPGRKTDVKDCRWVAELLEHGLLRGSFIPPIEIRDLRDLTRYRRQLVNTHSAEVNRLQKVLEDANIKLASVATDVMGVSGRAILRALLAGVVNPEVLAELAKGRLRKKKPDLQAALLGRFRPHHTQLLTHILAHIEFLEESIAECEAQLEALCRPFAEVIALLDTIPGVSQRTAQDVVAEIGVDMAWFPSAKHLCSWAKVSPGNNESAGKRKSGRTGNGNKWLRAVLVECAHAAGHTKGTYLGTKFRRFASRKGKKRAAVMVAHRILEAAYFILRDKVPYRELGDQYLDAHHREHLIRHHVRRLESLGLHIDIRELPLTA

SEQ ID NO: 397191 - protein, 316 aa, unidentified
MSQASGPYVGIDVSKEALEIAVGPEGEAWSVPYDRDGLREVVQRLRAVKPALIVMEASGGYERRLLERLCAEGLPVARVNPRRVRSFARATGLLAKTDRLDARILARFGEAVKPRPYTPPPKEQQILQSLVRRRRQLLEMRTAEISRLDTAPDCIRGQIEEHIRWLEKEVERIEKEIDGWIDRVPEWKEKVKIAESIQGIGRVTAATVVAEVPELGKVNRKEIASLTGYAPMSNESGQRRGKRRIQGGRPLVRSVVYMATLSAIRCNPVIRRRYQELLARGKEKKVALTACARYLLVILNAMIRDHQPWNPSLCAA

SEQ ID NO: 397192 - protein, 372 aa, unidentified
MNYNTVYVGMDVHKESFTLCAYTIEEERGSYPRKTPADYKEVLKYLEFLRTVYGNNVNFVCGYEAGCLGYTLYHHLTDRNVNCVILAPTTMLEQRGRKRVKTDKRDAEIIGRCLAQHNYSPVHVPSASDEEVKEFLRMRSDHKQALKKVKQQILAFCLRHNYRYDKGSHWTIAHLQWLKALEPEALYKEILDEYMLTYTVLSDKIERLDERIEELASKDEYREAVKRLCCFIGIKTNIALSVLVEVGDFNRFATAEKFASYIGLVPGENSSGDDQTRLGITKAGNQHIRMLLTEAAQCYAKGNIGFKSKALKARQSGNPTQVIACADKANERLRRRYYKMVLNKNKKANIAKTAIARELACFMWGMMTDRIA

SEQ ID NO: 397193 - protein, 438 aa, unidentified
MSNKVIFNLDELFISVGIDVGADFSWMSIALPNQQFVGKPYKILHNSIDSLTTAVSKIKEAEELYSLESRIFLESTGIYHYPLFCYLRDKGFNCSVINPIITKNSTNINIRKVHNDRFDSKKAALVGLKPDLKVSLMPSDLALNCRNLCREYYDLMNNRGAYVNKLQGELRMAFPQYLGIFSKVTINTSLTLLETYTSPSAFLKADKQEIIDIIKSTARFGLTYAQNKYNAIIQAATDANQFGYIIDSNIKRIRLYISFIRKYDEEINNILESLHELVDANEDADFVKQIHLIETFKGAGFLSAVSIMGEIGDFSAFSKPKQLFAYFGLDPAVKQSGKFEGTKVQMSKRGSAIARRVIHTLTLQSISISRNGEAKNPVLREYYLKKCDSKPKLVAMGAVSHKVCNMIFAILRDNKPFKIIAPQEHIKQYNAAKCDIAA

SEQ ID NO: 397194 - protein, 316 aa, unidentified
MGGGEVYVGIDVSKERLDVAVRPSGEFFSEANDKRAVGRLVKRLQPLDCTRVVVEATGGYEALMVAGLLAAGLPVVVVNPRWVRDFAKSMGRLEKTDRIDAAVLALYAERAELKVQQLPDEATRRLRELCARRMDLLEMLDTERNRLEHASSAVRSQIVSHIDYLRKRLKRIERDIDGAVRSSELWRHQAQLMDSVPGVGPILRASALAWLPELGQLNRAEAAKLVGIAPLPDDSGKTRGYRRIAGGRGPLRKVLFMATMGAMLHNPHLRAYYDRLRARGKLHKVALVATMRKLLLILNPIIKTDTPWSDPCPENA

SEQ ID NO: 397195 - protein, 410 aa, unidentified
MKSAVITAVGVDVSKSKSTVAVRRPGGEIVMHSFDVRHTNSDLKKLVSTLKKLGGDIRVVMEHTSMYWRPIALTLKKAGFFVSAVNAMLIHDFSDNSIRKLKTDRADALKIANYALTFWDTLPLLNDEEETRLLLKMQSRANERITATTTVLRNGLIALADQTFAGVNLAFDPNTKNTDGHEKWVDFFLRYWHRDCVCQYSMEVFTESDRGWCKRKNYKFRTATAHKIYIMAQECVATLPKCESTKTLIGQACKSVNAVCEARHNTQLEMQRLAALLPEYEIVMQMEGAGPVTGPALMAEIGDVRRFKNKKALVAFAGIDAPPFQSGAFESKSRHVSKRGSPHLRRTIFLVSNIILTLSNPENAVFCFMGKMLRGKTLLCLYCCRKRKVLAHLLCSRERVPSLSSSSGCL

SEQ ID NO: 397196 - protein, 448 aa, unidentified
MFKRLSLIVWQFSQWLLIYERSLTMKVSYQTCCGVDVHKSFLVATIVKNTGGIEPSYQKKRFSTFNNSILEFKQWLLDNDCHDVCMESTGKYWVPVFNLLEDDINVVIANPKWVKAVKGNKDDTKDSKWIGDLFRLGLVRGSYVPCKKIRILREYTRYRYKLISCRSSEKNRYQNALTVCNVALDSVVSDIFGKSSTSIIDYLLEQSGTSINHEEIASKLLRSLKSKEDAVIESVEGYQMTDAQKYRMRLVRAHMDYITAEINDVDKMMENMISSNPDFENAVQFLCTIPGVKRDSAITIISEIGTDMSQFSSSKRLCCWAGLTPGSNESAGKKKSVRITRAGVYLKPALVQCAHAAVKSDKSPYYKKKYDSLVKRRGKKRAIIAIARMILTAIYQMMSTGEQWNPSDLYKIDMPVALVEKQKAKAIKQAKKLLQREGLLPPDEPLAS

SEQ ID NO: 397197 - protein, 401 aa, unidentified
MPSLWVGIDAGKRKHHCVVLDAEGKVLVSKAALNDEAALLDIIGTILSLAGEDGVRWAIDLNAGGAALPLALLAAHGQEVVYIPGRVIHHAAATYRGDGKTDAKDARIIADQARIRTDLQPVRELDPVSVDLRLLTARRLDLIHDRVRSINRLRATLLEYFPALEAAFDYSKHTAALTILMKYATPPALRRLGRVRLARWLKARCCRNSAHVADRAVTAAEAQHTELPSQTVGAKLVGELAQQIIKLDSAIGIADGEIATRLREHPSGELLVSIPGFGVILASTFIARTGGDLAGFDSPDQLASAAGLAPVPRDSGRVTGNLHRPRRFDRLLLRTCYLAAHSSLKNSPASKAYYRRKRSEGKSHKQALIALARRRTNVIWAILRDHTPYQEPPGKTDQLTA

SEQ ID NO: 397198 - protein, 384 aa, unidentified
MYKHNILFIGLDTHKVSTEVAHVEDQRGAKPVHYGKINTTKAAITKLARQYQSKYPHATLHFVYEAGPCGYWIYRLLTSLGHCCSVVAPSLIPKKPGDQVKTDKRDALKLAKLLKDEELTPIYVPESEDEAVRDLSRARETAMTDLKDAKYQLKALFLRNNIICKVNDNWSAQHLRWLTELVLAHHSQQTVLQEMIQTISERIKREKRLANELYHQVKQWRFYPVVKALQALRGVRLLIAAGVVAELGDLRRFDHPRKLMSYLGLVSKEHSSGDKRRLGRITKCGNGRARRLLVQGAHTYKHKANISTELQKRQEGLPSAITDIAWQAQLRLCRRYNRLMSRGKHRNVVVIAIAREMAAYIWAIAREVVISLVNPRLRVSRVPA

SEQ ID NO: 397199 - protein, 359 aa, unidentified
MTDGSRERPNMTAGLDIGDKHSYLCLLGTASGEVMEEGRLRTTPEAFRRRFASEEPMRIAIEAGTHSPWVSRVLEECGHEVLVANARKLRLIYANKRKTDEIDAENLARLARLDPKLLYPLKHRGEDSQAHMAIIRSRQALIGCRTQLVNHVRGAVKSFGGRLPKCPAVSFHNKAPEHIPETLRPALVPILETISSLTRRIRDYDRQLETISKERYPETDLLRQIEGIGPLTALTFVLTLEDPYRFEKSRSVGAYLGLVPATAQSGERDPQKRISKEGDEMLRKLLVGSAHYILGPFGSDSDLRRHGEKIASRGGKNAKKRAVVAVTRKLSVLLHSLWMSGELYEPLRNTHRSSGGRAA

SEQ ID NO: 397200 - protein, 359 aa, unidentified
MRVVAGVDCHKSSHTAVFLDAVGQIIDRMTFPTTEDGYERALTVGERLGCTDWGLEGAGCYGYAFSVFARAHGATVLEVPGVLTKRHRRHSSRRGKSDETDAHAIAEVVLREAERLSCFHPSVLQRALRLRYDRRDRLVQERTRAVNRLRMAAVLIGVVELPRDLTSRKAASLVSASASRLRDEVRLHAAASAVVDDLQDAAEEILRLTEKIRAAERQLKALTTEISSELISVHGVSSVVAAGLMGHAGDLRNYRNAGAFAARCGAAPVPCSSGRHVAVRVNTGGDRQLNRLLHVIAVAQVATTAHPGRHYYERKRAEGKTHLAAMRCLKRQLATVVYYRLSAIQARLAAADHSGEDAA

SEQ ID NO: 397201 - protein, 347 aa, unidentified
MLHVGLDLSRTRLDVHAMDEAGASVAVTTAAPDAGGLASLAYRLGEFGQPVTAVIESMNGARFIHDQLELRGWTVEIADAVKVKGFAPLACKTDKIDAWVLAELSRRDLVPAIWLPSPAVRANRERARWRLHLVRHRTALKNRIHATLLAFGHPCPVSDLFGAAGRRLLDGLGLPEPWAGDVVAALRLIDILDGEIDDCEAALRREGAEHRYVPTLMTAPGIGWVLGYTIAAEIGDITRFPTAKKLVGYTGLCPSVDQSGGHDWRGSLAKNGPKYLRWALIEGATHAARHPVYRNRYQRTKTRLGRQRGPSVARVDIARKLTEAIWHMLTTNKPFAPAGATTTALAA

SEQ ID NO: 397202 - protein, 329 aa, unidentified
MSALVCGLDVHKDSTYATILDPSGKIVNQMRMNNERVLSYLSNFNVGKVAMESSNQVASLYRKLESKGYSVVVSHPKKTRYIAEAKIKSDRVDSRAIAELARLDALPLAYMPDKEISMLREQVRRRAFLVRERVKLRVKIKSILTYEGIRWPSDTGLFTVKGVEWLHGLCFEPVESYLRVLKPLDDEIRLVSKQLRGLAGKDEEVKLLMTVPGIGYYSALLVKSEIGDVNRFPFGDRLCSYAGLVPSTHASGNTVRHGGITKEGSRWLRWVMVEAAQTHVHKYDTSITRVYNRIAERRGRRSAVVAAAHKLLLVCYSVLKNKRAYYDQA

SEQ ID NO: 397203 - protein, 415 aa, unidentified
MKELYRCVCGLDVHKKVIVACVRRIGESGRVYSEVRKFATMTANLEALLRWLQSEGVTHVAMESTGVFWKPVYNILEGHFEQVMVVNAQHMKRVPGRKTDVTDSEWIAQLLQCGLLKPSFVPDRMLRDLRDLTRSRTKLTQQQAAVANRLHKVLEDANIKLGAVASDILGVSGRHMIEAIIAGQEDASELAELARRRLRGKIPELRVALQGRVTDHHRFQLKMLLAQYDFLTAQIEEISQRINAVSPPLFKQSVELLATSLPGVQQRSAEAVLAETGTNMDQFPTSKNLNSWAAICPGNHESAGKSKGGKTRKGNRWLRAALGQMAMAASKCKQTYFRAQHHRIAARRGKKRSLVAVQHSLLTAIFHMIKHQIPYAELGEDFFERRNIDGLTRYHVDRLQRLGYKVDLSPVQEAA

SEQ ID NO: 397204 - protein, 359 aa, unidentified
MQTQSNKIDFNGQNIYVGFDVHLKSWTVTIMTEKLTHKTFSQAPKPEVLFNYLTKTFPGGTYHSAYEAGFCGYWIHNKLSEFGIKSMVVNPADIPTTGKEKVMKTDPRDSNKIARSLRSGDLIPIHVPSIRTLEDRTLVRTRATLVKDMTRYKNRIKSFLYYHGIEFPEAFGKSQTHWSNRFNKWLEDIEMTEISGKDSLNALVGQSKHMRASILTVTKQIKELAKTDRYKKPLELLRSIPGIGLLTAMIILTEIETINRFANIDQLCGFIGLVPSCSTSGDNEVIGDITPRGHSILRSAIIESSWIAARRDPALNKSYHDYCRRMEPNKAIIRIARKVTSRISFVLKNDQPYVYSVVR

SEQ ID NO: 397205 - protein, 514 aa, unidentified
MSEGTAQPPFSRLCPRLLRKHSAWLIRHIPLTQNFHPQPLAPAKKADWVHAHCARVRSPYAAQDKPFASGFTNPHRNGGDIMLKLNYMSTLFVGIDVSSKTNAVYAMDFEENKYISSSFGNNQPGADKLVNMIAECMHKHKNLNTILIVLESTSVYSVHISNFLASSEVLMPYKPYVFCVNPKAASNYRKSYIGMEKTDPTDAYLIADFGRVGRTKKLEPWRGGQFISLKRLTRHRMHLSECITREKTYMVSNLYLKFSELQLLEGDDKPFGSLYGATSSAVLTEFLSPQEIIDMPEEDLLTFLAGKSRNRISDLSKTSELLRKAARDSYRLDKCMYEPLSISLASSFNCIHAYQKEIKLIEQAIEKCINGMNPNALLILQSIPGIGPIWASGILSEIGDITVFHSSDALAKYAGLYWPKGDSGDFTSEDNKMSKAGNPYLRCYLGEAANSVRKHIPEYADFYARKYAEVTKHQHKRALALTSRKLVRLVFGLLVKNQLYTGEKLDTEYNIESN

SEQ ID NO: 397206 - protein, 399 aa, unidentified
MLAVGIDISKSKSVAAILNQDGSMHTSPFEFHHTQPELDAFIKYILNSNQSATILMENTGHYHYPVLKALQEAGLPVCMVNAYQIKKFGDMDLRKAKTDKKDAVRIARYALEKSYSLVPYTSMEQKYEDLRFLARQYNQRMLTLKTNKVFLLNLLDETMPGITNILPLTTRTPETSLSVLFINRFKSYDRIKKMGKSRFLDAFEKIARKSRNRQTKTYGLAIYETALYNITTRGENEYTLGAQDQCLELVCESQKAADSIILKMQTLAETLPEYAVLRSMAGVGDRLGPLILAEIGDIRRFHSGKALNAYAGNDAPPYQSGTFESHNRHISKRGNAALRKYCFEVMQALKLTRPQDDPVYLFLLKKEQEGKPYNVAKMAGVNKFLRIYYARAMETLKQQ

SEQ ID NO: 397207 - protein, 345 aa, unidentified
MNNVTILAIDLAKDVLQVCKVTSKNKISYNKSITRKALKELLNNEKNCLVAMEACASSQYWSRLALKLGLSVKTMHARHVKPFRTTQKTDRNDALAIAVAATQLTIKSTRILTIEEQGLQSLGRIRDLQKSQCIAISNQIRSLLSEFGITIAKGDKALREAIPYIIEDAENGLPHQLRVALFSHWENYQNQVERLNDITKQLEAEVHKNTHCKKLMKLEGVGPLGAVGLLTALGDGSSFKNGRAASACLGVTPVQHSSGGKENIGSIAKKSSGLRLRSILFNGAMSAVSSLSKRVAKTVKEKWLQALIERRGKKVAAIALINKNVRTAYAMLQTDTEYKPQLLEA

SEQ ID NO: 397208 - protein, 408 aa, unidentified
MNTLYVGIDVSSKSNVVYLMLPNGDKHSNFSVANSHEGSTQLVKRILSALTSLSLDTVLIGLEATSVYGDNLVYFLREDASLAPFHRKIHVLNPKQVKKFHDTYNDLPKNDYVDSFVIADCLRFGRINKEVYLGDYRYKALQNLTRARFFAVQNLIKEKQRFMNVLFKKYSTMTQEKVFSDTFSTTALAVYDEFDSAEALANMDLHELTDFIIKKGKNRFPDPDAVAKAIQKAARSSYRLPKTVNDSVNQVLSISITSIKALESQIKEFDKAIKAQMELLPNVLISIPGIGPVYSAGIMAEIGDINRFDNQAALAKYAGLAWKQHQSGDFEAEVTRLIPSGNRFLKYYLCEAAFSLVRCDKEYSDFYHLKYKEVNRCQHKRALALTARKFVRLVFRLLKDNRLYCPAK

SEQ ID NO: 397209 - protein, 344 aa, unidentified
MVTFGVDAHKRTHTIVAVDDRGIPLGQITVGTTSKDHLGLLRWAARFGAERRWAVEDCRHLSRRLERDLLSAGERIVRVPPKLMAHARDSARTYGKSDPIDALAVARAAQREPDLPVARLDGPDRELRLLVDHRESLVAERTRLICRLRWHLHELDPAWEPKARSLDAQRTLDEVQARLQGQAGVVARLARELANRCAELTAVINALEKEIAQLVEQLAPALLALPGCGPLTAAKIIGETAGVDRFKSRDAYARYNGTAPLPVWSSNKARHRLSRTGNRQLNAALHRIALTQARWHPPAKALMDRRKNSGNSGREAIRILKRRLSDAVFQALVHDQTDALMPAA

SEQ ID NO: 397210 - protein, 401 aa, unidentified
MHYVIGIDVSKATSQVAVAVDGKVTQHFKITHDVLGFNQLNTIIMQFNEFPDIVFEATGIYSRRLKSFLDWHNYPYTYLNPLAAKKQLDQLRPNKNDLNDAKNLAETQFILARAKSYVQNPIYIELQDMSRFYQQINHDIVSTKNRLHRILQLTFPEIEGLFSATDSPHYWELLTIVPHAIITRRSRQALMDTIQGGISWHIGHERLRKLVDQLMSMGQISAPAVAANSYNVAQVIYYAKRLIELHGTKGDILTAMVDKAKDLPEYSIYQSIPGFSDKTVVSLIAELGDLHRFRTANKLNAFVGIDLRFNDSGDYKSTGFITKRGNSTARKVLFRAISNIASTASYGHPSHINDWYQKKKQSSLSKGTKKIAIGAMSRLLRTMHYLVINHQLYDYKAVSKH

SEQ ID NO: 397211 - protein, 387 aa, unidentified
MQKPHDDSKMCPAAFQQDSTLVVVVEMSLSSWLVAGLIPGVSREPLKKIDPDPERLLRLLYRWRDEAVAAGSKINRIAVAYETGRDGFWLARWLRNRGIDAHVIHATSVAISREHRRAKTDRIDTAMLRRGFLGWLRGEPGHCSMAIVPSIAEEDAKRPHRERDTLIHERTSIVNRMKSILIQFGVRNFNPVLRKANEKLDAVRTPEGIPLPANAVAALRRLMDRLRVIKEQVKAIEQTRLQRMQRNPADRMNAMVFLLVRIIGMGVETAEQLVREMLFRNFHDRKAVARYAGLTGSPDESGSKRREKGLSRSGNGRVRNILIQLSWRMLQFQPDSGLVIWYKKRTESARGSRKPMIVALARKLIIALWRYVNTGVVPEGFELRSAA

SEQ ID NO: 397212 - protein, 391 aa, unidentified
MIYIGIDVAKDKHDCFITNSEGEVLFNAFTIPNNADGFHDLFQKISSLTNDFSNVKVGLEATGHYNYNLLGFLIDKGLPTFVINPLHTNLFRKSLSLRQTKTDKVDAHTIALMMMSGVNLQSYSDTSYHNEELKSLTRYRFDKVQERAKLKTSISRLVNILFPELEKLVPSLHMVSIYALLAEFPSSAQIASCHLTRLTNLLANASKGHYNKEKAIEIRNAAKHSIGSNMPAKSLELKHTIRLIQELTSEIDEIECFIKSIMDEIRSPILSIPGINYRMGAMIIAEIGDFNRFSSPDKILAYAGLSPSTYQSGQLDGCYSHKKRRGSRSLRYALFNATKFVCIWDNQFSAYLAKKRSEGKHYNVAISHAAKKLVRVIYQLEKSGQLYHRAA

SEQ ID NO: 397213 - protein, 375 aa, unidentified
MTKINRIGVDTSKSVFVLHGVDCAEQPMLRKKLRRRQFLEFFAKLEPTRIGLEACGASHHWARELQELGHEVVLLPPQYVKPYVQRNKNDSRDAEAICEAMSRPRIRTVPVKSAEQQAALMLAGTRDALIRRRTQLTNTIRGYAAEFGLTAAKGLNKIEPLLARIAAAENLPDLAKELFASCAQEYARLKEQLRTIEARLMAWHRSNEASRRLAEIPAVGPIGGALTVMKVPDPKAFRCGRDFAAWIGLTPKDHSTAGKTRLGVITRAGDEALRSVLVAGATAVIQQARKGRGQHSRWLIDLIGRKPPKLAAVALANKNARIIWKLLVSGERYNPARAMRNAAVSEGHGAALRRAPRRAPRSPASQIGATAMIEA

SEQ ID NO: 397214 - protein, 344 aa, unidentified
MKNTTIAIDLAKSVFEVGVSDRPGHVAANHRLSRAEIALFMANQPATTVIMEACSSAHYWGRTFQGFGHDVKLLPPLYVRPYVQRGKTDRADVKGMLEAWRNSDIRPVPVKSESQQQLTSLHRIRAGWMTTRTMRINSARGLLREFGIIFPLGASALADRVGEVIADDNTDLTMPVRELLHQLVLEIRELEQRIEMVEKQLEALAAQTPVVALLRTIPGVGLLTATALVGFVGDVQRFRSGRHFASYLGLTPREYSSGLRHRLGRISKLGDVYLRTLLIHGARAVLVGAQTQSSPDRFRAWALQLQRRCGNNKTAVALANRLARIVWAVWKSGKPFDCRPQVTA

SEQ ID NO: 397215 - protein, 411 aa, unidentified
MDKIYDSCCGIDVHKKLIVACLRKGNRQEVREFGATTRELLELADWLKTSDCKMVAMESTASYWKPLYNILESSDLNAMVVNARHMKAVPGRKTDVKDAEWIADLLQHGLLQPSYIPDKDQRELRELVRYRKSLVGERTRELNRLQKMLEGANIKLSGTVSDINGKSARSILEYLLTGECIDGAKYDEMYEQKIIAHNLKATKEQIIDDLNGVMTPLQRRMMKELLSHLDELNTHIKNLDDEIDNFMKPEEKQASQAIQDVTGIGNTSAQAIISVIGTDMERFSTDRHISSWAGLCPGDNESAKKRKSGKTRKGNSLLRTTLITCAHAAVKNKKSYFYAQFMRISAHRGKKRAYVAVAHSMLIAIYHILKDGVIFKDLGADYYNQFNKERKINAYLKKLKALGWEAPVVAA

SEQ ID NO: 397216 - protein, 352 aa, unidentified
MEIHTIGIDLAKTVFHFVGLNARGEVVVQRKCSRSQLLRFTSNLRVCLIGMEACGGAHFLGRALRDQGHDVRLMPAQYVKPYVKTNKNDYIDAEAIAEAVGRPRMRFVPIKTDDQLDLQSLHRIRERWVVRRTAVINQIRGLLLERGITIRKGRLHIEASLPPILEDADNKLSGILRVLLAQLQLEMQYLGRQIAESDKLILEIAKGMDSCRRLIAIPGIGPLTATATIAAIGNGAAFKKGRGFAAWLGVVPGEQSTGGKQKLTGTSKRGNKYLRKLFVQGAHTVLLQKNKQSPGLSTWLADLTARKRKQVATVAMANKMARMVWAVLTKGEAYRPPLLLEPARNGLQMSPA

SEQ ID NO: 397217 - protein, 344 aa, unidentified
MDHFAGLDVSVKETSVCIVDDTGRITREVKVASEPEALLQVLRNPAYRFKRIGLEAGPLSQWLFSALAEAGLPVICVETRHMQAVLKAQINKTDRNDARGIAQMMRVGLYRPVHVKTLRSQKLRMLLTHRKLLQSKAIAIENDLRGTLRNFGLKVGMVGKVKFEARIKELVENLPDLAELVEPLLIVRRALSEQTVILHRRLLAIVRADEVCRRLMTTPGVGPVVALTYRATVDVPARFRKSKAVGAVFGLTCARYQSGEIDWSGRISRCGDEMMRVMLYEAVQSMLRSKKWSWLKAWAMQIARRRGMKKAIVALARRLAVIMHRIWVDGTEFRWTREQAVAAA

SEQ ID NO: 397218 - protein, 355 aa, unidentified
MTSTQYIGMDVHKESISIAVRNAAGKIVMECVIETKASTILQFMDGLRGDVQVTFEEGTWAAWLYDLLKPHVTKVVVCDPRRNALLQEGNQNDRVDARKLAELLHNNQLRSVYHGDHGLRTLKELVRSYLTITQDVSRVMTRVKAVYRSWAIPCTGKQVYAPHHRAEWLAKINEPGVHRRAEFYYQQLDALRCVRQQVRRELLAESKKHPAWKRLCGIPSIGPIRAAVLLGILQTPHRFRSKRQLWTYSGVGIETSSSADHQVVKGQLERKKKPVEIRGLNRNFNHDLKNLFKGAAIVAATKPGPFAEFYAELVAKGTRPEMARLTLARKIATIVLIVWKRGVCFDAQHLKPQTA

SEQ ID NO: 397219 - protein, 380 aa, unidentified
MLDNPSEKGKVMDKITRIGVDLAKNVIQLHGVDSMERVVIRKAIARQKFPEWFANLQPCLIAMEACSAAHYWARKLRALGHEVRLIAPQFVAPYRKGGKHVKNDRLDAEAICEAAGRPHMRFVPVKTADQQNLLVVHRMRSGFVGQRTALVNRLRGELVEFGVFLPQGIDAFRAHFVGALENGATELNGVARTALLQGWDHIQALDRQIAWCDAQIAAHVKHDSNAQRAMTVIGIGALTASAAVATVGDARLFRNGRQFAAWLGNVPRQASSGGKTRLGRITKQGNTYLRTLLFQGARSAVMSAHRRNDRLSRWIVQLQARVGWYRTLVAVANKHSRILWAILARGERFDPAYVPTRPGTTGPSHLNRVAAPMIDPGVQT

SEQ ID NO: 397220 - protein, 309 aa, unidentified
MTSWVGIDISKATLSISVRPQGVTFDTSNDAEGHQLLLNYLSAWTVERVLLEATGGYERAVKTRLQRAGYSVVCINPRRARAFSTAMGKLAKTDPIDAAVLAHLAQVIQAPESQVLSEEQEILRDLVQRREQLVQQRDDERRRKAQAHSPKVQESLETCIKHLKEQIKLLEKEIVQMVALVDETKAMRLQRVTGIGLITAASMLAYLPELGQLNRKEIAALVGIAPYNCDSGQQKGKRRTQGGRASIRRILYMATWSVVRYQADFNARYLALRERGKCAKVALVACMRVLVVRLNAMIRDDAEWRQTAG

SEQ ID NO: 397221 - protein, 374 aa, unidentified
MNEFSKYVGLDTHKETIAVAIADAQGGKARYYGEISNSPEAIRKLVKHLCPDGELISFCYEAGPCGYEIYRQIGRLGHHCSVVAPSLIPTKPGERVKTDRRDSEKLSRLDRAGELTAVWVPDQEQEAMRDLTRAREDMKGLERTTKQRLNAFLLRYGRIYAGGKSRWTQAHFRWMEGLKFDVRVQQIVFQEYVDAVKQSEVRVVGLEKEMEKALEHWILAPVVDALMALRGIKLITAMTIMAELGDITRFDSPRQLMSFLGLVPSEDSSGPNRRQGGITKTGNGHVRRVLIESGWSYRFPARKTAHLQRHAEKCSDEVQAIAWKAQKRLCGRYAHLLSRGKLKVQVCTAVARELVGFIWAIACEVMNKHVVSAR

SEQ ID NO: 397222 - protein, 339 aa, unidentified
MDQVNTIGFDTAKHVFQVHGTDAQGRVFRRKLRRKEVISYFASLPPSVIGMEACGGAHYWARQLQALGHEVRLMPPAYVKPYVKRGKNDAIDAEACWEAVGRPTMRFVAIKSEEQQSVLMLHRARDLLIGQRTQTSNALRGHLAELGIIAKQGRGGTDELLALVEGHEEGQLPELARTALLVLADQLRELRVKINKIEREIHAWHRSNATSRRLETAPGVGPITASAIVATVPDPSRFKSGRQFAAWIGLTPNEDSTGGKQRLGHITRAGDPYLRRLLVVGAHAVLRHSGNAKSAPTKWAAELLGKKPYTVAAVALANKMARVIWAMMMKEEAFRAVSA

SEQ ID NO: 397223 - protein, 350 aa, unidentified
MIHVGLDLHHKNSFVKALTEEGQVIEGRRIYHHDMTELWEYLGQFGTEPKRVVFEATANARWLQRLLKEDPTVEPVAVTPHKVRIIAETVAKTDQIDAQVLASLSKMNALPRSWLPDAEVEDLRELTRHRATLVRLRTRAKNRVNGVLVRRGIVRPWGNIFGKLGRKWLTEVELDAVMRLEVDQWLSLLDDYDHKSAAMEKKLYQDYARRDRWRGDVELLMTMPGWGKLTALTILAELGDYRRFRRRSSVSNFAGLVPSSKRSDTSCRYGKITKRGSTALRSILVEVSINAVRKVPRYGKLYSRLKAAKSGNVGKVAVARQMLEDGWTMLMKQEPFRFMPNQAESLTRRG

SEQ ID NO: 397224 - protein, 337 aa, unidentified
MKYCGIDLHSNNSVVIISDEEDRIVFSKRLPNDLGQIRAALEPHQEELAGLVIESTYNWYWLVDGLMDTGYRVHLAHPSAIKKYEGLKHSGDFADAAYLAQLLRLGLLAEGYIYPREERGVRDLARKRMQLVRYRTAQILSIENIVTRQTGARLKGEAVKRLTAEQVDAFAFAPDVALAVEANRAVSQALGQQIEALERRLKERVSLRPEYRLLKTVPGIGETLATTIMLETGSIGRFAQVGNFSSYCRCVDSLRESNGKKKGEGNSKNGNKYLAWAFVEAANFALRYCPQAKSFYDRKKSKTNRVLAIKALAHKLARACYHMLRDQKPFDVSRCFG

SEQ ID NO: 397225 - protein, 358 aa, unidentified
MTTYYIGVDVHSNSTELAIEKRNKVIARYTVPTTIPAISNVMDSLQGKKYFAMEEGPMAGWLYRNLNKKLDEFVISDPRRNKLITSDGDKDDKIDAGKLASLLRGNYLRAVYHSDDNQRAELKHWVSLYQDRVRDAVRHINKIRARCRMHGVTIPRLALRDPTPRLRWLSKINHPVLTRQLKMLWIGYDASAKQVRISKRQLSTLGKKYNIIKLWSQLPGIGLIRATTLFAFLDTPWRFRQKNRLWKYCGVGLQRTTSGTDRKGRPKPARLQLPWAVNRTLKNAVLGAALSAINRKDNAFRDYYERMLKDGVIPSNARHAVARKLLTVMWGMWKTNSRFDENLLCIELSRPTASALSR

SEQ ID NO: 397226 - protein, 370 aa, unidentified
MKIVYPICCGIDVHKTFIVAVIVKSDSINPTYLKKRFSTFHNDLIRFRDWLISNHCDNVCMESTGKYWIPIYNILEDHIPNVVVANPKWVKAIKGEKDDNKDAKWIADLFKMGIVRSSFIPSKDIRVLRECSRYLFKLVNNRSSEKNRFQNALTVGNCNLDQVFSDVFGKSASSIVNLILSDNDYSREAIISSIHGKCKSSPDEILSAIEGVSFSQSQILRMKIIQDHMVYLDSQIRHLESLIDSLVSPYEDYIYLLCSIPGVKRTSAITILSEIGIDMSQFSSHHRLASWAGLAPGCNESAGKKKSVKISRAGVYLKPCLVQVAHAAIKDKNCPYYGNKHSKIAKRRGKKRAIIAIARKILVAIYHTYA

SEQ ID NO: 397227 - protein, 403 aa, unidentified
MNAVGIDVSKGKSMVAILRPFGEIVYSPFEIKHTSHDINSLVDLIHSINGESRVVMEHTGRYYEVLAHQLSEAHIFVSTINPKLIKDFDNDSLRKVKSDKADAVKIARYALDKWQNLKQYSLMDELRNQLKTMNRQFGFYMKHKTAMKNNLIGILDQTYPGVNTYFDSPARSDGSQKWVDFASTYWHVDCVRKMSLNAFTDHYEKWCKRKKYNFSKSKAEEIYEKAKELVPVLPKDEITKRMIRQAVEQLNSASSTVEELRTLMNDTASKLPEYPIVMAMNGVGPSLGPQLIAEIGDVTRFTHKGAITAFAGVDPGVNESGTFSQKSVPTSKRGSADLRKTLFLVMDVLIKTMPQDDPVYQFLDKKRSQGKPYYVYMTAGANKFLRIYYGRVKEYLTSLPQSE

SEQ ID NO: 397228 - protein, 327 aa, unidentified
MNLHTLGIDIAKLKFDVCLITTSGKLKHKVLPNTSAGFAQLSAWLTKHEVARAHACMEATGTYGEALAMHLHAAGHRVSVINPAAVKAFAGSRLSRTKTDKVDAALIARFCLAQQPPQWTPPALEVRDLQALVRRLEALIEMRVAEENRLEAGSVVAVVRTSVEEHVAYLKAEIKRTEQLIGTHLKTHPGLRQQHELLESIPGIGETTAALLLAEIVDITQYRNARQVAAYAGLVPRERRSGSSVRGRTRLSKIGNARLRKALYFPAITALRCSEFFQNWAQGLRERGKCKMSVIGAAMRKLIHLAYGVLKTGKAFDPEWGRKAKTA

SEQ ID NO: 397229 - protein, 492 aa, unidentified
MPQLNKNATIKWPSESKGSKGGRKSRRVCKSRRSSADPTEGLQVDNPNAAAIDIGCSEHWVAVPAGRTERPTQRFGCCTAELNRLADWLKECGVDTVVMEATGNYWVVLYDILEERKLTPVVVNPRYAKNMSGKKGDIPDCEWMQKLHTYGLFSNSFRPAQEIRVLRAYLRQRETLVGAAAQEIQHMQKALTEMNVQLANVISDISGETGLRIIDAILGGERAAGVLAKLKGPRIMASLVTLEQSLEGHWKEEELFRLEQARLSYAHFQEQLQQCQQRIEQQMQTIQGRVPLEGQGMTPRTMPAADKGAEPVSGQGDGRKSKSFDLGIELKRVLGVDLTQIDGVGPVAAQVILSEVGTDMSRWRTEKHFASWLGLCPDHRISGGKILGRATRPVVSRARNALRLCAYTLTHSKSWLGAKYRRLKHKLGAPKAIVAMAHHLARLIYRMIKNGQDYVDKGMEVYEAKYRENRIKWLKKQAKELNLELHEMQALA

SEQ ID NO: 397230 - protein, 332 aa, unidentified
MSVYVGIDVHRKRSQVAVIDQDGRVLANRNVNNGVTPILSVIGGLPPGTPAAFEAAYGWGWLVELLEDYGFEPHLVHPLQCKAIASARLKNDKVDAAILAQLLRADLLPEAWIAPPAVRQLRALLRHRAQLVRLRTLLQNRIHAVLADHGHDRPAGCWSGPGREWLASLELPAVSAEVVSDALALIDALESVTGRLDLEVRQHARSDPRVKVLTQLPGVGPFTALVLLAEIGDITRFASARKLASWAGLTPTVRGSDRTVRHGHISKQGSVWVRWILCEAAQKAKHSPQFAASYQSIARRRGTKIATTAIARKLLTRAYHLLTDAASGGAPH

SEQ ID NO: 397231 - protein, 321 aa, unidentified
MNAIKVIGIDLAKNVFQVCVWMADGSVASNRKISRQKLLDTVRTFSSGTLIAMEACATSHYWGRTLQAMGFIIRLVPTQHVKAFSHHQKNDANDALAICETACRPGLHFVPVKTVEQQDIKALRSARQLMVEQRTALANQIRAFLAEEGVIVPAGLQKLQQYLPEILEEESHELSSVRRRLLHTLGEDLRDLNIRIHEMDNEIAALSRQQSGYHHLLTIPGVGPLIAAAFVSEVSAPQFANGRQLSAWCGLVPRQHSSGGKNRLSSLSKNGNRHLRTLIIHGARAVMRCVQNRDDCLGEWLRKLIARCGFMKATIALANKL

SEQ ID NO: 397232 - protein, 350 aa, unidentified
MLIIGCDYHPSFQQIACVDTDTGELGERRLAHPEEANQFYGELKQRNVAVRVGMEASGHARWFERLLRQLEFEVWIGDAAEIRTKRVRKQKTDRQDAQLLLRLMMEDRFPRIWVADAENRDLRQLLWHRHRLVQMRTRVMNQLHVVALNEGLQRKKALWRPAGRNELESLVLAPWASRRRQDLLELLDQLAPKIAELTQALEREVEKRPVTRRLMTHPGVGPLTALAFELVIGTPERFRCGKQIASYVGLIPEEKSSGNRRRLGHITKQGNALLRFLLVEAAQVTVRSQPQWRSRFFHLAMRRGRKIAKVAMARKLAVHLYWMWRQGLDYGQWQKLGSHAGEPGHLYGGK

SEQ ID NO: 397233 - protein, 388 aa, unidentified
MSTVLYVGMDVHSTSYSLATFALGDQKVRFELKIEPDCEQVLQYLDTVRRQLADTLGEVEFVCGYEAGCLGDTLYQQLTVKGIKCVIVAPTTILAPTSKRRVKTDRRDAALIARSLAFGTYHAVHVPTDEDKSVKEFIRMRDDHQKKLKQTKQELLAFCLRHGHRFTGTRGYWTNAHMAWLHSLELGGLLQETLGEYLATYESLKERVERLDRRIEELSQGARYRERVGRLGCFLGIKAHIALALLAEVSDFERFGRAGHFASFLGLTPGESSSGEQRTRQGITKAGNSHLRRLLVEAAQSIARGRIGYKSKDLKARQHGNTAQVIGYADRANERLRRKYYRLIQRGVKRNVAVTAVARELACFVWGMLTDHLGLRCAGGGGVLPQQG

SEQ ID NO: 397234 - protein, 394 aa, unidentified
MKLVGIDVGKNSHHFCVMDKETGEFNVTPSSFSNNKEGFDFLINSLKPYSKKSILLGMEDTGHYHVALLKFLLSNGYTVALINPKTTDLTRKMEGAITKNDKLDTITICDVLDTPERKKQYRITKVDRFDLYEQRQLTRHHHNLKEELNIYCNRLQKSIDLVFPEFNTLFGSKYGIVCMNLLKTFGSAEAIASTDIRTIRKCFEIKGRGGRISLTAEKLKECAKNSIGISSEVETIQIKHLVSQIMLIKEQIAEIDKKIEEFSIKNNSPILSIPGISHFSGTSILAELGDIGNYSKPSRIIKFAGVAPYHYESSQYNAQHTAITKKGSKYLRKTLYQIILSVINFNPVFKEHYQLKISQGKGLRFTQGHCIRKLLRIIYHLLETGQSFDPALLR

SEQ ID NO: 397235 - protein, 386 aa, unidentified
MPQPKDDLSRSLVALDQHSSLIAVVELSLSTWLVGGMVPGIERDPLKKLVPDEDGLLKLLHRWRDEAVKAGHQINRMVVAFEAGRDGFWLARWLRSRGIEAYVIHPTSVAVSREHRRAKTDRLDIALLKRSLLGWLRGEKKHCSMAAIPTLEEEDAKRPNREREQLVGKRTGIVNRMKAALVRLGIRDFNPKLRKAPQQLATLRTPEGGTIPPNTLAELQREMAHLSFINEHIKQIEDARLIQLKQAPQHGSNAKVVQLGRINGIGIETADMLANEVFSRDLRDQRAVARYAGLTGSPDESGRRRREKGLAKAGNARVRRGMIQLAWRFLFHQRNSALTQWYRQSVAAGKKRTTVIVALARKLLIALWRFVTIGDVPQGVILRTAS

SEQ ID NO: 397236 - protein, 412 aa, unidentified
MDVLHPRCCGLDVHKSSISACILLREAGRVQKHQRRFGAMIQELQELAEWLRQFGVSQVAMESSGVYWKPVWNILEGQFTVVLANAQHKNVPGRKTDQKDAEWIAQLLQYGLLRPSYVPCEIIRDLRDLTRMRASLSQEASRISSRIQKVLEDANVKLASVATNVLGKSGRAMLEDIISGEDDPEHLASLALGHLRVKIPQLRLALEGKVRSHHRFLLRRLVDQIQFVEHEIGLLDERLEEIAQQRPELSQAVARWDTIPGIDRVAAWALLAEIGDNMAQFPTAGHLASWAALCPGNHESAGKRLRGTTRQGSPWLCRMACQCAWAAARTKNTYLTSQFRRLAARRGKKRAIIAVAHTIIVIGYHLQKNQSNYEDLGGNYFDRIHSDGLKRYLVKRLQQLGHKVTLEPMVAA

SEQ ID NO: 397237 - protein, 389 aa, unidentified
MPLDHHSEEPTAIRTNLGAIFVSLELSRSTWLITSLSPGGGEKMSKHSVSAGDIAALLSRFSELKQKAFARTGQSFPIIVIQEAGLDGFWIHRVLQSEGIESYVVDAASIATSRRRRRAKTDRIDGEALVRALLAYKRGEPRVCAMVRAPTPEDEDRRRLCRERKTLTVERVQHVNRIKGLLFCQGVSGYEPLRRNRRQRLDELKTGDGRPLPPHLKGQIGRELDRLELLLGQIKAVEAERDALLTPATETEGMPAPQAMLIDLRGIGAEFAAVVWSEGLCRSFANRRQVAAYGGLAPTPWQSGSVAREQGVSKAGNPRLRTTMIQLAWLWLRHQPNSALAQWFQERVKRNGRLRKTTIVALARKLLVALWKYVTAGVVVEGAVMKAVS

SEQ ID NO: 397238 - protein, 312 aa, unidentified
MAHIICGVDIGAETLDARIGRNGAWQRFVRTNDGIDRLAAFCRTHQAGLVVMEATGGYERLPFHRLWAAEIPVGIVNPRSVRQFAEAMGTLEKTDKIDAGMIAWYGATKRIVPTPPPSDDQRALTAMVRRLRQLIELRTAQNNQRRLVDQADALDSFTTIVAMINREIRSLQAKVIARIDADPLWCAFDQAFREVKGVADRTIACLMANLPEIGTLSGKAIAKLAGLAPIARDSGKKNGNRPVRGGREAVRSILYVVAEIVRRHDPDFKAFHQTLRAAGKTAKVVRIALARKLLVRLNAKARDVRKGLAQPA

SEQ ID NO: 397239 - protein, 338 aa, unidentified
MQNLFYVGIDVSKKTLDASLFVEGVGLKEFPHIVVDNNKEGFKEMFRWLRKQGCKDNRTSFLMEYTGFYSNAIREFFDKKRFKYRMENPLELKLRFGIVKEKNDKIDSARIADFLARHSDQLKPSHMPCKELQQLEALNNERKYYVQQRAALACRIQVVSSSEERARHQHHIDLYTKDIGKVEEKMQLIISQNEYIKKNYNYLLTIPGIGPTNAINAIVITENFTAFKTARQYASYIGVAPHSKTSGKCVRWKPKPSNCSDLQAKADLTQGAQSAVEYDPEMRTYFERRTKDHKDTDTIRKVYNHIKFRLILRMFAVVKQQHSYVPLDKVKPISLTKQ

SEQ ID NO: 397240 - protein, 493 aa, unidentified
MGACGLESGDVVLAAIPIRKMTIGIAQTLLLVIEWRIAMPKRTTGDRPELKTVSVGAAAIDIGSKMHMAAVNPACTDVPVRSFGTFTQDLHDLADWFKACGVTSVAMESTGIYWIPVYEILEQRGFDVILVNARYAKNVPGRKTDVSDAAWLRQLHSYGLLRGSFRPDAEIATLRAYLRQRERLVEYAAAHIQHMQKALMEMNLQLHHVVSDITGATGMRIIRAVVAGERNPDVLATYRDVRCHSSPETIRAALVGNDRDEHIFALTQSLELYDIYQAKMLDCDRKLEVLIAALSNKGGKPVGKLSKPRIKTKQVNTPTFDVRTALYGVLGVDLTEIHGLGPSLALKLVGECGTDLRAWPSAKHFASWLCLAPGNKISGGKVLSSRTRRSSSRAAALLRLAATTVGRSDTAIGAFYRRLSARAGKSKAVTATARKIAVLFYNTLRHGMSYRDPGADHYEQQYRNRVLANLQRRAKSLGFLLQAIPGDADPAVS

SEQ ID NO: 397241 - protein, 417 aa, unidentified
MSTDVRFFGGVDWASETHQVCLVAADGKIIGERAFAHGGAGLAEMCDWLVTTSGEEPPTVAVAIEVPHGPVVEILLERRFQVDAVNPKQLDRFRDRFTVAGAKDDRRDAYVLADALRTDRHCFRRLTVEDPVVIELREWSRMVEDLQQERNRLANRVREQLWRYYPQALELGDDLAADWFLDLWALAPTPAKAARLRESRVTSLLKAHRIRRIEAAEVLRILRQKPLVVASGTVEAATAHITAVAARLKLVNQQIKQAHRRLDELSDKLAEGREEDAPGQKSKQRDVTILRSLPGVGRIVLATLLGEAAEPLRKRDYHALRTLSGVAPVTRRSGKRCVVLMRQACHLRLRTAVYHWARVAIQHDVRSHARYAELRKRGHSHGRALRSVADRLLAVACAMLKSQTTFDPEHAVEAVAT

SEQ ID NO: 397242 - protein, 366 aa, unidentified
MERTFVGLDVHARSVVACALDDTTGELSKARLVPDNETVLAWLQALPGPVAVVYEAGPTGYGLARFLTKRGVRCVVAAPSKMHRPSGDRVKTDAKDALLLARLLRLGEITPVTVPSLAQEAARDLVRVREDVRADLMRARHRTSKLLLRQGILWSGGTAWTGAHEQWLGQQRFELPGLQAAYDTTLETVLLATSRRAWLDKAIVEMAHEAQWWPTVSRLQCLRGVSTLTAFGLAVEVGDWSRFSGSTIGAYLGLVPTESSSGEGRHQGSITKTGNTHARRLLVEAAWHHRRPYRPTKTMRDRWDLAPAAARARGHAGNQRLHDRWLRFNERKKRTVIANVAVARELAGWCWSLATLEEPAAPAVRR

SEQ ID NO: 397243 - protein, 343 aa, unidentified
MKHIGFDIDSTTTHISVFSERGREILHTKIATREADLVAFMMSIPGPKRVTLEESQIADFVTRIIQPYATKVIRCLPQHNRLISESEHKYDRADARSLAELLFLNKLKEVHHAPWEYRQLREGVRAYWVASRDLSRTKSQLKAFYLFNGVHCTGEKVYASRYRVAFTKQIEKRSANMQILAQLYLQLDFCRTKKAAHIKILKELAGHFKEDERNLKTYPGIGLIGACSLIAYLENGWRLKNKRKLWQYCGIGVRRHESAGKGHRKASRQGNRYLKNAVMTAAATIANRRMADNTLTKLWRAGIVAGAPGDQMKRNIARKVAVLAQRSLRFKEEYHDDRVAATP

SEQ ID NO: 397244 - protein, 359 aa, unidentified
MDVRDQTKRQVVGGVDTHKDLHVAAVVDERDRVLGSQSFATTRQGYRQMLAWMRSFGELQRIGIESTGSYGAGLFRFLQTVGIEVREVTTPDRHDRRRRGKNDDLDAQNAAHAAFAGQRTVTPRSRDGMVESLRVLSACRKTAVAARRVALQLIQNTIVCAPDGLRDILRRMTRMQLIRTLAGWRPDLTAFRDVEAAYRITFKSLARRYLELHDEIADLDIMIGAIVDELAPDLVARNSIGHVGAAQLLLAAGDNPDRLRSEASFAALCGTSPVPASSGKTIRHRLNRGGDRHANSALHIIAIGRLRTDPKTKKYVAKRIAEGHSKLEAIRAVKRYIAREVFTLIMRRHKTINQTQITA

SEQ ID NO: 397245 - protein, 431 aa, unidentified
MKYKLKQKQIQRITQITDSTLVVGADIAKKIHVARAVDFRGIELGKDCTFHNDASGLTKLATWMKELKQTHAKTEIVFGIEPTGHYWFPLAAYLKEQGIKIVVVNPHHVNKSKELEDNSQTKSDYKDAKVIADLIRNGKYSEPNLPTKEYADLRILMNLREKMSVSLTQVKGRIVNWFDRFFPEYTSVFKVWEGKASLMTLRAFPLPAEIRDKGARTVLEHWKTEVKRGVGIKRAEKLVATAATSIGLTEGVEAARMELAVLLQQYDLFSEQLETTMTKVQEILESIPGTAQMLSVPGVGVVTVAGFLAEVGDIHNYDHGQQIIRLAGLNLKENSSGKRKGRTGISKRGRSRLRALLFRAVMPMVAKNPAFKALHQYYTTRSQNPLKKKQSIIALCGKLIRILFTLGTQQKEYDANDVIGPVRQAQMQVAA

SEQ ID NO: 397246 - protein, 392 aa, unidentified
MIYVGIDVAKDKHDCFITNSDGEVLFKPFTISNNREGFETLFERISSVSDDLNKVKVGLEATGHYSYNLLGFLLDKGLPTYVINPLHTNLYRKSLSLRKTKTDKVDSRTIATMMMSDMNLKSYSNTSYHNEELKSLTRYRFDKVKERAKLKSSVSRLVCILFPELEKLVPTLHMASIYALLSEFPSADAVANAHLTRLSNLLSESSKGRYGKDTAVMFRDAARGSIGSHMPAKSLELKHTIKLIQELTIEINEIEAAIKRIMDEEIHSPILTIPGISYRMGAMIIAEIGDFSRFDSADKILAYAGMSPSTYQSGQLDNCYSHMEKRGSRYLRYALYNATKYVCQWDESFRVYLEKKRSEGKHYNVALSHTSKKLVRLIFALEKSGQAYLPTT

SEQ ID NO: 397247 - protein, 390 aa, unidentified
MSHCFDASRSLTALEQDSTLIAVIEMSQAKWLIAAIVPGIDRRPLKKLEAEPQRLLSLLHGWRSEAGQAGCEIKRIAVAYEAGRDGFWLARWLQAHEIEAYVIHPSSVAVSREHRRAKTDRLDTELLVRAFVGWLRGEKRHCSMAAIPSVEDEDARCPNRERESLVHERTRIVNRMKAILARFGIRGFRPTVRGGAEERLEALRTAEGRPLPDNTRAELRRHVARLRLVREQMREIENERLRQLARPPGSDTGPQAMVRLIARIVGVGLETADMLVNEILSRNLRDRRAVARYAGLTGSPDESGKRHREKGLSRTGNARVRYGMILLAWRFLQFQKGSALTQWFFARTADGRGGTRKTMIVALARKLLIAFWRLVTTGEMPEGVILRPAV

SEQ ID NO: 397248 - protein, 410 aa, unidentified
MEVVHAHCAGLDVHKDSVVACARHMVDGKITTSVKTFNTTTAELILLSDWLSGEGATHIAMEATGVYWKPVWHILSDGEFELVLANAAHVKNVPGRKTDVNDATWLADLMAHGLIKASFVPDEPTQQMRDLLRTRKQMVRERSSHTQRIQKTLEDANIKLDSVVTDILGLSGRRIIEALIAGQTMPQALATLAHRRIHASTDELEAALRGRVTRHHRFLLKLHLDQIDAFDAAIARIDEEVSANVEPFRIAIEMLAAIPGVGDLSATIIVSEIGIDMSRFPTAGHLISWAGLCPKNDQSAGKRRSTRMKKGAPWLKSTLVQCAWCASRTKGSYLQAQYLRLRSRRGAKKAVCAVAASILTAAYHMLKNGTVYQDLGASYFDNRAKDKQALRLVSRLKNLGFQVQIKPVAA

SEQ ID NO: 397249 - protein, 333 aa, unidentified
MSKITLIGIDTAKQVFHLVGVDAHGHYVWRKQVRRARLLSTLAQVEPCEVVLEACGASHHWARNIKALGHTVRLVAPQHVKPYRRGQKNDYRDAEAIISAALSPGMRFVGVKRVDQEAEQALHRVRSRLMSHRNAAANELRGLLGEYGQVFGRGLKSLREGARYFAEAEEAHTLGLVELVNDVLEEIDVLQRRMDHYERQINQRVQSDEISRRLREELNGVGKLSASALRVKVADVRDFGNGRHFAAYLGLAPGHSGTGGTVRIGHIKRGHDRYLRQLLIHGARSALSHLGDKQDPQSCWLRGLLERRGFNIASVALAHKNARQAWAIMAREQ

SEQ ID NO: 397250 - protein, 291 aa, unidentified
MLFERTSVGLDVHARSVAAAAIDGVTGELKRARLTPSLEHIQSWIGELDGPVAVAYEAGPTGFGLYRALTAAGIRCVVAAPSKLQRPSGDRVKTDAKDAVHLARLLRLGEISSVCVPTVAQEAAQDLVRAREDCRGDLMRARHRLSKLLLRHGIVYSGGAAWTGPHDRWLRQQRFPNLATLAAFESDYETVLAVTARRDRLDAAIAAIAAIAVDSEFTSVTHRLGCLRGIATLTGFALAVEIGDWHRFTGNSIGSFVGLVPSEHSSGTSRVQGSITKTGSTHARRLLIEAA

SEQ ID NO: 397251 - protein, 355 aa, unidentified
MNSEKYIGLDVHQATISVAVMDCRGKVVMESILETKAATLLEFLAGLRGTLSVTFEEGTWAAWLHDLLKPHVQKLVVCNPRKTALLKDGNKNDRIDARKLAELLRLDNLKPVYHGQTGVPMLRELARSYLTLVKDLTRVMNRLKAMYRSWAIPCAGRDVYYTRHRAEWLSKIREAGVRRRAEHLYQQLDMLQHLRQQARRELLAESRKHAITAKLRQIPSFGPIRATLAVALIQTPHRFRTKRQLWAYSGLALETLTSGEYCYVRGQLRRSKKQVSIRGLNKDHNHDLKGLFKAAATRASVQPGPFQDFYQRSLAKGIKPTMVRLTLARKIAAITLTLWKKGENFDVEKLKSQAA

SEQ ID NO: 397252 - protein, 356 aa, unidentified
MHSMNRELRRVIGGVDSHADTHHAAALDDRGCLLGSKPFAVSAAGYQELLAWLASFGPIDRVGVESTGSYAAGLIRHLAGAGVRVLEVNQPHAHTRRRRGKTDAIDAEMAARHALSLASAVTPKQTCGIVESIRQLRIPRDSAVKSRSVAMVQLGELIRTAPSELREQLAIRSTLKGKAALCRRLRPDTDRLSEPANAAKLALRSLARRITLLDDEIADLDRQLTPLVATAAPRTSALLGISTGHAGQLLITAGQNIDRIHSEGAFAALCGASPIPIASGKRGRYRLNPGGDRQANRALHMIAICRLRHCPKTRAYAQRRTTEGKSKREIIRCLKRYIARQTYATLRDDLRSLSPS

SEQ ID NO: 397253 - protein, 345 aa, unidentified
MSHCTATKKAASAFVRRNSIPTTGAVAKALFNSAIGIDVHHDILVCAYQYCNRESDEITTEVCSFGTTASELAKFTDWCRNRHPEQILMESTGVLWFSPYEALESVGFTNRQLSLINARDFKAIVGRKSDKQDAERLALYARIGNVRSSFVPAKCFREMRTVSRLLSKTTDEQSRARSRYLKFLNFIGCRASSVFSDVRGKAATAILEVLAEGTREQLIDAIKIHGRRLRKSATEILDALDFAVSPAMAMQLRIQKQHMEALSQTCEELYALLKVMQANYQPWINRLMTVPGIKERAARVIFAEVTNDLSSFPDAAHLASWVGVCSGTMESAGKRYSGRAAKGNR

SEQ ID NO: 397254 - protein, 339 aa, unidentified
MELKRISIDTSKHIFTIHGVDPQEHPVLRREIRRTQLESFFVKLEPTEVALEACAGSHHWGRLLSRMGHRVKLIPPQYVKPFVKRSKNDRNDAEAIGEAASRPAMRTVPLKTTEEQAATIIVKHREMLVAQRTQAINALRGHAAEFGIIAAKGCPNITALLSVLAADEAIPVSARAMFGEMGQHVADLDVKIEELDRRLLDQHKANPVSRLLAAIPGVGPITAITMALTVDPGNFESGRHLAAWLGLTPREHSTAGKHRPGKISKAGNERLRQLLVVGAMSVIRVAKPGRQSTSGWLLQLLERKPRKLAAVALANKMARIIWAMMARGEAYRRQPVTTA

SEQ ID NO: 397255 - protein, 357 aa, unidentified
MGKSIGNLASVTRIGLDLAKNVFQVHAVDARGEVVAARKIRRGALLEYFARLPPCVVAMEACSSAHHWGRLFFAQGHDVRLIPAAHVKPYVRRGKNDAADAAAICEASLRPGQRFVAVRSVENQAALMRHRVREQLSGQRTALLNALRGHLAEVGVIAAQGAQHAYELKRLLDQGADEHGEIVVPDYVRAALLPLAKQIDALDETIGAITDELADAAERDTTTRRLMTIPGVGPVIASAIVATAPDMSAFANGREFAAFLGLTPRQHSTGGKQRLGRITKMGDRYLRKLLVVGATSVLCHRQGHNDALRHWAKALLARKPEKYGFKLTAVALANKLARLVFALMSRGGVYEGRPIAA

SEQ ID NO: 397256 - protein, 412 aa, unidentified
MRRVIGIDIHRTFGEVVIWEDGRLRRLGRVDMTRAALEGLGGKLQPTDEVVVEATGNAMAVSRVLSPFVARVVIANPLQVKAIAHARVKTDKVDAGTLARLLAARYLPEIWTPDAETERKRRLTARRYQIVRHRTRIKNEVHAILHAHLIPKCPHADLFNRPGREWLARQGLPADEREAIDRHLRELDRLGEDLAVLDREIAAGALDDNAVKRLMTITGVDLTVATGVMAAIGDIRRFDHPGKLVSYFGLNPRMRQSGLSAAYHGRVSKVGRSHARAMLVEAAWAAAKAPGPLHAFFVRVRAKRGHQIAAVALARKLNVLCWHILTKDEDYLWARPALIANKTRALELQAGKPQQKGTRRGRAYAYNVKALRDQEQQLAQQAERNYARFVERWRTRPPKGEARERLNPARNG

SEQ ID NO: 397257 - protein, 410 aa, unidentified
MDVLYANCAGLDIHKDTVVACSRRVSAGKVIRDVRTFKTTTSDLLALSDWLASQGATHIVMEATGVYWKPVWNILSDGDFALILANAAHVKNVPGRKTDVNDATWLADLLAHGLIRASFVPDAQTQEQRGLLRTRKQLTRERTSHVQRLQKTLEEANIKLDSVISDVIGASGRAMIEALIAGETNPLRLASLASSRIKASPAVLGEALRGRVRRHHRFLLRLHLQQIDALDRAIAEIDKEVEPNLAPFRDLIPVLTSIPGIGELAARVLLAEIGTDMSRFPTAGHLVSWAGLCPGNDESAGKRRSTRMRKGAPWLKTTLIQCAWAATRKKTSYLAAQFHRLRARRGPKKAVGAVAASILTAAYHMIANGAFYQDLGADHFERRAKPNQIKRLVAKIQSLGYNVELKPLAA

SEQ ID NO: 397258 - protein, 331 aa, unidentified
MEQGVVIGVDVSKHELVTAVHPTGDTWTSETTAIAIEAVIARLQTYQPRLIVMEATGGYELPLAAACAAVKLPIAIVNPRQVRAFAHAIGRTAKTDAIDASVLALFGARVEPTPRAVADADTQALAGLITRRRQLLEMVGAERRRLEQAPPTGPITRDLRNHIRWLERRVADVDEEIGTAIQQSAVWRVSDDLLRTVPGIGPTTARTLLAELPELGRLDRRAIAALVGVAPFNCDSGQFRGRRRIWGGRASVRASLYMAALVASRHNVVLAAFYRRLRDAGKPPKVALVAVMRKLLTILNAMMKHHCRWNPKAASTPASTSRPARGVAVLA

SEQ ID NO: 397259 - protein, 465 aa, unidentified
MAKKAQKIKKGNRSELLIVNPNAAGIDIASTEYQVCVPEDRDTEPNRRFEAYTCDLHTIAKWLKQCAIDTVAMEATGIYWVQLFMVLQEYGFDVLLCNAKHIKNIAEKKTDYVDAGWIQMLHSYGLLKESFQPENQIRQLKDLMRHRERIIQRMSQDTLRIQKALEMMNIKVHKVLSNIKGKSGLQILDAIVRGERRPSVLAELVHHSVKASKEEIIKSLEGNWNDAQLLILKQNLEVYRFSLSQMEQLDQSIEQLLIAYSQIHSNPQNNKPIVRALKRKQPQANNLHFDAEQYGYEILGVNITRVPGISSLTTIKLVSELGRNFPIKFPTYKHFCSWCNIAPNNKISGGKVLSSKIPKRKNFVGQAFRVAASTLSRSKGYLGDYFRRIQSRSGHHQAIIATAHKLARIVYHMVKMNVEYDESIEKEKNTKLLEFKRKSLIKYLKKIETELDLSVSSPINYHLVR

SEQ ID NO: 397260 - protein, 356 aa, unidentified
MKETKKLNFVNQHIYVGIDVHARRWVISIICGDLFLGSFSQDPESKILSNYLKKNYPGGIYHCVYETGFSGFWIYDELRSEGIDCIVVNAADVPTTHKEKDRKTDKVDSRKLARSLSRGELEGIFVHNKEHYEQRSLIRTRASLVKDQTRCKNRIKGLMKFFGIEITDDQIRTHWSNKYIQYLENLETEHLYAKVSLKSYLEQLKYYRKLISDLTKQIRRLSQTEKYRQNLNLLKTIPGISTLTAMTLLVELGSIERFNNLDRLCGYIGLVPSEHSTGDDQKRNYMTKRGNCFLKGMIIESSWVAIRKDPVLLNCYTNLAKRMRKTRAIITISKKLISRIMYVLKQKQEYKFLFVK

SEQ ID NO: 397261 - protein, 410 aa, unidentified
MDVFLERCAGLDVHQASVVCCVLIGAPGRKPQKLLRSFGTTTRDLKTLQAWLAEHGVTHVGMESTGVYWKPVYAVLEGHVDLTVGNAHHIKNVPGRKTDVKDAEWIAQLVRHGLVAKSFVPPPAIRDLREMVRHRRTLIETRTAVRNRVLKLLEGANIKLSGVASDVFGVSGMAMLEALAAGTNNASEMAGLARGRMRRKHAALEAALDGRMREHQCFLLGMHLRNLKAIDQDLEALDARIGTQLEPYQVQHRLLMQIPGVDWVTAASIIAEIGTDMDVFASARRLAAWAGVAPGNYESAGKPKGAGTRRGNVFLKSALFAAASAAVRTKGSYYRDKYNRLRARRGPVRAIMAVAHKLLLAAFHMLSTGEAFRDLGEGYLDQVARKRSTTKLVQRLSNLGYDVMLVPKAA

SEQ ID NO: 397262 - protein, 425 aa, unidentified
MTAQPNATPAATWVAIDIAKRHHAVLIETPDGKQQQFRMASSMEEHDRLVALLRGLPQPARIAMEPTGDCHRTLAFRLLTEGFDVCLVSSVAGARYREAMFNSWDKNDPKDARVILALLKQGMTLRYIDPLLAGHHGLQELSKTHYQISLARTRLQHSLMTHYLPLYFPEIERYFDSAHADWFARFMLRFPTAASIQQRDYETFRKEAWDLVGRKVNKAAWLRELYEIALRSIGLPVADDSLEVQSFRLQLQRFQELVQQRDRLAEQAHQTLSGRPDYESLRSIPGIGPVLALTILAEAGDLRRFAHHRQFLKYCGLDLAKCQSGQYKGQERLSKRGNARLRFAFWFAATVAIRMRENSFREKYERYIRNDPSNADRKRKALTAVAAKMARVAYGLVKQQTQYRCYFENALPRGSTPLRRAVGTS

SEQ ID NO: 397263 - protein, 371 aa, unidentified
MKSIIYIGMDVHKKTYSLCALLKETGEIIGETKIPADVSLIIKFIENAKKSVDSDDVQIKTGYEAGCLGYSLYWQLAAKGIECDILAPSTMHRSAKNKVVKNDRRDAKNIAANLANGTYKSVYVPTDEDVEIKEYIRMMHDFKIELKKVKQHINAFLLRFGHQYPGKSKWIPAHIKWLKELELSDMYREILDEYLSQLEILSEKIERFKHRLEELSQKETYNEKIGQLRCIKGIDTTAAMTMHAETSDFDRFPTANAFASYCGLTPGEDSSGESYHRLGITKQGNSMIRTTMVEAAQVLVRGTIGKKGKKVKSKQKDQNVKVIDYADKAVVRLQKKYHRMIFRGVKRNIAITAVARELACFVWGIETGHIS

SEQ ID NO: 397264 - protein, 409 aa, unidentified
MQVYIGIDWSEEKHDVVFMNDAGMELASLVIPHTLDGFAQFDGTRLKMGLAPSDCLIGLETAHNLIIDYLWSQTYSQVYVLPPNQVKSNRGRFRQSQAKDDPEDARLIADILRTDRGRLQPWHPDSLLTRQMRAKISLILHLGKQITRLANRLRSVLLRYYPAALQVFKGGLTTQIAPEFVVAFPTLQAAQSLTYAAFESFARAHGYRQTKNLPGCFTRLQAHYPPASQETVTIYQTEACLLAQLLLAASRAKISELAQLQMLYQRHPHYATFSSLPGMGKLIGPGQLTKFGDDPQRFPHPSSVQALAGTCPVTVRSGKSRIVKFRRACDKEWRYLSQEWAMALVHKTQAPIAVAYYEHIRPHCHSDRHAYRCVANRWLAIAWKLWYTGQTYNEAYHFQQRAARSKPLG

SEQ ID NO: 397265 - protein, 360 aa, unidentified
MDKYIGFDIDSKKTIACVVQKGKKDQYATISSNIQSMKGYLRQQRTGGYRLHLTFEISGQAGFIYDSLIDSVDTITVSNPSKMTWIYRTAKKTDRIDARKQAVLLSIGEIPTVHMPSRQVRQWRNTILHRRKIVSRITAIKNRTRAVLKSVGFKKAFHRGSWWKNANRFWMRGLAEEGQISSEELWRMNLCNLLDELELLEKQLHRVTEYLDSYLDKQAGGRLLMSIPGVGPRTAEAVLAYTDDVSRFGRGKQYCAYFGLTPRLDESGSLKRLGHISKQGPSVVRWLLCESSWKVIRKSKAMRAFYERVMCGQAGRKKIAIVAVGRKLLSIMRAMQMTGELFNEELVCRECGSIEMKKSA

SEQ ID NO: 397266 - protein, 323 aa, unidentified
MSSFVGVDIAKNTFDIATHLPNGKHKTKAKLANDAKGFKEFEAWLLKQAEPSALIVMEATSVYHLELAEFVYNKGYRVCVVNPATTHAYAASELRRIKTDKSDAKLIADFAREKAQKLKLWAPEPPKYRQLKAMVRRLDDLQEMEQMELNRLEVSDEKVKDSINSVLRHIEKEIAETHRAIKNHIDDDPDMRQMRDLIVTIDGIGEKTIERLLAELGDLRQYDDPRKLVAAAGLNPKLQDSGLLKGRTVISKIGSARVRAGLYMPGLVALRHNEAIIAMKDRLKANGKAPKQIICAAMRKLLHFVYGVLKSGQPFDPKLALAR

SEQ ID NO: 397267 - protein, 358 aa, unidentified
MTITSMAHPSAPQLTVGVDTHLDVHVAHAVDQLGRSMATVSIPTTPAGYQDLLAWARGLGEPVAWGVEGTGAYGAALARFLAANGQAVVEVNRPDRQARRRRGKSDPVDAEAAARAVQAGQVTVVPKAGDGQVEMIRSLRVARQTAMRARTQAINALKALLVTAPAELREQLRGRSAAALVRTAAALEPGPIASPLAAAMLSLRTLAGRHQALSAEITTLTTELDRLTTRAAPKLVALFGVGQDSAGALLVAAGDNPDRLRSEAAFSMLCGSSPIEASSGKTTRHRLNRGGDRQANAALYRIVLVRLCYDQQTKDYMARRTKQGKSKKEIIRCLKRYVAREVFAVLHDMRTTDSTKAA

SEQ ID NO: 397268 - protein, 350 aa, unidentified
MWYVGLDIGLKWHYVVVMDAEGHITQQQRLPNDPVLLQRFFETLDGPARVVLEATGNWVAVYERVEPYVQEVVLAHPLKVKAIASARIKTDKIDATTLAHLLRANLIPRAYIPPRAVREWREVVRHRAFLVRLQTRVKNRLHTLLAKRGVTPPGHSDLFGVAGRQWLTSLGLPEPYGAMRTRYLALLERFAHQIREVERTIDQTVQTTLEARLLETIPGIGRYLALLILAEIGDIARFPDPKRLVAYAGLCPSTYASGQTLRHGRLTHQGSPWLRWALVEAACHVWQAPQSRLCHVYHRLCQRRDAKTARIAVARKLCTILFAMLRKQEPYRDCPVSPLDPPRRLDAACR

SEQ ID NO: 397269 - protein, 407 aa, unidentified
MAIKSSKELREGPSVKVTRIGLDIAKHIFELHGVDRHGRVAIRKTLRRERVLEYFSQLPACEVALEACGGAHYWHREISKLGHTVRLLPAHKVKPYLDGNKNNAHDAAAICEASSRPSMRWVEPKTIAQQDLQSLHRVRQVTVRQCTLLANHLRGLLLEYGIAVARGTAALQRALAQLLEPDEQRLSPLLKQLIAGQWRMLKLHEQQVKVHDRRIANIARHDASCQALLKVEGIGPLTATALVATAGNGRQFKNGRHLSAYLGLVPGHSNTGNKTVMLPITKRGNRYLRTLLVHGARSTLYHARRKTDPRSLWLQRLQAKRGHNVAAVALANKNARIAWALLRFGQAYRPNLAHAPVAERGATPAASAPGRRAGLTLKLHRVSAASAESPIFPSRPQRVKGGTEKCS

SEQ ID NO: 397270 - protein, 371 aa, unidentified
MTKKIRYVGLDVHKCSIDMAIAGSEANSPVRSYGQIDNRLGILDRVIGKLESKESGLRFVYEAGPCGYQIYRHLTAKGYHCSVVAPSLIPKRSGDRIKTDRRDAINLVRLFRAGELTSIYIPTEEDEAMRDLTRGREDAVKAHRTSRQVLLAFLLRHGYRYSGVSYWSKAHWNWIGDIKMPHPAQQITLQEYVHAVQEQSARVQRLTQQIQELVAQWDLALLVQGVQGLRGISLIVAATTVAELGDLTRFASAKQIMAYLGLVPSEHSSGDSIKRGGITKTGNSHVRRALTEAAQAYSHPARESRVLLARLAGLPEEVRKIAWKAQVRLCDRFRRLTARGKNRNTVITAIARELAAFMWAIANELRPMRKA

SEQ ID NO: 397271 - protein, 324 aa, unidentified
MIDGILGIDVSKNTLDVSICSFTKVRTERFANSFDGWRHLLDWLIAQKVQRVHACLESTGRYSLGIACALYEAGHVVSIINPAQLRDFVRTKLGRNKTDGVDASHIREYCELFKPSPWAPPSEAHRRLGELQTIRAGIIAGLTEWKNRKNSGIADAEAQALADATISHFMSQLGAVDKAIALTIDNDSELRSKRDLLLSISGVGETLAGVVLAELPGPDVLRSSAEVVAYAGLNPRQHQSGASVDRATRISKIGNAVLRAALYMPALSAMRYNPAIVALATRLKSRGRLKPKQIVVAAMRKLLVLCFGVLKTGKPFDAAIAMGC

SEQ ID NO: 397272 - protein, 355 aa, unidentified
MNSEKYIGLDVHQATISVAVLDSKGKLVMESILETKAATILEFFAGLRGTLSVTFEEGTWAAWLYDLLKPHVAKLVVCNPRKNALLKQGNKSDKIDARKLADRLRLDDLKPVYHGETGVRTLRELARSYLTIVKDLTRVMNRLKALYRSWAIPCAGRDVYYTRHRDEWLSKIKEAGVRRRAEQLYQQLDMLQHLRQQARRELLAESRKHCITAKLRQIPSLGPIRSALAVALIQTPHRFRSKRQLWAYSGLALETRTSGEYRFVNGQLRRSKKQISIRGLNKDHNHDLKGLFKAAATRASFQPGPFQDFYQRSLAKGIKPTMVRLTLARKIAAITLTLWKKGENFDVEKLKSQAA

SEQ ID NO: 397273 - protein, 427 aa, unidentified
MPYQIAGIDVHKKMLAVVVADVEVDGDFRFERQKTGTTPLDLHRLADWLVEREVEEVVMESTAQYWRPVWEALEQHWRPRRRARDSAPRLAGTLHLAQAQSNRGPGGRKKDFPDAERLMKRLVAQELTLSFVPDAEQRLWRTVMGRKYQVTRNRVQLQNRLEALLEEAHIKVSSVVSDLLGVSARRMLQALADGETDPAALAQLAAPRLRATPEQLCDAFHASATLHPVYRRLLTLTLEELRMIEDHLGQLDQQMADLLTAHHDAVQRLAEVPGLGVDSAQQIIAEVGATAATFPSSKHLASWMGACPGNEESAGVNYNHRCPKGNRQMRRVLNQAANAAVKAKGTIFALVYRRLVPRLGHAQAIGAITHRLCRLIWKILHQRVRYEERGPAVSAEAKKVRARKMIRELRSLGYRVEPLQAPSTNPA

SEQ ID NO: 397274 - protein, 341 aa, unidentified
MVYVGLDVHKCWTTVAALDPDSGEVWRFDRVPNTRADFAEVLRALPEPRRGVLESGRNSWALHDQIRPLFEELYVADAAELKRRMSGRGAKTDRKDALKMALVLAEGRVPAVWVPSLQIRDVRTLTRGKVRLTQLRTQVINQVRSLCAMFGQECPASSLRTQKAQAWLQQLALPPLATQMLQRWVQIWQLLEACVAEAEQQIEQVVAHDEEAQRIQTMPGVGAFTALTVVAEIGDVRRFDSAKALIGYSGLAPQVHQSGERTRHGPLPHSGNPWLRYVMVLAAQHVACRRTDSVLRRRYWRTHMRHGPNPAKIATARKMLALAYHLLRRREDYQEKLLTAA

SEQ ID NO: 397275 - protein, 401 aa, unidentified
MISVGIDVSKEKSMVCILKPYGEVVLSPYEVAHTEEEVGKLITRIQSLDGEVRVVMEATGAYHLPLLTSLKQAGLFVSVTNPLAMKKYASATLRKGKTDKMDSVRIANYGIDNWFRLTDYSAPEAIYGELRMLGRQYAHYISMRIKSKQVLTDLLDRTMPGIKSLLSSKRSEKPTKDKLSDFVEKYWHYDKITGKSETCFINDYCHWAKKKGYQANVAKAKAIFALARNGIPTLSSSVPSTKMLTLEAIKVLREINRTLDTILTQMQSLASNLPEYNVVGAMKGVGVVLAPRIIAEIGDVRRFHSSSALIAFAGIDSPPYQSGGFTGTKRTISKRGSSLLRKTGYEVMKCLKTVKPSQDAAVYLYMLKKESEGKPKKVAKIAALNKFLRIYYARVMEVYQN

SEQ ID NO: 397276 - protein, 347 aa, unidentified
MAFIGVDLHTNSFTICRLHDDGSEAFETFTLSASALQAFCMSLDADDEIAVEATGNTAWFCDEIRPCVGRIVVVNPRQFQVIRKSVNKTDKNDARSLAFFLSKDMLPETRLKSTAEAELGSLVATRDVFVKQRTMLLNKIHAMFVRRGTKLKKEGLASKKRLRELDVSQFTALEQVELNALRNQALGLTETLAELDKAIEAAGAELPGHEGISSIKGIGSRSAAILLSGIGNIEDFESADKLAAYVGIVPKVSQSNNTDNRGRITKRGNKLMRTTLVQCTLIATRYSGYLNAFYQRIKERRGAGKAIIATARKLLSIIYDALKNGWVFEDFTEFKIKQNQCPTGQPS

SEQ ID NO: 397277 - protein, 342 aa, unidentified
MTNRCQLHVEVFAGLDVSAREISVARLRSKEKTPTVASFANNASGHKALLAYLLQGTEHVRVCLEASGNYSLDLALALHAHRQVEVSVVNPRRARRFAESLGERSKTDPVDARVLCEYAARMPWVTWRPPTARALRLRAITRAIESLGVMHTQEKNREHALKASQALPSLVIREMRRHQRYLEHRMEHLRRKARQLIAKDPELDRRFRLMVTVPGVAETSALQILGELVVLPDSLDARQWVAFSGLDPSHFTSGTSVEKRPRISRGGSRHLRRALYMPALVALRREPHLRTFYQGLVNRGKARLQAVVAVMRKLLHALFAMFRSNQTYDGAKLCSAGLASCA

SEQ ID NO: 397278 - protein, 377 aa, unidentified
MNQSTTVYVGLDVHKDSIDIALADAPRDSEVRHLGTVAGGTEAVSKAMRRLVSAGHRLHIVYEAGPCGYALQRHFAGLGWRCEVVAPSSIPRPSGERVKTDRRDAMKLARLARVGELTPVRVPDEADEALRDLVRARDDAVREQRNARHRLKALLLRNAIAYAGRSAWTAAHLRWLAGVKMEHAAQQIAFQEYLHAVSESGARITRLEHALRDALPTWTLAPVVAALQALRGVQLIAAVTLVAEIQDFWRFANPRQLMGYLGLVPGENSSATRRRLGSITKAGNAPARRMLVEIAHLYRHPARVSPVIARRQADLPKTVTDIAWNAQTRLCARFRRLAARRVPHNKIVVAIARELLGFVWAIAREVTPAPSTPLQPH

SEQ ID NO: 397279 - protein, 381 aa, unidentified
MNIQNIAAPVAGAENTDCLFLAIEMSLSHWDVLVRMPGSDKLSRHRLAGGDGPALLALIAKLRQRAERQAGRSVRVICCYEAGYDGFWLHRLLAENGVANHVVDPASVLVDRRSRRRKSDRLDGEALLRTLMAWWRGEPRVCSMVRVPSIAEEDAKRGTRERERLVKERVQHVNRIKGLLATQGIYDFHPLHADRDKRLARLALPEHLRAEIGRELARLTLVINQIAMIEADRDAVLTAAPSPEDAGAAKIRKLAELKSIGPEFATGLVREVYYRDFANRRQVGGYTGLVGSPWLSGKLAVEQGIGKAGNPRARTLLVELAWMWRRYQPQSALSRWFNQRVGSQKGRLRRIAIVALARKLAVALWHYLEHDILPEGAVKKS

SEQ ID NO: 397280 - protein, 341 aa, unidentified
MKSVGVDLHKQSISVCVMVKDGQKRKVEQRRSLRCADQEGIRRLFEQLGSFQVVVEATSSYEWFFLLIEDLADRCVLAHPKKLRVIAESKHKSDKIDAQVLAEFLLLDMIPESYRPTPRVRQHRVLVRHRNAVQKQITAVKCKLRHKASFYNADIAALFTARGLLHLGKIAMSSADRFECRSLQDQLAFLKGQLQAANQELASFAQTAPVAEREARAVLATMPEVGPVTTDVILSETGDVRRFRGAKRIVAYAGLDPGFRESAGKGKQLSITKEGSRLLRWALIETAWRLVRKTARWRGLFDRLRATTGHKKKAIVGVARRLLCVLYAMLRDGKAYRLASG

SEQ ID NO: 397281 - protein, 346 aa, unidentified
MEIIRVGVDLAKNVFELYGVDKHDRPVWRVSLRRARWLQELQRRVAPGAEIGMEACAGAHHWGRQLRARGYRVKLMAPQFVKPYVKSNKSDRNDAAAICEAMSRPSMRFVELKSVEQQDIQAVHRVRAELIKQRTGKANQIRGLAGEYGLVAPVRIGPLRHALPEWLEEARNGLSDRFRRVLAGLAEDLRRLDERIKELDEEIASIVRELPAAQRLLALRGVGPTIATALVAALGSGESFARGREFAVAMGLTPKHRGTGGKERILGISKRGDAYLRQLLVHGARAAVRTARGKVDPLSRWINGLLAHKHSNVVTVALANKTARLAWALIRHDVDYDPALAANRAQ

SEQ ID NO: 397282 - protein, 334 aa, unidentified
MKELKSCVGIDISKDSFEVCIKELVGERVVIKATHSFQNSFTGFADFLQWALRKVPNPVFVMETTGVYHEELTHFLYSNEQKVSVVLANKIKHFAKSLNIKTKTDKADAQMIAQYGLERQLEWWQPMMPQMKNLRDLCRERLSLKKDIVRCKCQIHGMKHAHSTLDVVLQIKEQQIEFLEKNIQTIENEIIRITQEDQDFNERVSKIETIKGLRLLTIVTVLCETNGFTQFNNIRQVVSYAGLDIEERQSGLFKGKTRITKKGNSRIRQCLYMPALSATSYNEKIKALYQRVIERNPTIKQKGVVAGMRKLLVLIFVLWKKNEAYNPEYQWNAH

SEQ ID NO: 397283 - protein, 394 aa, unidentified
MATDNKPWRNRKERKEWARRLQAEDPGLEVVHSHAAGIDVGNGAHYVAVRPDSDPQPVRRFECFTADLHRLADWLESCGVKTVAMQSTGVYWIPLYEVLEERGFKVYLVNARHTKNLPGRKSDVQESQWLLKLHTYGLLNNSFQPPAEIRILRTYWRQRAEHVRGAATCVQRIQKALTQMNVQLANVISDVSGLTGQTIVRAIVAGERDPVKLAELSQPGIQASREEVAKSLEGNWRPELLFVLQQEIAMYDVYQQRITECDQELQKQLAGFAGTVPLHAPKAEQKRKRIKPAKNAPRFELRGELQRITGVDLTRIDGIDVMVAQTLVSEVGLDMGQWKTEAHFASWLGLCPDNRTSGDKVLKRGTRRVVNRAATALRMAATSFRSFLRMLRAS

SEQ ID NO: 397284 - protein, 412 aa, unidentified
MQVLYQRCCGLDIGKKEVVGCLMTPGEGRDGVTKEIRKFGTTTSALLGLRDWLMAAGCEHVAMESTWPYWKPLWNVLDGHVGLMLVNPAHMKAVPGRKTDVKDAEWIADLPRHGLLKPSYVPERDQRELRELVRYRRSMIEERAREVNRVQKVLEGANIKLGSVASDVIGVSGRDMLTQLANGADDSEQLADLARGRLKEKHEQLVEALTGFVQPHQRYMLRKELDHIAYLDGQIAELDAETERRMSDAEKVLQRLDTLTGVGLRTAQAIVAEVGPDVSHFPSHDHLASWAGLTPGQNESAGKRKPARTQPGNKHLRATMIEAARAAAHSKGTYLGAQYERLRRHMKGNKALVALAHAMIVIVYRMLQDGTEYHYKGPNYYTERDRKAIELAAVRRLNSLGYVVILQPDTAA

SEQ ID NO: 397285 - protein, 351 aa, unidentified
MNILAMDLGKCKTVICFYNSNTGERKFEKVRTEPKRIHDLIVEKSPKRVVLEICSSAGWVYDIVKSLGIEVQVANPNTQAWRWKNVKRKNDREDALKLAQLSAMNQLPTVHMPKRQVRQKRAMIQYRQRLVKRVTQIKNNIRAILEKEGLSMAKGKCGWTKRSLEQLSKMALPLEECSFDNLWCGQLNVELGMLEATNKCLADVTAKLDEQAKSNEHIQRLQTAAGVGPRLAETIVAFIDEPGRFASGKQVGCYAGLTPKQYQSGSMDRQGRISGQGNKLLRALLVEVSWLGLRHNRWMRETYNRLLRGSPSRKKIAITAVARKLLVRCWAMLRDEQPWRDLKVEMEKQAA

SEQ ID NO: 397286 - protein, 386 aa, unidentified
MPQLNDLSRSLVTLEQDATLIAVIEMGQSSWLVAGIVPGVERQPLKKLAVDESALLKLLHRWREEAEQAGHKIKRIAVAFEAGRDGFWLARWLRARDIEVHVIHASSVAVSRQHRRAKTDRLDTELLKRAFLGWLRGERHHCKMVAIPTIKDEDGKRPNRERESLVGEQSRIINRIKATLVRLGIRGFNPKLKKAAERLEGLRTPEGEPIPPNTLSELHRDMERRRLVRDQIRQIESARLDHLEHEPGEGAHAMVRLLARVMGIGIETADMLVQEVLSRNLRDRRAVARYAGLTGSPDESGKKRREKGLARSGNPRVRRGMIQLAWRFLMFQKDSALAQWFRARTENARGTRKTMIVALARKLLIALWRLVRDGVVPDGVILRPAQ

SEQ ID NO: 397287 - protein, 327 aa, unidentified
MIIVGVDYHPSVQQVAFLDTETGETGERRLNHSDGEAERFYRDLQRRQVKVRVGIEATGHARWFERLLAELKFELWIGDPARIKAARVRKQKTDRQDAQLLLRLLIEGRFPQIWVPSPENRDLRQLIWHRHRLVQMRTRAMNQIQAAAMNEGVRRKKTLWSKTGRRQLEALPLAPWATRRRQDLLELVDRLNTTIDELTAAAEQEARKRPEVLRLMTHPGVGPITALAFVLVLGSPDRFGCGHQIGSYLGLIPCEDSSADRQRLGHITKQGSSLLFIWPCVATVASLRLRWHANWPSASTGCGVRDSITHRLCSSVRTRESPDTSMV

SEQ ID NO: 397288 - protein, 485 aa, unidentified
MYLQMTNHLWAAYDASSFSFASAGMLAFADECSGSAGPPARYIAFAERQLGLPRRTRLIPLEVSMAHPPTQEFAAFVGIDWADTSHAVCLQAAGSDTRESSVLAHTPEAISAWVAALRHRFGGQPIAVCLELTKGPLVSALRAHDFLVLFPVNAMTVAKYREAFTPSRAKDDPSDAELQLELLVKHRDTLQKLSPQSATMRTLDQLAEFRRRLVEDKVRLTNRLTSALKNYFPQVLHWFADKDTTIFCDFLTQWPTLKAVQLARRSTLERFFRAHHVRDATVIDQRIQASKRATPLTTDAGGIAPTALLGHARVRQLRVTVHAIDDFDDAIAQRAQSHPDFPWVNALPGAGAVLAPRLLAAVGEQRDRDPSAAALPQYAGIAPVTERRGNTSWVHWRLQGPTCLRHTFVEWAAESIRHSCWARAYDQQQRDQGTSHRAAVRALAFTWMRILLRCWQHRTPYDESVYRTALERRGSPPIHHLVRAS

SEQ ID NO: 397289 - protein, 415 aa, unidentified
MKNHAELTHFAGLDWAKDHHDANIMDRQGQEVARFRFAHSGPGWQEWREKIREYPALGVAIETSQGAAVEQLLASGVTVYPVHPQAAKAYRQRQAPSGTKDDELDAWSLADALRVDGAHWRPLSPQDAMVEELRLLCGDEAALIEQRTALVNQLQAALHAYYPAALEAFEDWTAPYAWAFIQAFPTPQRLVQATGHRRRVFLHTHKLWRPGTAEKRLEIFARADQFCGGEAVTRAKSRLAVALCRSLDALQLQLEDYRAAIEKLFAEHPDHDVFGSLPGVGVTLGPRLLSGLGANREQYPEVQGLQCVAGTAPVSFQSGQIKRAKIRWHCDRFLRHTVHLWAGCSLKSCAWAAAYYAAKRKDGKSHACALRCLAQRWLKILWKMWQTHTPYDPEYHARNQQRHGSWVLQLNPKTT

SEQ ID NO: 397290 - protein, 310 aa, unidentified
MDRIIVGIDVSKDRLDVVVRPSGEIFAVDRNVAGVEKLAARLRELSPHIVALEATGGFETVVAAGLGAAGLPVAVVNPVQVRAFAKAIGQRAKTDPIDAGVIAHFAAATNLEPRPLPNEQTRLLADLVGRRRQIVAMIGAERQREQRLTAPRLRKSIARLVKALEKELASLDADIDDTVKGSPAWRAKEELLTSVPGIGPVISRTLVAELPELGQLSHKQIAALVGLAPFTRQSGKWRGKSFIGGGRTAVRAALFMGAMVAKKHNTVLKAFFDRLVAAGKPKMVALIAVARKLLTILNAIVRDSQPWQTA

SEQ ID NO: 397291 - protein, 351 aa, unidentified
MPRKSSVRIVTTIGIDMGKTTLHMVGLDSCGAIVLREKVSRGRIVSRLANLPSCLIGIEAGMATHYVARELAALGHDVKQVPPIYAKPFRQGHKNDFRDALAVAEAVQRPTTRFVPPKSNEQLDLQALHRVRSRLVSQRTAVINQIRGFLLERGIIVRQGLRFLRQLLPDILAKRTDVLSPRMARIVSDLAGDWRQLDDRIETVTDEIETLAKNDDSCRRVMTVPGIGPIISSAMVAAIGNGSAFSRGRDYSAWLGLVPKQMSTGDRTILGRISKRGNGYLRMLFIQAARVILLRPANWPKHGFGAWLVRAIQRLHPNVLAAALANKLARIAWTVLAQERSYEARVTTAEA

SEQ ID NO: 397292 - protein, 422 aa, unidentified
MRAIGLDVHLDFCEIAIAENGRVRSAGRIATKPDELHLFAASLGPQDRVALEVTGNAWRIARILQPRVEQVVVVSPSDTGIRQARAKTDRLDARTLAKLLATGELDSVWMPDHDTWVMRRRLSRRSQLVHARSRAKNQIHAVLMRQLIGRPPMSDVFGVKGRKWLAGLVLPIEERETVDGAMRQIAFLDAEITAVERLIAQAALESPQIKRLMTVPGVNVICAATFLAAIGDIRRFESSRKLVGYLGLDPRVRQSGSGPATHGRISKQGSVGARHALVEASWSTVRQPGPTRAFYQRVRGRRGHQIAIVAAARKLACLFWVLLTREEDYAFGQPSLTKKKLRGLELTAGADSKRGTKNGLWAANGAMRQAERELAQQAESAYQHTVRQWQAAEAAKVGASVTPGRASSGPSKGQVARQTTSP

SEQ ID NO: 397293 - protein, 408 aa, unidentified
MLEPVVKRCVGLDVHKMVVVATALVEQQDGSIKEETKQFGTFRKHRRQMVRWLKSLDVELAVMESTGIYWKSVFASLEAAGITAYVVNARDVKKVPGRKTDVSDSKWLADLVRVGLLSPSFIPPRDLRELRLITRYRMKVKGMLSAHSNRLHKCLDDAGIRLGGVVSDIRGVSARYIIRGLLEGKKPQELVAHVHGRLREKIPDLLASIDEPLSERHKWLLRSIDRQITALEQEIMDIDDYLAEQMIAYNKQIELLQTIPGVDFIAAVMLLVEIGPEMECFGNAHRLASWAGMCPGNNESAGKKKSGRTRKGNATVRKVLCEIANAAVKTNSQFKGQYKGLVIRRGHKRATVAVGHKVLRVVYALLKSLKPYMDPAIDYSQLVVKRNAPRWLSALKKYGYLPELAKAA

SEQ ID NO: 397294 - protein, 393 aa, unidentified
MVYVGIDVAKDKHDCFIANSDGEVLYDVFTIQNDMDGFEDLLFKIKTASRDLNKVKVGLEATGHYNCNLLGFLKSKGLPTIVINPLHTNAYRKSLSLRKTKTDKADARAIASMIMSDVSLKPYSDTLYHNENLKSLSRYRFDKVSERAKLKQSVSRLVNILFPELEKLVSIIHAKAVYVLLSEFPGAHQIASANLKHLTALLSTASKGHFGRDKANEIREAARRSISTYLPAKSLELKHTINLIRELSSEIDEIETEIKKIMDSIDSPILSIPGISYGIGAMIVSEIGDFSRFDSPDKILAYAGCSPTTYQSGQLYSSHAVMEKRGSRYLRWALINAARYVCNWEPTFTAYLEKKRSEGKHYYVALSHAAKKLVRLLYHLETTGEKYIPQTLS

SEQ ID NO: 397295 - protein, 309 aa, unidentified
MDAQYVGIDVSKDRLDVHVRPSGEAFAVARDGEGLAALVARLQPLAPHLVAVEATGGFEITVAAAIAAAALPLAVVNPAQVRHYAQALGRRAKTDRIDAAVIARFAEAVRPQPRPLPDEATQMLADLVTRRRQIITMMVAERQRATRLPKRLKRSCERVVRVLEAELAALDQDIDTIVRGSPVWRAKEDLLASVPSVGEITARTLIANLPELGTLDRRKIAALVGVAPFTRQSGQWQGKSFIGGGRPNVRAALFIATMSAVRHNPTIRAFRQRLLAKGKPKMVVMVACMRKLLTILNAIVRDQKPWQLA

SEQ ID NO: 397296 - protein, 397 aa, unidentified
MAKDKLVARAVAGDGRTGKSLTFGCNLAGFESLQGYAQRSLTNLGASGYVVAMEPTGHYGEPLAAWLSARGVEVHAVQPLKTARAKELYDGTWRKTDEKDALVIADLCRRGLGSRWRLQTGAFAALRVLTRRREQLVERRRQVVNRVHRHRDVLFPELRGLFSKLEGRASRWVLRHVPTPAAVSTMGVEALAEKLYEASRRQLGRARAEAMVAAARSSVGISEAAASHEFALGQLLDELEALLAQLKAVERQMTEQLAAVPYAGRLLTVPGFGPVIVASLLGEFGDLRNYRVAAQLIKMAGLDLAESSSGERQGHHHISRRGRPYARQLLFMAALSAGKKALAERRRRLVEEKGKPAPVAVIANACALLRISHALVRDDQDFAPARHAGALEIAKAS

SEQ ID NO: 397297 - protein, 332 aa, unidentified
MKKDQVFVGIDVSKATLDVFIHGLSQYFVVENNLEGFVCLLEKTMMGAKCKKEELFFCFENTGKYSRMLSVFLQSENILFTMESALQIKKSMGITRGKNDRIDAKRIAHYAYEKRESLAPTILPGAKIDQIRSLLSLREKLLKHRTAYKNGISDLHDCYEVGECELIKEVQQRQISNLNDEIKKVEQKMESIIESDYSISKNYKLILSVRGVGKILGFYLIGYTANFTSFANARSFACFAGIAPFSYSSGIVKGTPRVHPFANKMLKALLNLAAMAAIKYQGEYLQYFNKRVNELGKNKMSTLNIIRNKIVYRVFAVVQRQTPYVDLLKYAA

SEQ ID NO: 397298 - protein, 324 aa, unidentified
MKVVFPICCGVDVHKSFVVATIITTPTDSLQPHYQKKRFSTFNSDLNRFATWLLEHNCLDVCMESTGKYWVPVFNILEKRGIRVVIANPKWVKAVKGNKDDTKDSKWIGDLFRIGLVKSSFIPELKIRILREFLRYRYKLVSMKSSEKNRFQNAFTVCNVALDSVVSDMFGKSATAITDYLTSDESFDPEHCVSLLQRSLKKKAEKVLESIEGYSISDEQKARIKIIREHYDFIEKLIAKVDTCVNEMVEKYEGEINLLCTIPGIDRNSAITIISEIGTDMSQFGSSKRLCCWAGLTPGNNESAGKKKSVRISRAGVYLKPALV

SEQ ID NO: 397299 - protein, 456 aa, unidentified
MGHARARKVPAQLVEDEDYQLRHERVAGIDIAKAKADVCTRLPPDRDGGRRASRVEEVPATAREILALAGRLLADGVQLAVMEATSDYWRIWYYLLETAGLNVQLVNPAHARQLAGRPKTDRLDAQWIARLAEMGLLRPSFVPPPEIRALRDLTRTRLQLVRDRTREWQRLEKLLEGALIKLSSVVSRLARAKTARDILEALADGQRDPRALAGLAAWQIKGGREAVEQALEGMLPGDHHPRLIRIHLDHITFLDRSIAAIEDEIDAALDAIPAAWGISADGVPSPDPGPGQAALTAVQRLAEIPGVSPKLAMAIIAETGLDMTQFPTAAHPVSWAGLAPVARQSGPRTRKPKKGQGDAYLKGYCTQAANGAARTDTFLGERLRRLSRRLGGNRAKCAVARSILVIIWHLLSDPEARFADLGPDWHDRKADRDRKTRAHLRGLQALGFDVTITPAA

SEQ ID NO: 397300 - protein, 360 aa, unidentified
MPSIPHPSRPRIVVGVDTHKQTHVAVALNQVGAVIGETTIPAHRAGYAQLQRWACELGEHEGEVEFGVEGCGSYGAGLASFLRRAGHRVVEVNRPDRSVRHRRGKDDTIDAETAARAVLSGAATAVPKTGDGTVEMIRQVKIAKDTATKARSQAIITLKTIIVNAPAELREILEPLGDKALIEECRKLRYESMSGPIDAACYTLRALADRYHALDQETRLHDRVLATLTNRAAPALTSLFGIAEDSASELLIVVGDNPDRINSEAALAKLCGACPIPASSGKTSRHRLNRGGHRQANAALHRILVVRMRFHEPTITYVTRRTAEGKTKKEIMRCLKRFLIREIYQIIVAPHKTNPLPSTT

SEQ ID NO: 397301 - protein, 371 aa, unidentified
MNNNNIVVGLDVRKKTIAVAVLYPGIEQVSERQMIDNMLENIEKLVRRLAAQGKPVFCYEAGPCGYPLQRQITQLRYVCEAIAPALTPRRPGDKVKADRRDAEKLARWFRAGELTIIRIPTREEESVRDLVRAREDALGDRLRARHRLGKFLLRQRRIYRETKSWGATYREWLRTQRFEWTALQQAFDAYVRHVDEADERLAELDDRVDDLAQQPMYQVPVRYLRCLKGIDTLSAMTLAAEIQDFERFQRAPSFMAYTGLVTSEYSSGQRVVRGAITKVGNAHVRRILVEAAWHARLPSVKIGHTLAERRKGCPLEIRRTAYKAQRRLYRKYWRLIHRGKRPSVTVVACARELAGFVWAISWRFPPIPTTA

SEQ ID NO: 397302 - protein, 411 aa, unidentified
MGIDISLRKGAVSFLNQEGKHLGKVFEISNSPSGFDQLNEKISQAVNQYNFQRIFLGLEATSNYGFHLMDYFTRTTLPCEVKVYQINAKYIKRFKKAFPEREKTDLVDAQFIAEYLRFGKLPVDYKPEALRLPLKRLVRYRYHLVKSIEREKKVFIANLFLLFPGWVQEKPIKTLGATSMAVLNDLSLDDIVNTPLEEMATFVAKAGKNRSPDPEAIAEKIKQAARESYRIRPELANSCQFILASITKTIAALKKALAELDSAIACEGKGFINPLLSIKGIGPVYATGIIASIGDIKRFSSDDQLARFAGLVWKRNQTGETELQEKRLVKECDKYLRYYLVEAANSLRTHNEEYQAYYLKKYQEVSTHQHKRALVLTARKLVRLVFALLANNQLYDPQRRFQSPVAPCENL

SEQ ID NO: 397303 - protein, 342 aa, unidentified
MNSTYHYIGLDVHKRTVAFCEKRADGKTVASGSFSTRREALKQWVEQRTIPWVGAMEATLFSGYLYDALTPHAVEIQVGHPARIKAITAAKHKSDTIDAETLANLLRADLFPQCHMAPPLVRELRRVLRYRNFLVRQAVTMKNKTTGLLMEVGAAYDAKRVHQRGYFHELLEDLEEVPPSVVQLLRTTRGGMEMFQGAQKQLVDALVRHDQLRERVERLRSIKGVGEVTALTWALEIDDPARFSNLKKAHSYCGLCSGQHESAGKNRRAPLSKQRNPHLQTVLIEAAKLAPRWNPQLREVHEKALEQDKNRNRATCIVARKLVAYLMAVDRSGQPFQTPDEE

SEQ ID NO: 397304 - protein, 311 aa, unidentified
MITDSIGLDVSKEKLDVHRLSDGEFAQFDNTVKGFKAFRKWATADSLVRVVYEATGPYHKAFERACGDNLPLVKVNPLQARRFAQASGTRVKTDRVDARMLALMGVAFDLVADKPLTKDQHDLKELHGARAALVKDKTRLLNRQKNLTLPLSRSQSEKRLAQVKKQIAELNEAIEALLRADPVASRNIDILKSIPGIGAISAATILIEMPEIGTLTRKEAASLTGVAPMTRQSGKWQGKSFIQGGRKTVRDALYMPALVAARYNPDLKAKYDKMVAAGKPPKIAITALMRKLIETGNALIKVDRLWVEKCT

SEQ ID NO: 397305 - protein, 344 aa, unidentified
MGEVSTIGLDIAKSVFQVHGVDSSGAVVIRKRVSRLKLLEFFAALPPCLVGIEACPSAHHWGRELQGLGHTVRLMPPSYVKAYLKRSKNDANDAAAICEAVTRPSMRFVPIKTKEQQAALMLHRARQLLVRQRTMLSNALRGHLAELGIVSAKGRNGISELLRIIADGADNRIAAATRAILDVMARQYSAIGAEIRSIDKSILTWHRSCEASRRLEEIPGIGPIVATALVAEVGDWKEFRSGRNLAAWIGLVPKQRTTGGKDRLGSITKQGNRYLRWLLVAGAMAVIRYAQKHGTKNRPWLGRLMERRPTMVAAVALANKIARMAWAVMVRGERYKEPTLLMAA

SEQ ID NO: 397306 - protein, 270 aa, unidentified
MGEVITIGLDIAKSVFQIHGVDDDRALVIRKRVSRAKIHEFFADLPPFLVGIEACPTAHHWSRELQSLGHTVKLMPPSYVKAYLKRAKNDANDAAAICEAVTRPSMRFVATKSKEQQGALMLHRTRQLFVRQRTMLSNAIRGQLAEFGIIAPVGRLGFGRLLEMMDGPEELGVPKTAWVCLMGLAEQYQRIQGEIGKLEQCIQAWHRSSELSRRLEEIPGVGPIVATALVGTITDPHAFASGRHMGLDRAGAAAEIDRRQGSSGRHNQAG

SEQ ID NO: 397307 - protein, 353 aa, unidentified
MIIIGVDYHPEFQQIALLDRGTGEFQEKRLTHSQEAEKFYRALADQKVRVGMEASGHARWFERLLAELQIELWIGDAAEIQSKRGRKQKTDRQDAQLILQLLLEERFPRIWVPSAENRDLRQLLWHRHRMVQARTRIMNQLQAVAINEGLRCKKRLWRAGGRQQLESFRLAPWASRRRRDLLELLDRLNPTIAELSQAIEQEAEKCPAARRLTTHPGVGALTALAFVLILGKAERFQCGKQVASYLGLVPLEKSSGNRRRLGHITKQGSSLLRFLLVEAAQVTVRSLPEWRSQYFHLVMRRGRKTAKVAMARRLAIRLFWMWRQGWDYQPSKSSVRTQDSPEIAMVCTRTPSN

SEQ ID NO: 397308 - protein, 388 aa, unidentified
MDVLYQSCAGIDVHQATVVVCILHGPLTSTRPKREMAQFDTTTKGLKACHDFLTQFHVEAVGMESTGVYWRPVWHELCDDFELILAQPAHMKAIPGQKTDKKDAHWIAQLTRIGLLPRSFVPDETIQELRELTRQRKHYVESRNRETNRIHKILQSGGIKLTTYIEDIMGASGRNLLQLLIDETPITPRMIHQSVYTSLKRKVPQLLEALDGYFSAHHRFMLGQSLEIYDFYQKQIDCLEERINGYLNLYERPVEILDSIPGMDLITASVIIAEIGVDMSQFPTAGHLASWAGLCPGNNESAGKKRSTKIRHGNSYLKRCLCQAVFAAKRQKGSPLAERYYQIQSRRGPQKATIALAHQLLKIAYILLKENLTYQEFVLQKRLLETSQ

SEQ ID NO: 397309 - protein, 398 aa, unidentified
MTESSDYESVQVFIGVDVGKDTHHAVAINRSGKRLFDKALPNDENKLRSLISDLKQHGQILLVVDQPATIGALPVAVARSEGVLVGYLPGLAMRRIADLHAGEAKTDARDAAIIAEAARTLPHALRTLKLADEQIAELSMLCGFDDDLAAQTTQASNRIRGLLIQIHPALERVLGPRLDHPAVLELLQRYPSPEKLASLGEKKLAAQLCKLAPRLGKRLAADIAQALAEQTVVVPGTNAAAVVLPRLALQLITLRKQRDEVALEVEQRVLAHPLYPVLTSMPGVGVRTAARLLIEVTCRAFASAAHLAAYAGLAPVTRRAGSSIRGEHPSRRGNKALKRALFLSAFAALRDPLSRAYYTRKMSQGKRHNQALIALARRRCDVLFAMMRDGTFYTPQAS

SEQ ID NO: 397310 - protein, 337 aa, unidentified
MKYSGIDLHSNNSVVTVTDETDKVIAEKRLPNDLSKIIGFLQPWREEMFAVVVESTYNWYWLVDGLQEAGFVVKLANTGAIKKYDGLKHSGDEADARQLAHLLRLGILPTGTILPPEQRAVRDLARKRMQLVRSRTSHIIAIENIAARQRGMKISSNQIKRLTADDVDQMNFPVDVGLAIKSNLAVVTTLGEQIDLLEKRLQEVMDERPEYGLLTSVPGIGRILASVILLETGTIDRFASVGNFASYARCVDSQHMSNGKKKGEGNTRNGNKYLSWAFVEAAYYAQRFCAEAKRFYERKKAKTNTAVATKALAHKLARACYHMLKEQRPFDAARCFA

SEQ ID NO: 397311 - protein, 321 aa, unidentified
MTAPAPAAGPFVGIDVAKDSLDVHVRPGALAFREANGEAGIAALVTRLAALAPALIVLEATGGYQDPLVAALAVARLPVAVINPRQARRFAEATGQLAKADRIDAAALAHFAQAVRPQPRPLPDDATRALAALLARRRQVLQMLLAERQRHAAQPRGPIQRAIGRHVAYLERELGRLDGDLGAAVRASPAWRERDDLLRSVPGVGPQVARVLLAELPELGRLPGRQLAALAGLAPYARDSGRGHGKRRIFGGRAVVRSALYMAALVATRFNAPLARCYQALLARGKAKKVALVAVARRLLVILNAMLRDHRPWDENLALPT

SEQ ID NO: 397312 - protein, 312 aa, unidentified
MPENTEPDYVGIDIAAERLDYCVSETDEGNCRNDAAGRAELIAKLKQLPHPRVICEASGGYEKLIVAELLAAGIEVCVVQPARVRAFAYAEGLLAKTDRIDARLLRRYAQKVHLRLAVPVAAALATLRELLEHRRALTTQLCEVEGRLPLAGMTLAKLLGRQRTFLKKQIEQIEKMISQHIDTDPDLRGKSERLQQIKGVGPVLASTLLAYVPELGKIESAQLSALIGVAPHPRDSGKNRAPRHVRGGRSQVRNVLYMAAVCAARCNPILAAFYQRLKAHGKPPMVCLIAVMRKMVCLMNRLIQDPNFVLAQ

SEQ ID NO: 397313 - protein, 406 aa, unidentified
MIYCGIDWAEKTHDVALVDDDGTLLAKRHITDDATGYKILLDLLAEHGDTEDNPIPVAIETSRGLLVAVLRTGKRQVYAINPMAAARYRDRHAVTRKKSDPGDALVLANILRTDMHAHRPLPQDSDLARAIAVLAQQDAVWNRQQLANQLRSLLREYFPAALDAYLHWQNGLCRPETRVLLELAPTPSRAARLSLAQLRSALKRAGRQRRIDADAERIREVLRAEYAHQPLLVEDALGKQMLALLRQLEAACTAADQLAEAVEEVFPQHPDAEIILSLPGLGTQLGARILAETGDDHARFATARGMKAYAGASPITRASGKKSSITRRWVKNDRLNHTGYLWAFASLTHSPGAKAHYDRRREAGDWHAAAQRNLFNKMIGQLYHCLQKHILFDENLAFPTQLLEAA

SEQ ID NO: 397314 - protein, 393 aa, unidentified
MFYLGIDIGKRTHAASIMSDTGKILLKGFSFKNTTEGGEQLLQQLNRFSIDPGNFSIVMEATGHYWLALFSFLDTNQYTVHVINPIQTDGWRKGTEIRKRKNDRIDSVLIADLIRYGSFGESALSDEPLLELKQLARYRSYLKGTASDFKRKIIAVIDQIFPEYETVFSKQGIFGKASKQVLYELSSPEAINALPTEKLAQFLSEKSRGRLRLEKAEKLKQAAANSFGITLAQDAYLFQLRSMLEQLMFLETQVEEVDQQIEQRMKQLDSVILTIPGISYTNGATILGEIGDISRFSTPKKLVAYAEIDASVTQSGEFEASRNVMSKRGSPYLRKALFSAALVASNHDPTLKAFYQKKISEGKHHFTAVGAVARKLCYIVHAILKNNEAYKIQ

SEQ ID NO: 397315 - protein, 417 aa, unidentified
MNHPKMQYTYVGIDSHKDTHTAVFIDCFFEKLGEVQFNNRPSCFDEFLLQAQTYLMPDTCFMFGLEDVSSYGRTLMVFLKSKGQQVKHVNALLVARERKNQNIVQKSDSIDAECAARVLLAKFGELPNAEQQDMHWILRSLVTRREFLVKHKAATKTQLHSLLTQHYPNYRSFFASVDCNAGLAFFMRYPSPSALEGTAIDELATFLWEESKGQFGADKAQHILSSLEDTTVQFQDVRDMVVQSAIRQIRYNMEEIERLDTSLASFMAKFDCTLTSIAGIDTVTAATMLALIGDIKNFSSPAKLARYAGIAPVTYASGKKDLQFANQRGNRKLNSVFYILALRLTIAIGPTQKVLNSFFYDYYRRKLGEGKTKRQALKCVQRRLVNIVWTMLTNGEEYVNPPMFDLPQAMVDDVATH

SEQ ID NO: 397316 - protein, 389 aa, unidentified
MVSVQSNRGGHAAFMEGAPMLDATTFIGLDVHARSIKAVSLDVMTGEVRAATFGYDAGAVAEWVRSVDPGARCVYESGVTGFDLQKRLSGLGVDCVVGAVSKMIKPSADRRRKNDRNDAEFLARMLSVGNVVEVWVPDDECEAARDLTRALEDARDDLSRSKQRLSKFLLRHGLVFDERTPTGRRKGNWTRAHWSWIESIRFAERADEEVLAYYVDAVRRAAEEKARLERLVEGEARKPRWRRRVDSLRCLKGVDTASAADLVFEAGEFSRFRNARSFAAWVGLTPSEHSSGESDRRGAITKAGNKHLRKTLVEAAWHYLTCSGRPKDLAKGQAPDRGARRHAAKGVRRLVERREALLARGVHGSKANVATARELACWVWAVGLMAEEA

SEQ ID NO: 397317 - protein, 359 aa, unidentified
MHKKSISYCVKSADGHIDSEGTIAASREALQAWVGKIGRPWIGGLEATMFTGWIYDYLKDYAAELRVGHPAMLKAIAAGKKKNDQVDAQLLADLLRCNLFPESYMAPTEMRDLRRVLRFRTMLVEVAVRMKNRLSGILMEVGAEYDSRRLHNKSYFPELLTELEEMPASVLDLLRINRGAVEYFDGLQRHLLGELSKHPHLQERVILLRSIPGIGQVASLTWAPEIGDPHRFPSADHAVSYCGLCSAQNSSAGQDKRGPISKQRNRYLQTILIECAKLAPRYNQELVVVRERSESKAHRNYATIAVARKLVSHLLAVDKRGTPFVIPPTEDNDNNGNGKTKAQTKNKTKGNGKNKGNDA

SEQ ID NO: 397318 - protein, 344 aa, unidentified
MPIVTIGIDLAKNVFAVHGVDESGKATLVKPRVSRDQLVTLIAQLPACLIGMEACSGAHHWARMFQQHGHTVKLMAPNLVAPYRMSGKRGKNDAADAAAIWEAVTRPSMRFVPLKDEHQQATLCLHRTRQGFVEERTATYNRLRGLLSEFGVVLPQSPEKLRRHMTEHLDTLPGWAKRSISDLLEHAGHIEDRLLEYDRAIAEIAREDARSKRLMQLRGIGPTTASALLASIGAGHDFRNGRQVAAWIGLTPGQYSSGGKARLGSITKAGDAYLRGLLVNGARAVIANLGEKQDRFSRWARTLVERRGYWRAAVAIAAKNARLAWAMLKYGHDFKCAKVGTAQG

SEQ ID NO: 397319 - protein, 359 aa, unidentified
MNIKRIGIDLAKQVFQLHGVDRFDKASERKKLSRAQMHNYFKALSPTLIGMEACGSSHYWGRVLSAYGHTVKLIAPQFVKPYVKSGKNDANDAEAICEAVSRPSMRFVAIKSAEQQVMQAGHRIRSRLVRSRTALSNEIRGLLGEFGIVTPQGIGQLRRALPIIAEDADNGLTEQFKVLLAELAEELQQIDDRVDKHDKRIQAHARDDARVQRLLAIEGIGPITASALVAAVGDATQFSCGRDFAAWVGLVPRQNSSGGKQRLGHITKGGDTYLRTLLIHGARAAYNASTKKTDTRSRWVQALAGRSNANIATVGLANKNARIVWAVLSKGEAYRGAKADAEISNTPPDMSEATPCGAP

SEQ ID NO: 397320 - protein, 356 aa, unidentified
MNEDITADVGLTIGLDLGDKYSEGCVLDASGEVVETFRVRTTQPALERALSRFGKARVVIEVGTHSPWVSRRASAQGNDVIVANPRRVRLIAENDSKNDGFDAELLARLGRVDPQLLCPIVHRGEQAQRDLVLLRARDGFVRARTQLVNQVRGFAKSLGTRLPGSSTEAFPRRVRSVVAMDLFPGLETMLEMIDRLTQEIRAMDREVERLCRGSYPETRVLRQVKGVGPITALCFVLTLEDPNRFRKSRSVGAYLGLRPRQRDSGEQRPQLRITKAGDELLRRLLVSAAHYILGPFGPDTELRRIGLRLAETGGQAAKKRAVVAVARRLAVLLHRLWVSGEVYEPLGYDASMAQAA

SEQ ID NO: 397321 - protein, 439 aa, unidentified
MCGGTVNGFSLSFQKGAMSMKVVYQTCCGVDVHKSFLVATIIKTTSGVQPSYQKKRFSTFNNSILEFKKWLLDNSCRDICMESTGKYWVPVFNLLEDEINVTIANPKWVKAVKGNKDDTKDSKWIGDLFRLGLVPGSYIPCKPIRILREFTRYRYKLVSARSSEKNRFQNSLTVCNIALDSVVSDIFGKSATSVIDYLLEQSDNSINHEEISSRLLRSLKKKSESVIESIEGYQMTDSQKYRMRLVHAHMDYITSTIADIGSMIDSLVEPYDSAIKLLCTIPGVDRNSAVTIISEIGTDMTQFSNSKRLCCWAGLTPGNNESAGKKKSVRITRAGVYLKPALVQVAHAAVKSDKSPYYKAKYERIMKRRGKKRAIIAIARMILTAAYHMLSTGEVWNPTDLYKIDMPEPLKNKQKEKAIKQAMKLLIAEGILEESPIAS

SEQ ID NO: 397322 - protein, 351 aa, unidentified
MPRTSIVHAVTAIGIDMGKNTLHMIGLDARGTIVLREKVARGRIALRFTNMPPCLIGIEAGLATHYVARELTAIGHDVKQVPPAYAKPFRQVHKNDFRDAHAVAEAVQRPTTRFVPAKTDEQLDLQALHRVRSRLVSDRTAVINQLRGFLLERGIIVRQGLRFLRQALPDILAKRTDVLSPRMMRIVVDLASDCRQLDERIEAVTDEIETLAKSDDSCRRVMTVPGIGPIISSAMVAAIGSGGAFARGRDFSAWLGLVPKQMSTGDRTILGRISKRGNGYLRMLFMQAARVILMRPASWPKHGFGGWLAHAAQRLHPNVLAAALANKLARIAWTVLAQERSYEARVTMTAA

SEQ ID NO: 397323 - protein, 377 aa, unidentified
MKKVRFVGLDVHADTIAVAVAEPGGEIRSLGQIPNRPESIRKLMKKLGPADSVRACYEAGPTGYVIYWQLTTLGVRCDVVAPTLVPVKAGDRVKTDRRDAEKLARSYRAGDLTPVWVPDAAHEALRDLVRAREAAKKDQLRARHRLGKFLLRHGRRPPTGMTSWTQRYLAWIKTAVRFEQPAQETTLVDYLHEVEHVAGRIEGLERAIDEAVRTVPARMRAVIDALQALRGIALVSAVTIVAEVGELSRFTRAPQVMGYTGLGTREDSSGPRTRRGGITKTGNAHLRRIVIEAAWAYRHRPAVGGALRKRQATLSEEVKAIAWKAQHRLHGRYRKLLGRGKCQQQVVTAVGRELLGFIWAIGVTVETEQRTRQANAA

SEQ ID NO: 397324 - protein, 430 aa, unidentified
MAYRIAGIDVHKKMLAVVVSDVEIESEFQFERRWFGSNPEQLRSLAAWLLEQEVEEVVMESTAQYWKPVWEALERYWKPIREKRKGARRRSGTLHLAQALSNRGRRGRKRDFPDAERLVKRLVSRELTLSFVPDPEQRLWRTVTRKKYQLTRDKVRLQNQLEALLEEAHIKLSSLVSDLLGASARRMLQALAEGETNPAALATLADQHLRATPEQLCDALGACTDLKPVYRRLLKMALEQLQFLEQQMGQLDQEMANLLSQHQDAVQRLAEVPGLGVDSAHQIIAEVGPTAATFPSEGCLSSWVGACPGQEESAGVNYSHRSPKGNRHMRRLLSQTANAAVKAKGSIFELVYRRSVPRLGHNRAIGAIAHRLCRLTWLILHQGVRYEERGPAVSQKSKQARTARMIRQLRRLGYRIEAPNAQHPSSAQVQ

SEQ ID NO: 397325 - protein, 346 aa, unidentified
MDHIAIDLGSRESQICVRTADGTIQDERRLGTLSLGKFLSGRAKSRVVVEACAEAFVVADAAKAAGHEAVVVPAALAPSLGVGDRGVKTDTRDARNLSEASCRMSKLPSVHIPAQASRERKAMCNMRESLIQARTKLINSVRGWVRPQGLGVVRSGAAYTFPLRMKKHVTQRGGTIPSYVEHVLVAIENLSKEIMALDDELEEAAKADPTCQLLMTAPGVGPVTAMRYTAAVDQVDRFPNAHRLESYLGLTPGERSSSERKRKTGLTKAGPAKLRWVLVQAAWVARRCYKDDPIVLWSLEVEKRRGKQVAVTALARRLAGVLYAMWRDGKPYDKHHQAVRITATAA

SEQ ID NO: 397326 - protein, 342 aa, unidentified
MKFYCGIDLSARDSHICVIDERVKIVVQLKLRNELKRIVKVLAPFKENLEIVVESTFNWYWLVDGLQAAGFKVVLAHTLGLHLITGAKVKTDRRDAFALAKLLLAGVIPKAYIYPVATRAVRDLLRRRAQLVQRRAGEYGSLRRLLLREGILSSRQQEIKTAEEAELEQWFEHPLVRLHAGQELQRITLYTKQVTELEEKILAEAKQEKSYQPLQKLPGVGPIIALTIMYEVGEHTRFENAKVFSSYCRVVMGVAQSGQVTRRGRASKQGNHYLKWAFSQAAVHAVRNYPQVRRYYERQLKRHQGRARKLVVYNIIAHKLAQAAFHILKDESEYRAELLFGR

SEQ ID NO: 397327 - protein, 364 aa, unidentified
MQPYLGCEAHKHYSVFVAVDERGKATSPVRIEHNVAAYQRYLDTLPSGTEIAIESTGNWYWIVDLMEQAGHRPHLANPSEAKKRMGKTHKTDALDAKGLAILLRNGTLPESWIPPGELRDQRELLRTRMALRDLRTSLKHRIHSAIDRYGLHATGISDLFGVRGRAYIAEVLPDLPKETARMVSLELDSIDQLNIKLMILEQHIDCTLASSPEIRLLHTLPGVGKILAPILWLEIGDIERFQRAENLASYAGLVPRVIASGGHIRHGGTCRNVNRYLKWAFVEAATCATHLRAYREGHIGLLYRRLAPGKGHGRAIVAVARHLAEASYWMLRKREPYRQPQPHPPSSKFGQARDTSDHAAKVSG

SEQ ID NO: 397328 - protein, 387 aa, unidentified
MPQPNDLSRSLAALDQDSTLIAVIEISQSSWLVAGIVPRIKRQPLKKLAADETALLQLLYRWRDEATKAGCTINRIAVAYEAGRDGFWLARWLQRQGIEADVIHPTSVAVSREHRRAKTDRLDTELLKRAFLGWLRGEPRHCSMAMIPTPEEEDAKRPNRERENLVGERTRIVNRMKSTLARLGIRGFKPNLRRAPERLDRLRTGEGASLLPNTMAELRRDMARLRFVMDQIREIETARLVRLEQHPEQASHAMVRLLARVIGIGVETADMLVHEILSRNLRDRKAVARYAGLTGSPDESGARRREKGLARAGNARVRRGMIQLAWRFLMFQKESALAQWYRRQTADERGTTRKTMIVALARKLLVALWRLVTTGEVPEGVVLRQAA

SEQ ID NO: 397329 - protein, 426 aa, unidentified
MDARTTKLAEAQEAAVIVGVDVAKRAHWARVIDPRGRELVKPLRFDNSRVGFLRLEQVLAEALGGVGLERVIVGLEPSGHYWKPLAWHLYSRGIRVVLVNPYHVKCSKELDDNSQLKSDRKDALLVASLVQQGRFLGAYFPEGAYADLRVLVTERFHLKRRLNSAINRLRGMLDEYFPEYEGVFRDLLGKASWWVLRHCPFPQDVLEYDPEGLATSLKLATRGRVGMKRARVLMRAASESVGVKAGIEGARQKLYCLLDEIEFYRRQLEVVEARMRELLERLPEARLLMSIPGVGPLVAATVLGEVGDFRRFRHWKQLRKLAGYNLVAQSSGQKEGRSVISKRGRPVLRHILYLAALATVTRSGEFRALYESLRMRQRNPLKGKQALVAVATKILRIMFALVKSGQEYCPGKLLGRCQQQLAETAA

SEQ ID NO: 397330 - protein, 420 aa, unidentified
MAIDELPTPVFCGIDWAEDHHDIALVDAGGNQLAKVRISDDAAGFTQLTDLLTEHGDSQAAPIPVAIETSRGLLVACLRATGRLAFAINPMAVARYRDRHSVARKKSDAVDAAALANILRTDMAAHRPLPTDSELVQAIAVLARAQQDAVWARGQAHNKLRSQLREFYPAILDAFAQHKHGLCSREARTILAAAPTPTMAAKLTRRRLQTLLKQAGRVRGIQADAERLHEVFNCDCLHQLPQVETALGLQTSALLRQLNTACDNADQLEEAVTQAFERHPDAPVIRSFPGLAALTGARILAEIGDDRARFANAGSLKAYAGSAPVTRASGKSCKVMSRKVKNQRLAAVGYVWAFISLTRSPGARAHYDRRRAAGDRHVAAQRNLFNRFMGMLFHCLHNGHTYDETIAFPQPSDGHVAAAA

SEQ ID NO: 397331 - protein, 408 aa, unidentified
MATSSLHLTMECRDAPAKRPRPAPGQALSRSLVALDQNSTIIAVVELSQSTWLVAGMLPGIERQPRKKLEPSPERLLALLHRWRDEAVRAGRTITRIALAFEAGRDGFWLARWLAARGIEAHVIHASSVAVSREHRRAKTDRLDTELLKRGFLGWLRGERGHCSMARVPTIAEEDAKRPNRERDCLVGERTRIVNRIKSTLARLGIRNFKPTLRKAAERLATVHTPEGMPLPPNTLAELQRDIARLGFVVSQIREIEDARQKRLEHQPETGPHAMVRLLARIVGVGVETADLLVHEVLLRPMRDRRAVARYAGLTGSPDESGARRREQGLARAGNARVRRGMIQLAWRFLMFQKESALALWYRARTADSRSGTRKTMIVALARKLIIALWRFVTAGEPLEGVVLRPAS

SEQ ID NO: 397332 - protein, 372 aa, unidentified
MNYNTVYVGMDVHKESFTLCSCKYEDEKASHYQRTPASYKNVLRYLAFLRTIYGEDTRFVCGYEAGCLGYSLYHQLENFNVECVILAPTTMLEQRSKRRIKTDKRDAEIIARSLAQHNYSPVHIPTKMDNQTKEFIRMRDDHKAELKKIKQQILAFCLRQGYQYDGSGNWTAKHVKWLRSLKPAGLYKEILDEYLLTYTILTDKLNRLDQRIEELASKEEYTESVSKLTCFLGIKTHTALSVIVEVGDFQRFVSARKFAGYLGLVPGQHSSGDDRNGLGITKAGNTHVRRLLVESAQSYTRGKIGYKSRVLRSRQAGNSPQVINYADRANERLRRRYYKMVLKDGKKYNIAKTAIARELACFIWGMMTDNIY

SEQ ID NO: 397333 - protein, 373 aa, unidentified
MKTTTNKSSSTPSVVSTSTPAVVSGFTLGLDLGDRAHHVCVLDAAGQIVREASLPNTRPALAQLLADFPKATVALEAGTHSPWISRYLTDLGATVLVANPRKLHAISRNERKCDRRDAQMLARLARVDTALLHPIQHGSAQAQHDLLGLKLRDALVRTRVSLLNAVRFTLKSLGHAVRNPSSESFHKNVLQDIPADCLPVVQPLLTVLAHVTEQIKAMERDLVQRSKQDYPVTQRLQQIAGVGPLTALCFVLKIGDPERFSRGRDVGAYLGLCPRRDQSGGTDKQLRISKCGDGLLRRLLVSAAHYVLGPFGPACALREHGQRLTGTGSAREKKRAVVAVARKLSVLLLSLWKYGPDYEPRNTASPALVLIPA

SEQ ID NO: 397334 - protein, 324 aa, unidentified
MALKIVYQICCGIDVHKTFVVACIASTNKQGVTTYKRHRFSTFTQGLKELLQWLLDNHCKDVCMESTGKYWIPIYNVLEKDCNIVLAHPKYVKAIRGKKTDKKDAKWIADLFKHDLVAGSFMPPADIRQLRDLMRYRFKLTCFMSSEKNRLQNCLTVSNIQLASVVSDTFGKSSQRILDKILENPDDTSFDIEPLIHGSMKKKLPELELAIDGFITPEQAGKLKVIKKHFEDLESRKAELEKLILALASPYQQELDLILTAPSFKNKFTAIGIISEIGVNMEAFPSAKHLCSWAGLTPTNNESAGKKKSVRVSKAGCYIKPLLV

SEQ ID NO: 397335 - protein, 347 aa, unidentified
MKRIAVDLAKSVYQVAESVRSGQVVQRKRLNREAFRRYIQEQAEPVEWVMEACGTAHYWGRLAQSLGHQVKLLHPRYVRPYRRRNKTDRNDCDAMLEAARCTDIYPVPVKSRDQQQLQQLHGLRETWKKSRTQRINLLRGMLREAGIEAPASTADFIRAANELVEQPELAPLSRLLHIVLAEINLYEQCVAECEQQLKCWHAGDEIVRKLDEVSGIGLLTASALTAAVGKPERFASGRQLSAWLGMTPREFSSGNSRKLGHISRQGNVYVRTLLIHGSRAALLAAQRCQARTPEKLTQLQRWAVQTVARIGHNKAAVALANKLVRICWAVWCHERRFNGNWQSVRPA

SEQ ID NO: 397336 - protein, 290 aa, unidentified
MSKIRFVGLDVHAETIAVAVAEPGGELRSVGVIPNRLESIRKLVGKLGPVQQLKVCYEAGPTGYVLYWQLTQLGVACEVIAPTLVPTKAGDRVKTDRRDAEKLARCYCAGDLTAVWVPDAAHEALRDLVRAREAAKKDQLRARHRLGKFLLRHGQRPTDAGKAWTKKYLEWIKTHIGFDQPALEATLSYYVQEVEHMAERILHLEKAIDEAVAQASPEIRAVIEALQALRGVAQMTAATVVCELGSLSRFQSPRQLMGYSGLVSREHSSVETGFNAVRSPRPAMLISEEC

SEQ ID NO: 397337 - protein, 331 aa, unidentified
MNNDLCRNDIAMGKVIFDQVVRVGCGIDVHKDNIVATIRKSEDDYETKEFSSFTSSLTELREWCKLEGVTHIAMESTGVYWKPVFNILEEGDFEIILVNARHVRNVPGHKTDKKDSQWLSKLLLSGLLKASFIPPVEIRDLRDLVRYKKKVTAQASSEKNRMIRILEDANIKLSSVLTNVDGAVGSRIIDALIAGKTNVDGLMQYYHGQIKASKEEFRKALQGRLTQHHQFMLRVLKESITDKERVIEKLDKQIDELAKQYAVEIELLQTIPGVAYDSAVGIISEIGANMKQFSSEQHLSSWAGMSPGNNESGGKKKAQRPSTGTSTCKPS

SEQ ID NO: 397338 - protein, 359 aa, unidentified
MLGVLTFCTTKEAPVSELYSGRQFVGMDLHRRRSVLVRMTEFGEHLETVRILNDRDSLADVLSRAGQSPEVVLEATYGWYWAADALAELGACVHLAHPLAVKGFSYRRVKNDQRDAADLADLLRMGRLPHAWIAPPATRELRELVRHRAKLVAMRSQCKAHVHAVLAKGGIWVPMTDLFGVEGNLLLDKVTMPAPYKARIASLRRFIEAFDAEIDLFTGLVQRRLTHDGGYIAIQQIPGIGPVLAAVFVAEIGDVHRFAGPAQLTCWAGLTPSHHESDNTVHRGRITKQGSRLVRWAAIESVKILPDTSRIGAIREQVAHRRGNRNIGAVAAARRQLELVFYGLRDHHVRALHRSPHAA

SEQ ID NO: 397339 - protein, 398 aa, unidentified
MQAARGVVLGFDVGRYSHHMTAIDARTGEVAASLPVGQDEARIRDALAPHAPAGALVVVDQPGDLSSLLFAVARDMGLDVGFITPRAMAKGIELYGGELKSDEHDSFVIADLALRIPSLVRPVPERRAEVEELASLMAYDRELTDDVRRAASRIHELLLATCPALGAVYAGQRVKQRLPLAMLARFGGAGGLSAAGRDEVEGWARGQPRCGARGLAFVGSALDAVGSQGVATTSSPFYDELLRIEAASLRSALDAREAVGARVDELLDRIPEAQLLLSMPGVGRVTAATFVSEVPDVGAFASAAKLAAYAGLAPRVRQSGRSLNSVTKPRAGNRRLKRALVLSAARSVDFCEESRAYYDRKRSEGRCHYSAVVALARRRINVMYAMLRDGKRYQSRLG

SEQ ID NO: 397340 - protein, 337 aa, unidentified
MDTNFLNSATYIGIDSHPTTHTAFAINRFEDEKGHITFDNSKSGIGQLLLWLETIDTKPSNMILGIEGGDNTRHSLLSYLLEKDYTVYEVNPMYTKQRRTFGTRRDKSDGKDAKLIAGVLTTKLKELPKIQKVQLATAILILRKTVWFYEDITASGARLKNQLKTIQREKNLVRSSNEIKLLLGIEKSVIKELTHIKKQQKQLEKQLKQQLTSYGGNLTTIPGIKTILAAKIVAHSGNIQRFHSIDGYIRYAGIAPKERSSGKNNRFVKDKATGNRNLSTTLWMAALNQIQWNKTMKEYYQKKIKEGKTKKRALISVMNQTAKTVYGMLRSGENYRG

SEQ ID NO: 397341 - protein, 382 aa, unidentified
MQASTIDTPTAEHCGTIFVSVELSQKTWLVTLHSPDRDRISRHKLEGGDHVGLLGLLESIRTRAALRLGTVPKVVSCYEAGYDGFWLHRLLTAAGITNLVFDPASIAVEQRSRRAKTDRIDGELMLRTLMAHLRGEPRVVRIVRVPSVEQEDARRASRERDRLIKEQTAHTNRIKALLRLQGMAVGYPRRGNWLHWLAQQRDWQGQPLSPHVLAEVTREHARLMLVREQLAALEQAQATQATVVPAAMAERRDLLQRLKALGPAFAATLTNEVFYKDFRNRRQVGAYCGLTPSPWRSGGIDREQGISKAGNPRARLKAIELAWLWLRHQPESELSRWFRTRTASAGKRAKRIAIVALARKLIVALWRYLTTGLIPAGAIMKA

SEQ ID NO: 397342 - protein, 428 aa, unidentified
MNDREIIRLEQFRQLKREIRGSEEHLIIGIDVAKQKHNAFLGTATGKTLKRLVFENNREGFEKLLIHVESISASNGHKRVTFGIEPTANYHKPLAEFLINKKHELVLVSGVAVKRNRELLDGRWDKNDMKDSANVADLISQGKCLFYEHPALVLRDLRSLLSLKKKFKKIEHGFRVRIRNHLLAQYFPELDRYYGHRESENLAIVRWCLSPSKIAEMKYEDFFRLVTTRNRGLTQHQRLKAIWDNAHCSIGCSTGTAAEFEAEILAEALKQVRETIGGINEKVIEICVLFPEYQYLLSIPGFGPVVSAIVLAAIGDPFRFESGNQVLKTAGWDLNANRSGKRSDSVKPVISKRGKSDLRYALYQAALIASARNKYFTSWFIEKLKGREKEQGIKTKMRVKLAAKLLIIAWTLMKKKEPFNPELLKIKK

SEQ ID NO: 397343 - protein, 346 aa, unidentified
MDYCAGLDVSLKEISICVVDADGKTVARGVSPTDPEGVAGWFRARSLSPRLIVHESGQLSIWLQRGLYRLGLPTICIDARKAHKSLSARPNKSDAADAEGLAQLARTGWFTPVHVRSEDSDRLRCLVSARAHLISLRKDLEGHIRGILKTFGIRLTGIGKGGQRQVFRDQLAAAGERDAVLRSIADGFIAAHSTLCQAAADLDRAVKEKAQTHPVARRLMTVPGVGPVVALNFVALVDDPSRFRRAENVGAFLGLTPRRHQSGELDWSGRISRCGDGTMRSLLFEAATTLIGRVQKFSALKSWAVRLAGRRGFAKAAVATARKLAVLMLTLWKNETEFKWKKEAIG

SEQ ID NO: 397344 - protein, 348 aa, unidentified
MEIHTIGIDLGKTLFHLVGVDSSGTVVVRKRCSRAQLLVYTANIRVHRIGMEACSGAHFLGRALREQGHDVRLLPAQYVKPYVKTNKSDYIDAEAIAEAVERPNMRFVPIKTEEQLDLQTVHRVRERWVMRRTAVVNQMRGLLLERGLTLAKGRRHLEEAIPGILANADSKLSESFQVLLRQLNQELEQLSARIAEMDKVIERTAADHEGCQRLTTIPGIGPVTATALVAAIGNGAAFRRGRDLAAWVGMVPREYSTGGRQKLLGISKRGNSYLRRLFVQGARAVMQRRNRQSNSLGRWLTQLLARVHQNVAIVALANKLLRAAWAVLHKNEPYRCPELVTTSSDPGA

SEQ ID NO: 397345 - protein, 340 aa, unidentified
MVNTKDKVMEKFFIGVDVSKKTLDCVLYDGEMSKMKGIYHLKTTNDKAGCEKILKWMRQVKASKKASIFCMEYTGRYSYTFAENLAGKGLQFCMVPAIKIKGTFANARGKSDKVDAIRIAQYAYRYRDELKPTSLKDNDVVKLRDLMNDRKMLVKDMASRKAIVSEYKESPEEGRCKRAKEGLELLKKQLKEVEKEILELIKSNPAVEKNYNLLISITGISFVNAVNIIIFTDNFQSFSDSRKFAAYCGVAPFEYTSGTSVNKGVHVSKMANRTLKADLSMAARCAITYDTELRIYYKRKREEGKSFGCVLNAVKFKLIGRMFAVVKRGTPYVNTQKYAA

SEQ ID NO: 397346 - protein, 388 aa, unidentified
MIYAGIDISKYKHDCFILTDLGEVVNDGFSFTNDTEGFAQFQEVLSGFSPDNVRIGFESTGNYALNLKLFLEKNGYTFMEVNPVLVKEYIRSETLRRTVTDKICAKHIAGYLCEKAFRPHSVGFYDTFALKQLTRFRSSLVSQRSRYLVQLTNVLDCIFPEFKPLFSNKFSVTALYILSHYPSPEAIANMNSRSYDILRKKSRGRFSLDKFVQLKSLAKNTVGVFNDYYRIELETLLDLYNQIDGKIDQVETEITKAIRELNPPTLSIKGVSEFSAAVIVSEYGDFSRFANPNKMLSFAGLEPGYFQSGTLEHNGRMVKRGSSHLRCALMNCAGAIHIHNEVFAVYYRKKRNEGKSHRVAVNHIAKKLIRIIFALETKGMMFDAELLR

SEQ ID NO: 397347 - protein, 347 aa, unidentified
MRFYTNQHQFYCGIDLHARSMYVCILSHDGEVLLHRNMKAAPESFLKAVAPFRDGLVVAVECIFTWYWLADLCAELGIPFVLGHALSMKAIHGGKAKNDKIDSQKIAVLLRGGMLPQAYVYPAEMRATRDLLRRRTHLVRKRAELLSHVQNTNSQYNLPEIGKKIAYKANREGVAERFADPAVQKTIEVDLALITYYDKLLQELELSILKTAKRHDANTLYLLQTVPGIGKILSLVLLYEIHHIDRFPSVQDFASYCRLVKCSKESAGKRLGTSGKKIGNAHLKWAFSEAASLFLRNNPQGQKLLARLEKKHDKGKALSILAHKLSRAVYFMLKRKVAFDMDRFLQT

SEQ ID NO: 397348 - protein, 342 aa, unidentified
MQIAILGIDLGKNSCSVVGLDVAGRVVLRRRLRRDGVIKLAAGIPGCVMAMEACCGAHHLGRLLREHGHQVRLMSPEYVRPYVKAQKNDDRDAEAIAEAATRPTMRFVELKSEAQLDMQSLHRARDRLVGERTALINQLRAVLLERGIVVPQGRRKVECYVDALLAEEEIQLSPRTRLLVKDLRAEWRELDRRISAFDDEFAAQARSDETARLLTSIPGIGPLNATALTAAIGNAQTFGRGRDLAAWLGLVPKQVTTGGKPKLLGISKRGNRYLRKMLIHGARAALPTLSKGETPLGAWLRALLARAHVNTVVVALAAKLARIAWAVIRSGKKFDMKAATAS

SEQ ID NO: 397349 - protein, 348 aa, unidentified
MSAKLDTAIAVIGIDIGKNSFHVVGHDKHGAIVLRQKWSRGQVETRLANLSPCLIGMEACVGAHHLSRKLQQLGHDTRLMPAKYVRPYSKGQKNDFRDAEAIAEAVQRPTMRFVATKTAEQLDLQALHRVRERLVSQRTGIINQIRAFLLERGIAVRQGLRFLRAGLPDILATRGDVLSPRMLRVVEDLAEDWRRLDARIECLSSEIVALARQDQACVRLMTVPGIGPLISSAMVAAIGAGEVFSKGRDFGAWLGLVPKQISTGDRTILGKISRRGNRYLRVLFVQAAWVVLIKPKSWERHGLKPWIEAAQKRLHHNALAIALANKLARIAWAVLNKERAFETASQPA

SEQ ID NO: 397350 - protein, 430 aa, unidentified
MHNKNYISVGIDVGSAFSFMTIVAPDGSVIQKPFKITHNKPDSLEKAVSAIKKAEELHSLESRTFLESTGIYHFPLFCYLVDCGFNASIINPIITHSTKNGNIRKVKNDKIDSKGIAKLGLSKDIPVSQFPAKLVLELRSLTRKYYDLTDERSAHINKLKGDLHTVFPQYLDVFCDVTGKTSTMILRQYGTPDKILRGHKKTMIEKISKASRKGLAKASERYEKLCAAANAAKTFGCQIDSIYFNIFLTLDLVEKLDSALDSILNRIRQLITFNKNEKFIQQIKLLNTIPGVGFLTAVTIMCEIGDFSAFRNPKQLFAYFGLDPEVNESGKFVGTQLHMSKRGSRIARRAIFAVALASIRTKRNGEGINPYLRKYYELKSGQKPKMVAIGAVMHKVCNIVFAVLRDEKAFELRSPEEHCKQYQRPALAAA

SEQ ID NO: 397351 - protein, 354 aa, unidentified
MQNDRQSSETVILGVDTHLDIHVGAVISQAGKLLGTHIIQTNQAGYLELLDWARSFGSLERAGIEGTGTYGAALTRYLIKNGIYVVEVNRPDRSKRRLEGKSDPLDAENAARTVLSGSSKAIPKMQSGACEALRIISVARRSVVKARTQAINQLRALLVSAPQDVRDKLWKSKPHECVTACINSEVSEHSPLRIALCSTLRSLAKRWMALTEELNELDESLDKLTRKYASNLRSQFGVGPQTAATLLAVAGDNPERLKNEAALASLCGVNPLPASSGKTVRHRLNRGGSREANNALWTIALVRMRSDPRTRIYVDRRTGEGLSTKEILRCLKCYIVRELYLLILSDLAYANRRS

SEQ ID NO: 397352 - protein, 373 aa, unidentified
MIVVGIDPHKKTHTAAAVSTKLGELRGEVTVQARAKGHAKLIQWARALDEERVFALEDCRHVSGALERFLINRGERVVRVPPKLMGEARKGARSFGKSDAIDALAVARAALREPELPEAHLEGPAREIQLLVDHREDLVAERTRIQNRLRWHLHDLDPALDEQAKRLERSHKRLEQLGRRLAHTEQTVQVRVCRDLLRRLKALSCDVKALEAELEQLVGRHAGPLLELPGCGTLTAAKLVAEVAGVERFSNDARLAKLAGVAPLDASSGKQQRHRLNRKGNRQLNCALHRVAVTQGRVHAPARAFLARKQAEGKSRREALRCLKRHLARVVFRILRLIARPHHEVERLPLLNRETKMQPLTLARRTSACVDLT

SEQ ID NO: 397353 - protein, 423 aa, unidentified
MKVVYPICCGVDVHKTFFVATIITTEGIQPKYQKRRFSTFNNQILAFKAWLLENNCRDVCMESTGKYYVPVYNLLEDSINVTVANPKWVRAVKGCKDDAKDSKWIGDLFRLGLVPGSFIPKKDIRILREYTRYRFKLMSCKSSEKNRYQNVFTVCNVALDAVVSDMFGKSASSITDYIVNSDTFNPEYCISLLQKSLKKKADEVVDSITGFQMTLSQKHRAKLVREHYNYLENQIQKLDDAIDELAKPFEPYISLLCTNPGIRSLSAIMVLSEIGDDMSQFGSSKRLCSWAGLTPGNNQSAGKKKSVRINRAGVYLKPTLVQIAHAAVKDAKNTYYKTKYERLSKRRGKKRAIIAIARMILTAVYHMLSTGEVWNPRDLDQIDMPLELREKEMQKSIRRAAKLLVAQGIVDPNAILIPLSDTA

SEQ ID NO: 397354 - protein, 340 aa, unidentified
MKITIIGIDLAKNVFQIHGVDERGKVAVRKQLKRAEMASYFANLEPCVIGMEACGSAHHWARKLEGYGHTVKLMAPQFVKPYVKTNKNDMADAEAICEAVSRPNMRFVAMKTVEQQAILSVHRARQGFVKARTAQANQIRGLLSEFGIIIPQGIGAIAKHVPEILEDGENDLPGTMRNLIERLTVNLKEMDRQAKELEAQIQRWHRENAASRKLAEIPGLGPITASAIVATVGDAREFANGRQLAAWMGLVPKQNSSGGKQTLLGISKRGDTYLRTLMIHGARSVVRVAENKAESESWLIKVLARRNKNVAAVALANKNARIVWALLAKDRMFRPDYTPA

SEQ ID NO: 397355 - protein, 317 aa, unidentified
MNSKINQNEINVGVDTGKTQLDIYIRPLDIYFTVTNDETGIKKAIKEIKKHSVTRVVIEATGRLEQAFIMACADAKIPFVIANPVKIKRFAGAIGQKAKTDKLDAWLIAYYAEAIKPQLSSLKPAEMRLMSDLLSRRAQLMEMQTMEKNRSQIMPKTILMMIKPILTALKKQIEKVDSKLQKLIQDCDEYKAKNDIIQSVPGVGNVVAFNLLSDMPELGFVNNKEAASLVGVAPFNRESGTFEGKRMIRGGRPKIRTAMYMAMMSAIQCNPKFKGMFQRLVEAGKPKKVAIIACIRKLVIVLNSMVRDGVMWDPKMI

SEQ ID NO: 397356 - protein, 438 aa, unidentified
MPMEATLSDQRRTTKPARLPVIHERAAGIDMGSRFHVVAVGADRCDEPVKTFQAFTGDRVRLADWLQSLGIETVAMESTGVSWVAADEIFEDRGLEVIVANAREARAVPGRKSDVNDAQWRQRLHACGLLRARFRPGSDIAALRADVRRRERPIDDAAAHIQHLQKALTLMNLQLQPVVTDVTGTTGMKSIRAMVGGERDPQGLATRRDVRCKADTQTVCAALVGNDQPEPVFALTQALALYDVDQTRVETCDARIQQVLAGLNAGKDMPDEPLPKPRHRTTQPNAVNFNVREALDQLVGVDLTQIHGVGSSLALRLMTECGTDLSRWPSAKHFTAWLTLAPGSKSSGGKVLSAHTRQTTNRVAAHRRLAAVTLGRTDTALGAFDRRLSARVGQSKAVTATARKIAVLFYNAMRFGMDDRDPGADQYERQDRDRVIKQ

SEQ ID NO: 397357 - protein, 373 aa, unidentified
MNYSTVYVGMDVHKENFSLCCYTNEKETAEYAQKVEGHYSKVLNYLEAMRFHYGNDALFICGYEAGCLGYTLQRELTAHNVKCVILAPTTMPVPAGKKRIKTDKRDAALIARCLAHHDYSEVHVPTEQDEQVKEFIRMRDDHQLALKKIKQQILSFCLRHGYQYDGTKSHWTQAHLNWLRSLKLDGVHQETLEEYLLTYDYLTAKLDRIEKRIGELADKEEYKEKVHKLSCFLGVKTITALSVIVETGDFKRFASAPQYAAFLGLVPGEDSSGGDQTRLPITKAGNRHLRLLLVEAAQCYGRGQVGYKSKALAARQKGNSPAAIAYADKANERLRRKYYRMTLKNGKKANVAKTAVARELACFMWGMMTENFT

SEQ ID NO: 397358 - protein, 334 aa, unidentified
MNYTHFVGIDVSKSKLDYAVYHGKQLSFQYESGNNLEEIKSFLKLLKKQPGYLMEQTLFCMEHTGIYNQYLLHSLHTFKANVCLESSLQIKLSLGLQRGKNDRIDAVRIAQYAYKSKEELRLWQPKREVIEQLRHFTTLRYQLIQAKKQLTVAVKENIPLNKKLQKQLTATCKTTMAALQKDIEKVDHHIEEIIVSDDELTRLFSLITSVQGVGKVTAAEIIISTNEFKNIDDPSKFACYSGVAPFEHTSGSSIRGKTRVSHKANKYMKSLLHMAALVAIQFNEDLKAYYHRKLLENKNKMSIINAVRNKLIWRIFACVNQNRPYQNNYLTALV

SEQ ID NO: 397359 - protein, 385 aa, unidentified
MRNKTIVPREYDVFAGLDVDKKSIAATFSGHQGFIRSLSMPYKVEDLLNHVRNHFADQKVAFVYEAGPTGYGLYDGLAAQGYTCLIAAPSMIPRAPGQRVKTNRLDSKALSESLRGGQLKSIHVPSPLYRQLRHLTQLRDTMMSEAVGMKQRIKSLLLFEGIAFPPAPAGSQWSFIVKAKLRKLPCSNTVRFKLDQLLDSLEFAEKQVFKSTKEIRRFCQTDPELSQCIEYMMTVSGVGWIVASQLLARIGDWRELENIRQLGGFLGLVPTEHSTGDKTDRGPITHTGDGRLRSKLIQASWSAIRKDGELREFFRSVCQRHPRKVASRVAIVAVARKLSVRISVVLMKQRPYEVRKKVHSAPLTQEETSPQGTTRRLREPGEKNS

SEQ ID NO: 397360 - protein, 402 aa, unidentified
MNAVGIDVSKGKSMVAIMRPFGEIVSTPFEIKHTASDIHSLVELINSVEGESRIVMEHTGRYYEVLAHQLSEANLFVSAINPKLIKDFDNDSLRKVKSDKADAVKIARYALDKWQNLKQYNVMDELRNQLKTMNRQFSFYMKHKTAMKNNLIGILDQTYPGVNTYFDSPARSDGSQKWVDFASTYWHVDCVRKVSLNAFIDHYQNWCKRKKYNFSQSKAEEIYGKAKELVPVLPKDAITKLIIKQAVDQLNSASTTVESLRTLMNETASKLPEYPVVMAMKGVGTSLGSQLMAEIGDVSRFTHKGAITAFAGVDPGVNESGSYEQKSVPTSKRGSSDLRKTLFQVMDVLIKTHPQDDPVYQFLDKKRAQGKPYYVYMTAGANKFLRIYYGRVKEYLSSLPES

SEQ ID NO: 397361 - protein, 421 aa, unidentified
MKVQRTSVGLDVHARSVVACGLDGDTGEVFQRRLCPDHQEVLEWIKGLPAPVAVTYEAGPTGFGLARFLLAAGIMCLVAAPSKLQRPAGDRVKTDARDAAHLARLLHLGQIVEVTVPSVAQEAARDLVRAREDCRGDLMGARHRLSKLLLRQGIVYHGGQAWTGKHELWLRAQRFDNPALTLAYEAALDAMVACVHRRDRLDEAITTMAVDSEFTPVVARLGCLRGISTLTAFGLAVEIGDWHRLTGRSIGAYLGLVPCEYTSGTTRVQGGVTKTGNGHARRLLVEAAWHHRAPYRPSRDLRRRWDAATPSARARAHAANHRLHTRWAGFDQRKKRAVVANAAIARELAGWCWSLAVMPDWADPHNRPDEQRRCRQASWSDPRLYYEQSRCTATDHARSLDQRPTPTRKFRPAVTNPRISD

SEQ ID NO: 397362 - protein, 341 aa, unidentified
MSTLVVMGCDPHLDTVAVSVIDGVGREVWAREVPNQASGWEETVGVCARLGVTRVGIEGASGYGRCLAQRLSAEGVVVMEVPTRVTAGSRRHEGASKTDPGDARAVARAVARGEGAAWVDAAVLEQIRVLSHRRDSLVETQTREVNALRALLAEVDPAEAARTPRLRSVAGFEKLSRVEYDGDPHRETVGELIRHIAADCARRLDQVKQLTRQLRAVMPPAGEALMRLDGIGVVTAAQILAEVAGSDGFATEAKMAAWSGIAPLDASSGRQQRHRLNRGGNRRANRAVHTMITTQLRHRGEAADYITRRIQEGKTRKEAIRAAKRYAIRRIWKTLHTHGLT

SEQ ID NO: 397363 - protein, 391 aa, unidentified
MERPMMQPKDLSRSGIPFEQDRTIVAVIDMSQSSWLVAAFVPGLDRHPLKKIEPDQEVLLRLLGRWREEAIRAGRDIERVTVAFEAGRDGFWLARWLRLQGIEAHVIHPTSIAVSREHRRAKTDRLDTELLKRAFLGWLRGEPDHCAMAAVPTLGEEDAKRPSRERENLVSERTRLVNRLKGALARLGVRDFKPTLRNAAGRLEAVRTPEGVPLPPNTLAELRRDMARLHFVREQIREVEEARLERLERAPGEGRNAAVRLLARVVGVGLETADMLVHEVLSRNLRDRRAVARYAGLTGAPDESGAKRREKGLAKVGNARVRRGMLQLAWRFLRFQPDSDLARWYRARTADARSATRKTMIVALARKLLVGLWRLVTIGDVPQGVVLRPAT

SEQ ID NO: 397364 - protein, 354 aa, unidentified
MRIVSALDVHRRQITTKTLDLESGEVRRSRIVPAAREPVREWLSRFEGVDAHVALEATTGWRFIVEEIERAGLAAHLADPAETAAHRGRKRRAKTDAADCDLQLRLLVRGELPEAWIPPWHILELRVLSRLRKTLLDERTRWQQRLQAQLFHQGVPPGLKLCTASGREALLAAPLSPAGQTLAAVGARMIELLDSELAPLERSLRAIARRQPGCRALIARLYGVGERTSVAIVSELGDARRFRSSDDAVRATGLDVTVYQSDRKRAPGHLSRQGPALLRWALYEAAQCAARPASPDHGYYLQVRERRDHQRACLSVARKLCRRSYHILRELGDEALAPVDELLPGAEQLIRPAA

SEQ ID NO: 397365 - protein, 342 aa, unidentified
MQITTIGLDIAKNVFQVHGIDAAEKVVVRKQVRRGQILAFFEALPPCLIGMEACATAHYWARELTRLGHRVRLMPAKDVKAYVKRNKNDAADAEAICEAVRRPTMRFVQIKSTEQQGRLMLHRARDLLMRQRTQVINALRAHLAELGIVAAQGREGIKELLKIIASEGDAGLPVDAHASLVVLAAELQAMQTMIGSIDKRIMAQHRSSEASQRLESIPGIGVTGATAIVATVSDPKVFRSGRDFAAWIGLVPREDSTGGKQKLGPISKRGDRYLRRILVVGACAVLRYARQQPQKYPWLTQLLARKPFKVVAVALANKMARIAWALLAKGGTYRAPVLVAAA

SEQ ID NO: 397366 - protein, 359 aa, unidentified
MRIIGCDLHARQQALAMLDTETGELVNLMLWHEGNEVREFYSQLPRPVLVGIEATGSMHWFLNLMEELGIECRVGHPATIRAAAPRKQKTDRRDAELILQMLVEKRFPAIWLPTKELLDLRALVLHRHQWVRIRTRIQNALQAIALANGLRRGPSLWSYDGQAKIAFLSLLPHASYRRSMLQEMYRKMEEEIENLTQRVAEQASQRCGARLLMTHPGVGPVTALATEVFLGDARRFVDGKALASYVGLIPREYSSGARQRLGGVTKQGSPLLRFLWCEAGAHAVRRDPELKRFYRRKLVQKGLGKARVAVARKLGIRLWIMLRDEIDYQEFCRRGQKQQSGAACAGKPEVAYGAKSPAD

SEQ ID NO: 397367 - protein, 416 aa, unidentified
MKKDNNSGKKSEPTSKRTKSRGPVQRDTKEVLAELVGKLKEKLDPKKVAATSAGEKHQRGELRPNLDRLTVGVDLGDQGSHYCILDLEGETLAEGQLRTTAEDLATFFQELNAARVVVEVGTHSAWVQEVISGCGHEVLVANPRLMDGSKRRKRKNDRIDANKLARLGRVDPESLYPIQHRSREVRQDLVRLRARDALVAVRTEIINTTRGLVKSMGARLPKCSSRSFAHKGEEAVAVEMREALLPLVRLAATLSADIKEYDKKIETLGREKYGHTALLRQVKGVGPITALAYVLTVENPQRFVKSRDVGPYLGWVPKQEDSGESQPQLGISKAGDTMVRKLLVGSAQYILGRFGPDTDLRRNGLRLCERGGKNAKKRAAVAVARKLAVLLHRLWVSGEVYEPLHNAMSAPIAAAA

SEQ ID NO: 397368 - protein, 343 aa, unidentified
MQIVRIGLDLAKYVFEVHGVDAQDNVVLRKTLRRDAVSQFFAELPACVVGMEACSGAHYWAKELSDLGHEVRLISPQFVTPYVKSNKNDRNDAEAICEAVSRPSMRFVPPKSVEQLEIQAVHRIRQRLVSNRTRLVNQIRGLLAEHGVVIPRDISRLRRAVGQIAEGADDGLSDILRDLVRDIREELAEVDHRVASYTRRIRDLFQANEMCQRIGKIEGIGPITATALVAAVGDRTCFKNGRQFAAWLGLVPKQRSSGGKTRLFGISKRGDRYLRTLMIHGARAVLGKAGGKTDPRSQWIGQRRERRHPNVVAVALANKNARIVWSVLSRQEDYRPVQTASAI

SEQ ID NO: 397369 - protein, 454 aa, unidentified
MPRRPKNKVQTQPVNLQPDSAGIDIGATELLVAVPPDRDQESIRTFGTFTEDLHALADWLSRCRIKTIAMESTGVYWIPLFQILETRGFEVCLVNARHVKNVPGRKTDVLDCQWLQYLHSVGLLRGSFRPNDQVCALRSYLRHRDMLVRCAASHVQHIQKALTQMNLQLHHVISDLTGLTGLAILDAILAGQRDPKVLAALRDPRVKASEATIAKALVGDYRPEHLFTLKQALALYRHYQTQMRECDLQIEKHLASFQTKATEPVPTPVGRQRKKPERNQPQFDLRSHLHRILGLDLTALPGLGTVNAHTFFSEIGSDLSKFPSSKHFASWLGLCPDQRLSGGRVLSAHTRSVKSRAAYALRMAAYSAGRSYSAIGDYFRRMRARLGTPKAITATAHKLARIIFHLLKTHTPYDESIFARDEQRYLHRRTLNLRRQAHDLGFSLTPLPVSGEVS

SEQ ID NO: 397370 - protein, 521 aa, unidentified
MSTRTRSKPQTRTRRRFVQKPRGIVHPRVQQVGPTHFGILCVDCAKARSKWMLCDFYGNVLIEPTVLVHSRGHFQAAIALVREAIERHGIQDQFVVVERTGNYHLPVKRAFAAAGFESRIVHPFATKQYRQAADPGNKTDDTDLFAIFRAAIAGFGLEELPLDGNYQELRLLTRHRRDLVHKRSALCCQIREHLEAVMPGYASCFEDLWASPIALEIVRRFPSPAVLAEVGSDRLCRLLRTAGRRFHRQSVEKVVAWAAQAAAPDPAAAVHHRLWQALEEDRARKTLEIEAVEHDTAGLLARTPYILLLSFPGINVVSAAELTGEMGPIEHYASAKSITGRAGIFPARYQSDQTDLAGELVRCANRSLRAILMLIADNLIQCNAYFRSLAAVWKSQGKDPRHSHVKIACRLARIVFQIVAGRQVFQHPGCRQRDYVLEKLLAFLREHDTPLDRLLAIMQSAIEQIPQREHGREAAPLRQQLEKNLNAKRGPKPIGDILPVVLARLGVGELKSRSSEVQDPS

SEQ ID NO: 397371 - protein, 421 aa, unidentified
MQKEPTRFAAFIGIDWADKKHDVCLAVPDSKTRERSVIEHRPAAIKGWALELRKRFGGAPIAVCLELTQGPIVSALLEYDFFVLFPVNPNTLATYRRAFKTSRAKDDPTDAEVAVDILTRHPDKLNQLRPERPTMRMLRRLVAGRRDLVQDRVRLTNRITHLLKEYFPQVLQWFRDKETAVFADFVERWPTLQAAQRARRDTLVDFFHVHNVRRSERIDHRLEAIKAEQPLTTDMAVIAPARLMVESLLPQLRALRDAIAKVDAQIASLCETLPDHKLFASLPGAGKVLSARLLAAFGEQRDRFPDAAAFQKHTGVAPVTERSGNKHWVHWRWACPTFLRQTFVEWAEQTVPKSFWARAFYDSHRARGSTHNATIRALAFKWIRVLYRCWVDRTPYDEARYLLVLQRRHSPLIKFAAQAPA

SEQ ID NO: 397372 - protein, 405 aa, unidentified
MRSVFVGHDWAEDHHDIHIENSEGERLHACRLDDGLEGVRRLHSVLAELADDPSQVVIATETDRGLFITAMIAAGYQVIAINPMSTARYRERRSTSGAKSDRGDAQTLAEVARLDSHNHRLLEPDSDLADAIKHTARAHQNLIWTRQRQLNQLRSVLREFFPAALATFPELAHSDCLATLAVAPSPAAVHSLSTVRIAAALRRGGTKRGADAKAATIRQNLRADQLRAPEQLEAAMSSHVTALVAVATELSQQINRLETELTELLDQHPHAKILQSIPGLGTKLAARLLGEFGDAPDRFTDARSRKNYAGTSPITKASGRSHIVIARRIRNTRLADACHQWAFASLSHSPGARTFYDQRRNRGDSHNRALRALSNRLVGIAHGCLTHQTPYDEHTAWGHRYNLVT

SEQ ID NO: 397373 - protein, 337 aa, unidentified
MTIIRIGLDTSKHVFQLHGVDASEQPILRRQLGRKEAEKLFAKLPPTRIGLEACGTAHHWARVLRGLGHEVVLMPPQYIKPYVKRGKNDAIDAAAICEAMSRPSMRFVPIKSAEQQAALMLLRVRDLFVKQRTMVINAMRGHAAEFGVTAAKGPVRMAELLQRAHTEEAGVPVLALEMLSVLASQLDALDIKLSKLEAELMAWHKQDPVSQCLATQPGIGPIGAVSFSLKVTDPKGFHSGRHFAAWIGLTPKEHSTGGRQRPGRISRQGDETLRRLLVLGAMARIRFADAGNASPWLLSLLARRPKKLVAVALANKMARTLWAMMVSGEVYRHPQEA

SEQ ID NO: 397374 - protein, 312 aa, unidentified
METKFVGIDVSKLTLDFDCLPISAPQRFENGADGIVALVALLRGSGVECIVIEATGGYETTVASALAVAKLPVVVVNPKRVRDFAKSMGHFAKTDRLDAKVLALFGERIKPPLRTLPDEAQRALGDLLDRRTQLVNMRAQEKNRLATVTAVARKSIEQHIAWLDKCIAKLDADIGDRLKKSPVWRHKAELLDSAPGVGGVTTMSLLAKLPELGSLNRQKISALVGLAPFPDDSGTRVGTRYIRGGRAEVRCVLYMATLSAIQHNPPIKIMYARLIAAGKPFKLAMTACMRKLLTILNALIKKDQTWRLQPTA

SEQ ID NO: 397375 - protein, 332 aa, unidentified
MNMHLQGGVAKGDRKPNAGVDVSKHHLDVCFNGQTHRVGNDAQGWDELTAMLRQEQVDLIVLEATGGYERGLLCALQSAQLCVARVNPRQARDFAKSMGVLAKTDRVDARVLCDFADVLARHASRERYVTPMLQQARQTLAELMTRRRQLVDMRVAEHNRLEHAGPKAKRSIHSVIKLLDRQLESIDHQIDDHMDEHFKQQRKLLDSVKGVGPVTILTLTATLPELGQLGRRQIAKLVGVAPLADDSGTRQGKRMTWGGRAEVRSVLYMAAIVAMKHNLVIRAFYERLVAAGKPKKVAIVACMRKLLTILNAMLRDQATWNAARHLSLAIGA

SEQ ID NO: 397376 - protein, 415 aa, unidentified
MALKIVYKICCGIDVHKTFVVACIASTNDKGVTSYESHRFSTYTSGLKTLLQWLLDRNCKDVCMESTGKYWIPVYNILEKGCSIVLAHPKYVKAIRGKKTDKKDAKWIADLFKHDLVAGSFMPPADIRQLRNLMRYRFKLTCFKSSEKNRLQNCLTVSNIQLGNVVSDTFGKSAQAILDKLLENPADTSFDLEPLVYKSLKKKLPELRDAIDGFITPEQAGKLKIIKDHYENLESRKAELEELILALAAPYQQELTILQTAPGISSEFTAIGIISEIGTNMEAFPSAKHLCSWAGLTPTSNESAGKKKSVRVSKAGCYIKPLLVQCANAVVTSKKHPEMRNRYLRLKKRRGHKKAIIAIARMLLTALYHMLKNGENYNAELYQKSDLPPFNREITIEQALMIARNQGYKIKSATT

SEQ ID NO: 397377 - protein, 412 aa, unidentified
METLYPRCAGLDVHKRTVVACARRVEPTGRVREEVRTFGTMTAELLALADWLAEAGVTHVAMESTGVFWKPVFHLLEGRFEVLLVNPRHIKQVPGRKTDVKDCQWIAQLLQCGLLRASFIPPKPIRELRDLTRERAQLVAEKAAVANRIQKTLEDANIKLAGVATDVLGASGRAMIRALIAGREDPDELAELARRRLRRKLPELRAALQGLVSDHHRFLLGHLMTHLEALEGLITDLDLRIAAVMPPFAEAAERLKTIPGVEQRTAEGLIAEIGTDMGRFPTSGHLASWAGVCPGNNQSAGKHRSGRTTKGDRWLRQTLTQAAWAASHTKGTYLSAHYHRLAARRGKKRAVVALSHTLLVIVYQILKYGTTYNELGADFLDRLEPERLTRQLVRRLEKLGHTVKLEPRNDAA

SEQ ID NO: 397378 - protein, 340 aa, unidentified
MNATTYGLDLAKSIFQLYWVDPETGETHSRRLSKTQLIFFLSNRTPGKFVLEACGGAHWWARKIISLGHEAILLHPKYVRPFVRTNKTDAADARAIWTAAQQPGMRPIPVKTEAQQALLGLHRIRSELVDSRTRQVNQIRGLLGEYGLHFVLGRKAAMAQFVTRLSEIEQTIPAPLWRLLSRQLQRLRQLDAEILAAEQEIAAWLKTEPAAQCVDAIPGIGPITATALVATMGSPQAYRSGRAFAASLGLVPTQSGTGGKVHLGHISKRGDPYLRKLLIHGARIVLTRSKRRPCWAEALLVRRPTNVAIVALANKMARTAWALLAHRRVYEPGYVSARPA

SEQ ID NO: 397379 - protein, 340 aa, unidentified
MRELYVGCDLHSNGIFIGIIDEQGKRVFKKRLSNDLREVRETLVALQEKIVGIVVESTYNWYWLVDGLMEGGYRVYLANPSAIQQYAGLKHADDKHDAFWLAEMLRLGVLPEGYIYPKQERPIRDLLRKRGHLMRLRTSLVVSLQNILSRNLGWRVNVNDVKVLREDRITPLLAENGDLAMAGQISKETIDFLTHQIDQIERRVDKEVRLKEAYRFLQTLPGVGKILALTIMLETGPISRFATVGDYVSYCRKVPSRWMSNGKWKRSGNTKNGNRYLSWAYAEASDYARRLHPEPRAYYQRKKQKTNAVVAHSALAHKLARAAYYVMRDQVPFDPEKLFR

SEQ ID NO: 397380 - protein, 402 aa, unidentified
MDVHKASVVACVMIAASDGTVHSEIKTFGTMTKDLLELGDWLKSWQITHAAMESTGSYWKPVYNLLEGQLELLVVNAHHIKAVPGRKTDVKDAEWIADLLRHGLLRGSFIPPKPQRELRELVRHRSNLVGRRAQAVNELQRTLESTNIKLGNVVTDITGVSATEMLQAIVAGNADPEALAEMARGRLKQKKELLQQALRGKVEDHHRLILSQLLVEIADYEEQVRDAGSLIATRLKDQRELLDRLDEIPGVNQRVAEVIVAEVGADMKRFPTAAHLISWAGICPGNNQSGGKRRSCRIKPGNRSLRSAIVEAANAAGKKKDCYLATMYRRLAGKRGKKRALIAVARTILQSCYYMMLRSCKYQELGADYFERRDPVGLANRLAKRIEKLGFAVSLQPAPKVA

SEQ ID NO: 397381 - protein, 345 aa, unidentified
MTQYKRIAIDTSKAVFTLHGIDQQERPVLRTNLRRAQMIPFFKKLPLTVIALEACGASHYWAHELTALGHTVHLIPPQYVKPYVKRGKNDRNDAEAICEAAGRPGMHFVPVKSVTQQAQGMVLKVRESLIGQRTALINTLRGHAAEFGIIAGKGAGKIASLLSAIGQEATIPTEAQEMFTLLGQQIHEIDVRIKDIDAKLTAAHKASEISQRLVTIPGVGPVTALTLAVEIDPAMFESGRHLAAWAGLTPKERSTGGKQRMGGISRAGNERLRVLLVSGATAVINAAMKPGSRQMTDWLRALLLRKPRKLVAVALANKMARTAWAMMKSGETYRRPITAAGTVAA

SEQ ID NO: 397382 - protein, 412 aa, unidentified
MKRALRRVGIDWGSESHQVCRIDGEEEPKQRGFPHTGEGLSALVAFVVEGEIDPEQIAIAIEVNHGAVVEALLAAGLRVYSINPKLLDRLRDRFSMAGAKDDRRDAFVLASCVESDAQAFRRIEPGNEENTRLQAATRLREDLKSEQRANANRLWNALREYRPALLTLCPGADEPWLWVLIEKAPSPSEGAKLTRARIGAVLKKHRIRRLTAEEVRTVLRGDVLSLRPIYIESHVARVLVLIERLKLAQAQIVTIEKQIKTALAERVKSEEQTERRDLTILLSLPGFGSLTVATALGESGDAFDRRDYNALRSGSGAAPVTKQSGGTRYVVMRQVCQPRLRVALHLSALQAIRIDPKFRDLYLRARARGQTVGRAIRNIVDRLLFLAIQLLKKNQLYDIQLRQLAPELATAS

SEQ ID NO: 397383 - protein, 316 aa, unidentified
MISCFVGIDVSKATLDVGFWPELSKPFQLRNDPEGIAQLIACLNELEVERIVLEATGGYEKAVFKALRIADLDVVRVNPKRSHDYAQAIGQLAKTDRIDALMLAKFAQHLASPSKIEPSQARDELSELVKLRDQIVEHRDDDRRRIKQATSPVAITFFTEHIASLNAQIKALDKHLAQASKALNSEKAKHLASVKGVGLITTAKLMAYLPELGTLSGRKITALVGLAPYNKDSGSKSGPRKIEGGRYKVRGVIYMAAWVMIRHVPEFKTRYDTLVARGKRPKVAVVACMRVLLVRLNAMLRDGAPWKDHKTQAPAA

SEQ ID NO: 397384 - protein, 320 aa, unidentified
MREPHSVGIDVSLDRLDVAIRPGGQCFCVSNDAAGWAELVARVQRYATGAIGLEPSGGYERGVVRALLAAGLSVCRINPNRLRQFARAGGALAKNDRIDARLIAQYVAVMPTRPVRRDPAVELLAEIVTMRRQLCDQHVALENQAGHLEDAMLQRMAKRRLARIAADIALLDKRLADLVAAQPRLAERFRLLCSMPGVGATLAYTLLALLPELGELGRRQLAALVGLAPYDLDSGRFRGQRHIYGGRMAVRNALYMPALAAFRFNPALRAFYRRLVAAGKKPKVAIVAVMRKMIAILNAMLRDATNWTDATTSRHTVPAT

SEQ ID NO: 397385 - protein, 330 aa, unidentified
MDREYIGIDLHKAFFQACAVTSQGERRWERRFPRTADGIAQFVARGIGPHQAIAVEASGPTWAFVDALAPTGAAVCVVDPRKTKLKAGFAAKTDRLDARRLADALRRESVVSIYIPPPAIRELREVCRGRHQVVRLRTRLAQMIRSLLLRCDAGEPPGTRLYAPRALAWLTQVQLAPDADRQLRRLERLYRAIHADAQAADAEVKHRAAADSIAGALAGMTGIGPVLALTIRAEVGDVARFDRGPALASYAGLVPRVDRSADRVYHGRITKEGSPWLRWALVAAAMHAMKRADATGRWARRLAGRKGAYKARVALARVLCDDVVALWPRG

SEQ ID NO: 397386 - protein, 346 aa, unidentified
MTLTIVDEACAITGGVDTHADTHMAAALDRVGGLLGVQEFAATPDGYARLLAWLGEFGTVSLVGIEGTGSYGAGLARHITAAGIRVVEVDRSDRQDRRRAGKSDPLDAVSAARAAQSGRASGAPRGRDGQVEAIRALMVAKRTARAERTQTINQARALILTGPDDIRIRFTRHGPADLVAELAALRPRPGSMVRYHTLLALRELGRRAVFLDAQLDRLDELIVPLVTARAPGLLRLYGVGPDTAATLLIAAGDHPGRLRSEAAWAHLCASAPIPASSGKVTRHRLNRGGDRQANHALWRIVITRMSSHPPTRAYVARRAKEGLSKPEIIRCLKRYAAREVYPHLRG

SEQ ID NO: 397387 - protein, 414 aa, unidentified
MALARWVGRAIGLDVHRDFCVVAICEDGQVRTGARVASTPEGIELLGQSLLASDRVALEVTGSCWEVARILEPHVERVVVVSPDDTGISQARAKTDRLDARTLARLLWSGELESVWMPDERCRVLRRRLARREQLVRSRTRVKNEIHAVLQRRLQGKPPCSDLFGVKGRRWLAGLEVPLEERESVDAGIRHVEFLDAEIGTVDRLIAQQALAWPEIRRLMTVPGVNLICAATFIAAVGDPRRFLTSRKLVAYLGLDPKVRQSGDTPARSGRISKRGSAAARWALVEAAWSVVLQPGPLHAFYDRTRARRGHGKAIVATARKLAILFWCMLCRGEDYAHQQPSLTRKKLRRLEITAGAPKYAKTAHGVWSSNTAIRQAERELATQAETSYKRMVTDQQAGAPARKVGASATPERA

SEQ ID NO: 397388 - protein, 343 aa, unidentified
MQMVTTIGLDIAKSVFQVHGVDAAGQVVIRRQLKRRYVLAFFEKLLPCLVGIEACASSHHWSRELQSLGHTVRLMPPAYVKPYVKRQKNDTTDAEAICEAVMRPNMRFVPTKTIEQQSCLMLHRARHLFIRQQTAVINSIRAYLAEFGIVAPVGRRGVEQLLEVVADAADRRLPEIARVCLAALGSQLRRLKAQILEFDRRIMAWHRSNATSKRLDAIPGVGPALATALVASIADPKAFRSARDFSAWVGLVPTQNSSGGKDKLGSISKQGDRYLRSLFTAGALAVIRYAKIHGTRHRPWLTGLLARRPTKVAAIALANKLARMAWAMMARNERYKEPAALTA

SEQ ID NO: 397389 - protein, 320 aa, unidentified
MDIQPMFRCAVGMDVHLATITVCVIIAEPGCEPEVHRRTFGAFQRDRRAMADWIASFQPDTVVMESTGIYWKSPYAALEKVGIRALVVNAQHVKKVPGRKTDISDAEWLAMLARAGLLRGSFIPPASLRNLRQLSRYHQRTTAMLAAEKNRLVRVLSDAGIRLTAVVSDPHGVAARAMIDCLLNGGTPEQALAHAGRLRAPRDELLAALQGELSEHHLFVARMIRQHLAFLETQLADLERQLFDALEPYAAAVQLLLTIPGIDRLAAAKLVVEIGLDMAAFGHAGRLAKWAGICPGNHESAGKRRVGRTIPGNRYVRDPL

SEQ ID NO: 397390 - protein, 469 aa, unidentified
MAGGHRVWSPNVTCSRVRAISLARGRGDHQVSLRARTGDSALHRGPLPVASDNQEVHMKQIRQKVGGLDIHRDSVVACTRVTMPDGSIEVAKERFKTTQAGLAELTTFLMDAGVNTVAMEATGIYWRTVYYALEGLFEELWLCNAQHVKNVPGRKTDLSDAEWLADVAAHGMVRPSFVPPPDIRELRELTRYRKTQVDARAKEIQRLEKILQDAGVKLTSVASTVWSKSSRAMIEAMIAGERDSVVLADMAKGVMRKKTDRLEEALESNFGSHHAILCRQVIDHLDFLDASIATLSTEICARLVPFEPQVALLTSIPGISAATAQVIVAETGADMSRFPTAGHLCAWAGVAPASYESAGKKRPAGTRKGAPWLKRTLIEAGRAASRTKGSYYSALYARIARRRGPNKAAVAVAHSMLETAWHLLSTGALYEDPGADYFERRHDPVIEAKRLQRRIEALGFSVTIEEKAA

SEQ ID NO: 397391 - protein, 316 aa, unidentified
MMQISRTAGIDTSKAKLDVAVYGGAERWQIDNTAAGWRRLAASLSSASVRRVGIEASGGYERGVVGYLRDQGFTVLVLQPIQVKAYARLHLRRAKNDKLDAVLIAACTATIDQPRTAPDQRLESLALHLTFVEQIEEDIARFKVRLEHVDDPRLRRMVMADIARLKMRRLAELQRIVAVLRLHDDLARRLDLVLSVPGLGQRTAIALLIRMPELGCVSREQAAALAGLAPFDDDSGMHKGERHIAGGRSRLRRSLFAAALPASFRWNKALMALYGHLTERGKAHNEALVACARKLLIYANTVVQRGTPWVDRPLSV

SEQ ID NO: 397392 - protein, 340 aa, unidentified
MPLYGGIDLHANNSVIVLLNEQDEVIYRKRLPNDLSTILEQLAPYHTAMEGLVVESTHNWYWLVDGLREADYRVHLANPAAMQQYSGLKYTDDHSEARWLAHLLRLGVLPEGYIYPKAARAVRDLLRKRAHVVRQPTANVLSVQNIMARNTGARFSVKRIHELPKQDLTTLLAEETQVLAVTSSLVVLDGLRHQIKRLEQTVQKRLHHTPSYEQLLTVQGIGTILAQTITLETGAISRFPTVGNSASYCRCVDSTKMSNGKRKGTGNVKNGNPYLAWAYMEAAQFAMRFQPEAQRFYPRKLAQSRNNTVLARKAVAHKLSRACYDILRDLVPFEATKAFG

SEQ ID NO: 397393 - protein, 416 aa, unidentified
MNAVGIDVSSRKSTVAVLRPLGEVVCLPFDVTHDIAGLASLAEKLKAIDGETRVVMEHTGRYYEAVAKALHEAGFFVCAVNPLLIKEYGANSLRRVKTDKADAVKIARYALDNWADLRDFTPMDAIRYDLKTLNRQFQLASKQRTASANNLIALLEQSFPGIRKCFDSPVRSDGTQKWVDFAHSFWHVDCVRKQPFPAFCERYRKWCKRHAYLFKLSNAEEVYALAKRAVVLTPKSKVVKVLVQEAANQLSSISRSVEVYRAEMDRLAAMLPEYPVVMAMYGVGKSYGPQLMAEIGDVRRFERKQALVAFAGIDPMPNQSGDKNVRSNKSSKRGSPYLRKTLFNVIRTYLQCAPQDEPVFQFLNRKRAEGKPFYVYMLAAANKFLRRYYAKLRDYFASLDTLQSVDPIPATLKASL

SEQ ID NO: 397394 - protein, 316 aa, unidentified
MQTLLDIGVDVAKNEVVVACAANTFVPHAVANRRVELRAWLKSIPKGSRIGLESTSTYHELLADLAYEQGFSVFVLNPRNTRHYAQGVGERAKTDHVDAQVIARYLAREHTQLHAYQPPTADQRHIDRLLRRRAKLTRIRAMLRQSLRELDMCATEIKALFTRFDALIKKIDITLAQLNAVSQERLKTQQHLQSIVGVGPIVGISLSNVLQRVPFHNADAFVAFVGYDTRAQDSGQRRGRRRLSKHGPAELRRLLFNAAMAASKTDSWKPIYRHYRNKGLSGTAALCIIARKIARTAWSISKYQTTFDPKRLTCQA

SEQ ID NO: 397395 - protein, 430 aa, unidentified
MDGVNGNRLEEFRQLRKAIRQSEEHLIVGIDIAKDRHHAFFGTATGKTLLRRIVFSNDHAGFRKLLDQAEALRVQHGLKKVVYGMEPTANYHKPLGEYLIKLGKTVVLVSGVTVARNRESLDGRWDKHDGKDSANVADLISQGKCLYYEHPSAELRGLRGLLSLKRRLKKQEHGYRVRIRNHLIAQYYPEMDRDYERLGAEGLSVVRWCLAASEIAQLDVDPFIERVTSRRITVEKRRRLEEIWEKAAGSIGCDGVPGVSHEAKIMVEGLRQIREMIKETEQKIEELCKAFPEYQYLLTIPGFGPDVSAKVLGAIGDPDRFQNGKQVLKMGGLDLSADRSGKDSGRAIPEISKRGKADLRYALYQAALIASFKNRDVMIYYTNKIRGREREKGIHVKMRVKLAAKLLVIAWTLMKKREPFNPVYLKAELD

SEQ ID NO: 397396 - protein, 343 aa, unidentified
MQAVKTIGLDIAKSVFQVHGVDAEGRVIVRRQLKRRYVLAFFQKLSPCLVGIEACASSHHWSRELKALGHTVRLMPPAYVKPYVKRQKNDAADAEAICEAVTRANMRFVATKSPEQQSCLMLHRTRHLFIRQQIAVINAIRAHLAEFGIVARVGRNGVEELLDVVADASDQRLPELARGCLAALGAQLRTLKTQVLEFDRRILAWHRSNEMSKRLDEVPGVGPALATALVASIADPKAFRSGRDFSAWVGLVPKQNSSGGKDKLGSISKQGDRYLRSLFTAGALAVIRYAKIHGTKHRPWLTALLARRPTKVAAIALANKIARMTWAMMTKGERYREPAALAA

SEQ ID NO: 397397 - protein, 410 aa, unidentified
MAVERCAGIDWAKEAHRVSVLEADGSPLVEQGFTHDERGLGQLCELLVGLGVKRVAIERPDGVLVGRLLEAGLAVLPIHPNQLKAARPRFRAAGGKSDSFDAFCLAELARTDHHRFRVLAPDSDETKALRALTRAREDLVRTRVSLTNCLHAELEAFWPGADRVFCRIASPIALAFLERYPSPTDARRLGEKRLAGFLARHGYCGGKSAAELLARLRCAPEGRVQETEEEARRTAVLSLVAALKPLVEQIRVLDSRIAHAVRAHPDGGVFLSLFRDPGSMLTAAKLLSEIGDRRERYPTAEALAAEALAADAGMCPVAKESGKRKVATFRRACNKRLRDTLATLADCSRQHNPWAKDVYLRARERGCDHPHAIRILGRAWVRVIWRMWQDGVPYDPLKHGGRRRLDAAGG

SEQ ID NO: 397398 - protein, 345 aa, unidentified
MKHYAGLDVSLKETSICIVDETGSICREMKAPSHPEDLARVLQDPTWRLARIGLEAGPLSQWLFSGLAVAGLPVVCIETRHTKAFLKAQVNKSDRNDARGIAQMMRVNLFLPVHVKTMTSQQRRALLTARKLLQEKVIAIENDIRGLLRNFGLKVGVIGPVGFDTRIRELVDGRPELADIAASLLAARQTLRAEASRLHRKVLAIVKDDGTCRRLMAVPGVGPVVALAFTSTIDVPARFRHSKAVGAALGLTPVLKESGESKRVGCVSLCGDGMMRTLLYEAAQVMLTRVKKWSWLKAWAMNIAKRGSLRKAIVALARRLAVIMNRMWSGGTEFRWTRDDAKASA

SEQ ID NO: 397399 - protein, 310 aa, unidentified
MVDNSIRTAGIDIAKDKLDVAVLGCDDSGVFENNDAGFKRLAAWLAAAGVSRVGVEATGGYERGVVRHLRADGFTVVVLQPLQVRAFAKMRLQRAKHDKIDARLIAACTEMLTPDSRLPPDPRFDVLADHLTFIEQIEDDIVRCKTRLEHITAKRLVRIVAADIKRLEQRRAAELKRLTDALCAHADLRQRFDLVLSIPGIGARTALATVVRMPELGQVSREEVAALAGLAPFVQQSGQWKGQMHIGGGRARLRESLYAASLPAAFRWNPPLMAFYEHLRARGKSHKCALVACARKLLIYANTVVARGTP

SEQ ID NO: 397400 - protein, 348 aa, unidentified
MMIIGCDFHPSWQQVSWLDTETGETGEQKLVHASGDAKKFYQQLAAPVRIGMEATGNSQWFIELVEDLGHEIWIGDAAQIRASYVRQQKTDKRDAAHILKLVVEGRFPRLWTPDREQRDLRQLVLHRHKLVRIRSRVKNELQHLSLNKGMQRKHKLWSQAGQKLLRELPLKPWAACRREDLLGLLATLDQQIGKLDQAVRLAADQHPQAKLLMTQPGVGPNTALAFVLTLGDARRFPRGKQVASYLGLIPREYSSGGRQMLGSISKQGNRLVRSLLVEAAQIAVRHDPGLRKQYLHRCHRKPKGVAKVAAARKLAVRLYWMLRTQQPYPEIVRIESSPRVPLVARHGE

SEQ ID NO: 397401 - protein, 428 aa, unidentified
MADRANATPGCNLVAIDVGRYSNAVLIEAMSGKRHRFKMANTAADFGRLLGFLRGLPGSCRVGLEPTGDYHRPIAHRLLSAGFEVMSINSVALSRYREAIFNSWDKNDPKDAGVILEMLRRGAVQRYVDPMVAGTHDLQELAKTYYQVSRARTKVQHSLINHGLPLYFPEMHRYWATTRNEWFVRFLLQFPTPAHVRSLSCAQFVEAAWDVVGRKVNKRAKLEEIWEVAGSTAALPHALDSLAVETFRITLRRYQELNALRGELEQRAERALEANADFAHLKTLPGIGAVIAMTILAEGGDLRRFGHHRQFLKYCGFDLAKNQSGTQRGKEQLSKRGNARLRLAFWLAAVAAVHMRENSFRAKYERYIRTAPEDPDLRRKALTAVAAKMARVAYGMIKKNQPYRQFFEQSLPSGSIPLSAAVGAYATP

SEQ ID NO: 397402 - protein, 407 aa, unidentified
MIPSPLKTDLPSPLNVPVNPAQPNPEANGGEQFDRQTILVGIDWADKLHAFHATGPDGSQWAGNFKQSPQAVLAWLVDLQAHFPNTNAVEICLETSRGAIINALLQYPNIIIRPVNPQALANYRKAFHHGGGKSDPVDAQLILQYLQHYRAKLLPLRRDQPLTRELGTLCEDRRRLVQQRVRLANELISLLKLYFMVILELKPANIYANFIVKLRKRYPTLELIQAAGPTKLRKLLCGIGSKETLNQSIKDYDTEIKRLVRTHADYPIFASLPGTADNTQARMIAVLGDDRSRFSSANALQCAAGIAPVTTQSGKSRYVSSRWACSKFMKQTFHEFAGLSLVKCSWAKAYYEGLLRKGKTPQMARRSLAYKWIRIIYRCWQNHETYDDARYTARLLASGSPLAQQLT

SEQ ID NO: 397403 - protein, 429 aa, unidentified
MNYTQNEKIEQVTDTTLVIGIDIGSQIHYARAFDNRGLELTRKVFSFRNDIEGFNTFNQWAEDLKIEKNKTDVLIGCEPTGHYWFAFAKYVTEHKMTLVMVNPFSVKKIKELDDNSPKKTDAKDPKTIAKLVIDGRYSIPYMPEGIYAEIRDLVYSRDRIVKQHNISANRIQRWLAIHFPEYLGIYTRFDAASGLAVLEKAPLPKDVIALGVGGIKKLWHDKKMRGRGVTEVRAKTLVDAAHNSIGLDGGTGTRSELYMLLEEHRLWTSQIEAVEKAIEEAVLKVKYVEKLLAIKGVGIITIAGFVAEIGDIRRFKSPKQIQKYAGLELVENSSGKHKGRSRISKRGRRKLRRILYQVMIPLLASNREFRGVYDYYVTRVKNPLKRRQAMVAVSCKLIRVFYAVLTKGMDYDRFKMMSDIHRESDQIVA

SEQ ID NO: 397404 - protein, 466 aa, unidentified
MPIDKKQWQNRKERKELARRLRSEDPNLEVVHPHAAGVDVGNGAHYVAVRPDCDSQPVRRFECFTADLHRLAGWLQSCGVQTVALQSTGVYWIPLYDILEESGFEVYLVNARHTKNLPGRKSDVQESQWLLKLHTYGLLNNSFQPTSEIRVLRTYWRQRAEHARGIGTCILRMQKALTQMNLQLANVISDLSGVTGQKIVRAIVAGTRDPRKLAELSDPRIQASKEEIAKSLEGNWRQELLFVLKQEVEMCDTYQRRMVECDQQLQEHLTSFADTVAPQVKAGETQKKTAKQKNKNAPQFHLSGELHRITGVDLTRIDGIDVMVAQTLVSEVGLDMSRWKTEAHFASWLGLCPDNRISGDKVLSRGTRHVVNRAATALRIAATTLLRSQTYLGAQYRRLRSRLGAPKAITAMAHRLARLAYRMLKYGQQYIDRGAEYYEQRNRQQQIEFLRKKAAKLGLQVTAAHP

SEQ ID NO: 397405 - protein, 389 aa, unidentified
MRFYTKQHQFYCGIDLHARTMYLCVLNQDGEILLHRNMPAGPEPFLKAVAPYRTDLVVCVECIFTWYWLADLCAREGIPFILGHALYMKAIHGGKAKNDKIDAQKIAVLLRGGMLPQAYVYPAAMRATRDLLRRRMHLMRKRAELLTHVQQTNWQYNMPEIGKKIAYKANRAGVAERFADPAVQKSVEVDLALIDYYDELLRDLELALVKTAKQHDAHTLYLLQTVPGIGKILSLVLLYEMHDIARFPRVQDFVSYCRLVKCAKESAGKRYGASGTKIGNAYLKWAFSEAAVLFLRNNPAGQKYLARLEKKHGQGKALTILAHKLARAVYDMLKRGTAFDMAQFLSSSGSGAGEPGAELGPHGVSLTTVLGKEAPPASANAPEHIGAIP

SEQ ID NO: 397406 - protein, 423 aa, unidentified
MPTTTLYVGIDVSLRTNQVCAINFNQDIFFNESFENSPAGTDKVILKLISVLRAHSELTKIQVCMETTNVYHIHCSSSLSTDARLLSHGCKVYVVNAKLIEKYKETFVEREKTDPEDAFLCADYVRIGKCKNVMPAMGYRNLALQRLTRQRKHIAELIRKEKQYLSANLYLKYSALKTDPESSPFSDIYGKTSSVMLTDFLSTEEIVEADLSDLVTKIAESSRKRISDPETAAKLLKKVVRNSYRLDTMAADSVSMAMSSSFRLIHCYQKELKQLDKEIIRMVESSGNNYYTILTSIKGVGPVFAAGIIAEIDDINFFKDDSHLASYCGLRWKRKQSGPKDSDHRKQPNSCNSFLRYYIVEATGSVIRYSDDLASHYYKKRKEVKINSHKRALVLTSRKFVRLVFGLLRNNKLFDDHYLAAIS

SEQ ID NO: 397407 - protein, 344 aa, unidentified
MTYSNVIAIDLAKHVFQVCKASHDGTVIYNRTCSRQKLKELLVKEKTALVAMESCGGTHYWARFAREQGHEVKAIAARTVKPFRQGQKTDANDAIAISVAARQPHIHSSRLLSIAEQCQQSIVRARDLLINQKVKTSNHIRSLMLELGIAVTKGDKVLRKTIPEILEDGENDLTTGFRTTLNIMYQHFLMLLNEIEMVSKQLNNEVAQDEICQRLKALEGVGPICAIQLKIALDPEHYSKGREAAACIGLTPVQHSSGGKQKLGSISKRSNHNTLRSALFQGALAVVVNIDKRESRTYKDAWLKALIARRGKKVAAIALANKTVRTAFAMIKYNQEYQPQLLVA

SEQ ID NO: 397408 - protein, 346 aa, unidentified
MELHTIGIDLGKTVFHLVGLDLRGEVAVRKKFSRTQLLRFTANIRVELIGMEACGGSHFLGRALREQGHEVRLIPAQYVKPYVKTNKSDYIDAEAIAEAVARPTMRFVPIKTDEQLDMQSLHRVRERWVMRRTAVINQIRGLLLERGITLRKGRHHVDAALPLILEDADANLSGAVRLLLAQLKLDLDQLSVRIEEADAVIQKTADENEACQRLVAIPGIGPVTATALIAAIGNGGAFHKGREFAAWMGVVPREHSTGGQQKLLGISKRGNSYLRRLFVQGARAVMQQRTKQSSGLSAWLTKLTSRTHRNVAAIALANKLARIAWAVLAKNEHYRPPVLADVVAAK

SEQ ID NO: 397409 - protein, 326 aa, unidentified
MEHELHYIGIDTAKEKLDVDVLRPDGRHRTKKFANTTKGHDELVSWLKGHKIDHAHICIEATGTYMEPVAECLYDAGYIVSVINPALGKAFAQSEGLRNKTDTVDARMLAEFCRQKRPAAWEAPHPLERALRALVVRHQALTDMHTQELNRTETAREVQRPSIDAHLLWLEAELKRLEKQIKDLTDDDPDMKHRRKLLESIPGIGEKTSAVLLAYIGLKDRFAHARQFAAFAGLTPRRYESGSSVRGASRMSKAGHVSLCRALYMPAMVATSKTEWGRAFRDRLAANGKKGKVILGAMMRKLAQVAYGVLKSGVPFDASRHNPVAA

SEQ ID NO: 397410 - protein, 421 aa, unidentified
MKSTAASKLRQIPQGYLVIGVDPHKKTHAAVSITQDFTIHAKFKFSNSMEGLEMMLQRTKAEMIKTGCRGVIFAIETGGHYWRNLAYVLDERGIPFHFINQFTLKRRREGKDINRRKNDYRDSEVAAQLLCTGEFTESKLPQGVYAELRAAHNAYRRLVKERTRITNLLKGLLDSLFPEFTSVFKDPCALTAMSVLSTCAIPKVISNMPDDEFVTTVKAEHHGRLMRKKLLALHHIAKTSIGIEASARSVSMEISFLVEKFNLIKQHIRTIEGTLVRFVDETEEGKYLLSIRGLNYIAVAGLLAEIGSFKQYRNAKQLIKMAGSNPTESESAGKRGTHTPMSKHGRPVLRYCAWTSVIPMLRFNSDFRAWAKKMRERPVHANPLNGREVVGACLNRLLRLSFALAKKQSYYQMPELARIAV

SEQ ID NO: 397411 - protein, 435 aa, unidentified
MKLTQIRENTAGIDIGSEHIFIGLDDDSVHQFGTFTCEFRAAIELLKTHHVQSIAMESTGVYGVILHEMLQQAGFEVWLVNPAHIRYVPGRKTDVSDCQWLQQLHSYGLLANSFLPDPAIKALRAYLRLRERYISESAKAVLHMQKALTMMNIRLHQVISQIHGASGMRVLKAILAGERDPHQLVALCDRRIQANKHDQVVASLEGHYRPEYLYELADAIDCYEFFQCKLNECDRQIDKEISQLAEKQPVPEEYGKAKPIRHHTPAIDQLHQKVVRAAGGVNVNELPGLTDYSALRLIGEIGVDLAPFPSEGHFTNWLKLAPGKKQSGKSIRKHKYKSAPRAAEIFKQAAQSLLESKNHALGAFGRRIRARRGPGIAIKAVARKLAILYYRAMTQGMAYVEQGVEAYEKQYQERRLHNLHKQARRLGFTLVELNE

SEQ ID NO: 397412 - protein, 470 aa, unidentified
MADWVHAHYARVRSPYAAQDKPFASGFTNPHRNGGDIMLKLNYMSTLFVGIDVSSKTNAVYAMDFEENKYISSSFGNNQPGADQLVNMIAECMHKHKNLDTLLIVLESTSVYSVHISNFLSTSEVLMPYKPYVFCVNPKATSNYRKSYIGMEKTDPTDAYLIADFGRVGRTKKLEPWRGGQFISLKRLTRHRMHLSECITREKTYMVSNLYLKFSELQLLEGDDKPFGSLYGATSSAILTEFLSPQEIINMPEEDLLAFLAQKSRNRISDLSKTSELLRKAARDSYRLDKCMYEPLSISLASSFNCIHAYQKEIKLIEQAIEKCINGMNPNALLILQSIPGIGPIWASGILSEIGDITVFHSSDALAKYAGLYWPKGDSGDFTSEDNKMSKAGNPYLRYYLGEAANSVRKHIPEYADFYARKYAEVTKHQHKRALALTSRKLVRLVFGLLVKNQLYTGEKLDTEYNIESN

SEQ ID NO: 397413 - protein, 391 aa, unidentified
MSMYFIGIDISKYKHDCCIISAANQKVVSKITIRNNKSGFDELLTIINSFSNPEDIRIGFESTAHYALNLELFLENSLLTFMEVNPVLISEYKKSKTLRRTKTDSVDCESIARWLMTVEYKPHSKGFYHAYSLKSLTRLRDRLIRQRSFYLVRITNVLDHTFPEFKPFFNERLSKTALYLLENYGSAEKMARMNSASYEKLRSLSRGKFSPQQFLKLKELATNTVGVNNSIFDVELNSLLALYKSLAKEIDTLEKEINKLIDEVNPHYMSIPGIGPLSAAVIYSEYGDISNFSNPGQMLAFAGIEPGINESGTESHGGRMVKRGSSQLRYTLINCCLPLIRFDMTFAAYYAKKRGEGKPHRVAITHVAKKLIRVIYALERQDIDFNTKKLH

SEQ ID NO: 397414 - protein, 426 aa, unidentified
MKNINVLTTLFVGIDVSARTNVCLAMDFNSNVLLRLDVANNQIGADTLKAKLLDLIHRNDFKTTIVALESTSFYGLHISNFLSADEELIPHNVYVHPLNPKMISNYRKSFIGLGKTDPIDAYIIADFARVGRITTEPWKGPQYLALQRLTRHRLHLVECITREKAYMVSNIFLKFSELAVLKEGDHPFSSNHTATAEAILTEMLSLEDLIRLSSEELIEFVCSHSKNRYSHPEEVCKLLKKAARDSYRLDKTLYEPLTVSIASSFNCIETYEREIKSINKAIEKTLKGLCPDAFTVLQSIPGIGQVFASGILSEIGDIHAFHSADALAKYAGIYWNRHQSGDYEADDTSMSKTGNKYLRYYLIEATNSIRCHEPSFAAYYRKKYDESKTHHHKRALALTSRKTIRLIYSLLDKNQLYSANRVQITP

SEQ ID NO: 397415 - protein, 392 aa, unidentified
MYIVGIDIGKNHHEASIVSPEGKQIGRSLRFATTHKGADSLMSFIFKNIGNSPCVFGMEATGHYWYPIYSFLKAKGYTICVINPIQSDSLRKMYIRQTKNDSIDSFLIAEVIRFGQFGTTSMADENILAMRQLCRYRDSVISSRTEIKLRIGTIMEQIFPEYEKQFSSLWVSTSMGILEKYLTPENIENAPIDELFEIIKDKSHNRLTKAKAISIKEAAADTFGIKIAQDAFSFQLKQLIDRMNFLDKQIEALDIEIMKYYEQFDCYLHTIPGIGMIATATILAEIGDIHRFKSSSALVAFAGIDPTVRQSGEFNSTHNHMSKRGSPYLRHAIFLAATTCSFHNSPLNAYYKKKRDQGKHHLTATGAVARKLTTVIYAVLRDSKPYEPKKFC

SEQ ID NO: 397416 - protein, 343 aa, unidentified
MDHFAGLDVSVKETSVCIVDDTGKIVREVKLASEPQALLAVLKNPAYRFKRIGLEAGPLSQWLFSALAEAGLPVICVETRHMKAVLKAQINKTDRNDARGIAQMMRAGLYRPVHVKTLRSQKLRMLLTHRKLLQSKAIAIENDLRGTLRNFGLKVGMVGKVKFEARIKELVENLPDLAVLVEPMLIVRRVLREQIVILHRRLLAIVRDDEVCRRLMTTPGVGPVVALTYRATVDVPARFRKSKSVGAVFGLTCAKYQSGEIDWSGRISRCGDEMMRAMLYEAAQSMLFHSKKWSWLKAWAMQIARRRGIKKAIVALARRLAVIMHRIWVDGTEFRWTREVAAA

SEQ ID NO: 397417 - protein, 372 aa, unidentified
MKKKILFIGLDVDDKFFSGCGYEGKGSRYLDFKCKPSLGALDKKLQSFKEEGYDMKICYEATYLGYSLQRDLENKGYECEVIAPSLIPEIAGKKIKTNKIDSRKLATYYSQGNLTKVYIPDKEEETMRDLLRSRKFLQDQIKRLKVHITSMCRRQGLNYREEIERPRAEYWTQLHREWLSKKINESEYKALKLNLSILLNELCNLESSLELYDKEVEKISEQPKYKRVVKALSCYRGVDILTALTLVLEIGDIRRFDHPRRLTSYAGLDLIEYSSGDKERRFGISKMGNRHIRTGVVESCQYSSEYPKVSVKLKKRRKGVDAKFISIADRAMKRLYTKGTMLLYKGKPINKVKVACARELLSFVWESLREAA

SEQ ID NO: 397418 - protein, 387 aa, unidentified
MPINDHLVQNETAIRSDVASIFVSLELSRSRWLVTSLSPGSEKMSKHLVAGGDGAGLLDLLIRLRDKAEQRAGTPVRIVVIQEAGLDGFWIHRLLATDGIESHVVESASIAVPRRHRRAKTDAIDGAMLLRTLMAFKRGEPRVCSMVVPPRPAEEDRRRIARERRTLIKERVEHINRVKGLLASQGITGYQPMRGGCRERLEELQTGDGRPLPPRLKAELGRALDRIELVRRQIAAVEAERDALVQADDVRARSPAVLLMQLRGIGPEFATVLWMEGLFRNFTNRRQLAAYAGLAPSPWKSGCVDREQGIAKSGNPRLRTTMVELAWLWLRYQPDSALSRWFRERVGSERGRIRRIAIVALARKLLVALWRYTTLGDLPVGAALKTT

SEQ ID NO: 397419 - protein, 343 aa, unidentified
MITIGIDPHKRTLTAAALDPHSRLLGQLRLAASSQAASQLLAWAAAWPERRWAVEGASGLGRGIAQLLVAAGEQVVDVPAKLAARARLLGTSSTRKTDLADAASVASAAIHHRRLRPVALEDQTVVFRLLSDRRDDLVAERTRILSRLHVLLADLQPGGAARELSATRAATLLRQTHPITAVDAERKRIAHQLLAEVRRLDRQVKTASQRIRTAVGEHGTTLTQVFGVGPVLAAKLLGHAGEVTRFPSRDHFASYTGTAPVEASSGDVRRHRLNRGGNRQLNTALHIIAVCQIRDPSPGQVYYRRKLVEAKTPEEARRSLKRHLSNIVYSHLVTDHRRRTRAC

SEQ ID NO: 397420 - protein, 338 aa, unidentified
MSIVMGLDQHRGQITAEWIETATGEVSRARVAPAHREPVARFLGRFGGVDLDVALEATTGWRFVVEEIRAVGGRAHLAEPAETSARRGSKKRAKSDRADAGHLRELLMIARLPESWIAPDHLLDLRARVRLRHTLSDQRGEWQQRIRAVLYHHGCPQRRDLMTHDGRQWLRAQALPETAREQVTVALAMIEALDVQLAPLDRELRAYARRQPGCRALMGHYGIGEPTAVTILAELGDCRRFSSSRLAVRYSGLDITVHQSDQRRAPGHLSRQGPPALRWALFEAAQVARRPGSPDRDYYTQAADRLGANRACLAIARKLLKRSYHTLRELGEEALAPA

SEQ ID NO: 397421 - protein, 310 aa, unidentified
MSNIFVGIDVSQDHCDLYVYPSAQQDTFRICDMEDVIARLRDLQPAMIVMEATGGLEIPVVAELVAADLPVTVVNPRQVRDFARALGILAKTDAIDARVLALFAEKVRPPSRPLPDARMRALRELVTRRQQLVEMRTMESNRRRMLRSERASTSIQLMLNTIENEIHQLDLEIKKHIIKSPIWQKKADLLKSVPGIGNTTAPLLVVALPELGKLNRRQIASLVGLAPMNRDSGTLRGHRTIIGGRRMVRTALYMPTICAIRFNPIIRRFYERLRTAGKPPKVAITACMRKLLIILNAIIRKNVPWVPDIA

SEQ ID NO: 397422 - protein, 415 aa, unidentified
MEDLGLRALYRRVAGIDVHRMLHVVTVLLAQPDGSMQRQTRQFGGFRRDCRELAAWLAELRIELVVMESTGIYWKSVYAHLENAGVPAWVVNAHRVKHVPGRKTDTADSEWLAVLARFGLVKASFIPPKDLRELRLVSRYRRKLNAMRASELNRLHKILDDGGIKLGGVVSDIDGVSARAMVTALIAGQSIEQMLGLARGKLKQRREELGASLDGDLSARHLFVLGHLEAHIETLQREISEIDSYMLAALQPYAWAHELLQTIPGIDEIAAALILIEIGDDMARFGRAQSLACWAALSPGNDESAGKRKSGRTAHGNSVIRSILCECANAARMTKSTLAAKYRSLMVRKSHKKSIIAVAHKMIRLIYLLLSRRLPYIDQAIDYAAMSARKNAPRWIKQLKCIGRWPSPKPAAASA

SEQ ID NO: 397423 - protein, 443 aa, unidentified
MKNSAARKLKQVPEGYLLVGVDPHKKKHAAVAITQDLTIRDRFKFDNTREGLEFLLQRVQAEMIKSDCRGIMFAIETGGHYWRNIAYYLDERGIPFRFINQYTLKRRREGKDLNKRKNDYRDSEVAAQLLCTGEFVESAIPQGIYAELRTAHNGYRRLVKERTRITNLLKGLLDGLFPEFVQVFKDPCGLTALSVLSTCPVPYVIAGMTEGEFVTTIEARHHRRLMRKKLRALHGIASGSIGIVAGAQSLSMEISFLVEKLRLIEGHIGIIERGLIRLVDATDEGKYLLSIRGLNYIAVAGLLAELGCFKAYRSAKQMIKMAGSNPTESESAGKKGARTPMSKQGRPVLRYCAWTAVIPMLRFNPDFRAWAKLRRERPVHANPLGGKEIVGAALNRLLRLSFALVKNQTYYRSPQVSAGGRLGGVYYTSGGQGDAVAGFWESR

SEQ ID NO: 397424 - protein, 399 aa, unidentified
MLAVGIDISKSKSVAAILNQDGSMHTSPFEFHHTQPELDAFIKYILNSNQSATILMENTGHYHYPVLKAFREAGLPVCMVNAYQIKKFGDMDLRKAKTDKKDAVRIARYALEKSYSLVPYTSMEQKYEDLKFLARQYNQRMLTLKTNKVFLLNLLDETMPGITNILPLTTRTPETSLSVLFINRFKSYDRIKKMRKSRFLDAFEKIARKSRNRQTKTHGLAIYEAALRNITTRGENEYTLAAQDQCLELVCESQKAADSIIPKMQTLAETLPEYAVLRSMAGVGDRLGPLILAEIGDIRRFHSGKALNAYAGNDAPPYQSGTFESHNRHISKRGNAALRKYCFEVMQALKLTRPQNDPVYLFLLKKEQEGKPYNVAKMAGVNKFLRIYYARAMETLKQQ

SEQ ID NO: 397425 - protein, 338 aa, unidentified
MKRYLGVDLHRNCFTVYTRQEDGSGASREWSIRSLKAFAQTVTANDAVAVESTGNTRLFCQALNGRECRIVVVNPRQFEVISRSVKKTDEHDAKVLAEFLAKDMLPEVRMKDEVHAQIASLAQTRDKLVKLRTTLKNKVNNLLAARGVLIRKESLTSEKGLAGVLAAPVSDLARLELEILVGEIRHLNESIKKLEGLLHDQGPKLPGWENLKSIKGIGDTGASVLLATIGKIEDFADEGKLAAYFGIVPRVSNSNETEHSGRITKRGCKLGRTTLVQCALIAVRYSPYLQAYYRRIAAHRGTGKAIIALARKFLGIIYKTLKNNWVFEDFPNFVLAKT

SEQ ID NO: 397426 - protein, 433 aa, unidentified
MEEAQDEPLFCERAAGIDIGKLMVAVTVRVPSETRKGGRQQETREFGTTRRQLLELADWLRCWGVERAGMESTSDYWKPVFFLLEQQGLDCVLYQASQVKALPGRAKTDKLDSVWLAKVTERGSLAGSFVPPEDIRRLRTHTRYRRRLTQARTAEKERCEKLLEDAHLKLSSVISDIHGVSGRDMLNAVIAGERNPRVLAEMARGVMRRKTARLEEALDCSFFTPEHAFILQMMLDNIDHYTAQIAVLNERIAVLCEPYERQLAQLDEIPGFGVKNAQDLIAEIGVDMTAFPTAGHLCSWARVAPRVKESGGKRKGRSAAGRGNPYIGGTLGEAAASVGRTQTFLGAKLRRLCKHMPKKKAQGAIMRTQLVIAHGLLSDPAAEYRELGPGYYGQRAGTRRQASGHVRGLERLGYKVTIELLDPETGELTTAAV

SEQ ID NO: 397427 - protein, 327 aa, unidentified
MSVYAGIDVHRNRCQVAVIDEGGKVLVNRNVTNGVKPVLPVIGGLPAGTPAAYEAAFGWGWLLELLESYGFEPHPLQCKAIASARLKNDKVDAATLAQLLRADLLPEAWIAPPQVRQLRAMLRHRAQLVRLRTLLRNRVHAILAGHGRPAGCWSGPGRQWLAAPELPAVSREIIDGDLALMDALQQPIDRLDREVRQQAKADPRVTVLTQLPGVGMFTALVLLAGIGDISRFGPARKLASWAGLTPTVRGSDRTVRHGHISKQGPAWVRWVLCEAAQTAKRHPDFAPGYEGTARRRGKKIATTAAARRLITRAYHLLTGAASDGAPA

SEQ ID NO: 397428 - protein, 451 aa, unidentified
MTKKKMELDVINPNCAGIDIGSKSHFVAVGQAMEDVKEFGVYADDLTAICLHLKEYGITSVAMESTGNYWQNLYVELEKHQMEVTLCNGKFTKHAKGKKTDVKDCRWIQKLHALGLLTGSFLPDETTEQLRTYCRQRTNWIDLAAEASHKMQKYLRLLNFRLDVVVKDICGLTGLAIIADICKGNLDPEKLSLHRHGNCRKSQEEIAKALKGNNRTDFLFGLKQEYDSYLFFQKKIDACDTQINAFLKTQINSNPDKKKLKTDEKLHKRVNKNSIKGIDLNQAAYQYFGGIDLMKIEGLSHSTILTIMSEVGPEGFTKFESSKQFTSWLRLAPNNKISGGKILSNKIPKGSNRLKIALRHAANAIGNLKDTHLADFFKRVAYRKGRATAVSATARKLAVIIWNMVSKRMEYKAPSEYLFLDQKRKMNVIQKIKKNIAKLEIKPEDLGFVTA

SEQ ID NO: 397429 - protein, 375 aa, unidentified
MTKIIRIGMDTSKSVFVLHGVDAAEKPVLRRKLRRGQVLDFFAKLEPTKIGLEACGGAHYWARELTGLGHEVVLLPPQYVKAYLKRGKNDAADAEAICEAMSRPTMRFVPVKSVQQQAALMLAGTREGLIARRTQLTNTIRGYAAEFGLTAAKGLDKIEPLLARIATEERLPWLAKEMFAVYAKEYAQLKGQIAKIEAKLMAWHKHNELSRRLAEIPSIGPVGGSLMTMKVVDPHAYRSGRDFSAWIGLTPKDHSTAGKTRLGVITRAGDETLRSVLVAGATAVIQQVRRGKGHYSPWLVELVKRKPPKLAAVALANKTARIAWKLMVSGERYDRAHAVAPHREGRDATLVGGYAPRPSLPSCTTAREAPAPSKA

SEQ ID NO: 397430 - protein, 343 aa, unidentified
MDHFAGLEGSVKETSVCIVDNTGRIVREVKVPSEPEALLAVLKNPAYHFKRIGLEAGPLSQWLYSALAEAGLPVICVETRHMRAVLKAQINKTDRNDARGMAQMMRVGLYRPVHVKTLRSQKLRMLLTHRKLLQSKAIAIENDLRGTLRNFGLKVGMAGTVKFEARIRELVENLPDLAALVEPLLIVRRVLHEQISVLHRRLLAIVRDDAVCRRLMTIPGVGPVVALTYRATIDVPARFKNSKAVGAVFGLTPSKYQSGEINRTGAISKCGDAMMRVMLYEAAQVMLTRTNKWSWLKAWAMKIARQRGMKKAIVALARRLAVIMHRIWVDGTEFRWTRKVVAA

SEQ ID NO: 397431 - protein, 314 aa, unidentified
MSPLVFVGIDVSLTRLDIALRPGASSSHPHDESAIAAVVEQLRALSPTLIVLEATGGMEIPLTSALATAGLPVVVVNPRQVRDFAKASGHLAKTDALDAQVLAQFAEVMRPQLRPLPDAETRALAALLTRRRQLVEMLTAEKNRLLRAAAPIRKRVRAHIAWLERELEHTNTELAEAIRHSAVWREKDELLQSVPGVGPVLTSTLLASLPELGTLTNKQIAALVGIAPLNRDSGTLRGRRTVWGGRAQVRAVLYMGAMVAGRFNPVIRTFYQRLQRAGKAKKVALTACMRKLLTILNAMLKHRTPWRVVEARHA

SEQ ID NO: 397432 - protein, 442 aa, unidentified
MSELAVLDPRAAFVDVGSEKMHVSIGGGPPRVFGTVTSQLQALRDYLIEHQVRSVAMEATGVYWLALYSVVEAAGLDVRMVDGRQTRHLPGRKSDMQDCQWGATLHAHGLLRAGFVPPAHIRRLQDYLRLRGEHVAAAAGHVQHMQKALERMNIKLHDAISSLTGASGLAVVRAILAGERDPAALLALCDVRIRKVKAERVVEALRGDWADEHLFALGQAVQSWDHYQAQIVDCDRRIAEVLARMPGGDAPSAGAEQPAKRRTQPGVNTPQISNLRDLLERMCDGKDATTLPAHSEYTVLQLVGEVGTDLTRWPTEKHFASWTGLAPGSAQSGKRRAAVRRRRNRAGKIFCVMARALARSKYIALGAYYRRMAARRGGLVANKALAHKLAILFWRVMVKGMDYVEKGLAHYEAQVLETRQRLLRKLAKQFGQNLVPIQANPP

SEQ ID NO: 397433 - protein, 353 aa, unidentified
MKYYNSTTEFNCGIDLHAHQMYVCLMDRSGKKLVHTNIRNNDFNYFLKLVAPYRHDLTVVCECMFGWYWLADACSEAGIHFVLAHALYLKAIHGGKNKNDRIDSEKLAHLLRSNLIPPSYAYPAQQRPLRALLRQRLTFVWQRSELLTRIQSHQLAHNRLTSASTNRDRWQEHLLASEPNPVYQLNLQNQLALIRHYDTQITAVETQLQKLTKTFAYQDYTLLQTVTGIGESLGLTILYEIGDVERFPTVKDFLSYCRLVKGTVASAGKIKGLRGRKLGNPYLRWAFGEAAIIAKRDQSLLGPLYQRLEARMNGNKYKANAVLAIKLARCVYYMLKNKTVFDPQRLVASLAHN

SEQ ID NO: 397434 - protein, 477 aa, unidentified
MPLLGRNHPITNMKSKTSKHKKQNKKVSLDAGWEPVNSHAAGVDIGSREHWACVPREADERPVRKFGTFTGDLEAMAEWFKECGVTSIAMEATGVYWIALFQILERRGFHVILVNARQTKNVAGRKSDVQDCQWIQRLHTYGLLQGSFRPEDRYCVLRTYLRYRDELVGARSTQCQHMQKALLQMNIQLPQVLSDVAGVSGLAIIGAILEGQRDPVKLAALVDPRVRASQQIMRKALQGDYRAEHLFVLRQAYELYHTYEARINACDEQIVRQMGDLPAKVDRAIKPLPARKQGRSRFFDTMAGVDLRPELYEKFGVDLTGIEGIGVLTSLILLTEVGPNVSRFHSEKHFCSWLGLCPDNRISGGRVLSSRTRRVVNRASDALRMAANSLERSQSALGAFARRMKARLGAAEGITATAHKLARIVCRLIKHGENYVRQGLEDYEKKFAARKLNALQKTAKAFGFELVQKQALPQPVS

SEQ ID NO: 397435 - protein, 350 aa, unidentified
MGHIIGIDVASEVSSVVVMSKSGRVVMDTRISTSERNLRQLVRSVRRPRQVVFEECGQAAWLYSVLEPLSDDVFVCNPKKNRDLSGHSKDDDRDALNLAERARLGALSRVWHGGKSLQALRDRLRDYQVLTSESTALKNRIKAVFRNRGIAVGTKAYEPLTRAAAVRKLPHEALRSRVVHLGEVLDVVSEQRADAQKQLVKAVRKNAMFKSLTSMPKIGDIFAATIIAEVGTPHRFRSRRQFWSYIGYAVTTFETSQYCTDQRGIVRKKERKTRTRGLVRQYNRSLKYVFSHIAMDLSRHEWNEEFVRLQRSGVSVANARLTLARKAAAIALRLMKTGELYDEALVFTRD

SEQ ID NO: 397436 - protein, 343 aa, unidentified
MTIVTLGIDLGKNLSSVAGMDGDGTVVLRRRVRRASLSRLAAELEPCIVAMEACCGAHYVGRLFAAHGHEIRLMSPEYVRPYVRAQKNDDNDAEGIAEAATRPTMRFVELKSQDQLDLQTLHRARSRLVGVRKTLINQMRAILLERGHVFRQGRKVLEREIDGLLEAPPADLSPRMLALVADMRREWQGLDERIDALNAEFGDIARREAPVQRLTSIPGIGVLGATALVAAIGNGEAFRRARDLPAWLGLVPRQMSTGGKARLLGITKRGNVYLRMLLIHGARAALPGLSKQDTPLGGWLRALLARAHRNVVVVALAGKLARIAWASLRHGRVFDPMAGAAVR

SEQ ID NO: 397437 - protein, 356 aa, unidentified
MEIKINKKECAGKPMRYVEAEYYNHYVAIDWSSTIMSVAKMSSNSSYPQIVKELPATIKSIKDYLKKLSGKIILTIEETTGAQWLYVELKDFVEKIIICDPYRNSLLREGPKNDPKDAAELCRLLRAGMLKEVYHSNDENYKIRKLASSYNDLIKAGVRAKNQLSAIYRGFCLDYKKETFNVKDDMAIFVIEEKQRYLELYEKERKEYIKIFRKLKKKNSIINYLTGIGGIDIINAVKIFSVVIDANRFPTKYKYYSYCGLVKYKMESGGKLYGKKDTKYNRILKGVYKTATLAALRGHNDIREYYEVLLKEGYAEKESKNIITRYIAKSTLAMMKNNTKYKPYSWRVKTENKTSQ

SEQ ID NO: 397438 - protein, 336 aa, unidentified
MSSIPVFVGLDYHKDTVHVCVLDAAGRQLANRDCVNDWQSIVRVVRRQGVPQRVAIEACTGAAHLADELIARAGWPVRLAHPGYVARMKQSPDKSDHSDSRLLADLERVGYLPQVWLAPEQVRELRRVVRYRQQLVGERRNIKLRVSALLREQRLFFSSKAWTKAWRKCVTSLTELSEQARWIIERQIARLDQLDSEIHAVEERLQHLTDNDALVAKLREQKGVGLITAVTLRAEIGRFDRFQNGKQLARFCGLSPRNASSGQRQADAGLIKAGNPQLRVSVIEAAHRLLRFDQRWSDLGGQLLARGKPKCVVIAALANRWIRGLHHQLTALTPAA

SEQ ID NO: 397439 - protein, 330 aa, unidentified
MAYAGVDIHKSYCQAIVCTREGDVIKEGRTTTDKEDIEEFFSGLERLEVAIEATTNHEYFYDLLVGLGHHVVVAHPLKTRMIAEAKIVTDKISARTLVDLLRGDLLPTSYVPPKEQRELRHLVRHRIALGRLRGRLKTQIKTELRRKNIKYREGANCFTEKGKAELRRLHNPVIASYLTIYEVVEDELKKMDRVIAEAGTQYAEVGVLTSLKGIGVYSALVIYSEIGDGSSFPTEDHVFSYAGFVPRVHQSGHEQYYGRITKEGSKYLRWILVEAARVHVQWCPESKITKHYEKIKRKRGEKIAIIAAARKLLQVIYHMLKNREPFRIEG

SEQ ID NO: 397440 - protein, 345 aa, unidentified
MTNIKRVGVDIAKTVFHIHAVDGRDKSVWEGKYNRKAWLQAIIKRVPNGALIGMEACASSHYWARELRGLGFVVKLIAPQFVKPYVKSNKNDRADAAAICEALGRPHMRFVAVKSILQQDIQAAHRIREELVCHRTAKANQIRGLVGEYGIVAPVGIGQLRRALPQWLEDGENGLTADFRQLMFGMAEDLAALDERIEETTALMTRKVQSDPAAQRLMTIGGVGPIVASALLGALGDGRNFRKGRDFAASLGLTPRQHSTGGKPTLLGISKRGNSYLRKLLVHGARSVFRHAGTKEDKLSLWLMSLAKRKHANVAIVALANKIARIAWAVVHNEDTYNPSLAAGL

SEQ ID NO: 397441 - protein, 429 aa, unidentified
MSDKEIIRQQQFCQLKEVIRGSDQHLIIGIDVAKEKHHAFMGAATGKSLLRRLIFENNLEGFCKLLTHVEAVKVQHGLSESVFGVEPTGNYHKPLGSYLVNANHQVVLVSGQAVKNNRILLDGRWDKHDTKCAANVADLISQGKCLFYDSPPEAIVELRSLLSLRRRLKKEEHSLRMRIRNSLLAKHFPEMDRYFGQCLSENLSIVYCCLDPKKIAQMDFGRFFQLVTTRERGLAQQRRLKAIWEVAAASIGIVVDRSSQFEAQVLVEKILQVQKEIKDTQQLIETISQQFSEYHLLLTIPGFGPYVASLVLAVIGDAWRFGSAKQVLKMAGFDLGAKRSGKKSKEAVPVISKKGNAALRYGVYQAAFIASTRNIDFVEYYTNTLRGRERERGIKTKMRVKLAAKMLVIAWTLMKKKEEFNPVYLKNKL

SEQ ID NO: 397442 - protein, 343 aa, unidentified
MSIQVIGIDLGKSNFHLVAHDPKGQAILRKKLSRQQLVQFVQNTPASTIAFEACGGAHWLGRLCMTYGHTVKLLPPQYVKPYVKGNKNDFIDADAIAEAATRPSMRYVPVKSEEAQLLSAIHRIRQGYIKDRTACMSRIGALLLEFGVSLPQGHSVMKTLPAWLAEHARHLPALIHNELCGLHQHYQLLMLKVAEQDNKLKRYLASNEDAQLLKSIPGIGDITASQCIAELGNGGQFTNGRNLAAWLGLVPHQHSTGGKARLLGISKRGNKHLRTLFIHGARAILSRPEKTGAVFGNWLTKLRASKPFNVVCVALANKLARMVWAVLKYRQEFNAAKLQSGYA

SEQ ID NO: 397443 - protein, 420 aa, unidentified
MSNDIDADIIFPRCAGIDVHKDILAICRVYRDQDGSRIQELRMFGTMTDDLLSASDWLSEVGITHVCMESTGVYWQPVFNILDANFDVWIVNAHHLKSVPGRKTDKKDAQWIAKCFEHGLLNRSFVPDASQRDLRELTRIRTKIVQERATLSNRIQKLLEPCNIKLASVATDVLGVSGRAILTALSNGETDVVKLANMAKGKLQSKHERLIRSLNGNMTATQRLILSELLNLVNAQEESLSRINKAIDEIMPPFQESANILMTVPGLNKQSAEAILAEIGCTLDTFPTVDKFCAWAGVAPGNNESAGKKKNTRSRDGNVYLRTASVQVARGAVRTHDTYCGALYHRLVRTRGDGRAIVAVAHSILAAIYFMLKRKIDYNELGADYFAKRKPEAVVRECVRRLKQCGFDTKLEPIELAQAA

SEQ ID NO: 397444 - protein, 356 aa, unidentified
MEKVIKQAVGIDCGKDELVVSIAVLDSSFEETNLITFSVTNELVGFAKLVQMINKYQCADVIAHLVVEATGVYHERLCYYLAEHGLKISVILPNRAASFMRTLATKTVNDKISSAALAIMGLQKKLDIWQVPEPTINHLKQLSRERESLSEDITSMKNQLHALNHSALLAEGSIKRMQFRIEVAQVQMGEIEQEMKTVIAANSDLQQRFNNVCTIKGVGIITAVTVVAETNGFNLIRNQRQLVSYAGLDVIKKESGTSIKTPGRISHQGNVHLRKALHFPALAAARFDERAKERYTNLLAKHNIKMKAAVAIQRKLLVLIYTLWKNNEAYDINRSSLKYLEQSKKTALTELVLDRS

SEQ ID NO: 397445 - protein, 370 aa, unidentified
MQATIRFIGLDVHKDFISVAIADEGRGDVTSYGDIANTPAAVSKLARKLSRQSLDLCFVYEAGCFGFVLYRHLTKMGHSCVVAAPSLIPRKPGDRIKTDTRDALKLARLLRSGDIECCHVPDESDEAMRDLVRAREDAVCACRISRQRLNGFLLRHGKVYDGKSRWSGAHMRWILETKLPHEAQQIVLEEYRRRVEHDADCVDALTMQTRRLNESWRWAPVVSALQALRGVCLITAVTVVAEMGDLRRFAHPKQMMAALGLVPSEYSSGGKRHQGAITKTGNGHVRRILVESGWNYRFPARLTRQMEHRQRGLDKAVTDIAWQAQKRLCGRYHQLNMRGKNVKLITTAVARELCGFIWDIAQQVEPKTNI

SEQ ID NO: 397446 - protein, 354 aa, unidentified
MEKRKKLDKDETVFIGIDLHKRTWHVTMRTFDIELFSGSIEGVWDKLESLLKRYPENKIIAVYEAGYFGFWLHDKLTDYGVNCKITPPSLIPIEYGNKVKTDRRDSRKLAHFLAKGLLKNIYIPTLQERYHRQVTRRRRQLINDRVRVQNRIKAELQLNGITLPEPTGKWTKIYFTNLSKIKFPDRWMHESFERFLEQYIFLCDQITRQTQLLKELSEKKSYKKRVEILRSIPGVGIIAAMEILLELQDMKRFRRADQLAAYVGLTPSQYSSADKIRMGRITCIGKNSVRAILVQAAWCLIRKDGVMRERYDKIKARAGGKRAIVAIARQLLIRMRRILLDGTLYVPGVIASTG

SEQ ID NO: 397447 - protein, 420 aa, unidentified
MFKIFRFNCCGLDVHKTWIYACIGITDSNGRTEYKEKRFSSFSRGLHELDEWLTLYSCDEVCMESSGKYWIPVFNILEKNHKVTLAHPKYTKPQKGNKTDRKDAKWICDLFMCDMIKPSFIPPPEIRQLRDLLRYHSKLTNMETSEKNRALNCLTVSNLKLDDVFSDVFGKSALSITKQILDHPGERFDVSPFVDRRCKTPIEEIQAAVDGTISKEQAIKLRRCLEHIDQLEGHKQSIKDEILAITESYSETLELLRTIPGFDKNPMTAITVLSEIGSDMTVFPTAKHLCSWGGCCPRNDQSNQKIKCRRISQAGTYLKPILVQIANALIKSKSHTEFVERYRRLKSRRGHKKAIIAICKMLLTAIWNILSKHVPYSNEGYFTSTPNVKKDKVLTTAQAICLLRLRGYIISDDNSQPIAS

SEQ ID NO: 397448 - protein, 354 aa, unidentified
MQITTIGLDLAKHWFQVHGVDANGHVVVRRRLRRSGVIAYFRSLEPCLVGMEACATAHYWARELSALGHTVKLMPPAYVKAYIKRNKNDATDAEAICEAVARPSMRFVPVKGAEQQSVLMLHRARSLLVRQRTMLVNALRAHMAEFGIIAPQGRRHVEILRQTIAHQQERLPELARSILQTIADQLNDTMERVREIEVRLVRLHRQNPISQLLATVPGVGIMSASAIAATTSNPTLFRSGREFAAWLGMTPRQNSSGGKDRLGRTSKRGDKYIRSLLIAGAVAVLRHARNRPARDGEWVRALLARKPTKVAAVALANKTARIVWAVMMRGDGYQAKAVLGQPAEWPSAHFSMRG

SEQ ID NO: 397449 - protein, 459 aa, unidentified
MKRDKRKAKRLPSQLAAVNLHAAGIDIGAQEHWVAVPADRDLQPVRRFGACTADLEAIADWLQQCGVTTVAMESTGVYWIALFELLEARGFAVVLTDAREVQRAPGRPKSDVQDCQWLQRLHTYGLLAAAFRPTEQVCVLRSYLRQRAMLVTYASQHIQHMQKALTQMNIKLQHVISDVTGVTGMTILKAILAGERDPQKLAHFRDRHCQHSEAEIARALQGNWRTEHLFALPQAVELYEFYHQQITTCDHQIEAHLQTFVDKSEGKELPHRPRKRKRRATEPRFEARTPLFRLSGVDLTAIEGIDENTALVLLSEIGTDMSRWPTEKHFASWLGLCPHHKISGGKVLSRKVRPSANRAATALRLAAQCLHHSHSALGAFFRRLKARLGAPKAITATAHKLARLVYRLLKYGEDYVAQGMEEYEQAYRARTLQNLVRKAKALGYKLLPTSDAASQGAPA

SEQ ID NO: 397450 - protein, 418 aa, unidentified
MKVVYPICCGVDVHKTFLVATIITSQGITPHYSKKRFSTFNKSILQFKQWLIDNNCFDVCMESTGKYWVPIFNLLEDTIRITVANPKWVKAVKGNKDDTKDSKWIGDLFRLGLVPGSFIPPKPIRILREYTRYRSKLVSCKSSEKNRFQNAFTVCNVALDAVVSDMFGKSASSITDYLISSNSFNPDYCSSLLQRSLKKKADAVVESIEGYQMTKEQKERIILVRSHLEFIQQSITMLDEKLDKMLVPYENAITLLCTIPGVDRASAITIISEIGTDMTQFASSKRLCCWAGLTPGNNESASKKKSVRITRAGVYLKPVLVQIAHAAVKSNKSPYYKVKYERISKRRGKKRAIIAIARMILTAIHNMFITGEEFNPSDLYKIDMPQEMVEKQKEKAIKQAVKLLLSHGLIKETDISVV

SEQ ID NO: 397451 - protein, 375 aa, unidentified
MSEVIVACRSFVGVDLHKTTVTLVAVAPDGKEIARLTINTKCREKIRAWLLDLPRPLHMAVEAVGFVEWFIECFRPCVNRIDIADATELSNRRGKRRKNDYRDALDVAQRLARGECPCGYIADDELMQLRKLGRHWRQLSSVMARTKQFMKSMLLAANLRGPKFDGASAQRWLLAHGHLLKPAQHRAFASFTRIVQLIELQRQPLRFAIIEASRSERFAPMTMLLQSVPGIGEIWSCIITAEIGPFDRFPNSDALEFWAGMTADMKESAGRTQSGPITKAGSRTLRWALCNAALTLCHSDAGQEAIRQRLIRKTGGIKGKANTAMGRRLLRLLYAMVRDEKPYQPGPSRHRNAAANKARAAKRAQKTRKNGKEAA

SEQ ID NO: 397452 - protein, 454 aa, unidentified
MARRRPAKSTRQQMLLTVHPHAAGMDIGSRFHVVAVPPDRSPEPVRTFESFTADLHRMVDWLVELGITTVAMESTGVYWIPAFEMLEARGLEVLLVNARHVKNVPGRKTDVHDAVWLQQLHQHGLLRGSFRPAQTLAALRAYLRHRERLLEYAAAHIQHMQKALMLMNVQLHHVVSDITGATGMKIIRAIVAGNHDPATLASYRDIRCQASVETITEALIGHYRAEHVVALRQALELYDCYQAKVAECDQAIEAALASCEQADPEMPLPAARYRTRQANEPRFDVRTALFQLLGTDLTQLHGFGAYTALRLIGECGTDMTKWPTAKHFTSWLTLAPDNQISGGKLLSTKTRRSANRAAKILRLAAVNVGKTQTALGAFYRRLAARVGKAKAVTATARKLAVLFYNALRHGMAYQDPGATYYEEQYRQRVLQGLRRRAKALGYELRESAAVEGVS

SEQ ID NO: 397453 - protein, 411 aa, unidentified
MKLFVGIDVSSSQDMKACIMSFDGETLASITVDNNLIGASYLRDQIVDIAQKHVIQEIVIGMEATSVYSWHPAMFFHEDESLKRFQTKVLTINPKLIKKFKESYVDLDKTDHIDAWIIADRLRFGRLRQSVVMQNQFIALQRLTRMRYHLVHNLTREKQYFLEHLFYKCSSFTTEVESSVFGNAIMELLLEQYSLDEISAMDIQDLAEFLRIKGKNRFTDAEYVAKSIQKAARSSYRLSKCVEDSIDLLLGTSIESIRSVTKQIKELDKAIKKLLDGIPNTIQTIPGIGPVYSAGILAEIGQIERFDNQASVVAKYAGLTWNKHQSGLFEAEETKMIRSGNRYLRYYLVEAANSVQRNEPEYRAYYLKKYHEVPKHQHKRALVLTARKLVRLIDTLLRNDQIYTPRRKVNK

SEQ ID NO: 397454 - protein, 315 aa, unidentified
MRSTITQSVGVDISKDALDVAVHPAGESFRIPNDPQGHRALIKKLKGFDIARIVFEATGAYHRLFQHALDAAGLPWVKVNPRQARRFAQAAGKLAKTDRCDALILARMGAALGLEPSAPLSQTVEAMKELVNARNALVKDRVAALNRQAITVSPLIKRQLAQRLRQVDSQIEAINKRLKSLRGADPDLGRRFDILVSIPGVGETTANALMAETPELGRLGHAQAASLAGLAPIAKDSGQAHGKRSICGGRPRARQALYMPALNAIRFNPQFKAKYQAMVKAGKPAKVAIVAIMRKLLILANALIRDQRKWSPAAP

SEQ ID NO: 397455 - protein, 353 aa, unidentified
MAGTNVNQDVFGGVDTHKDVHAAAALSVTGQLLGTALFPTTRAGLSQLLTWLTGHGALIRVGVEGTGSYGSGLTRHLRSAGISVVEVNRPNRQFRRQRGKSDTVDAEAAARAALSGTAAGTPKSQDGMVEAIRLLRLARRSAMKARTQTGNQLHAVVQSAPTALRDALRGQSLAKLVTLARRFRRRAAMTPLAAARFTLKSLADRWATLEAELRDLDHQLEFLVSAAAPSLVALTGVGTETGGALLVAIGDNPDRLHSEAAFAALCGASPVEASSGRQKRHRLNRGGNRDANRALWVVVMCRMATDATTRAYVERRTQQGLSKREIVRCLKRYVARQIYRTMLPTLQHATATA

SEQ ID NO: 397456 - protein, 411 aa, unidentified
MRIVHQRCCALDVHKKSITACVLVWDGKQLIEERKKDFGTTKKQLGRLRFWLMACKVSEVAMESAGVYWKPVWHVLEKQNQFRLKLVNAQHYHGVDGQKSDQIDASWLAELLQCGLLKGSFVPEQWQRELRDLTRLRVALWQDQNRVQNRIEKLLEDANIKLGSVVSNTLGTSGRKILKAVIAGDKDPGWMADYAQGRLRAKRQELTEALFGFVTDHHRTLLAMLLRQIESLDQDIAALEAEIRRRLAPHQDLVERLAEIPGFGEITAWTVIAELGLDRNVFGTPERAASWSGLCPGNRKSAGQRGHGRTRKGNRWIRRGLTQSALAASHDQDSYLRSFYWRISSKRGPKKARVATAHKQLTIAFFIIRDGVRYNDLGPDHYDRRQPERTQRYLVKRLEALGLKVTVEPAA

SEQ ID NO: 397457 - protein, 348 aa, unidentified
MTLTIVETRAITGGVDTHADVHVAAALDVIGGLLGVQEFPATPAGYAHLLAWLGGFGTVCLVGIEGTGSYGAGLARHVTAAGVRVVEVDRSDRQDRRRQGKSDPLDAVSAARAAQSGRAAGVPKGRDGAVEAVRALMVAKRTARSERTQTINQARALVLTGPDDLRTRFTRHTPADLVAGLASLRPRPGDVVGYATRIALRELGRRAEFLDGQLERLDELIVPLVTARAPGLLALYGVGPDTAALLLVAAGDHPERLRSEAAWAHLCATAPIPASSGKVTRHRLNPGGDRQANHALWRIVITRMSSHPPTRAYVERRTKEGLSKKEIIRCLKRYTAREVYRHLRPGPG

SEQ ID NO: 397458 - protein, 326 aa, unidentified
MEHELHYIGIDTAKEKLDVDVLRPDGRHRTKKFANTTKGHDELVSWLKGHKIDHAHICIEATGTYMEPVAECLYDAGYIVSVINPALGKAFAQSEGLRNKTDTVDARMLAEFCRQKRPAAWEAPHPLERALRALVVRHQALTEMHTQELNRTETAREVQRPSIDAHLLWLEAELKRLEKQIKDLTDDDPDMKHRRKLLESIPGIGEKTSAVLLAYIGLKDRFAHARQFAAFAGLTPRRYESGSSVRGASRMSKAGHVSLRRALYMPAMVATSKTEWGRAFRDRLAANGKKGKVILGAMMRKLAQVAYGVLKSGVPFDASRHNPVAA

SEQ ID NO: 397459 - protein, 358 aa, unidentified
MNYVGVDLHQKTSWFYVVDSCGNKLDSRNVPNTEEDLKDYFGKIPKPFTLAVESTCNWYFFVDLAQQYAEEVFLANSYELKAFAKRHKKTDKIDARLIANVLHKGFLPAVTIADKQTRQIREIIRYRINIVRDRSRNVSRLKALLDKVGCHYSGDFTTYKGLRSIDTEGLPIIYVDIINRYREQIMDLSERIEGIEKGVVDVTHRDVDMCNLLTIPGIGAFSAALIKSEIIDISRFRSFNRLCAYAGLAPRVRASADKIYYGALNTNRRKNLQWILLENVYHFIKGLDRAKQKFERIKSKKGHNTAKVSLARDMLKVIYHVLRGERPFYPEVDVSKKRELQSRNVRIQSVAATALSGV

SEQ ID NO: 397460 - protein, 417 aa, unidentified
MKSAPSALPEEPPNGLTCGIDWARDDHAVAVVDARGREAYRCVVEHSAAGLRALLGLLGKRGVSEVAIERPDGPVVEALLDAGVTVVVISPNQVKNLRGRYGSAGNKDDRFDAFVLADTLRTDRARLRPLVPDQPATLALRRACRARKDLVSHRVGVANQLREHLKRVFPGAVGLFAELDSPISLAFLARFDCQDRADWLSPRRMAAWLASVGYCGRVDPAVLHARLTAAPRGAAGEHGTAEAHVTRALLAVLATLNEQIKALATQISEQLALHADQHVFTSLPRSGRVRAARLLAEIGDCRARFPTPESLACLAGVAPSTRQSGKIRAVGFRWACDKQLRDAVTDFAGDSRRASPWAAKLYDDAIARGKDHPHAVRIVARAWLYVIWHCWQDGVAYDPARHKALQRILAEQKTAAA

SEQ ID NO: 397461 - protein, 417 aa, unidentified
METQKNIVCGADVHKTFIKTTILSRDGTKLVGRFGMTLDEILRFKNWVISNKCEAVALESTGVYWIPIYTVLEGSVEVILANAYKIKHTPGKKTDKRDSAWLAELCLNGMIEPSRIFPKDDRELRNMTRSRENLVNNRTQMKNRIHKELESECIKISSVLSDIFGKSGMQILNALLEGKNIDEILKEITSKKILNKEQELRNAIKTSLDPARCILIRTYLEIIDKIEEKIKMLDMEIKIRMQRLKEDLEIAMSINGMGFTSASTILAEIGNFRDFQTAEQLASWCGLTPKVSQSADVLVTGSITKQGSKHIRRMLVQVAHIIAKSGSSKLKKFFLRIQVKKGTKKAIVALARKLVCILHHLLVNREKYLDGDASKTRKIKKFDPDINLPPVQMAEQEMINVLVNAGYIVKHKGQMSV

SEQ ID NO: 397462 - protein, 449 aa, unidentified
MNPIPNDPNPASTLVAAPALPRPEPAFAAFIAIDWADEKHAVALQAAGHTQIERTTLEQKPEALTQWIAGLRQRFAGAKIALILEQKRGALLWALQPHEHLVLYPINPQMSAKFRQAFHPSGAKDDPLDADLQLDILLHHRARLTAWQPDEATTRQLSLLVEGRRRFVADQVRATNRLRDALKSYFPQALALVGEDLSSRMACAFLKKWPRLASVQAVKPAVLRQFYYAHHSRSAELLAERLQIQAQAQPLTTDEAILAAQSLLVQSLAQALATLHPVLARYDQQIARLFATQADFAIWESFPGAGPALGPRLAVAWGTQRDRFADRQAMSAYSGIAPVKEASGKALWIHMRWACPKFLRQTFHEMAKCSLQRCAWALCYYRMQIERGKGHHAAIRALAFKWQRIMWRCWQDRTRYDDAKYVYDDAKYVASLKRSASDLYARLSAAPAK

SEQ ID NO: 397463 - protein, 333 aa, unidentified
MVEGTLGSHHKEGSRKMSKHSMICAGIDTGKRKLDVAIKGQADELQVDNSPDGHRALSGWLRQRRVKRVGIEASGGYEQAVVAQLRRDKFEVVVFQPAQVRAYAQFHLQRAKNDKIDAALIADCTAAVQQIHAPPDPRLAPFAKHQTLIDQITEDIARLKNRHESCRDQRIGRLWREEIARLRGILRSERKQLVAAIRRYPDLAERLALIASVDGVGQPTAVTILVRMPEIGRVTREQAAALVGLAPYDDDSGDHVGARCIDGGRERLRKSLYNATLAACFRWNAQLVAIYQRLIAAGKPHKVARIACARKLIIYVNTVVERGTPWVQNPTAA

SEQ ID NO: 397464 - protein, 356 aa, unidentified
MKSYRLQEFVVKGKEVFVGLEDSKKTWKLAVRSEKMVIHQVSMEAKYPVLIGYLRNKFLDCTIHLMYEAGFKGFNLYDALTDDGIDCVVIPPHVVTEPKVNRIKTDKRDARRLALVLENHDFKDGCHVPDKERREDRQVSRTLIALQKDIIRSRNRIRKLLQFHGIEVPFPDKWGREEFRALKKLELSEPLRISLDIFLTQLEELWAHQLSLRAALRKLCKKERYHRAFTIARSLPGIGWFTAIRLVLELGEDLSHFTSAKKIASFVGLTASEHSSGETEHKGRITGMGSGFIRATLIENSWAAIRKDPVLLAKFTRVWHASGSRKKAIVAVARMLIVRFRTCVMSGTPYVIGVAA

SEQ ID NO: 397465 - protein, 344 aa, unidentified
MEHFAGLDVSVKETSVCIVDDTGRIVREVKVASEPDALLSVLTNPTYHFKRIGLEAGPLSQWLFSVLAEAGLPAICVETRHMQAVLKAQINKTDRNDARGIAQMMRAGLYRPVHVKTLRSQKLRMLLTHRKLLQSKAIAIENDLRATLRNFGLKVGIAGRVKFEARIKELVENLPDLVVLVEPLLIVRRVLREQIVILHRRLLAIVRDDDVCRRLMTVPGVGPVVSLTYRATVDVPARFRKSKAVGAVFGLTCSKYQSGEIDRSGRISRCGDEMMRVMLYEAAQSMLRSKKWSWLKAWAMQIVRRRGMKKAIVALARRLAVIMHRIWVDGTEFRWTREQATAAA

SEQ ID NO: 397466 - protein, 412 aa, unidentified
MKDLLEISCGLDVHKEKIVACILTGPLGKPTHSEIREFSTLVPDMTALRDWIVSQNCHHVAMESTGIYWMPVYEILEDAFSGDITLLVVNARHMKNVPGKKTDMRDSEWISTLLRAGLLNGSFIPEKRIREFRDLNRYRKSIIRDITSQKNRIEKFLQSSGFRLSSFISDIFGASGRNIILYLIEHGQIDRTALDSCLKAKTRNRIDEILMSVNGTLSEHQKKFLKILMNHYDSLKEHLNEIEKDLEQDMEPFTLQVEQLNSIYGISTTASCAIIAEIGVDMKPFKTAEHICSWAGLCPGNNESAGKRKSTSVTKGNPYIKSMLCEIAWVIAGKRNTYLSAWYWRIKQKKGAKKAIVALARKLLVIIYTMLKQGTLFDESCFEARRKNCEQKQLSRYIRELEKHGYHVEAQG

SEQ ID NO: 397467 - protein, 388 aa, unidentified
MQDVADQSAAPTTIGADLCAIFVSLELSRSTWLATSLSPGRGEKMSKHSVSAGDIAALLARFSELRRKACARTGKSFPIVVIQEAGLDGFWIHRVLLSEGIESHVVDAASIATSRRRRRAKTDRIDGETLLRALLAHKRGEPRVCSMVRAPTPEDEDRRRVCRERKVLIMERVQHVNRIKGLLFSQGASGYEPLRRDRRARLDALQTGDGRRLPQHLKAQVCRELDRLELLLEQIKAVEAERDALLDAEQTKASAPPPMLLGVHGVGPEFASVLWSEGLSRHFDNRRQVAAYAGLAPTPWQSGSVNREQGISQSGNRRLRTTMIQLAWLWLRHQPRSALTLWFEDRMERNGSRRRKTTIVALARKLLVALWKYVTAGVVIEGAMIRAA

SEQ ID NO: 397468 - protein, 345 aa, unidentified
MDVLIGVDPHKATNAVAAIDERGRLLEYAVFSTSRAGLRSLARWAKRFPSRRWAVEGASGLGRSVALRLVAAGEKVVDVPAKLSSRARLLATGNARKNDRVDAIHVALAALGSERLAEVGEEEHSEVLRMLSERREDLVKERTRTLNRLHVLLRDLLAGGAPKNLSAEGATLALRGVRPRSAPARTRRRLAADLLRDVRRLDRQLLDLEARIRDAVREASTGLTALFGVGPILAAKIIGRVGNIARFPTRACFASYTGTAPIEASSGEVVRHRLSRAGNRKLNHALHMIAICQARHDTEGRTYYRRKLAEGKSGKEALRCLKRRLSDAVYKQLQTDLVAVTAAAA

SEQ ID NO: 397469 - protein, 316 aa, unidentified
MTQIGTTAGIDTSKAKLDIAVHGSAEHWQVANGAAGWRQLAVTLSRAGVTRVGIEASGGYESGVVDYLREEGFVVLLLQPIQVKAYARVHLRRAKNDKLDAVLIAACAASIDQPRIEPDPRLAKLARYLTFVEQIEEDIARLKVRLEHVADARLRRLVMADIARLKTRRATELKRIVAALRTHDDLAHRLDLVLSIPGLGERTAVALIVRMPELGRLSREQAAALAGVAPYDDDSGKHKGQRHIAGGRDRLRRSLFAAALPAAFRWNKALIALYQRLTARGKAHNAALIACARKLLIYANTLVRRGTPWIEKPATT

SEQ ID NO: 397470 - protein, 407 aa, unidentified
MDVVHPKCAGLDVHQQTVVACARVGSGKAVTHAVRTFGTTTPELLALSDWLATHGCTHVAMESTGVYWKPVWHVLDGHFELVLANAMHIRNIPGRKSDVNDATWIADLLAHGLIRSSFVPPEPIQELRDLTRTRKQLVREIAQHTLRIQKTLETANIKLTAVLADITGVSGRAILQALVAGERDPERLATLANERVKASRADLVAALHGRVTGHHRFMLHLHLTQIAALEAAVREVEARLGDALAPFRAALDRLITMPGVSETVARVIVAEIGFNMTRFPTAGHLVSWAGLCPRLHESAGKRLSNRTRSSNPWLKTTLVQAAWAATRKKDGYFRAQFLRLKSRRGPKKAIIAVTASMLTAAYHMLKHGVDYRDLGADHFDRRDKAKLAKRLIARLQDLGITVEVRAA

SEQ ID NO: 397471 - protein, 357 aa, unidentified
MKIVGCDLHARQQTIAMVDTETGEFTEKTLSHEEDAVRAFYAALEGPVAVGIEATGSMQWFLELLEELGIQCRVGHPAEIRAKETRKQKHDRRDARLIWELLIEDRFPEIWMPSSKERDLRTLLRDRHQWVKMRARLQHTLQAIALNHALRQGHALWSAAGQRALEALPLPPYTRQRRDELLALYAQLQKRIQELDKEVEAQARQRPQARRLLTHPGVGPVTALATDVFLGDPSRFATGNQVASYIGMIPCEHTSGKRQRLGKMSKQGNALLRYLWTEAAMSTVRKDPELQRFYRRKLIQKGMGKARIATARKLGIRLWIMMRDQIDYEEFCRRGKLRQTGEAHAGMPDFNSGPAQQ

SEQ ID NO: 397472 - protein, 411 aa, unidentified
MEVIYKRCCGLDVHKEIVVACLLIREGGKVLKEIRSFLTMTVDLVVLHDWLKAHQVTHVAMESTGIYWKPVFNLLEEDFTILLVNAAHIKTVPGRKTDVKDCEWIADLLSHGLLRGSFIPPEPIRDLRDLTRYRKSLTDERVRQVQRLQKFLEGANIKLASVATNVMGVSGRAMLEALVSGSTDPQVLSELAKGRLRKKLPELKKALQGRFRSHHGFMVAEILTHLDFLDEAIERVSQEVSSRLVPFSKIVELMDLVPGINQRVAEGVLSEMGVDMSCFPSHRHAASWTGLCPGNNESAGKRKSGKTRKGNQWLRRYLIEASWAAVRKRATYLSALYYRLVPRRGKNKAIVAVAHSLLVMIYHILKDQVPYHELGSDYFNKLNAAYVQRHHVKRLESLGFKVILEPLPKAA

SEQ ID NO: 397473 - protein, 392 aa, unidentified
MKKDSIFEKDSRKKRKGASKGELLDQELVAKIDSLQREREAALKLTIGLDLGDRSSCYCVLEEKGEVIGRGVVITEGKEMEQLFGQLPASVVALEVGGHSPWVSRLLEKLGHQAIVANARRVKLISQSSGKNDRLDAEFLARLARADQKLLAPIRHRSESAQADLMGVRVRAQLVELRTEAVNAARGLVKSFGQRMAKCDADSLKESHAQDLEPAIRGHIERLLRVVKELSKEIEGCDAELEKLSAERYGEETRRLKQVPMVGPITSLAYVLTLDDASRFRHSRDVGCYLGMRPKRDDSGQSQPELGITKEGDVYLRKLLVQCAQQILSGRGPDCDLKKWGEKIAAKGNKKAKRRAVVAVARKLAILLHRLWVSGEPYQPQRHRQVGQRAAA

SEQ ID NO: 397474 - protein, 376 aa, unidentified
MKKNNTCPKSSKRKKTGRKTRSKTRKESFTIGMDLGDKTSHYYVTDCDGEMVRESTVATTKKGMQQRFSCLPRCRIAIEVGTHSPWVSRLLSSLGHEVIVANARQVKLISASTRKSDRLDAQTLARLARLDPELLRPIRHRSEKAQGDLMQVRVRAALVDTRTGLVNTARGMAKAMGERLPACDADQMGVEKMQGLPAMLVEALRPLLETVEVLTKQIKASDQKLEQLAGSDYPETELLRQVSGVGSLISLTFVLTVEDPSRFRKSRDVGSYVGLRPRRSESGESRPQLGISKEGDVYLRKLLVQGAHCILSHKSPDTDLKRWGLKLAGKGNKNAKKRALVAVARKLAILLHHLWVNGEVYEALRNSKPLEAKAAA

SEQ ID NO: 397475 - protein, 433 aa, unidentified
MREAEDEPLFAERAAGVDIAKAGIEVTVRVPSETRRGGRQQDTRSFRTTRKDLLALADWLRVWGVAKIGMESTGDYWKPVLFLLESEGFDCVLYHAAQVKALPGRPKTDKLDSAWLAKITERGALPGCFVPPEEIRRLRTHTRYRRHLTQARTAEKSRVEKLLEDAHLKLSSVISDIHGVSGRAMLEAIAAGERNPGTLAQLARGTMRGKIARLVEALDCSFVTEEHAAVLTMMLSTIDYYTAQIGELTAKIAVLCQPYEHQLAQLDAVPGTGVITGQDIIAEIGTDMTVFPTAAHLVSWAKWCPQVAQSGGRRKGANASGRGNRYLSAALGEAAVNAGRTQTFPGAKYRRLVRRMPKKKALVATGNSLLAIYYALLSDPAAAYTDLGADYYERRANIRRQARNHVRGLERLGYKVTIEPADPATGATAEPAA

SEQ ID NO: 397476 - protein, 404 aa, unidentified
MRAICGIDWASEWHDVRIADADSGERIVQRRFAHDEAGICALIALLVSQRVERVAIERPDGLLVGRLIAAGLPVLAIHPNQAAAARDRFRAAAGKSDALDSFVLCEPARTDSHRFAALAPSGDETVALRALVRTREDLVAARVGLANQLRAQLDAFWPGATQIFADIDSQIALAFLERYPAPADTHGLGPQRLEGFLARHAYCGRRPIDELLTRLRSAPRASVGELEADARRAAVLGLVAALRPIVCQISELTSQLRGAVRAHPDGAIFTSPFRDPKSVLTAAGLLAEIGDNRARYPHRDALAADAGQAPVAIESGKRRTASSRWACDKRLRNHFAVLADSTRHQHPWAHDIYQRAIDRGCNHPHACRILGRAWSRVLWRCWQDHTPYDPTQHRAATRHLQPGG

SEQ ID NO: 397477 - protein, 347 aa, unidentified
MKIASVGLDLAKTLFQVHGVDSQGHVVVRKQLRRIDVLPFFAKLEPCVVGMEACGSSHYWGRELTKLGHTVRMLAPQFVRPYVKSNKTDAADAEAICEAVNRPHMRFVPIKTQAQQTMLSLHRARAGLVKSRTALANQIRGLLSEFGIVLPQGIRLLGQRVTEALSNREHELCEQFQTLIQLLVEQLRELGNKAAELEGRIRAMHRTDEAGQLLETIPGVGPLTASALAASIGNPRAFRDGRELAAWLGLVPRQHSSGGKPRLLGISKRGDTALRTLLIHGARAVIRMAANKPEMTDSWVMKLCRRRHKNIAAVALAAKNARTAWALLIRKQVYQVSHVPVRADVTV

SEQ ID NO: 397478 - protein, 284 aa, unidentified
MIAGFDIHKQVMQAAVLEPASGEFCEERFSGADGLAAWVARWGGRVEVVAIEATTGWRWVARDLEAAGLEVRLVDAGQARALRGKKRKAKTDRLDARWLCLIVARGLLGECEAWLAPIEIQRLRDQTRLRKALADDRTRWEQLDSLETQLRRFARTDRRCRAVTQIFGVGPIIACHLVAEIGDATRFRRARQVVRLAGLDPVVEESADTRRRGHLAKAGSPTLRWALVQAAQHGGRQRSPERHLYHAVTRRSGSPQAKLTVARKIARRAYHVLQDLDRDQPQAA

SEQ ID NO: 397479 - protein, 358 aa, unidentified
MDESTRVERLAEVVRVGVDLAKRVIQVHAVDAAGRRVSNRALARDRFIEWCTRLPAGCLVVMEVSSSAHHWCRKLAAMGLDARIVAAQLAAPYRSEGATGKNDANDAAAICEAAGRPHMRFVPVKSIEQQSVLSVHRLREGVKEDRTACINRIRGLLLEFGVVVPAGTAALRGVLDEVLEDAGNEMNWLARVTLQQAQAQWRQFDEHLAWCDARIAEHAANCEDVRRATDLMGVGPIGASAVVATVGDFKQFKSGAQFGAWLGLAPKQRSSGGKNNLGTITKRGDPYLRTLLVQGAKSVANTAHMRSDPISRWVLALKERGGWQKAVVALANKNARILWAVMTKGQKFDRHHLSVKPA

SEQ ID NO: 397480 - protein, 382 aa, unidentified
MRKESVVNKVTTFVGLDVHKQTISVAVAYEDGEPASWGKIPNRPEAVIDLVRQLGAQGTKYTYEAGPTGYGLYRQLRALGAECLVAAPSMIEKAPGDRVKTDRRDALKLARLLRGGNLHAVWVPDVEHEAFRDLTRARQAAKRDQQRVRNRITKLLLRLGVDEPQGTTRWTAVYNRWLSELQLALPLQQVVLEELRRALEEAGARLERLVRQLKAACKTHAQAPLIRGLQTLRGVGLITAATAVAELGDPGRFATARKVMGYTGYKITEDSSGPRVHRGRITRTGNAHLRHALGEAAWQYARPVRIGKVLKGQRQGQPAAVVAIAERADERLHRRYWRLVHRGKATQQAATAVARELLGFMWAIARELAGLPVPPPRSRTAA

SEQ ID NO: 397481 - protein, 342 aa, unidentified
MIQYVGLDVSQRETAVCVVDEQGKIVFEGKAPSDPGSLARLLHKRAPAAKRIGFETGAMASWLWHELKRIGLPVVCIDARHAHAALSVRMNKSDQNDARGLAELVRIGWYREVRVKSAESQAVRAVLVARARLVTVRRDLENQIRGMLKEHGLQFPRAIGQGFRSHVREQLGDDHPLRSVVESLLAIHEHIDQEQAVLDKRVHRLAKADETTRRLMTVPGIGVVTALAFRHTIDVPSRFRSAHTVGAYLGLTPRRKQSGELDLTGKISKWGDRLLRTYLFEAASVLLHRTKRWSALKVWGMRLAKRVGLKKAKIAIARKLAIILHCIWTDGTVFEWGTAQAA

SEQ ID NO: 397482 - protein, 375 aa, unidentified
MEGAPMLDTTTFVGLDVHARSIKAVSLDVMTGEVRCATFGYDAGAVAEWVRSMDPRARCVYESGVTGFDLQKRLSGLGVDCVVGAVSKMIKPSADRRRKNDRNDAEFLARMLSVGNVVEVWVPDDECEAARDLTRALEDARDDLSRSKQRLSKFLLRHGLVFDERTPTGRRKGNWTRAHWSWIESIRFAEGADNDVLAYYVDAVRRAAEDKARLEGLVEAEARKPRWRKRVDSLRCLKGVDTASAADLVFEAGEFSRFRNARSFAAWVGLTPSEHSSGESDRRGAITKAGNKHLRKTLVEAAWHYLTCSGRPKDLAKGQAPDRGARRHAAKGVRRLVERREALLARGGHGNKANVATARELACWVWAVGLMAEEA

SEQ ID NO: 397483 - protein, 365 aa, unidentified
MDTIYIGVDFHARQQTVCYLKIETGELVVIELKHQNKDEVRAFYAQFSGRVIVGIEASGYSPWFERLLEELGHEVWLGDAAEIRRRARWRQKNDRRDAELILDLMLHDEFPRLHRPAPESSEILRMLRYRQKLVKMRTIGKNSLQALALQSGLSLRTKLFTTAGKQELCTAAMSPVMKQQRDQWLVLLETFDQRILETMFWLRQQSQGDERISRLRTHPGIGLLTSLVLVHTLWPVSRFRNQRKVTAYAGLEPMERSSAERKHFLGISKAGSRLLRYLVVEAAHTAVKKDEELKRFYHRLEARRGRPKAKVAAARKLLVRSYIMLRDEIDYAEFQRRAVAARLARQSSRPTMPVSLIGQPASPDS

SEQ ID NO: 397484 - protein, 362 aa, unidentified
METIGIDLHRKRSRFVRLSQEGAVLEKGTIRSTAEGFREAFGGLDSGNTRVALEATGYWYWAADVLEELGLETHLANPHKVRVIAESTIKTDTVDATALAHLLRLTWLPESRITPKAMRLLRERLRYRITLVRIRTGLKVRIHAILGKCGVATPELTDLFGKTGREWLEQVALPQEYRDNLDGYLRTIDFLTDEVGQVERWLKERMKPSREARLLMDIPGIGQFGAALILAEIGDIRFFRTKRKLSSFVGVVSGARNSGEQVHNTRLKKDSNRYIRWFLSEAATKAAKVVPAWARLYERICAGNEKRKPKARMAVMHKMICAVWRVLRTEQPFDRLHNCPELEKDNGELGVGTGLKEGRVAD

SEQ ID NO: 397485 - protein, 341 aa, unidentified
MHQATIIGIDLAKRTFQAHGATSDGKVAFRKKLSRSQLLAFLTQQPRCVVAMEACATAHEWGRAARELGHEVRLIPPAYVKPFVKRQKNDAADAEAIAEAASRPTMRFVAVKSEAQQARAMVFRTRDLLIRQRTQLINALRGHLAEHGIVAPQGPANLKLLADAISDMKISLVPIVRDLGLLYLEQIKGLGEKIAALDRTLRRESKSATTACLQTMPGVGPITAVAIEAFAPAMTTFKRGRDFAAWVGLVPIQHSTGGKQRLGRTSKMGQRDIRRLLIIGAMTIVRWASRKGAREGSWLARMMASKPRMLVAMALANKMARAVWAMLTKQENYRDPAAALA

SEQ ID NO: 397486 - protein, 437 aa, unidentified
MAEIVTLVPLLFVGIDWGSREHRVVVLDDAGKQIRDWTIEHTGGEIADLVERLASLVTNAVARCQIGIELKSGPIVEALLERGFPVFAVNPKQTDRFRDRLMPSGAKDDRRDAFVLATAVRTDSQWLTRLRPTDTRTIELRAMLRLRDELVTDKARLVMRLRAQLWRYYAQMLELADGELDSRWLWALLEKAPTPKQGAALSRAVVARMLRDHRVQRLDADEVRAILKKPSLVVADGVEKAGAIHVSSIITRLRLLDDQVRAATSDIEQQLALWSKLATNESATSASTGSAREPPEDETPSRCEQRDEVILRSLPGVGTITLATLLAEVGEPLGRRDYTALRALLGVAPITRQSGNSRVVVMRRACNEVLRNTAFNWARAAVRYDGRCRARFAALVARGAKKPAAYRAVADHLLRVACSMLRAGTEYDPNHVVRRAA

SEQ ID NO: 397487 - protein, 476 aa, unidentified
MGFPVGKICLFQKRHRACDAARKVSARMTTNNISLAVLDPLAAFVDVGSEQMHVSIAGGPPEVFGTFTTELHRLRDWLKERGAKSVAMEATGVYWLPLYGVLEAAGLKVSMVNGKQTRNLPGRKTDMKDCQWGATLHAHGLLQAGFVPPAQIRRLQDYLRLRGDHLSCAAACVQHQQKALERMNVKLHDVISSLVGDSGIRVIQAILAGEQNPERLLALCDTRIQKKKAERVKESLRGTWAQEHVFALRQAVENWQHYQRQIAACDQQIEMVLREISGPDEGGATEVKTKALKRGGVNAPQIEDLHHILFKLCGGKDLTVLPAHTDYSLLQLIGEVGTDLGRWPTEQHFTAWLGLAPGSHQSGKRKGSVRRKRNRAGRLFCMMARSLAQSKNIALGGFYRRMAARRGGLIANIALARKLAQLFWRVMVKGLAYAEAGLKAYEEQVLETKRRALSRLAKQLGRIVLPTLAELQTAQA

SEQ ID NO: 397488 - protein, 415 aa, unidentified
MEGLSPLHRRVAGIDVHRMLHVVTVLIEQPDGSISKHCREFGGFKRDCRALATWLAELQVQLVVMESTGIYWKSVYAHLENAGITAWVVNAHFIKHVPGRKTDMLDSEWLAVLARFGLVRGSFIPPKDLRELRLVSRYRRKLNANCASQINRLHKMLDDAGIKLGAVVADIHGVSARAMVRGLIEGQPLAVLLSHARGALKRKTEELTASLDGELSERPLFVLRHLSDSIDAMQRQLADIDAYLLRAMQPYAWAHALLQTIPGIDQIAAALILIEIGDDMGRFGSPARLACWAALSPGNQESAGKRRSGRTRHGNNVIRYILCECANAARMTKSTLASKFKSLVVRKSHKKAIVALAHKMIRLIYILLSRRQPYLDQSIDYAAISAKKNAPRWIKQLRAIGKWPSHNPPAASAAH

SEQ ID NO: 397489 - protein, 317 aa, unidentified
MTCVGIDVAKGRLDLAIRYGSGEVETHHFDNTSDGIDQLKELLCKAAPDRIVLEATGGYERPVSAVLAADGLPVAVVNPRQTRDFARATGRLAKTDEIDACVLALFGERVQPEIRPAPSEDQKVFSALVARRRQLQKMRTAEQNRLGTAPSEAVRSDIEEHLSFLEERLKETERQIEEAVENSAVWREEEELLCSIPGVAEATAHVLMADLPELGEANRQEIAKLAGVAPLNRDSGRHRGQRSTWGGRASVRQALYMATLSATRHNERIQSFYDRLVDRGKAKKKALVACMRKLLVIMNTMMKNGSHWNPEYHASSA

SEQ ID NO: 397490 - protein, 375 aa, unidentified
MQQDKAGEVVTSYYGIDLHKDQITWHCIHKTGNGETVRENGKISTDRVHEELVPMLTVNDSYLIVEASGSSFFFYSLVEAHCKKAFVVNPVAFRELYMTGKKTDRIDAKKLAERLKYHIECGDGESGFPEVFVPDADIVKIRKMVTAYELIVKQGTQIKNQAKAIFRSKMIGVAIDIMDKGLEDALKDTRIDDADRSILNMLKRIYDTLMEEKEEIKKQILLLGSFRFRDEVKLLISIPGISLMSATVFMADICTVERFSSEKKMTSYLASVGTVDSSGSIIRNGGLSRRGRRTSYRFILQGLEHIVNGNKDFQKFKERHALTRSNKVRAAIVRKTFVSMYFMLKNKELYRYMNEAIYERKIRDLKRYGIDFKCA

SEQ ID NO: 397491 - protein, 343 aa, unidentified
MKQYVGLDVSDEEASVCVIDEDGVIVVEDKVPSEPEAIAAFLGREAPHAVKVGFETGPLSTWHWHELTDLGVPAVCIDARHAKGALSCRINKTDRNDAVGIAQIIRMGWYREVKVKSYASHHVRSSLRARALLIKTRCDYENQIRGFLKTFGFRVGKTGKAGFVKRVRELIEGHEDLQKLILPMLEVREAIRREIAGMDRVLGEVVKGSETLRRLMTVPGVGPITALSFASAVDDPGRFRKASSVGAYLGLTPRRYQSGETDRPGRISKAGDGMVRKYLFEAAVVLVTRGGAWSPLKAWGVRLAKRVGMKRAIVAVARKLAVVLHCIWVDGTEFVWTRQEAQA

SEQ ID NO: 397492 - protein, 331 aa, unidentified
MNMHPQGGVANGGRLNAGVDVCKRHLDVCLDTEARRIANDAKGWDELTAMLKAGGVDLVVVEATGGYERGLVCAMQGAGLSVARVNPRQARDFAKSMGVLAKTDQVDARCLRDFADVLARHKDRRKYITPMLESARQELAELMTRRRQLVDMRVAENNRLEHAGKVAARSIASVIKLLDKQLSAIDAQIDEHMDTHFRSQRELLDSVKGVGPVTILTLTAALPELGKLGRRQIAKLVGVAPLADDSGSRQGKRRIWGGRGGVRAVVYMAALVAMRHNPVIRDFYARLVAAGKPKKVAIVACMRKLLTILNAMLRDQAMWNAARHVEVPVAA

SEQ ID NO: 397493 - protein, 391 aa, unidentified
MVEERTIAHEATAVHAWIDELLTRVGDAPDTIAVAIETPRHLLVETLLEYGLAVFAINPKQLDRFRDRFTVAGAKDDRLDARVLATSVRTDRHAFRRVRRDDPIVIELREYSRLVENIDHEHRRLANQLREQLVRIVPGWLTLCAGADEPWFWALLETAMTPTGPRRVSTARLARLLKTHHIRRWTATEVADVVHARGFVASDGLTPAVHGHIALLLPRLGLLRSQRLTCEARLDVLLARLSESSSDDPRRHRDAVILRSLPGVGRLVSATMLAEAAQALAERDYGTLRSYAGVAPVTERSGKRFHVVKFRRACHPRLRQALYYWSQRSLALDPRTRAYYRALRQRGHGHARALRSVADRWLRILIAMLRTGTIYDDKRFRPAIEEAIQIA

SEQ ID NO: 397494 - protein, 415 aa, unidentified
MEGLSPLHRRVAGIDVHRMLHVVTVLIEQPDGSVSKHSREFGGFRRDCRALAAWLAELQVQLVVMESTGIYWKSVYAHLENAGITAWVVNAHFIKHVPGRKTDMLDSEWLAVLARFGLVRGSFIPPKDLRELRLVSRYRRKLSATCASQINRLHKMLDDGGIKLGAVVADIGGVSARAMVRGLIEGQTEAVLLSHARGALKRKTEELAASLDGDLSARHLFVMRHLSDSIEQMQRQLADIDAYLMAAMQPYAWAHNLLQTIPGIDEIAAALILIEIGDDMARFASPQRLACWAALSPGNNESAGKRKSGRTRHGNNVIRYILCECANAARMTRSTLAAKYRSLIVRKSHKKAIVAVAHKMIRLIYLLLSRRQPYIDQGIDYAAMSAKKNAPRWIKQLRAIGKWPTASAPAANAAI

SEQ ID NO: 397495 - protein, 401 aa, unidentified
MDPHLCVGIDVGCRSHRVGIALPDGSILEEFDISHSDAGFQEFFRRVDEHRNRLSLPVAVAMEGYNGYARPLDRLVQDKGYRLYNVNNLKLARFKEVFPGAAKTDPIDARKILELFRLKDQLPLAKDAIQEVVTAPVVNEKLKRLSRRRRHLVIEKMRVLNRMQADLQAVCPELLAATNDADNLWFLRLLTFRDDLRQLARLRRSTILQIPSVGQKYAGLIQKWQAKAQFSSEVEYVGPMIIQDARRILQLREQIHALDEVMAELADQSEIARRLSTIPGFGKTSIAELAGEIGAMERFASEASLALYLGMCPLTHQSGEMCRARIPRQVNTRCKSAMMTTVVRHIGCVPQSRAYYDRKRAEGKTHNQAIRSLGRHLVRVIWAMLRDGRDYEIREDQHSTP

SEQ ID NO: 397496 - protein, 348 aa, unidentified
MTVTIVETRAITGGVDTHADAHVAAALDPIGGLLGVQEFPATAAGYAQLLDWLGAFGTVCLVGIEGTGSYGAGLARHVTTAGVRVVEVDRADRQDRRRAGKSDPLDAVSAARAAQSGRARGAPKGRDGTVEAIRVLMVAKRSARAERTQTINQARALILTGPEDLRARFSRHDPADLVAELAALRPRPGDVVGYATRVAVRELGRRAGFLDGQLKRLDELIVPLVTARAPGLLALYGVGPDTAALLLVAAGDHPERLRSEAAWAHLCGAAPIPASSGKTVRHRLNPGGDRQANHALWRIVFTRLGSHPPTRAYAERRTAEGKSKPEIIRCLKRYVARETYPHLRPPAG

SEQ ID NO: 397497 - protein, 339 aa, unidentified
MTSIAHTRQVTVTGIICGVDISSSSLEARIGQQGAAASFPNHAEGIAALAGFCREQGVELVAMEATGGYEQQSFAQLSQTGLPVAILNPRAVRQFAQSMGRLEKTDRIDAGMIAWYAEVKPSPPVCLAPQSQQHLRALVTRLRQLTDIRTAQLNQQRLVTDRSVQASFKKLLALVARQIRDLEQAIAKLIEQDPLWRELNQVFRTIKGVADRTVARMMAEMPEIGTLSNKTISKLAGVAPLARDSGKHQGKRVVRGGRASVRDILFIVASVVGRYEPDFIAFQQRLRAAGKPPKVVRIALAHKLLVRLNAKARQVRQRIAALQPASSGLAFRKNLIPPS

SEQ ID NO: 397498 - protein, 367 aa, unidentified
MKKISTAAANEVRNISHEKLTIGLDLGDRSSWYCVLDESGAVLLEQRVSTTPKAMREVFGGMPRSRIALETGMHSPWVSRLLSELGHEVIVAHARNVRLIGESRKKDDRLDAQTLARLARIDPQLLSPVKHRSAKAQADLTVIRARAGLVRARTALVNTARGLAKSYGERLRGCNVRNMNPEKAEGLSPELQTALQPWLAGIESLSERIRECNERIEQLAQQNYPQVALLKQVKGVGTLIALTFLLTLEDAHRFRKSRDVGCYLGLQPGRRNSGQSEPQMHISKEGDRYLRTLLVQGAHHILGPFGADSDLRRWGLKLAERGGRNGKKRAIIATARKLAVLLHRLWVSGEAYEPLRNSSRAAMPAAA

SEQ ID NO: 397499 - protein, 390 aa, unidentified
MFYAGIDVAMDKHDCVVLDSGGNCVVEVFTFENSSNGFKTLHKVLKSCSKKPENIKVGLEATGHYSDNLLAFLNSIGYSPVLFNPLHTNLFRKGQSLRKTKTDHVDAHTIATMLRTEDLKSYSQPSYHLNELKSLTRYRSTLVSDCSRRKISLVRLCQILFPELKNLVPSLHMSSVYTLLSELPSADKVAKCNLMHLTSLLSSASKGHYGRDKAIEIREQARSSIGIRSVVKELELQQTIELIRILQQQIEAVEEEINSLMDDIDSPITSIPGIANRMAAVIIAETNNFNDFERAEQVLAFAGLDPSVYQSGQLTSTHSKMVKRGSKYLRFAIFNATKYVCRWDPTFRAYLAKKRAEGKPYNVAVSHAAKKLTRVMFHLAKTNKEFVPQA

SEQ ID NO: 397500 - protein, 346 aa, unidentified
MRIIGCDLHARQQTLSMLDTESGEVTEKTLAHEGEAVREFYAALAKPVLVGLEATGSMFWFLRLLEELGIEYRVGHPAAIRKAETRKQKHDRRDAELIRRLLVENRFPRIWLPTPEQRDLRTLLRHRHQLVRMRVMTQNGLQGLALSQGLRRGSKLWSQAGQQELQGLGLAGFAATRREQLQQLRRELNQRLRQLDQAVSEQAEQRAGTRLLLSHPGVGPITALATEVFLGDARRFPNAKAVASYVGMIPSEHSSGGKQRNGSLSKQGNPLLRLLWVEAARAAARKDARLKQFYRKKLVQKGLGKAVVATARKLGIRLWIMMRDQIDYTEFCRRAEQRCPHAGMPE

SEQ ID NO: 397501 - protein, 315 aa, unidentified
MVDVPCFMGIDVAKAQLDIAVRPSGERWTVPNDADGVATLVAQGQALHPTLIVLEATGGLERAATAALATAGLPVVVVNPRQARDFARATGQLAKTDALDARALAHFADVIRPTPRPLPDAQTQELRALLGRRQQLIVIRTAEQNRLAGTSGRLQTDIEAHITWLNERLATLDNDIETLLRASPLWRENDDLLQSAPGIGPVCARTLLRELPELGTLNRRQIAAWVGVAPLNGDSGTLRGRRMIGGGRAHVRTVLYMGTLVATRYNPRIKAFYERLLAAGKVKKVALTACMHKFLTILNAMLKHRTPWQAQEVQG

SEQ ID NO: 397502 - protein, 341 aa, unidentified
MKPEMNVLGIDIAKHVFHAVGMDDRGNVVSRKRLSRHDLMPFLAKLPPVRIGIEACGGAHYWARRFREHGHEVKLMAPQFVKPYVKSNKNDSRDAEAIAEAVTRPTMRFVPIKDVDQQDIQALHRVRERLIGERTALVNAVHGLMHEYGIVMPKGVAKFRQAVVGKLESEKDKLTPLSQEMFWKLVEEFAALEAQLAYYQEKLEALAQTHPECQRLMTIPGIGPLTATALVAAVSDASAFKNGRQFAAWLGLVPRQYSTGGKERLLGISKRGDSYLRKLLIHGARATIRWVGRKTDRRSQWIRQLVERRGTNRTAVAVANKNARIVWALLTSHQAYELAKG

SEQ ID NO: 397503 - protein, 429 aa, unidentified
MNYTQNEKIEQVTDTTLVIGVDIGSQTHYARAFDNRGKELTKKVFSFGNDIEGFNSFDQWIESLKTANDKDSVLIGCEPTGHYWFALGKYLTDHKKSLVMVNPFSVKKIKELDDNSPKKTDAKDPKTIAKLVIDGRYSIPYMPEGIFAEIRDLVYSRDRIVKQHNISANRIQRWLAIHFPEYLGIYTRFDAASGLAVLEKAPLPKDVIALGVNGIRKLWHDKKMRGRGVTEDRAKILVEAAHNSIGLDGGAGTRSELYMLLEEHRLWSSQLEAVEKALSEAVLKVDHVENLLAIKGVGSITIAGFIAEVGDVRRFNSPKQIQKYAGLELVESSSGKHKGRSRISKRGRRKLRKILYQVMIPLLASNKEFRGIYDYYVTRVKNPLKRRQAMIAVSCKLIRVFYAVLTKGVDYDRFKMMSDIHRDSELIAA

SEQ ID NO: 397504 - protein, 345 aa, unidentified
MDDTAPGYRLYVGIDIAAATFTAAWLSAGGKPTPPCTLDQTPAGHTALQQRLRATRVAPAATLVVLEATGSYWVALAVALHEAGYRIAVINPFQAHHFAKAQLRRAKTDALDAQDLAQLAAKLQPTRWDPPPAVYHEVRQRLVARDALVEMRQQARNQRHALLQWPVIVAGVRQHLDELVADLDRRIAALEGEIAAVLGEGAWAASFACLLSAPGIGLITAAWLLVGTLNFTLAATPAAATAYAGLAPMPRESGRSVRGRPSIGHGGNARLRTALYMATLSAARHNPAIRAFYDRLRAAGKPMKVARCAAARKLLHLAWALVTKQRRFDPGFKQQQHAASPELAA

SEQ ID NO: 397505 - protein, 330 aa, unidentified
MKNYKEVVGIDVSKKTIDAYCYQAQVHKEFKNDIVGYKSLLNWVLKSTKGVSVFYCFENTGYYSLKLALYLNSQKIVYVEESPLKIKRSSGIVKEKTDRLDASLIARYGWIYREELIPSTVKSTTHLELGRLLALRDQLVRNNAGLKGTLKEMKVFLTSSTTDAGCISLKRSIDYLSKQVKAIEIRIEELIFDDVSMQKNYELLSSLKGVGFVVACQLIYHTGNFTRFDNWRSFSSYCGTAPFAHESGTSIKRRKQCHYLGDRKMKSLLSMASISAIQHDSELRIYYKRKLAEGKDKMLAINNVRNKLIARAFAVVKRGTPYVVLQNYAA

SEQ ID NO: 397506 - protein, 356 aa, unidentified
MVKRNKLDFTGQPIYIGMDVHKKSWSISISTAYGHYKSFSQPPEVDKLVYYLHRHFPGAQYHSTYEAGYCGFWIHDRLKEKGVGCLVVNPADVPTKNKERKTKRDRIDCRKLSRSLRNGDLEGIYVPPRGKVEDRSLIRTRLSMVRKQTRCKNQIKSMLLFYGVMLPEEKEMGHWSRRFIRWIESIRMERASGDMALQMHLEELGHLRQIIAKLNRTILALSRTEEYRPWVSLLRTVPGISTLTAMILLTEIGEIRRFPSIDELTNYVGLIPDTESSGEKEHVGGVTQRSHSQLRWVLIEASWRAVSKDPALMMAFKEYGKRMRKTKAIVKIARKLLNRIRYVLKNRSEYVPGVLE

SEQ ID NO: 397507 - protein, 332 aa, unidentified
MNIVSTVGIDLAKNVFSVHAVGQDGTVILRRTVSRAKLPELVAQLPPCVIGIEACSGAHDWARRFAAFGHIVKLMAPKFVIPYRKSGKNDGNDAEAICEAVRRPNMRFVPVKSVEQQSDLSLHRVRQGFIEERTATLNRIRGLLTEFGHVVPLKAVELYRRVPELLEVLPPRVATCARDLLEHATRCETKAREYEREIKIHVRSHALARRARTRAGIGPITASAVVATVGNGRDFKNGRQFAAWLGLVPGQYSTGGKTRLGHITKRGDPYLRKLLVMGARTVLQRAARLTDPLSRWAQAVRIRRGYHRACVAIAAKNARVVWALIAQEPAAA

SEQ ID NO: 397508 - protein, 288 aa, unidentified
MDETTMEKFVGIDVSKSTLDVCIEPVTQTFHVVYDEAGIRRTVSRLEEVKPTLIVIEATGGLEVRIATELAGKGLPVAVINPRQARDFAKATGQLAKTDRVDAAVLAAFARAIRPQARPLQDADTRILNDLVNRRRQLIDMRVQETLRLNTAASKPLEKSLKKHIAWLDKRITEVDNDLTRRLRKSEVWRTKDDLLRGIPGVGAVTALTMLAKCPELGTLNRREIAALTGVAPLANDSGKHRGKRFIWGGRADVRAVLYMATISAIRCNDTIKLFFYSWRSFLSDLVL

SEQ ID NO: 397509 - protein, 331 aa, unidentified
MKFKETLGIDVSKKSIDVSLHLTNVVHKFDNSVKGFKSLLAWVKKQTGLNQNRVLICFEHTGLYSLPLAVFLTEKKVVFCLEPALQIKRSLGLVRGKNDIVDAKRIAEYAYLRREQLKPFELPSANVLKLQKLLSLRERMVKQRAGYSASIREYKSFLKQKDHESLFSTHQKMIHYLGKLIDAIEKEIKELIDSDQKMKVLYQLMVSVKGVGLVLASNFLVSTNCFTAFKNGRKFSCYAGTAPFAKQSGTSLKSKARVSHFANKRLKSLLHLSASSAIQSDPEIKAYYQRRVKSGKSKMSTINIVRNKIINRVFAVVSRGTPYVPLYQHAS

SEQ ID NO: 397510 - protein, 353 aa, unidentified
MRILGVDLGQSKSAWACLDNTSGELHQGWVVPAEAAWLRLLERCRPEQVVIESGPLAARVHDLLVAQKVKVLVADPTREAWNWKNVKRKTDPDDALKLVRLALVGQINPVHVPAPAVRQLRALLEYRRALVAEQTRCKNRIRATLVCHAGVRLAGSSKAWSVTARAALAAQMAPLSACGPDELWRGLVHSELEHLAEVLQRLAALDTQLNALARANRAVARVDGLPGVGPRTAQVIVAVLDQPRRFASRRQVSAYAGLTPRRFQSGQMDRSGRISKRGSSLLRWALNQAAWVAVRFSPEFRAFFLRLGGGTKKRRKQAIVAVMRKLLVVAWAVLRDGATYQARRLAAPAKTAA

SEQ ID NO: 397511 - protein, 313 aa, unidentified
MATARVHVGVDVSKENLDVYMPGGKTVRTGNTVSAVRRLVRGVKAKDPSAMFCCESTGGYERTLVDVCREEGQPVCVMNALQCRRYAEHRGMLEKTDRIDARVISMAADDKNPAALIHPGGRQRKLKEMWTLRTHLASQRDGERNRLEHLHEKEAVAAVKRIIASYERQIERLEKLCRDEVSQEEKSQTLLDRFQIVKGVGPLTALALVALLPELLFLDDKRLSKLAGVAPICDQSGTLDGPRHIMKGRGLVRRALYWAAVSASQHNKILAAFYNRLVEGGKAKKVALVAVMRKLLCLMRRIAQDPEFVPAEG

SEQ ID NO: 397512 - protein, 412 aa, unidentified
MEVLYACCGGIDVHAKMLVACVLKQGQKDVRTFSTMTEDLLRLLDWLTHVGCTHVAIESTGVYWRPVFNILEGAVDVMLTNARDAKGYKARKTDVIDAEWLADLLRHGLLKPSFIPPLPIRELRDLTRYRESLVREQTALANRIQKLIESANVKLGQVASDALGASGKRMLRALATGQTDAEQMSHLAQGVLKRKQPQLQQALEGRFTQAQRWILTELLDQYDQGEVALQRVAERIRQEVDKRADPFVPEAIKLLDTIPGVGETVAQIMVAEVGVDMEQFPSADHLASWAGMCPGNNESAGKRRSGKTTKGSRYLRAALVQAAWAASHQKETYLAAQYKRLVKRMGKKKALIAVGHSILVIAYHVLQNRTPYQDLGGDYFARRNVDKQRKRLVRQLESLGVKVTIAEIKEAA

SEQ ID NO: 397513 - protein, 409 aa, unidentified
MWTLGIDVAKRAHCAHVLDEAGVERLSGFRFANSHAGLCALREKLAQCGAAPHTLRVGMEATGHYWMALHDQLRASGHAVAVLNPLVTHARRNMTIRGHKTDPADARIIAHVLREPGVPLSAVARDEVRQLRTLARMRFELSAQATADKLRLGALLDRAFPEYAQLMPCVTGTASLCVLSHYPTAVDMAQANLRRLSSLLQAGSAGKLGRDKAVALRDAARNSFCVTSALAALRMEITMCLQRLELYQRQCAALEDEFKKQLGPQQALLRSIPGIGPVWAATILAEVLPIFDPAHQEGGKKFVAYAGLDPKANDSGQSNGRARMSKRGSKYLRTAAMQAAEVAALRVADPMFRALYERHIAKGKHHANALSHVANKLLHVVFAVLRDNKNYEPHVPQHTERATTTNEIS

SEQ ID NO: 397514 - protein, 340 aa, unidentified
MLIIGCDYHPSFQQISFVDAETGECGQRRLDHSSGEAESFYRGLRGSTVRVGMEASGHGRWFERLLAELGYELWIGDPAKIRAAEVRRQKTDRRDAEHLLQLLLEDRFPRIWVPTLAERDLRQLVLHRHRLVGLRTRVKNQLQAVALNEGMQRKKRLWSKKGREEFEQLRLLPWAGRRRGDLLALLDGFDGSITQLSQAVEQEAQRRPEVRRLMTHPGVGPLTALAFVLTIGPWERFGCGKQVASYLGLIPSEHSSGGQQRLGHISKQGNTLMRWLLVEAAHVAVQSDAQWRRHFIHLSLRLQRSVAIVAMARKLAVRLYWMLRRGCDYQQMAQHGSHGG

SEQ ID NO: 397515 - protein, 367 aa, unidentified
MKKVSTAVTKQSRNISQQKLTIGLDLGDRNSWYCVLDESGRIQLEQRVRTNAKALQEVFAAMPRSRIALEIGTHSPWISRLLSELGHEVIVANARKVRLIGESRKKDDRLDAQTLARLARIDPQLLYPVKHRSVQAQADLTLIRARAGLVRARTALVNTVRGLAKSYGERLRGCNVRNMNPEKAEGLSPELQAALEPLLNAIESLSERIVEYNEGIENLAQQRYPQVALLKQIKGVGTLIALTYMLTLEDPHRFRKSRDVGCYLGLQPGRRNSGQSEPQMHISKEGDPYLRTLLVQGAQHILGPFGIDCDLRRWGLKLAERGGRNGKKRAIVATARKLAVLLHHLWVSGEGYEPLHNSSRVIVAAAA

SEQ ID NO: 397516 - protein, 365 aa, unidentified
MPSMPHPDESSQSHPRDEEIILGVDTHKDSHVAAVITVLGVLVASAAFPTTTAGYRQLLAWARGFGVLCRAGVEGTGSYGSALTRHLRRQNITVVEVNRPDRAARRRQGKTDAVDATAAAHAVLSGRANTTAKTADGPVEMLRMFKLARTSAVKSRTQAVNQLKAVIVGAEPALRETLTGLTGTALIRYCASLPDTPPRDVSTATAYTLRRLARRIQVLTREARELELQITAVIDAHAPHLLQRKGVGPDSAAALLITAGDNPDRMNNEASFAALCGVSPIEASSGKTRRRRLNRGGDRRANAALYRIALTRSRCDQRTRDYLDRRAAQGLTRREAIRCVKRYVAREIYNLIRQLNPTTECPRTA

SEQ ID NO: 397517 - protein, 558 aa, unidentified
MVLSSPFGSVAPWLAAWTLVSLRPALALGAVIPFGRVCRLSPKAGLAHAKVKNFNHDPNMKKREQSPSVPAGQIRPAKQMPLVHRHAAGIDLGNEAHFVCVPADSVPEDQNPVRQFGVFNSELDQMVEWLKQCQVQTVALESTGVMWIPVFQKLEGAGLEVVLVNTKRLKHVPGRKSDVLDCQWLQQLHSYGLLSGSFRPVDIICRLRTLMRQRQNVIASAGSETQHMQKAMQEMGVHLHVVISDVTGDTGLRIIDSILDGQRDPKELVKLRDCRIRRSTPQEMEAALKGDWRDELLFVLGQSRQAYTFFQDQLAKLDEKIIALLADIPQAPPPQGPAQDVPSVPANEDKGSPAATSNDPCPSETVATQGKRAKKVKSKPSKGGNHLPKDIRPELTKIFGTDLTLIPGLNLVNVLILLSEIGSDLKKRWRDGDAFAAWLGLCPGAKISGGKVLSSRTPHVVNRVASILRLAAVVIGRTETCLGVFYRRMKTKHGAAKAATATARKLAVLIYHLQTTGENYKEPDRRKYDEKVRKYKVMRLTHQAKELGFNLVPLEKAA

SEQ ID NO: 397518 - protein, 408 aa, unidentified
MTVVGIDVSKSKSMVAAMKPGGKLVAAPYEVRHSDIELSHLALDVLCMEPDTRVVMEATGRYHEPVAAQLHSAGIFVSILNPLLIKQSGAGSLRKVKSDPKDALKIAKYGLDNWSTLREYTPMEAIRQQLKLCARQCDLYNKSIVMLTNNLISLSDKTFPGVNELFSSPEKADGHLKWVDFYRTFWHCDCINRMSPDAFGERYKKWCKKKGYHFSADAADALYAASCGLYTTLPRDNNARLLVTVAADQLIALRENQSKLEAEMLNFCKQLPEYETVMAMYGVGKSTGPHLMAELGDVRRFLHRSSIVAFAGVDPGVVGSGKMQLSSVATSKRGSPQLRKALFQVVSTYVKCKPENEAVYQFYTKKRDEGKPFFVCTTAAANKFLRIYYARVKECLNAAESATQVEEG

SEQ ID NO: 397519 - protein, 334 aa, unidentified
MENIALIGIDLGKNSFHIHCQDRRGKAVYRKKFTRPKLIEFLATCPATSIAMEACGGSHFMARKLAELGHFPKLISPQFVRPFVKSNKNDFVDAEAICEAASRPSMRFVQPRTESQQAMRALHRVRESLVQDKVKTTNQMHAFLLEFGISVPRGAAVISRLSTLLEDSSLPLYLSQLLLKLQQHYHYLVEQIKDLESQLKRKLDEDEVGQRLLSIPCVGTLTASTISTEIGDGKQYASSRDFAAATGLVPRQYSTGGRTTLLGISKRGNKKIRTLLVQCARVFIQKLEHQSGKLADWVRDLLCRKSNFVVTCALANKLARIAWALTARQQTYVA

SEQ ID NO: 397520 - protein, 336 aa, unidentified
MKLMPVGVDIAKNVMQVHFVNTDTGEIFNKALKRDKFLEFFTNRSPCLIGMEACGGAHHWARQLMRLGHTVKLMPGEFVKAFNIRNKNDTADAQAIWRAVQQPGKAVAIKTEQQQAMLALHRIRSQLMKFRLMQTNALHGLLAEYGEVMRKGHASLVRNVPEILARLSGRLPAVLIDSLREQLGEVERTDTRITDIERRIRELSKNDPGVKAISEIPGVGLLTATAAVASMGDAHAFRSGREFASWVGLVPRQTGTGGKIQLLGISKRGDKYLRKLLVNGAHSVIQNAREPGLWVTDLLKRRPINVASVALANKMARIIWAVLAHGRPYRKEAAHN

SEQ ID NO: 397521 - protein, 412 aa, unidentified
MKDLLEISCGLDIHKEKIVACILTGPLGKPTHSEIREFTTLIPDMLALRDWIISENCHHIAMESTGIYWIPIYEILEDAFSGDITLLVVNARHMKNVPGKKTDIRDSEWISTLLRAGLLNASFIPEKRIREFRDLNRYRKSIIRDITSQKNRVEKFLQSSGFRLSSFISDIFGASGRNIILHLMEHGQIDKMSLDSYLKTKTRKRIDEILMSVNGTLSEHQKSFLKILMCHYDSMKEHLIEIETHLQEDMLPFALQIEQLNTIYGISTTASCAIIAEIGTDMKPFKTAEHICSWAGLCPGNNESAGKRKSTSITKGNPYIKSMLCEIAWVIAGKRNTYLSAWYWRIKQKKGARKAIVALACKLLVIIYTMLKQGTNFDENCFEVRRKNCEQKQLSRYIRELEKHGYTVEAQV

SEQ ID NO: 397522 - protein, 385 aa, unidentified
MAPPRMPEAVIGLDVGKSSHWACVATRDGEILLSAPVANREGDLDSLFGRFPDALVVVDQSRNIGALALARAKAVGMSAAYLPGLAAHGAARLFAGDAKTDERDAMVIAKTALGIPDALLPVGDPGPTIAAARALAAQRNFLTCENTRSKNRLRSILLESCPAFEALVDLSDGPQLRLMASLGGAWSVTDAGPRRAAALTRGAARGKIEALVRSTASSTRPDAAAIAAEDRAVKLLARRISENSAEIEAITTEISALLEGDDTYRCLLTVPGIGPKTASELAISIDIEDFPSHDRLASYCGLAPRNRQSGTSISSVAASRQGNKRLKNLLIFSCNCLTRTEGRWGDYYARCRERGMPHGKALKALARKRLKVIYAIMRDRVPYAA

SEQ ID NO: 397523 - protein, 320 aa, unidentified
MTIICFDVSKDELVGVRINQRAAIKETYTLPNTEGAISSFLEEVHASHPRLTVGSEATAEYHRPLALACLARTIPFRLVNPLVTKQLTQVTIRKQKTDATDAFLIAKAVLQGAGTLVTHDSFAPGKVLNRTAVKLSHIAGALLRMERRLRETEAGAGVAETLIALREQAEETMRAAQREARASLDPGCSTLLQSIPGIGPTLSTAFLTELMPIERFPTQKGLVAYAGLDPRVKQSGVSMKRNTHLTKRGSPVLRRAAYLAASIAQRCDPELKAYYEKKRSEGKRYREATIANARHILYRIYAVWKRGTPYVKRELSTAGT

SEQ ID NO: 397524 - protein, 313 aa, unidentified
MSQNNPTILYVGLDVAKLSLQLHLAGRFHALNNDAKGHAQLLKHLRDHPQAHVVCEATGGYEQPVVRALQAASVPVSILEAGRVRYYAKAQGLRAKTDPIDAAVLSQYGATFKPMATAPASVQQQQLADLAQRRRQLIQSVVAERNRAEHYTHALCLRQARQNLKLLEKQIAQCDQAIARIVNEDAVLKHKADRLTAIPGVGPVVAATLLADMPELGTLNKQTAAALAGLAPYNRDSGNQQGIRHISGGRHSVRCALYMATLSAVRHDRILKEFYTRLLAAGKKPLVAMTACMRKLIILINRLLKDDHFQLAN

SEQ ID NO: 397525 - protein, 352 aa, unidentified
MPYAYHIGVDFHKAYSHIAVQDGDGRTVRSGRVRNDRQSIGSFLAPYSDNAHAVVEACRNWTVMYDWLDEICDDVVLAHPLKVKAIAEAKIKTDKIDATILSHLLRADLVPAAHAPSHGARELRQALRERMFYVRLRTMVKNRVVTAFDRYPEQTARLKQCSDLFGATGRQQLAELDVSALDRIQIDRSLGFIADINGRIKQAEATIKALSKGNAQVKRLKTIPGIGEFFARLIAAEIDDIGRFRSAKKLAAYAGIVPSTYSSGGKTWHGRIIKQGNKWLRWAFIEAVAPAVASDPQLKELYQRLSAKGSNRAKVAVARRLLTIAFQVLRDGRCYERRGARPESRSEQSRLS

SEQ ID NO: 397526 - protein, 352 aa, unidentified
MIIGCDFHPSFQQIAYVDQETGEYGERRLGHREEAAGFYRSLAGRKVVVGLEATGNDRWFRKLVVESGHELLVGDASAIHASQPREQRTDKRDARHILRLLVENRFPSVWQPSAGNEAQRQLLMHRCRLVRMRTRIKNQLDSIAKSEGLTGSRSWSGKRRQQIEGLPLTGWYGQRRADLLELLDGLEQRIQPLDRAVEEAARQDAQARLLMTHPGVGPVISLAYVLVVGDWRRFPRGKQVGSYLGLIPSEASSGKRQQQMGHITKQGNTLLRWLLVEAATTAQRYDASWHRQYVRLSMSKHHGVAKVAIAHKLAVRLYWMLRSGQDYGQMMERGSHARQSECPVGRSTRPIE

SEQ ID NO: 397527 - protein, 329 aa, unidentified
MDLSIGIDISKEYFDICNFDGKNYSYMTYNNTNEGINGFIKELNKIKKDKDLLITMEATGIYHLKVAIKLNTKGFSVSVVNPLIIKRYSQMKMRRVKTDKADSKIIAEYGYNEPSYPFIQKSEDRQKVELMLKGLEDFILLKNELSNRLEALKNNPYKCKEVEDAINNTICFVIENIKKLEDELENFVKKNFNEEYERLLEIPAVGKRIASLVIGFFGTFDVFENSKQVSSFIGINPSPKESGSSYRGKSNISKKGNGYMRKMFYLASLSAARYNPKCKELYMRLLARGKLKKVALIAVANKLIKQIFAIVKYRREFDVNYVEKSREKF

SEQ ID NO: 397528 - protein, 350 aa, unidentified
MQHIAFDAHKHYTLASVARPDGQLVREERIEHERGALQDFLTRCERGSPVAVETIGNWYWIVDEIEAAGCVPKLVHARKAKLMMGEINKTDRLDVRGLNRLQRNGTLPTVWIPPGELRDQRDLPRTRMVLIRQRTQLKNRIHATLAKYALHELDVTDAFGRRGRELLRQRFALLPPHTAYASQQLLDQVEGLDRQVHEFEQRIRATFKPTPPIQRLLTVPGLGLTLAVVIALEVGDVTRFATAEKLASYAGTTPRVHASGGKTRFGPSRPDVNRYLKWAFFEAANAICLTRRRAPTRHVSRLYERVARRKGHPKAIGAVARHLAEATYWILSKEEPYREPRALGRVVDGG

SEQ ID NO: 397529 - protein, 298 aa, unidentified
MMNNAKQTKDTKQTKTNVANKPNEPIYCGIDVGKKVFVVSLSCKDKTKTFSNTGGDIKQAITYLNTNAGTNLALVVLESTGGLEIPLAKALHQSGFNVVIANPNKTSQFAKSYSNAKTDNQDAKMLALYAKFLSLDESKLTHLLYVPPSEEQEHLEALVVRRHQLVAMRVQEKNRLGQIHQSQLESVKQVIAYLDEQIAKLEQDIDTLSKHFDDTTKKFKDIKGIGGVTVATLMSMLPELGTLSNKEIASLVGVAPHPKESGTLKYKSHCKGGRQSVRNVLYTNRTQNMLQYPYGILR

SEQ ID NO: 397530 - protein, 325 aa, unidentified
MTHSPSQPLGSSAVFLGIDVAKDKLDLAGDGIDSAESFPNDARGIASLLNRLTALHPALIVLEATGGYERAILDATLDRNLPIARVQPARVRHFAQAAGLLAKNDAIDARLLAAYAQALQPAVAQKRSANQAELDALVVCRRQLINTRIAHRNQLQLAPSNFVRDTLKNVLRKLEQQIKRVDQEIDRLIDSDDDFSGKRDLLASVPGVGKTTAATLIAQLPELGQIDKRQICALVGVAPFDFQSGRFKGKRRIFAGRTAVRCVLYMATVTAMRCNPIIKAFAQRLKAAGKVTKIVIVACMRKLLTQLNAMLRDRRRWDVPTPATA

SEQ ID NO: 397531 - protein, 310 aa, unidentified
MEDVVVGVDVSKDRLDVHVLPSGEALSVSRDSEGVAALAERLSGLGAALVVMEATGGFETIVAAGLAAAGLPLAVINPRQIRAFAQALGKRAKTDPLDAEVIARFGQALQPEPRPVPDEQARNLSELVARRRQLVEMMVAERNRRRRLVQPKLIKGVDRVLAALQQELTALERDIDQTIRGSPVWLEAEELLTSVPGVGDKTARTLLAEMPELGKLDRKQIAALAGLAPYNRDSGRFKGQRRIAGGRSPVRTALYMAATVASRHNPLLKAFSQRLRQAGKAPKQALIAVARKLLTILNAILRDRRPWQTA

SEQ ID NO: 397532 - protein, 476 aa, unidentified
MNAKTTSKKNQVVSGNISKCEELSKKTEEISKNLRASSWKDLETHGKFAKNDKISFISDDMLVAGCDIGSETHYLRAIDTRGRELSPKAFSFRNNAEGFASAKAWLLELAARHGKTQIVVGLEPTGHYWFCLAAWLVSNGISVVQVNPYAVKQTKELEDNSQRKDDLKDPKLIANLVKDGNYGMPYLPEGTYADIRRYALFRDQLMEDRTRAMNRLHRELTICFPEYKDAFGKVDGAFTMALLKVAPFPADLKAIGADGIRDFWHAAKLRGRGYSRAEKIIRCAEQSVGLQDGVDASREAVIHFAEQIVMLDEKLAEIGEKLHAKCMELPHAENLLEIPGIGGTILSGIISEMGDLSRFDTAKEIQKMSGMSLVACSSGKHQGETKISHRGRKRLRYWLFQAAKSVTSHTSEFKEIHAYYTTRESNPLKKMQSLVVIACKLLRIIFAIFKNGTRYDPEKMLRDIRRQAGMGMPAAA

SEQ ID NO: 397533 - protein, 400 aa, unidentified
MECVFGIDVSKENANVAVLVDNVVIKQFKIGLDRLGFSLLSDELNSFNAPLIIYEATAMYSRRLRAFLQRDGWKYTELNPLAAKKVMEEFRHTKTDALDAVGLARAMIKNHFRPTYQESPVYTELHDLERTYQQFNKDIVTNKNRLHRALQLTFPEIEHFMSSTDGVLYWHIVQRFPHPAIVLSHEENELTEIILTETSKKIGLKRAMKLANRLLALAQNSAPAKEPQSHAVRAVIALAKEVERINQLKAQIIVEMTTLGKNLSEVPLLVSIPGIGIKTALCLIAELGDVRRFHSANAINAYIGIDLIRYESGQYEAKMHIRKRGNPYARKILYRAILNIISVSQYQPTLISANYKRKKQSAQSHGTKKIAIAAMSQFNRLMHHLILNNELYDSTTFMPE

SEQ ID NO: 397534 - protein, 341 aa, unidentified
MTEVSTIGLDLAKNVFQAHGASVAGDVVFRRKLRRDQVLAFFAAQPPCFVAMEACPGAHYWGREIGKFGHTVRLIAPAYVKPFVKRQKNDMSDAEAICEAAQRPTMRFVAVKSEAKQASAVIFRTRDIVVGQRTQLINAIRGHLSEYGLIAPQGPFHVGRLIAHIEDPASSVPEAARSCLALLVEGLRHLQEQIGALDAEISARAKADDTTRRLMTVPGIGPLIATAIEALAPPAETFRSGRDFAAWVGLTPMQRSTGGKERLGRTSRMGERTLRRLLIIAASAVVRWAKRKGVPKGSWLGRMLERKPPMLVIVALANKNARIAWALLTKGESYRAPAVPA

SEQ ID NO: 397535 - protein, 343 aa, unidentified
MQFFVGIDVSLDSSSICVIDERGVIIKEGKTDSDPTAIARFVRHKGRKIEHLGLETGSLSQWLHAGLSREGFRVTVMEARHVRAAFAAMRVKTDRNDARGIAQLIRLGWFKAVHVKAPSAQETRTLLNGRRFLVDKLTGIENSMRASLRNFGLKMGHVTRSKWAARARELAVGIPALELVIESLLRVRDALRQELRTIDRQLLDEAKADPVVRMLMTAPGVGAVVALTFKSAVDDPTRFKRVRDVGPWLGLTPSRYQSGRTDIVGHITKAGDAGVRTALYEAATTVLSRVTRWSTIKNWGMRVASRSGAKKARVAIARKLAIVLLTMWRSQTPFRWSATQASA

SEQ ID NO: 397536 - protein, 385 aa, unidentified
MFVGYRVGAACSAYPTVVMEAPVFSERTSVGLDVHARSVAAAAIDGVTGELRQARLTPSHEHIRSWIGDLPGPVAVAYEAGPTGFGLSRALNDSGIRCVVAAPSKLQRPSGDRVKTDARDAVHLARLLRLDEVSAVVVPSVEQEAARDLVRAREDARGDLMRARHRLSKLLLRQGFVYSDGKAWTETHDTWLRRIGRVELVSPATRMTFESDYETTLMVKARRDRLDAAIITMAADSQFSAMVHRLGCLRGIGTLTGFALAVEIGDWDRFTGKTIGSFVGLTPSEYSSGASRVQGEITKTGNSHVRRLLVEAAWHHRPRYVVGQTIRDRWELAPPAARIRGDQGNHRLHGRWVKFNARNKKSVIANVAVARELAGWCWSLAVIDG

SEQ ID NO: 397537 - protein, 362 aa, unidentified
MENIIRQCVGIDCAKDELVCCLSVFTADLSVEVKVNQVFKNNASGIQKLISWAEKNKVKEHDLYFAVEATGVYHQLLAHMLSDQQKLISVILPNMISAHMRSLNLKTITDKSSAAAIADYGVKNKSELWKKPDNVIYRVRNLMREKNQLSEDSVITKNRLHAEQTSINCSEKTVARMNQRLQMIEKQIKEIFKEAAEIIKENKEIQEKISKICTIPGVGLNTALSVVGETFGFSLVKNSRQLVSYAGLDIRVKDSGISVKSKPRISKRGNKNIRKALYFPAISAARYNPNLTALYARLVGRHGIKMKASVALQRKILVLIYTIWKTGKPFDAEYEQRKEKSEDSSLNPPTELVLDRSNETNI

SEQ ID NO: 397538 - protein, 350 aa, unidentified
MVLLGIAPHKDTHTVVVVDQAGRQLDQRTVPARTLEHGRLVGWAWTHWPERLWAVEDCRHVSGRLERDLLAAGERVVRVPPRLMAGARRGLRAPGKSDPIDALAVARAALREPDLPSAGHDQASWEVKLLVDHREQLIAERTRTINRLRWHLHQLDPDLEQATRRLPGPGLDHLTTSLAQAADASSVVQVRICQAQVTAIKILTDQISELEGQLRRRVARLAPSLLGLPGCGPLTAAKLLAETAGVARFRSEACFASHAGVAPVPVSSGRTDRHRLSRGGNRQLNAALHRIAITQLRLPGPGQAYYQRRRAQGDGSGAAIRALKRRIARAVYQRLRVALPPADTLPTAAP

SEQ ID NO: 397539 - protein, 309 aa, unidentified
MEIVVGIDVSKERLDVAILPQEEVFAVGNDHAGIDELVERLKGIGVDAIALEATGGFEMLAVAGLSAAGLTVLVVNPAQVRAYAHAIGRRAKTDPIDAAVIAAFVLATKPEIRPLRDAETQALSELVARRRQIVQMIVAEENRLRMALAKQAQKSIKRLLKALRRELESLDADLDSHIRKSPVWRVREALLTSVPGVGATTARTLLAELPELGSLDRRQIASLAGLAPWTRQSGKWKGKSFIGGGRGKVRAVLFMAALVASRYNPDLKAFRDRLVAAGKPKIVATVATMRKLLTILNAIIRDGRPWQNA

SEQ ID NO: 397540 - protein, 316 aa, unidentified
MTEESVCVGVDVAKSTLDLAVSNSKEARQFQNDHEGIMSAVSYITGLQPTIIILEATGHFEIPLAAALQTNHLPVVIVNPRQVRDFARATGVLAKTDRIDSRILALFGMQINPEVRLLPDQKVRDMESLLSRRRQLIEMLTAEHNRVLQAEAGIRKGIKIHIKWLEKAISAINDDLDSQIRDSPSWREKDDLLKSVPGVGKVVSTTLLIELPELGQLNRRKIAALVGVAPLNRDSGTMRGKRTVWGGRAKLRAVLYMAALVGVRRNPVIASFYERLLKAGKAKKVALVAYMRKLLTILNAMIRSKTVWLEAAMETK

SEQ ID NO: 397541 - protein, 341 aa, unidentified
MNVTPIGIDLAKTVFSIHGTDQHDKVVVRKRLNRPKLLAFFAQLPPCIIGMEACSGAHYWARELTKLGHDARIIAPRFVAPYRKSSKNDDNDAEAICEAVSRPNMRFVPIKTEDQQATLCLHRIRRGLTKERTAQINQIRGLLAEFGLIIPQGRYAARRRVPEILEDAENGLPMRARHLIGNINHRILQLDEEILAYDREIEALARHDEQAKRLMAIPGIGPQTATALLASAHDPRQFKSGRHFAAWLGLVPRQYSTGGKVRLGRITKRGDKYLRTLLIHGTRAVIAKLPDKQDRLSGWARDLVERRGYKRAAVALAAKNARIIWALLMNQTEFKTQPVEG

SEQ ID NO: 397542 - protein, 320 aa, unidentified
MTKKKSQTFIGIDVSKQQLEVAVHQRDYQFRCGNKVSAFGALIAELIDWRPALIVLEATGGLENRVVSALQEASLPVVVVNPRQVRDFAKALGQLAKTDRLDARVLAHFAAAIKPPLRPLKTKEQQELDAFTGRRGQLVEILADEKNRRASAASDIVREQIKEHIDWLEDRIAELDKQIKAQLQTSPHWQVKDQILQSVPGIGPVASFSLLADLPELGTLNRQQISKLVGVAPLNRDSGQQRGTRHIYGGRARLRRVLYMAALTASRHNARLKEFYQRLRANHKPFKVAITACMRKLLAITNVMIRDNTCWKINEAPVSP

SEQ ID NO: 397543 - protein, 428 aa, unidentified
MDFTQNNRLAQINEQTLIIGVDVAKRKHVARAIDDRGRDLAKRLVFHNSLKGFSDLIEWADNLSDEYERPNIIIGMEPSGHYWLNLAYHLKDGGIQVVVVNPMKVKRSKELDDDSPTKNDTKDAKVIAQVVRDGRYHEPTLPEDVYAELREGMKLYDIIQEDMSSVKAQMHNALDRYFPEFLDVFKDWTGKAALHLLERGYLPGAIRETSEEDLLLEVKKVAKRGVGIKRIQDLKQAAEDSVGLTVGLRMGRQEIHYLIDQYKALEERLIALEAQLEELVLHIPGADQMIAIKGVSAITVAGFFAEVGDLSNYRDPRQIIKLAGLNLKMNQSGLFKGQTTITKRRRKRLRSILYQVARPLSLHNEGFKQLHHYYRHRSDNPLTGKQSFIALSRKLIKIFYVLGTRKCTFSEERMIRDIPMISTLQEVA

SEQ ID NO: 397544 - protein, 423 aa, unidentified
MDVLYERVAGLDVHKDTVVACARIVAAGKTTRECRTFATTTEQLVALRAWLEECRCTHVAMEATGVYWMPVFRILDAGKFELIVANAAHIKNVPGRKTDMNDAMWIADLLACGLIQASFVPNEEVQELRALTRTRKQLVREQTRHVQRIEKTLAEANIKLSSVISDIMGASGRRMIQAMIDGVRQPNKLAELAGKQIKATPKELYDALHGRLTDHHRFLLALHLKQWDSIDETIRKIDLEIDQRIGRMEAKAEGNRTPFRALIGLLTTIPGVSAVAAPAILSEIGPDMSRFPTAGHLVAWAGLCPGQNESAGKRKSSRLRKGAPWLKTMLVQCAWAAKRSKDSYYRAQFFRLQAKRGPQKAICAVAASILTAIYHIIKDGTEHQDLGSAYFDRRPLEAKASWLVARLKKLGFTVQLQPIVEVA

SEQ ID NO: 397545 - protein, 427 aa, unidentified
MTKIDYTPDARVLVGIDISKHRHEVLIAALGKTRRRRMTITNTTDDFMRLIAILRDYGQPVRIGFEATGNYHRVLMYHLGVAGFDLKLVSSVALARTREALHNSWDKNDPKDAQVILHMLQIGAVQIFQDPMVVGTNDIQELSKTHDAVSRSKTELWHRILTHYLPLYFPEADRFHRSSRTDWFLAFLEMFPSPHMISAMTKDEFIKAAWEVVGRKVEKSLLLSDIYETAKASAGLPVAPDSDAVRMFRLMLAEGRSLIRQRNAIEDRAVELLAERPDYLLLCTIPGIGPINALTILAETGDLRRFHHHRQFLKFCGMDLATVQSGMFRGRSKISKYGNARLRRTLWLAGQTAVMKKANSFRDKFERYIAQDRHNPDLRRKAYTAIAAKMARTIHAVIKSGEPYRPFFEGTSPGGRTPLCRAVEAGS

SEQ ID NO: 397546 - protein, 400 aa, unidentified
MISVGVDVSKGKSTVCILKPYGEVVSSPFEIHHVEKDMEDLDNLLSKLDGEVRVVMEATGIYHLPIVTFLHDKGYFVSVVNPFAMKKYAKDNSIRGAKTDRLDSIMIANYGIEKWFKLQRYEGTEETYAELKLLGRRYRYYMELHVKALQELTHVLDYVLPGIKKMFNSWNEANGKDKLSDFVERFWHFDLITSMSLEKFTEEYIAWAREKKYHRSRSKAEAVYELASSGISTLSSSTPSTKMLVQEAVSVLRAVDSSLSLILTRMQELAKSLPEYSVVREMGGVGNVLAVKLIAEIGDVRKLHNAKALIAWAGIDPPPYESGQFIGSKRRITKRGSSTLRKVGYEVMRVLKSHSAPKDDAVYNYILKKESEGKSKKHAKIAGLNKFLRIYYARVMEVYQ

SEQ ID NO: 397547 - protein, 424 aa, unidentified
MKYKMQNKQNQLIERISDSHLVVGVDIAQHIHVARAVNFRGIVVGDPLSFENNEDGFHRLKEWINELNRKNNLHSTIVGMEPTGHYWTNLSKWLLNQTIEAVTVNPHLVKRNKENRDNTQSKSDKKDAVVIADMVKNGYYTFIHKTPESFEKLQVLMSNRDVVVKRLVSSVNQINRWVDVVFPELREVFKNVTCKGAIATLRLFPTPGELKSLSPQDIVQGWRSIMKRQPGFQKARLLSELAKESIGSQTAIDAYTFHLSQLLEEYDLASIQLERVENEVTECLNQIPFAMKLLAMKGISKISLSGILGEAGDLSGFAHGNALLRHAGLHLVEASSGKWKGKVVISKRGRSRLRRFLYLATLSLVMNNPEFKDLHYNNIHVKKMKGMKSIMKLIGKLARILVSMARRNESYCPEKVQASTSVAA

SEQ ID NO: 397548 - protein, 359 aa, unidentified
MEQSTSITIGVDLGDRYSQLCVVDADGGIVEEGQVRTEESKLRASFGSRARARVVMEAGTHSPWVSRLLEGLGHEVVVANPRQLRLISQSDRKSDRYDAQVLARLGRVDPALLRPIRHRSAETLADREMLRARDTLVRARTQLVNHVRSAVKVTGGRLPASGTSAFVKKVSPAIPARVRPALEPVLGVITALNEALRHYERELETLADTRHPETACLRQVAGVGVVTSLAYVLTLEDPHRFAKSRSVGAYLGLRPRQHQSGDMDLQMRISKAGDRDLRRLLVQSAHYILGPFGPDTDLKRYGQRLAARGGKSAKKRAVVAVARKLAVLLHRLWVTGEVYEPLRAVARKAESERAEGAAA

SEQ ID NO: 397549 - protein, 433 aa, unidentified
MNASTSTPTTNFAAFIGIDWADKEHEIWLQPTDGSPARRSTLSQNPVAIQEWVSQLRQQFGGQLVALAIELSHGPLLAALLGVEFLVIYPINPKSLARYRQAFRPSGAKDDRSDAELLCEFLRHHYAQLKPWQPEDAQTRLLGGLTQVRRHWVDEVTGAVERVRANLKHYYPVILELFTEGLAQPMVVHFLQRWPNLKSLQAASQSELRKFFYGHNSRSAQLLDARLQLILKAKALTEDPAVLGIYQTDTLVIAELLGVLLKKIKEIQKQIAKLFAAHSDAFIFQSLPGAAQVLGPRLLTACGTQRERFAEAVALAQLSGIAPITVQSGQSEYQMFRFTAPQFMHQTFWEFAKCSIKYCLWAKAFVDQKIHNGMGFNAAVRALAFKWIRIIWRLWQNREAYDETKYLAGLRRAKPALVQPVVTSVSSLDSALL

SEQ ID NO: 397550 - protein, 426 aa, unidentified
MLRPRSFDQIVSSWPRCFCSSATLSWIDRSNSGLNSNNCQSRDDGHPSPPELVTKEESYLMLKQVRYLGIDVSKEKLAVVFGGHYRQFANSKEGHRGLIAWIKKESAKLQVDLQVVCEATGGYQLALCLALQEAGIGVTISNPARIRYFGRSEGRLAKNDPIDAALIERFANARRPPADAPLCREQIALREMVNHRRQLVESLKVLRVQHQQVLSGAVAEQIEDSMVLVQRQLERVEQEIEQMIEANALWKRKLEVLTATKGVGLRTAVMLLVGMPELGTLNRGQCAALAGVAPYDDDSGKFEGRRFIQGGRAEVRSALYMAALSAVRFNPVLKATYERLREAKKPAKLALTAVMRKLLIYLNSQLKKASHACPRAALRLIHNRPASAGCENGPARAPSRRSSRTKRIKAIVGKSRFAAVPGSESP

SEQ ID NO: 397551 - protein, 431 aa, unidentified
MNRSVEFLSVGIDVGADFSLMAFALPSQELLGKPYKIIHSSQRSLNGAVEKIKTLSQKYQLPARVFMESTGIYHYPLYHKMKDAGFDVFVLNPLVTHAGRDLNVRNIHNDKYDSQKIALLGLRPGLKTSLIPSDQVISMKVILREYYAVKKEISMYICRLKNQLRQAFPQFLPLFSKVNGVTAMAILCEYPNPESLLNAGEHAVADFMKSVSHNGPLKVQKKAAALIQAAQDARSFGHWNHGISILIRHYIEMIRLLDVRAKTLLAQAKALLAEQDSKTLAHQTELLQTIPGIGFLSALTLICELGDFSAFKRPKQLFSYFGLDPIVRQSGNYNGTNLKLSKRGSPFARRCIFVIALQSISLNIHKEPKNPVLRTFYEEKCMCKAKMTAIGAVMHKICNLIFAVLRNDAPFVLQTPEQHNAAYLSKTHSVA

SEQ ID NO: 397552 - protein, 367 aa, unidentified
MSHRRGAEEWLEPDEGRLSCPVLRGRRRSNALLLPDQIHGVNARGKVALRKQLKRSQVGTFFAQLAPCVIGMEACGGAHFWARKLTELGHTVKLIAPQFVKPYVKANKNDAADAEAICEAVGRPNMRFVPIKNSEQQALLGMHRARQGFVTERTAQANQIRGLLAEFGLVIPVGIRSIGRKLPEFLEDAENGLSGASRALFARLFEHCRALDRQVEELERAINAWHREDTASQRLQAIPGIGPLTASALVASVGDAKVFHNGRQFAAWLGLVPRQNSSGGKTNLLGISKRGDTYLPTLLIHGARSVLLHLKSHPDQAEGWLARVAHRRNPNIAAVALANKNACTVWTLLAHGRDYQAGYRSANIAAA

SEQ ID NO: 397553 - protein, 445 aa, unidentified
MARKRQKQRLEIVHPRCAGVDIGSREHWVAVDPHSTEQSVRCFTTFTDDLSQLADWLKSLNIEVVAMEATGVYWIPLYELLDSRGFDVYLVNSRATRQVTGRKSDVLDCQWIWQLMSHGLLKGAFRPADEVCALRSFVRQRATQVQEQSRCVAHMQKALTQMNIQLDNVVSDLMGKTGKTILRSIVAGERDPQQLAKLRDGRLRADEATVARSLHGNWRDEHLFALAQALAHYDFLGEQIAACDRQIHQALSELPKLIEEPASQPVKPMRSPHRSAGEQKALHQALHIAMGVDLCAIPTIGLETVLVLASEIGADLSRFPSEKQFCSWLTVAPPTYISGGKPLPGRKPKTFNRAGQALRQAASSARRSESYIGACHRARLVRMDSAKAIKATAHQLARLIYAMLTKGQAYVEQGIAAFEASSRDRQLRALQRKANKFGLVLHEAV

SEQ ID NO: 397554 - protein, 351 aa, unidentified
MDRYIGIDAHSESCTVVVMGPSGKRLRQQVVDTQAAVLIDFLKGVAGDKYVCIEEGQLAEWLVEALMPHVKEMAVVQPPEHNGRKSDLDDAWALAERIRVRAGGTYVFKPTTQYRALREAVRAHVIAVKEQTRAKNRFRSLLRSRGIPELNATIYEPDLRSQWLAKLPLSYRRRAEWLGQQVDATSQALAITEAWLKEEGQKVPEVKKLKTVPGLGDVRAAQIVAIVVTPHRFRTKQQFWSYCGLGIVTRASGEWKRSGNGQWAHVQGKVQMRGLNLNRQPLLKAIFKGAATSVLHRSNHLHEHFNRLVVGGTAPHLARLTIARRIAAATLAIWKNKEEYEPSKHRSIEAA

SEQ ID NO: 397555 - protein, 355 aa, unidentified
MIIIGADYHPGFQQIAFVDTDTGEFQERPLQHREEAEKFYRELAAQGMKVRVGMEASGHARWLERLLAELNFELWIGDAAEIQTKRVRKAKTDREDARLLLRLLLEDRFPRIWVPSWENRDLRQLLWHRHRMVQARTRLMNQLQAVALNEGLRCKKRLWRENGRQQLESFRLAPWASRRRQDLLALLDRLNPTIAELNQAVEQEVERCPAAQRLMTHPGVGALTALAFVLIIGEVERFGCGKQIASYLGLVPLEKSSGNRRRLGHITKQGNSLVRFLLAEAHQVSARSIPEWRGTYVHLVMRRGRKIAKVAMARRLAVRLYWMMRKQWDYEQLKKFGSHAGQPGSGDGVYTTPSN

SEQ ID NO: 397556 - protein, 415 aa, unidentified
MKVVFPTCCGVDVHKTFLVATIITTPADSLQPNYQKKRFSTFNSDLNRCADWLLEHNCLDVCMESTGKYWVPVFNILEKRGIRVVIANPKWVKAVKGNKDDTKDSKWIGDLFRIGLVKSSFIPDLNIRILREFTRYRYKLVSMKSSEKNRFQNAFTVCNVALDSVVSDMFGKSATAITDYLTSDESFDAEHCVSLLQRYLKKKAEQVLESIEGFSIADEQKARIKIIREHHDFIEEMIATVDTRVNEMVAKYEGNINLLCTIPGIDRRSAITIISEIGTDMGQFGSSKRLCCWAGLTPGNNESAGKKKSVRISRAGVYLKPALVQVAHAAVKDNDHPYYKLKYERIAKRRGKKRAIIAIARMILTAVYSMFCTGEVWNPVDLYKVDMPGCLKEQQLAKAIKQATRFLEKQGLSVA

SEQ ID NO: 397557 - protein, 408 aa, unidentified
MNPLFVGIDVSSRSNVAYLMKPDGTKHSSFSVQNNPGGVKILSSRIVSALDGLHLSSVAIGLESTSVYGDHLVYALREDGSLGRFASKIHVLNPKQVRKFKEAYSDLPKNDFVDAFVIADHLRFGRSNREVFMDDYRYKALQTLTRARFYAIQNLAREKQHFANYLFLKCSGLALDKEVKNTSATLLALMERFPSVDDLASADLDDLTDFVSKSGRGRFAEPEEVAKMVQKAARGSYRLPKTVNDSVNQAMSISIASMRALKEQAKSLDKAIAKQFETIPNTLTSIPGIGPVYSAGIIAEIGDVRRFVGHAQVAKYAGLVWTQHQSGEFEAESTRLIKSGNRFLRYYLLEGANSVRRCDSEFRRFYDLKFKEANRFQHKRALALTARKLVRLVFRLLKDNRLYKLPKS

SEQ ID NO: 397558 - protein, 389 aa, unidentified
MIYVGIDVAKDKHDCHIFDSNGAVLCDFFSFPNSKEGFEEFLSLATRLAKNKPEKLKFGLEDTGHYSTNLIHFLSANNLDVVRFNPLSVSRSRAALTLRKTKTDRNDARYIARLLASHTVNYCNKRTLIMHTLKSLTRARYRLVKELQPLKNRYRRLIHLLFPEIQGFFSSLYSSTPINLLALLPGAQPIACCDIRKLTSILKSFSHGRHGKEKAENLKALAKKSIAFHGDGDAFELTLIAKRIMFYQDQIATLESEIINIMKTINSPITTIPGIGYVLGAIILAEIGDIHAFDSPSKLLAFAGCEPSTYQSGKFSATNTPMVKRGSRYLRNALYLATNMAYLHSPVFRVYIDKKRSQGKHFYTAISHGIKKLSRVIFAILSQNSVYCE

SEQ ID NO: 397559 - protein, 379 aa, unidentified
MDANIASIKPWIMEWTHPLLIGLAMGHDVVAKTHQKEDGSTMNITTIGLDIAKSVFHFVGVNRAGKLVKKKMIKRKDLLHVIAQIEPCLIVMEACGGANYWAREFESQGHQVKLIAPQYVVPYRQGNKNDYNDALAIAEAAQRPNMRFVQPKPIEQQDIQMLHRMRERLNKQSTALVNQVRGMLTEYGIVITKGKASFRSALPDILENADNELTTKGRNIFYQLYEEFNGIEEKIKSCDKQVQQEAKSNQVCQRLESIPGVGPVTATAFYAAAGEGKDFNNGRHFSAWCGLVPKQHSSGGKDNLMGFSKRGNAYLRTLFIHGARTVLQHSGNKSDRFSCWAIALSERRGFNTACVAVANKLARMAWVIAAREEEYKLAL

SEQ ID NO: 397560 - protein, 317 aa, unidentified
MNNTEIQTPVNIGIDVGKANLDVAIHPSGQSHSFPNSDAHIRHLVRILKKYDIERIVVEATGRYEHALVSACRQAGLPIIVVNPISVRRYAQVIGVLAKTDRIDAQVIARYAATIKPDFRPAPDKTSQKIKDLLIRRSQLLEMSTMEKNRLQILPKSLHRSIKSLLRMLQSQIETITRQIDQEVAKVDHWRTKAEILTSVPGVGKVLAYTLLSELPELGSLNRKEIAALVGVAPINRDSGKLNGKRRIRGGRHRVRTVMFMAMLSSIQCNPVFKRFYERLKAQGKIPKVALIACMRKMIVVLNTMIKNQESWRGEMA

SEQ ID NO: 397561 - protein, 363 aa, unidentified
MASNPAVPAEQQAGEDVILGVDTHNDVHVAAVITVLGVLLGTQAFPTTAAGYVGLLGWARSHGTLRRAGVEGTSSHGTALTRHLRRERVYVIEINRPDRAARRRRGKTDALDAENAARAVLSGRATAEAKAGDGPAEATRMFKIAKDSANKARTQAINQLRAVLVRAEPELRESLIGLGPVTLFRACADLQDANAPATPAAAVVVLRALARSILSLTDEIKTLNKQLTSALSRCAPKLLERYGVGPDTAAALLITAGDNPERLTSAAAFAALCGVNPVEASSGKTTRHRLNRGGDRRANSALYTIVLTRLGRDQRTRHYANRRIQEGKSTKEIIRCLKRYVAREVFPIIIDALRPAATTAAAT

SEQ ID NO: 397562 - protein, 393 aa, unidentified
MFYLGIDIGKNTHVASLMDEKAKLIFKAHSFSNTSDGATTLLEKIAPYATELEIGMEATGHYWLSLYSFLIDNHFVVHVINPIQTDGWRKGTEIRKRKTDIIDSVLIADFIRYGNFLDTSLADEDTLSLRNLSRFRNYLVSSIGDLKRKTICVLDQIFPEYHCAFSDVFGKTSKELLLQLNSPSDYEDVTSAQLEALLSQVTLKGYAAKKFKDISALAKTSFGITFCVDSFSFQLKLLIEQINFIEKQVSDVESQMSELLKKIKTPITTIPGIGDVIGATILGEVGDIYRFSSGAKLVAYAGIDASVSQSGEYECINNHMSKRGSPYLRKALFRAAFVASNTDPVFKAYYQKKRMEGKHHNVAVGAVARKLCYTIYAVLKNNVPYEVQYPRES

SEQ ID NO: 397563 - protein, 343 aa, unidentified
MQVSTIGVDLAKNVFQVHGVDSSGKVVITRQLRRKQVIEFFSKIPPCLVGMEACGTAHHWAREVSKLGHAVRLMPPSYVKGYVKRSKNDAADAAAICEAVTRPSMRFVPIKSADQQALLMLHRTRDLLIRQRTQLINALRAHLAEFGLVAETGREGLAQLAAIIADESNREALPSAMKQALQAIVDQLAALELQVGALDRAIHVHHRANDMSCRLETVPGIGVIGATAIASTVTDPSVFKSGRDFAAWIGLVPRQHSTGGKERLGGISKQGDRYLRRLLVIGATAVVQHARRHPQKHPWIIRLLARKPAKLVAVAVANKMARIAWAIMAKGGHYRAPELAAAT

SEQ ID NO: 397564 - protein, 410 aa, unidentified
MNTKKICFVGVDTHKFNHTAAIINDTFTLLGIVETQALPSCYPKFIKQIQIKAPGARLIFGLEDVRGMGASLFGFLKSRHLDTREINPVETKRERSHSLHPDKSDPDDALHIARVLGQRWKTLPHIHHEPLILALQQINRQRDDLVHQLISAKNRLHAALHQIYPGYQQFFPTPFHHGALAFWKHYPNPARLKEVDEPTLTSFMRNRFPPLKAQKIAQTILERVPEKNIAEPVKLACETVIPSLVDAVENLQNNINAIEPTIEHILQQTPYKLHTMQGVGIVSAAQIVAQVAPIERFASASKLARFIGIAPRKWGSAKYMRYRSSLRGRRSLNQTFYLIALSQIALNRNGKPRCPRARSYYLKKIKDGKSKTVALKCLQRRIVDIVYAMMKSKTPYNPEMSKNNKTVYLL

SEQ ID NO: 397565 - protein, 352 aa, unidentified
MSEIVNHFLLTKNKSMNYKHFIGIDVSKSWLDFTLMREHEVLFHQRTQNNLEGIKDFFKELKKNRGVVLTNTLVCMEHTGIYNTFLLNYLNKIQANVCLESGIQIKQSSGLKRGKNDKVDSERIAAYAYRHRAELKLWESKRDALNQLKKLTTLRNRLINVLKQLKTPMKESRAFINRKDQNKVTKLCESSIKSLESDLKKVNQSIKAIIVSDAELNRLFNIVTSVTGIGPVTATEIIITTNEFKSITCPKKYACYSGVAPFEHQSGSSIRGKTRVSSMGNKNVKKLLHLAALSASICSGDMKNYFERKVQSGKNKMLVLNAIRNKIISRVFCCVRENKLYEKNYSNGLVCP

SEQ ID NO: 397566 - protein, 349 aa, unidentified
MQHVAIDLGGLESQICIREPDGSLLLERKIKTAAIKRFLTDRPKSRVIVETCAEAFRVADGALALGHEVRVVPATLVRQLGVGCHGVKTDQRDAQALSEVSCRIDLPSVHIRSEQARTWKSLLGTRLGLIQARTQLINTVRGWLRTQTLTLRRGGTSTFPERVRAKLLDKPEGMPTFIERQLSVVEDINRQIKEADTDIVALVKDHPVCRRLMTVPGVGPITAAQFHATIDDVTRFPSAHQVESYLGLTAGERSSSQTKRRTGITKAGSAEVRRVLNEACWCISRQRPHDPLAVWGRLVAERRGKWAANVAMCRKLAGILFAIWRDGTTYDASKVSRLVSGTWEPKQPA

SEQ ID NO: 397567 - protein, 469 aa, unidentified
MDKEHFKFSEDLTKNLYYCGMDVHKYEITASIYARDRSNTEFVKTEVFQTDLQGLTQFFGFVRKYRPLIFAMEATGIYHHSIVQFLEEQRKIAKWGYEIIVSNPADAAGLPGTKKHDKIDSIKLAKYAAAGLLRNGKKIIFVLEDLKAIFRMATKLEKERTMLKNRIKKTLDRAGIRPKGFNINLEWVRTLLYRFVQSSKSLGEITQQCVGDSTIATSLRTSLSKNLERLAPYFKLTLTSVQKAIIRQHLVDLDFKTSRKIILAVEVDRLLLDCPGLRQQAYQLSTIPGISAFSAVWILAEIGSIHYFSSWKKFRSYCGCCPNVISSAGKVYSAHTNRHSNKYLRTLFYNAAVVLCNFVRKESDLKAYATRTSVRKGNRSMKLAYCIIAGKIAKVAYATLRDKTTFSQKAPYSSVCLDRGFNTVELKEIRRARNLLQRVGRLKNLGLLGEDALNLAKGLDQALGKNFEG

SEQ ID NO: 397568 - protein, 459 aa, unidentified
MSQRRKKPKRAGQGGAVPSLSCIEPNAAGIDIGATEIFVAVPQGRDPSPVRSFETFTEDLHRLKSWLQQCGITTVAMESTGVYWIPLFQILEKAGMEVCLVNAQHVKHVPGRKSDVIDCQWLQYLHSVGLLRASFRPEERICAIRSLLRHRDSLVQMAAAHVQHMQKALTQMNLQLHHVLSDITGQSGLAILDAILAGERNPAVLAQLRHARVQASEEIITKSLVGDYQREHLFTLRQSLQAYRYYQSLITACDQEIAEQLQNLDSRTPPDASPLPPERYPHRPRKNEFRFDMRSELYRIYGTDLTAIPSINALTGYTVLAEVGTDWSKFRNGDAFASWTCLCPQNKKSGGKILSAHTRRSANRVNRALRLAAQTLERSTSYLGAYYRKMRARHGAPAAITAAAHKLARIIFHLVTTGEAYDESLFAAEEQRQRKRMENKLKRSAQQLGYQLIPLGQTA

SEQ ID NO: 397569 - protein, 348 aa, unidentified
MRTEYFITMDTHCRTTDVCVETAKGKLVRRERLSTGIPQIRGLIESVPRPRRVAFEEGAMAGWLFRNLKGCADELIVCDPRRNALVAKDGDKDDPIDAEKLNDLYRSGHLRQVHQLDGSEKAAAKQVIGMYHDRVAHRVAEGNQLLALCRRWGVMASRSRLTEPDGRDWLEARLAEGGAPRQVVDMAADQFKSLERAVEQEQSLYKQVCRMAKSDPMMSRACELPGYGPVRAATLVAYLDTPFRFKGKSALWKYVGVGLRREKSGGGSEFTCVEQACNRLLRCVVIGAAQCAIEQKDNVFARRYAHRVAAGQSKRNARRGVARDQVTALWGMWKSDKAFDAKRVRDPS

SEQ ID NO: 397570 - protein, 460 aa, unidentified
MRKRSQSLENLAVIHPNAAGLDIGAREIWACVPPGRDPESVKRFSTFTPDLQVLVDWVVACGADTVAMESTGVYWIPVFEMLEARGLKVYLVNAWHLKHVPGRKSDYLDCQWIQKLHSLGLLNGSFRPDGEMVALRGYLRHRAQLLEHRAPHVLHMQKALHQMNLQLHHVLSDVTGVTGLAILRALVAGERDPVKLAQLRNPGCKSSEDTIAKALTGDWKAEQLFVLKQSLEVYDFYTRQVAECDAEIERQSAAMKPRWEGVKELPDVPPLKPGSKSKNQPKLNVRAAIIRLTGVDLVAVEGISASLAQTILSEIGTDMSKWLNDKHFGSWLGLAPHNDISGGKVLRSRTLKTDNRAGQAFRQAAASVTRSNSAFGAFYRRKRAQLGPMQALVATAHKIARTVYYMLKNRVQYVDIGAEAYEQKQREREIIYLKKKAAKLGFDLSPHDPAKAVAQAVAMV

SEQ ID NO: 397571 - protein, 454 aa, unidentified
MTKKRQPQVKVQWDVLEQINQNAAGIDIGAEEVWVAVPPERDEESVRVFPTFTADLISLAEWLAACGIETVAMEATGVYWIPLFEILEVHGFVVYLVNARHLKNVSGRKSDALDCQWIQQLHTYGLLNPSFRPPEEIVALRSLVRHREMLVQYRAAHIQHMQKALTQMNLRLTSVLSDITGVTGLKIIRAIVAGERDGHKLAQFRDERCKKSEAEIAKSLEGHYKREHLFALQQALELYDFYDRQLHACDLELEAMYQEFEPPEDPSSPPPQPRTQKRRKNQAHFDLRQALYRLSGLDLTEIDGIDALTLQKVLSETGTDMSKWPTVKHFTSWLHLCPNNKITGGKVKQRGVQPTQNRASTALRVAAASLKSSDSALGAYYRRMRARLGTPAAITATAHKLARILYHLLKYRQPYHDFGADHYEQQYRARVLRNLNRRAAKLGFRLQPLAQQVS

SEQ ID NO: 397572 - protein, 340 aa, unidentified
MNKTTQFFIGVDVSKPYFDATLLSVINHVKQDMITERFDNNNVGLKSFAKWLKIHQVTFDENTLLVIENTGIYHRALWLFCSKHNLAIHIGNAMHIKNSFGIARGKNDKIDSQRLCNYARKEWEDLKAVPALNPVLMQLKDLMSARTKLLSQLNSTQTYIKELKDVRINAIQKTIETAHQKAIEGMRASIKHLEQEIKKIIIQNKDLKTNYDLLITVPSIGHLTAVYMICCTNNFVSKISGKQLACYAGVVPFCNESGISVKRKNKVHHMANKDLKKMLHLCALTAIQHYPEFRQYYERKKAEGKHSMSVLNAIRNKIVLRAVAVINNQKPYVDNFKIVA

SEQ ID NO: 397573 - protein, 272 aa, unidentified
MKDSIGIDISKAHLDVYHPGTGTSARFSNNPAGFKAVTRFIGTKQPDLVVYEATGPYHAALEHAFGGHLPLVKVNPLQARRFAQACGTRAKTDVVDARLLARMGSALDLCPDTPQHENQHDLKQLQTARTALIKESTRLKNRLHTQTLAIIRRQTTTRLGLVKRQLKALDNEIARMLAACPKRARAHAIVRSIPGIGPIAAAAVLIECPEIGTLHRKQAASLAGLAPMVRQSGIWTGKAFSRQDANTCATRSICRHSWQPGSIRICASFTRE

SEQ ID NO: 397574 - protein, 402 aa, unidentified
MNCVGIDVSKGKSMIAVMRPFGEVVVSPFEVLHTDSELSELARLLKSLDGETRVVMEATGNYHAPVAWLLHDAGLYVSVVNAMLVHDYGNNSLRRAKTDKKDAVKLANYGLDHWLTLPRYVPDEDTRLMLKTCYRQYQQYSKVQTMLKNNLISLLDTTFPDANRLFASPPRADGSEKWVDFVDAFWHCECVCGLSEKTFITRYQKWCRKHGYNFNENKALDIYASACGHFGVMPKTDTTKLLVEQAISQLQATSAALAALKQEMQSLAASLPEYPVVMEMFGVGPTLGPQLIAEIGDVRRFHSKKALVAFAGIDAPPYQSGQIDVRSRSISKRGSASLRRTLFLVMGVLLQCAPMDEPVYQFMNKKRSEGKPYRVYMMASANKFLRIYYASVKTYLDSLEHN

SEQ ID NO: 397575 - protein, 310 aa, unidentified
MDAFVVGIDVSKDRLDVHVAPDGKAFFVANDAAGIEALAGRLCGMAVKLVALEATGGFERLAAAALSAAGLPVAVVNPAQVRSFADALGKRAKTDPIDAAVIARFAAASGVEARPLPDAQGRLLADLVARRRQIMTMLVAEEARLKRAAERELKKSITRLIAALRRELDSLDESLDALIRKSPLWRIKEDLLVSVPGIGKRIARTLIADLPELGRLGGKEIASLAGLAPFTRQSGTWRGKSFIGGGRTHVRAALFMGALVAARRNPVLKAFRDRLVMAGKPKMVAIIAVARKLLTILNAIIRDQKPWQPT

SEQ ID NO: 397576 - protein, 398 aa, unidentified
MTESSDYESVQVFIGVDVGKDTHHAVAINRSGKRLFDKALPNDENKLRSLISDLKQHGQILLVVDQPATIGALPVAVARSEGVLVGYLPGLAMRRIADLHAGEAKTDARDAAIIAEAARTLPHALRTLKLADEQIAELSMLCGFDDDLAAQTTQASNRIRGLLTQIHPALERVLGPRLEHPAVLALLQRYPSPEKLASLGEKKLAAQLCKLAPRLGKRLAADIAQALAEQTVVVPGTNAAAVVLPRLALQLITLRKQRDEVALEVEQRVLAHPLYPVLTSMPGVGVRTAARLLTEVACRAFASAAHLAAYAGLAPVTRRSGSSIRGEHPSRRGNKALKRALFLSAFAALRDPLSRAYYTRKMSQGKRHNQALIALARRRCDVLFAMMRDGTFYTPQGS

SEQ ID NO: 397577 - protein, 339 aa, unidentified
MYYSGIDQHKRNSFITTYDSKGTVVKQMRVSNNPLLIQNYFAQFPGPHKAVVESTGSWYWLADLLQQHDVELTLAHATRLKAISAAKVKTDKVDSNIMALLLRADLIPEAHMISSDKRGPRDIMRTRLRLISKCAGCKNSIERLLEKFNVTTITELDDLYQLQARAHEDQIALMEQQIHKIECTLHPSLIPNEDIQRLLWIPGIGKVNAFTIYTEIDDIERFPSVNQFFSYCRLVPGADNSAGKNRHRSGSKAGNCYLKLAFSHAGVRAVQYYPEIKAFYKAKLRRKPERIARTLVSLEIARIVYQVLKTRKDFNGRFKNQQLSRTKQSQWPRLASPAA

SEQ ID NO: 397578 - protein, 305 aa, unidentified
MRNIGIDVAKLTLAVFVPECGGFEVNNNKDGFREILSKLNLDDVVGVESTGNYHHELAKFFLTKGIEVRELNPILTKQFIRATIRGRKTDKTDAEIIAKLLDNGEGHCMTLENIDNKLKKLFRARTKLVQKRASIKLQLQVVKPDMKIIVRSYKKLIKSFDIEVQKIEEEMNKFESKETEILESIPGISTKLARGILAEIGDIKRFDNKKKLVAFAGYDPKLTESGTSMHRTGKLTKRGSSHLRHALYLAAFANIRSKNVFADYYGKKKSEGKHHFKAITATSRKILEIIYALLQKGEKFRLDFS

SEQ ID NO: 397579 - protein, 341 aa, unidentified
MGQASTIGLDIAKHVFQAHGADTSGAVLFRKRLRRAQVLAFFAAQPPCVVAMEACGGAHHWGREIGRLGHTVRLIPPAYVKPFVKRQKNDAADAEAICEAAQRPTMRFVAVKDEEAQAAALVFRTRDLLVRQRTQVINALRGHFSEFGIVAAKGPQHAASLAALVEGPASVLPAAARTVLAMLAGELRRLDERIGDLDREIMQRAKADEAARRLMTIPGIGPVTATALLALAPSAATFRRGRDFAAWLGLTPLQRSSGGKERLGRTSRMGERTLRRLLIIGASAVARWAAHNGVSPGSWLGRMLSRKPPMLVRVALANKMARTVWALLAHGGVYRVPAAAA

SEQ ID NO: 397580 - protein, 346 aa, unidentified
MGMDIAVLGVDLGKNICSVVGLDGSGAVVMRRKVRRETLIALAEKLPTCIVGMEACCGAHHLGRVFAAHGHDVRLMSPEYVRPYIKAQKNDDRDAEGIAEAATRPTMRFVELKSQDQLDMQSLHRSRDRLVGERTALINQLRAILLERGMVAPQGKRKLEQFLAVLMDEQGGEGLSPRMTLLVADARAQWAELDRRITAFDAEFVRWVKDNQEARRLMTIPGIGAIVASALVAAVGRAESFDRGRDLAAWLGLVPRQFTTGGKPKLLGISKRGNKYLRRQLIHGARAALPYVAERDTPLGRWAKVLMSRAHRNVAIVAFANKLARIAWAVLQRGERFAATGMSMTA

SEQ ID NO: 397581 - protein, 342 aa, unidentified
MSVYVGIDVHRKRSQVAVINQDGQVLANRNVPNGAEPILKVIGGLPPGTPAAFEAACGTSWLVGLLEDYGFAPHLVHPSRCKAIASARLKNDKVDAAILGQLLRADLLPEAWIAPAPVRQLRALLRHRVALVRLRTRLRNRIHAIVADYGYDRPGGGYRTGPGRAWLASLELPAVSRELVEDYLGVIDALQQRIDRLDWEIRQRARAGPRVKVLTRLPGVGPFTALVILAEVGDISRFGSARQLASWAGLTPTVRGSDRVAHYGHISKEGSVWLRWVLCEAAQTAKRSPEFAVTFQRIAKRRGKKIATTAVARKLATRAWHLLADAGHAAAPPPAAPQTAAR

SEQ ID NO: 397582 - protein, 338 aa, unidentified
MNIVFLGIDLAKNVFQLCGLNQAGKPVYTKRTGRKELLQTLANIPAYLIGIEASTGAFYWQREFEKLGHKVKVISPQYVKPFVRGQKNDGNDAQAIAVALMQPTMQFVPPKSPEQQDIQALHRARQRIVNHRTATVCQIRGLLLDRGIPIGSAVSRARRAIPLILEDAENGLSSRMRRTIAELYDLFNDLGRRIHFFDKEIETVFRQSEACQRIAKVKGIGPETATAVVAAIGKGTEFKNGRHFAAWLGLVPRQHSSGDRQVLMNMTKKGDKHLRTLFIHGARAVVRVATNNNDGHMNQWVNQLKERCGFNKTTVAVANKNARIIWSMLRNETGYQVV

SEQ ID NO: 397583 - protein, 410 aa, unidentified
MKKMQFEQVYRNGCGLDVHKETVVATVMGDGIKTETRTFSTFTSSLTEMGKWLEQLGIENCAMESTGVYWKPILNILSEYVPHVMLVNARHIKNVPGHKTDKKDSEWICKLLISGLLKGSFIPEEKIRQLRDLTRYKTKLVQEQASEKNRIQRILEDANIKLTCVLSDITGVVATKLIDGLIAGRKDIEKLINEHYHGKLSASRQEIKEALTGRLTAHHIFMLKQMKKHIQKLEEQIEEIDKEIEQRVEPFQKEVELLQTIPGVGKEGALKILSEISPDMSNFPDEHHLASWAGMCPGNNETAGKKKSSRTRHGNKNLKAILVECGWAASRTKGTYIRAKYDKLAYRKGKKKALIAIGHIILCAAYHIINKKEPFSELGFEYLEERLKKKRFEYYTRKLAEMGYKVEKSA

SEQ ID NO: 397584 - protein, 351 aa, unidentified
MQVSTIGVDLAKNVFQVHGVDSVGKVVITRQLRRKQVIDFFSKIPACLVGMEACGTAHHWAREISKLGHTVRLMPPSYVKGYVKRSKNDAADAAAICEAVTRPSMRFVPIKSADQQALLMLHRTRDLLIRQRTQLINALRAHLAEFGLVAETGREGLAQLAEIITDESNREALPSAMKQALQAIVDQLAALELPIGALDRAIHAHHRANDMSCRIETVPGIGVIAATAIASTVTDPSNFKSGRDFAAWIGLVPRQHSTGGKERLGGISKQGDRYLRRLLVIGATAVVQHARRHPQKHPWIIRLLARKPAKLVAVAVANKMARIAWAIMARGGYYRAPELAAVTSRGSAMGA

SEQ ID NO: 397585 - protein, 326 aa, unidentified
MNIVFLGIDLAKNVFQLCGLNQAGKPVYTKRPGRKELLQTLANIPACLIGIEASTGAFYWQREFEKLGHKVKVISPQYVKPFVRGQKNDGNDAQAIAVALMQPTMQFVPPKSPEQQDIQALHRARQRIVNHRTATVCQIRGLLLDRGIPIGSAVSRARRAIPLIPEDAENGLSSRMRRTIAELYDLFNDLGRRIHFFDKEIETVFRQSEACQRITKVKGIDPETATAVVAAIGKGTEFKNGRHFAAWLGLVLRQHSSGDKHLRTLFIHGARAVVRVATNNNDGHMNQWVNQLKERRGFNKTTVAVANKNARIIWSMLRNDTEYQVV

SEQ ID NO: 397586 - protein, 359 aa, unidentified
MTSMIPVASHRRVVIGVDTHKYIHVAVALDDIGSVLQARSFGADRAGYDQLLHRAASLGGKLTFAIEGTGSYGAGLTCAVRRRDIGVIEVIRTDRRDRRLRGKSDTLDAENAARAVLAGHATAIPKTADGTVEMIRTVKVAKDVTVKARTSAMITLKQVLVNAPPELREELQPLTKMVLLRRCAAMRPGPVTTITAAAKHTLRAIARRWLDLDTEITTHEKLLDTLTTAAAPDLTAAFGVGPDTAAEMLIVAGDNPDRIRSEPAFARLCGVAPIPASCGMTTRHRLNRGGHRQANAALYRVVIVRMQHHQPTKVYVARRTAEGKTKAEIIRCLKRLLARELWAAMRPLRVTPQRTAAAA

SEQ ID NO: 397587 - protein, 337 aa, unidentified
MAEVHVLAIDLAKRSFQVSGTARGGAVLFNRTVSRSKLEQLLRGQTPCIVAMESCATGHYWGRVAHAFGHEVRLIPPIYVKPFVKRQKNDAADATAIAEAALRPNMHCVTVKSAEHQARAVAFRTHQCFVTRRTQLINSLRRHLAEFGIVVAKGPANLKSLMEMMDDATVDLPETARDIVRLYLEQIELLTHKVDELTLRLRDAVRETVEMRRLCTVPGVGPITAGAVLAFAPDLRAFSSGRNFAAWLGLVPRQHSTGGKARLGSVSKMGQHDIRKLLIVGAMSRIRWIVRKGVLPDNWLGRILGRKPRMVAAVALANKMARIIWDMMTHEQNYRMA

SEQ ID NO: 397588 - protein, 358 aa, unidentified
MRIIGCDLHARQQTIAMLDTDTGELEEKTLEHEGETVREFYSALRGPILVGIEATGSMQWFLELMEELGIECRVGHPAKIRKAETRKQKHDRRDARLLLTLLAENRFPTIWMPSTEQRDLRTLLRHRHQWVRMRSRVQHTLQSMALNHGFRRGHALWSQANQHALRALPLAPHASERRAALLTLYPRLQGSIEELDKEVCEEVQQHPQARRLLTHPGVGPITALATEVFLGDPKRFIDGKALASYIGMIPSEHSSGRRQRLGAMSKQGNTLLRYLWCEAAMHAVERDPELKRFYRRKLVQKGLGKARVAAARKLGIRLWIMMRDQIDYEEFCRRGKARQESGRVRAGMPAINSGPAQQ

SEQ ID NO: 397589 - protein, 326 aa, unidentified
MQGKEASEQETKAKSSVGIDVSKCWLDVHVAPGGEQRRFANDCTGIRQLKRWLLRHDIALVAIEATGKWHRQLHRSLVTSAIPVAIVDPYRVRKFAQAQGQLAKTDRLDARLLAAFAAIMKPAERPPAPQSMAELAELVVARASAVEALTALKNQLSSAECSFLKHHLDARIGRAGEDIAVLDTEILNRIKADDGLARRYAILTSVPSFGFAVAATLIACLAEIGSTNTKQIALLAGLAPIADQSGKREGVRVIWGGRSAVRRILYLAALSATRCNADMKAFYARLRTAGKAPKVALIAVARKLVILANTLLREDRTWQPTVVKYA

SEQ ID NO: 397590 - protein, 388 aa, unidentified
MHTIDQPVQPSAIRTDLGAIFVSLELSHSTWLITSLSAGNGEKMSKHSVSAGSHTELFARFAQLQERSRMRTGHSHPIIVIQEAGLDGFWLHRILEREGIESHVVDPASIATSRRSRRAKTDRLDGETLVRTLLAYRRREPRVCAMVKAPSPEEEDRRRVCRERKALTVERVGHVNRIKGLLFSQGITDYEPVRRDRRARLEKLRTGDGRELPTYLTAQLCRELDRLELVLEQIKMVEAERDALIAAQSAMIKPSPVTMLLDIKGIGAECAAILWSEGLFRHFDNRRQLAAYAGLAPTPWRSGTINREQGISKAGNPRLRTTLIQVAWLWLRHQPKSVLTQWFEERVKHNNGRFKKSTIVALARKLLVALWKYVTTGVVIPGVVMKTA

SEQ ID NO: 397591 - protein, 493 aa, unidentified
MKTAPSSLPAKRRARNARKLKQQAKTATIATPVRSLDELTPVHRRAAGIDVGSAENYAAIPAEGLAAGESPVRVFGVFSQEQDALVEWLRAHQITTVAMEATGIYWLTLYDKLEAAGIEVYLVDPHGVRAVPGRKSDWLDCQWLQKLHTYGLLQRAFRPDPPIRRLRTLTRQRAELVICGGVHLQHMGKVLTAMNLHLHLVVSDLHGETALRIIEAILAGERDPKTLVKLRDPRCHKSTLAEMEAGLKGAYDDENLFVLEQSYQGWKFYQQQLTHCDKRIEKVLAVLPTAKAVTLEAPPKPVVTPSAPKRGRKKQINRGPNAAAVDFSQALKRISGVDLIQVCGLNLLTVLMLLGEIGTDMSRWRNARAFASWLGLCPGAKISGGKVLSRRTRKVNNRASTLLRLAAWGAGKTDTWLGRFYRRIRARRGAPKAVTATARKLACVIYHMMKHGDEFVFLDTTQYEARARDHRLHRLRKEAQKLGFQLTELQQVA

SEQ ID NO: 397592 - protein, 359 aa, unidentified
MASVSIAHDPAAGVTVGVDTHGEVHVAAAFTSDLGRPLGHLEIPTTPAGYGRLLRWAQAFGDETPCFGVEGTGAYGAGLARHLRRAGCTVIEINRPNRQTRHARGKSDPIDADAAARAVLSGEASSVPKSDEDRVSMIRTLRVARRSAVQSTTQISNQVKGLIVTAPAELREQLRLLSGHDLIETLAGLRPGSITTPTAAAKMALRVLARRHQHLGDEIATLNVELERLTQEVAPELCALKGIGPDVAGALLVAAGDNPERLRSEASFAHLCGVAPLPASSGKTTGRHRLNRGGNRQANNALWRIVIGRLRWHQPTKDYVARRTAEGLSKKEIIRCLKRYVAREVFRLIVAKPELARAA

SEQ ID NO: 397593 - protein, 461 aa, unidentified
MRKARRWRRKPGKKIVDVTAGLEVLRPHAAGIDVGNAEHYVAVPPGRSDPSVQTFGSFTADLHRLAQWLQACHIESVVMQATGVYWMGLYQVLESHGFQVYVVNAKYTQTLPGRKTDVLECQWLQKLHTYGLLNNSFLPPEEIRVLRTYLRQRENLVAAAGTCIQQMQKVLTEMNVQLANVLSDLSGTTGMAIVQAILEGQRDPQRLAALADPRVQASRKEIAQSLEGPWREDLLFVLQQVHDLYFTYLESITACDRRIEAHLKTLEAKADLAAQPLPPMPRLPRRKHIPQTQLREELYRVTGVDLTRIDGIHVQTAQVVISEVGVDMTRWPDEHHFASWLGLCPNNRITGGKVIRRGTKKVLNRAATALRLAAQSLHRSKSYLGAKYRRLRARLDGPVAITAMAHLLARLIYRLLRYGTQYHDKGVEHYERKYRETQIKSLKKQAALLNMQLIPAPGVSK

SEQ ID NO: 397594 - protein, 345 aa, unidentified
MSIVGGLDIHRKQITFDYLDTATGEVQRGQITPADRAHLAAWLARRFRGGQDADFALEGGTGWRYVAEELAAAGIGAHVGEPADTAALRGLKKHAKTDRTDSRHLRQVLADGRLPECWIPPSHILECRALLELYHDLRTGHTRWLQRIHAVLFHQGARRLDDGLRTTDGLAALRAIAAEQLSPAGQAQVATALDMLAALDGHLDTVRCALLDAARHLTGARVLTARLYGVGPVTALALTCWLGGAGRFSSARKAVRFAGLDITVYSSAGKRSPGHLSRQGPEVLRWCVYEAGKTHARASAPDHAYYAQVKDRIDGKRAAISEARKIIRQACHVLSELGDDALTTT

SEQ ID NO: 397595 - protein, 317 aa, unidentified
MSKHNTVCAGIDTGKYKLDVAIDESADQLQVDNSPAGYRCLSAWLRQRRVERIGIEASGGYEQAVVSFLRADGFVVIVFQPVQVRAYAKFVLQHAKNDNIDAVLIARCTAAATDIHEPPDARLAPLAQRLTMIEQLTQDVAQVKTRREACWDQRIREFWKQEIDRFKRLLQAELKQLVAAIREHRDLSTRLDLIASVDGIGLRTAVAILVRMPEIGRVSREQAAAIAGLAPYDDDSGQRRGLRHIKGGRQRLRQSLYAATLPAAFYWNTQLKALYKRLIAAGKTHKLVLVACARKLLIFVNTVVARGTPWKSAPATT

SEQ ID NO: 397596 - protein, 384 aa, unidentified
MNNHSIIFIGLDTHKIFTQLAVLKDERGAKPESLGKINTNKSAFIKLARQLQSKYPKATLHFIYEAGPCGYWIYRLLTSLGHCCYIIAPSLIPKKPGDKVKTDKRDAAKLAKLFKAEELTTIYVPEAEDEAIRDLSRARETAMNDLKGAKFQLKGLFLRNNIKCDVKDNWSNQHLRWLTELVLPHPSQQIVLQEMIQTITERTKRVARLVNELEHQIKKWRYYPVIKAIQAMRGVRMLVAVGTIAELGDLRRFDHPRKLMAYLGLVPSEHSSGDKRKLGKITKCGNGRARRLLIEGAQTYKHKANISTELQKRQEGLSKEIVDIAWQAQLRLCRRYQRLMQKGKHRNVVVTAIAREMIAYIWAISREVVVSPIDPKTRISRVPA

SEQ ID NO: 397597 - protein, 450 aa, unidentified
MSKPRPQVIEDEEHQRVFERVAAIDVAKASGMVCVRLPGRDGRPRASKVWEVPAVTSAVTELGRRLLSDRVQMVTLEATSDYWRIFYYLLEALGLAVQLVSPAQARQLKGRPKTDKHDAMWLARLTEWGMLRPCFVPPAPVRALRDYTRARTDYVRERTRCYQRLEKLLEGALIKLSSVASKLTTESAKDMVRALIAGERDPHVLAGLARTRMKAKHDALVEALTGMFDAHHGELAQLELDQVKFLDQNITQLEARIRDTLAAIPEAQGVDADGTTGPAAGTGPDAPVLPAAARLAEIPGISPDLAATIIAETGLDMTRFPTAAHLVSWAGLCPAANQSGPRVRAGKKKHGNAYLRGALGQAALGAARTGTFLGERYRRVARRRGKAKAQVAVARSILTIIWHLLADPAARYTDLGPDYVASRTDRDKKIRNHVRQLQALGLQVTLTPAA

SEQ ID NO: 397598 - protein, 514 aa, unidentified
MSEGTAQPPFSRLCPRLLRKHSAWLIRHIPLTQKFHPQPLAPARMADWVHAHYARVRSPYAAQDKPFASDFTNPYRNGGDIMVKINYMSTLFVGIDVSSKTNSVYAMDFEENKYLSTSFGNNQPGADELVNRIAACMQKHKNLDTLLIVLESTSVYSVHISNFLASSEVLMPYKPYVFCVNPKTTANYRKSYIGMEKTDPTDAYLIADFGRVGRTKKLEPWRGGQFIALKRLTRHRMHLSECITREKTYMVSNLYLKFSELQLLEGDDKPFGNLYGATSSAVLTEFLSPQEIIDMPEEDLLAFLAQKSRNRISDLSKTSELLRKAARDSYRLDKCMYEPLNISLASSFNCIQAYQKEIRLIEQAIDKCIKGMNTNALIILQSIPGIGPVWASGILSEIGDITAFHSSDALAKYAGLYWPKGDSGDFISEDNQMSKAGNPYLRYYLGEAANSVRKHIPEYADFYARKYAEVSKHQHKRALALTSRKFVRLVFGLLAKNQLYTGEKLDAEYNIEPN

SEQ ID NO: 397599 - protein, 311 aa, unidentified
MHDTIGIDVSKDWLDAFCMANREHRQFANDDRGFRALHQWIRINGSSLIVFEASGVYHRALENSLSAASVPYSKVNPRQARRFAEATGKIAKTDKVDAAVLARMGAVLELAPQAPKAEYLNILREMMTARRGLIKDRVTVRTRMQTTTQTLLKRHLKERLAQVEKHLEQIDHTIMELVTQDEQLLARFEILTSIPGISKVTAFSMLIEMPELGTMSGKQAACLAGLAPISRQSGRWQGKERIQGGRAFFRRAMYMPALCTIRHNLSSKKKYDQLIQAGKPPKVALTAIMRKLVVTANALLRDQRNWSENRA

SEQ ID NO: 397600 - protein, 426 aa, unidentified
MKMNQTDQTKVEFAAFIGLDWADQSHLVCARAAGSKTVEPSEVKHDPKALAAWVSSLQQRFGGRPIAIALEQSRGALVHALMGYDFLVLFPVNPKTLAKYREALRPAGAKDDPGDAELLLELVVMHRDRLRAWVPDDEQTRMLALLVEYRRDLVKAQTRLSNRLKSLLKGYYPQALGWAGKLTTTQACDFLERWPTLADVQRAGVDELREFYAVHRCRRDELIAQRVAEISLAQPLTRDLAVITASLMMVKATVTQLRVVSEAVDRFQRQIEELFLQHPDHDLFQSFPGAGAALAPRLLTAIGTDRERFTAACEMQQFSGIAPVTKRSGQSCLVHWRWACPKFVRQSFHEFAAQSIHWSGWAKAFYTQQRQRGKGHHAAVRSLAFKWIRIIYRCWQQRTPYCEETYCEALVRRKSPLARMLLETAE

SEQ ID NO: 397601 - protein, 359 aa, unidentified
MPTAADSAEAPTAIQTNLAAIFVSLELSRSVWLITSLSPGSGGKMSKHSVPAGDVAALLARFAELKQKTLARTGQSFPIVSIQEAGLDGFWLHRVLESEGIESHVVDPASIATSRRRRRAKTDRIDGEALLRALLAYKRGEPRVCVMVKAPTPEEEDRRRLSRERKVLVAERVEHVNRIKGLLFSQGVSGYEPLRRDRRKRLDELMTGDGRALPAHLKTQISRELDRLELLLDHIKAVEGERNALLAEQQATAPPTVAAGKMLLDFKGIGPEFAAILWLEAFFRHFDNRRQLAAYAGLAPTPWQSGSVDREQGVSKAGNLEGYVRSAAQCCNSLECGPHISRIERRRGLLAAMGKARDG

SEQ ID NO: 397602 - protein, 372 aa, unidentified
MSQDGITFVGMDAHKKAINVAMLLPGAKQPMEWQVANESAAIRRLAKKLIREAPGEVRCCYEAGPCGYALQRAIEAAGPIVCEVVAPSLIPVKPGQRVKTDRKDARKLAEMQRADLLTVVHPPSAGEESVRDLCRCREDAQQDLTRARHRMSKFLLRRGLTFTVCKKAWGKLHRQWLRGLSFESPTDEAVFGDYLLAIEQLEERVLTLEAKLSAAADQDSYREPVGWLRCFRGINTVTAITLVAELHDFRRFRSARELMAYLGLVPSEYSSGESRHRGSITKAGNRHARRVLVETAWHYRHRAKSGETLRRRRQGQPARVIALADRAQERLCRRYRHLAERGKPTPKVVVAIARELVGFLWGALQAPAAVRN

SEQ ID NO: 397603 - protein, 438 aa, unidentified
MSNKVIFNLDDLFISVGIDVGADFSWMSIALPNQQFVGKPYKILHSSIDSLTTAVSKIKEAEELYSLESRIFLESTGIYHYPLFCYLRDKGFNCSVINPIITKNSTNINIRKVHNDRFDSKKAALVGLKPDLKVSLMPSDLALNCRNLCREYYDLMDNRSAYVNKLQGELRMAFPQYLGIFSKVTINTSLTLLETYTSPSAFLEADKQEIIDIIKSTARFGLTYAQNKYNAIIQAATDANQFGYIIDSNIKRIRLYISFIRKYDEEINNILESLHELVDANEDADFVKQIHLIETFKGAGFLSAVSIMGEIGNFSAFSKPKQLFAYFGLDPAVKQSGKFEGTKVQMSKRGSAIARRVIHTLTLQSISISRNGEAKNPVLREYYLKKCDSKPKLVAMGAVSHKVCNMIFAILRDNKSFEIITPQEHIKQYNASKCDMAA

SEQ ID NO: 397604 - protein, 351 aa, unidentified
MKNYIGLDVSMKETSICAVDETGQIVYEGIEESDAQKLVQHIKKRNLHVEKAAVESGSISHWLVSQMQKLGFPVICVDARHMAAILSLSVNKTDKNDARGIANALRGGLYREVHLKSQTAVDVCSLITARKALVNQRTKLKNTIRGLLKGYGIRLSTTGAKSFSSKVREVLNALPSAAQMAVEGVLNGFQALEEQAQKLEKEIKHEAQNDPDACLLMTIPGIGPITALSFKAAIGDPKRFQNSRFVGAYLGMTPHQYSSGETQRLGRISKRGTAVVRSLLYEAAVVMLTRTKLWSRPKAWALKILRKKGLKKASVALGRKLAVIMHRMLITKEAFKLGNPFDEQDQTVNVA

SEQ ID NO: 397605 - protein, 364 aa, unidentified
MNAMIAENTTNQESYWVGADVAKKTFDAALVRPGQHYPSTPLREVPVATFTRSIEGVKEFLSWVAAQLQGVSSPIAMRMVMEATGSYSVELTGWINEQCPALAPAIANPRQTSAYLDSMQLRNKTDRVEARALAFYGAERRPAPYETLSPERLELRALSRHRDALVNEKVREQNRGEEPFVSKLLASLHKSRLAQLKRDIAKLEARIKDLIEKTPELRRDAKLLRSIPGVAFVTSMVVLAELGDLRRFSRARQVTAFAGLTPRAKQSGTSVNAPAILCKRGNPRIRQALYMAAMVAIRFRGPLKDFYDRLIAKGMNGKAALCAVMRKMLTIMRAILIHETPYNPQWKNQGTKQPHPVENAAQNA

SEQ ID NO: 397606 - protein, 374 aa, unidentified
MSNIASLKTERHQFLYVGMDIHKDNHTAIATNCFGQNLLELAISNSEQDFDDLVARVERLSRTKNLKPVFGLEDSYGYGLRLAKHLYEKGLSVKMVAPVLVDRDRQYETHPEKSDSLDALGVAKVLIQRIDRLPNYSISKNDEISKNIKELTLDREFLVKEQGRLKNHLHRLLHKSHNSEYRTKFKDPFSLKALKYWRGHPVPRKRVDTAGNIFILKNQIRRKVKRLLDIREETKEIEQELNCLIQQTNQKIETLNGCGTVLASQVLAEVRNIDRFHSPHSLAKYAGLCPREKSSGKTFRHIKTKSGNRRLNMAVHRIALSQISKSGNKRAKEYFQKKISEGKTKVQALCCLKRRLIDIIFMMLKHKQAYNYSN

SEQ ID NO: 397607 - protein, 400 aa, unidentified
MNPVVGLDVSKGESEAQAFLDKDKPYGKSFSVKHIKEDLDLFVSYLRGIEMKTGVRPAVILESTGHYHTPIIQCLEGNQFLYILVNPIISYQAKKTSLRKVKTDAVDAYHLCVLYYKEEFEPYKKRGLRLLNLRTLSRQYETVTNLYIQTKLQFHTILDQVFPEYRGVFGDLFSQVSLKILKEFPTSEDVLRTGESKILERIVGMRIKRSEGWARERAAKLIASAERNPFQQGVYQSQLFSLDMYISMLLQYQEHLSSIETEIDVLAEEIEECKIIQSIPGIGGKIAATIISEIGEIDRFNHPKKLVAYAGIDPSVHSSGKFTATINHITKRGSSRLRHALYMAVLCGIRGSRNKKLKEYYDRKRNEGKPSKVAMIACVNKLLHWIYAILKRNEQFLDMA

SEQ ID NO: 397608 - protein, 449 aa, unidentified
MDVTYTHCAGLDVHKKTVVACCIIPGIKGEKQLEIRTFGTMTADLLALSDWLSSKGVTHVAMESTGEFWKAAYNILEGNFELLVVNARHIKSVPGRKTDVKDAEWIADLLRHGLLRGSFIPPQAQRDLRDLTRQRTNLVQDRATVVNRLQKVCEWSNIKLSSVATDITGVSARAMLEAILAGRTAPQTLAELAKGRLRNKRSELERALNGVVRDHHRFMLAQHLAQIDFLDEQIALFDKQIALHMAQTDTDNAQQPPSLPTTPSGTPDGTTIDAPSPAAAPPSWENAVELLDTIPGVNRRMAELLLAEIGADMSRFPSAAHLASWAKVSPGNNESAGKRYSGATGHGNRWLRTAIVQAAWAAVKVKKSYLSSFYYRLASRRGAKRAIFAVAHRMLTAVYHMLTNRAPYRDLGATYLDERNKTNLIKRTVRRLEQLGYKVNVEPIQPTTA

SEQ ID NO: 397609 - protein, 336 aa, unidentified
MPQYIGMDAHVSTCTFCVMDGRGREMDNTTLATNGRLIINYLRDIRGVKKLTFEECELSNWLYEILKDEVDELIVCNPVANKEYKKKKTDKLDARKLAKLLRGNFLTPVFHDGSKRERFRSLMSGYQDLVDETVRFKNRYKSLFRKSGIKIEGERIYKDKDLLKGLERPDFRFIGIQLHHILEKMDESLATYQQQIRRSKKHFKEIGNLMSIPGIGYIQAAKIVSQVITPERFPNKYKYFGYCGLVRHKKESGGKRYGSERIWGNRTLKCVYKMAGHQALRGTSALRKYYDHLHSKGLSDKKAYNAVCRKIAAISLSVWRNNTKYDNNIILNGLIK

SEQ ID NO: 397610 - protein, 349 aa, unidentified
MRFYNQSHRFYAGGDLHARSLYLHILDDQGKTRFQDNLAANPESFLHAVEPFRDGLVVGVECMFAWYWLADLCEDQHLPFVLGHALYMKAIHGGKTKNDKIDAGKIATLLRGGLFPQAYVYPRALRETRDLLRRRTFLVRQRAQFLTHIQNTNSQYNLPPLTKRLSYASNRTDPELVDRFPFESVQRSIRTDLHMIDALDEEVRELELYLTRHAKIDDPQTYHLLKTIPGVGPILALILLYEIHTIDRFPEVGNFASYARLVRCQHESAGKSKGFGGKKIGNGHLRWALGEAACLLLRCHEPAKRWLQRKEKKVGKPTALGILAAKLGRTVYHLWRKQRAFDAKRFLTS

SEQ ID NO: 397611 - protein, 336 aa, unidentified
MRYVGMDVHWRQTTICILDENGRRVKLFTVRGPWEKVLRELSRIQGRWRACFEASSGYGWLYERLKKMAEAVTVAHPGQLRLIFRSKRKNDRADAEKLAKLLYLDEVPTVYVPSAPVRSWRGMIEHRQKLIRERVRVKNQLRALLRTHGVVAPKGLWTRRGKDWLRGFRFAMEMDALQRDILLERLDAVEAMIRRVEQALARIGERHPAVVLLREIPGVGIRTAEAVVAYVDDPHRFGRVSAAGSYFGLVPCQDQSAGTNRLGHITRQGPATVRKLLTEAAWQAIRRSPRVRAYFERIRQDNPERRKIAVVATAHYLLRVMVAMWRTGETWRGEAA

SEQ ID NO: 397612 - protein, 459 aa, unidentified
MTPRKDHFPHPTPRPRRGTLPVTNPDAAGVDVGAEAHWACVPTDRDPEPVRRFGTCTADLEALADWLQRCGVTTVAMESTGVYWVPLYELLEARGFQVLLVDTRQVARAPGRPKTDFKDCQWIQRLHSYGLLAAAFRPRERVVVLRAYLRQRDMLVTYAGQHIQHMQKALEQMNVKLTEVVSDITGVTGMAIIKAILRGDRDPVELAKLRDPRCKESEATIARALYGNWRQEHLFALRQAVALYEFYHQQISACDQAIEAHLRTFADQSAGQPLPPRPRRRKREANEPRFDARARLYCVCGVDLTAIEGIDETTALVLLSEIGTDMSRWPSLKHFASWLGLCPQHKISGGKILRRRVRRGAGRAKRALRLAARSLHHSKSALGAFFRRIKSRHGTPAAITAAAHKLARLVYSLLKHGTDYVAQEMEAYEAKYRERKLQTLARQAGALGFQLVPAADAAS

SEQ ID NO: 397613 - protein, 371 aa, unidentified
MNSEKYIGLDVHQATISVAVMDGRGKIVMESILETKAATLLEFLAGLRGSLSVTFEEGTWAAWLHDLLKPHVQKLVVCNPRKTALLKDGNKNDRIDARKLAELLRLDNLKPVYHGQTGVRMLRELARSYLSLVQDLTRVMNRLKAMYRSWAIPCAGRDVYYTRHRAAWLSKIREAGVRRRAEHLYQQLDMLQHLRQQARRELLAESRKHAITAKLRQIPSFGPIRAALAVALMQTPHRFRTKRQLWAYSGLALETRTSGEYCYVRGQLRRSKKQISIRGLNKDHNHDLKGLFKAAATRASVQPGPFQDFYQRSLAKGIKPTMVRLTLARKLAAITLTLWKKGARATPSGWLYDSETVRAKCAMSVKRPGAN

SEQ ID NO: 397614 - protein, 394 aa, unidentified
MIYAGVDIAKTDHVIGAVDERGAEVCRPLPFKNTEAGLERAVAWLEGLAGSPSDVVVGMEATGHYWMACYSFLVARGYSVAVINPMQVKAVRKLKGLDKVKNDRVDAGLIAEALRIGRYDETRLATDEVASLRSLSRYLQSLRGMVAELKTQCVCLMDAHFPEYAGVFSDMFGAGSRAVLSKSPLPFELARRRADSLARDIAEASRRGGRSAGYAAKIKAAARSSIGVRLGQEAASFQIKSLIRQIEFADSECAKVEARVRALLDEVEPLVLTIPGASYVAGAQIVSEIGDVSRFRSAPAPVSYAGLNSSVSQSGKFDSGGGPITKHGSPYLRRALWLAANRARQYDPGLRAFYDKKRAEGKPHRVAVTAVARRLCHIVFAVMRNQVPYDPERE

SEQ ID NO: 397615 - protein, 352 aa, unidentified
MAKNDFDELMSVGVDIGKDVFHLVGFNKEGQLVLRKEIKRMALVATFEDLPKCIVGMEACLSAHFVSRTLRKMGFEPRIIPAIYVKPFNKGQKNDYNDAEAIAEAALRPNLKTVTEKTQEQLDLQALHRVRSRLVSRRTATMNQIRAFLIEQGITVRKSVAALRTSLQAILDNRSDEISLRMRKLILGLQQDWIWTDKRIEMTTSEIKSVSESEASCQRLMTIPGIGPIISTAVVAAVGTGEAYDRGRDFAAWLGLVPRQHSTGGRTILGRITKRGSRYLRMLFVQAAQVIMMRPKNWPKFSFGAWLEAAATRMQHNKLGVALANKLARIAWSVLNSGKDFDWKEKELATAI

SEQ ID NO: 397616 - protein, 444 aa, unidentified
MKHYYLGADVSKGYSDFMFLDAKKRRIEEDFQLDDTFEGHQKLYHILSSFCDQHPNAQIYTAVESTGGYENNWFDALIKFQSHLPLKTARLNPCGVHNNSKAGLERNITDPISAENVAKYMIEHPENVTYQQHDPLASLRKQWSFIKMLLKQKTQLLNQLESNLYGANPEILGYCKNGVPKWVLSLLRRYPTATKLAKAKRSSLTLIPYVTQSKAKELIQSAKKSVASATDQIAAQIIQATVKQIQQLTKAIESQEKILAENCSLPQVQLLKTFPGISDISAIGLILEIGSVERFAKAKKITSFFGLHPVFKKSGDGTWGFHMSKKGRVVPRQILYMVAMVAIQCNPLIKEIYLKHTEKGMKKKAALGVCMHKICRIIYGMLKHNKAFDPNVDRNNREKSPQGKTKIRTDKTRRYQSFDTKAPISARQNKKRKERKQSQSVNNA

SEQ ID NO: 397617 - protein, 337 aa, unidentified
MKYSAIDLHSNNSVVSVTDEEDRVVVEKRLPNDLAKILGFLLPWREELAGVVVESTFNWYWLVDGLQAAGFTTHLANTTAIKKYDGLKHSGDEADARYLAHLLRLGILPTGTILPPEQRAVRDLARKRMQLVRSRTAHILAVENITARQHGTRISSNQVKRLTTEAVDQMPLPDDVALAIKANVAVITTLSAQIDLLEKRLQERVGARAEYGLLTSVPGIGQVLATTILLETGPIERFAAAGNFASYARCVDSVRTSNGKKKGEGNTKNGNKYLAWAFVEAANFARRYCAEAKRFYERKKAQTNNGVAIKALAHKLARACFHILKERKPFDVTRCFA

SEQ ID NO: 397618 - protein, 347 aa, unidentified
MQFYTKQHNAYCGIDLHARSMYVCILNQAGDILVHRNMKASPETFLRTLTPYREDIVVAVECVFTWYWLADLCAREGIAFVLGHALYMKAIHGGKAKNDKIDAHKIAVLLRGGMLPQAYVYPAQMRATRDLLRRRMYLTRKRAELLAHIQNTNSQYNLPEIGKKLAYKANRDGVAERFPDPAVQKSMEVDLALLGYYDPLLSDLELHIVKAAKQHDANTLYLLQTVPGIGKILSLVLLYEIHDIERFPRVQHFLSYCRLVKCAKESAGKRYGTAGAKIGNAYLKWAFSEAAVLFLRDNPAGQKYLTRLEKKHGQGKALTLLAQKLGRAVYYLLKRQKAFDMHKFLQE

SEQ ID NO: 397619 - protein, 365 aa, unidentified
MNKYIWVGLDVHLDSITAAILEDDTQDPEVVKLSGDLMKVRRLFRRLAKRGPVRACYEASGSGFVLQRVLSRDGFHCEVIAPSLIPRKPGDRRKTDRLDAIMLVRLYRSGHLIPVHVPTEDQEALRRLLRLRYTYQVYSKATKLRIGGMLRNHGFVYREGKSYWTKTHRQWLTRIRLELEGPLQIALATELEHLEYIDTHREAIDTELERFAHAHPYRENVEALCCLRGVKTLTALTLLCEVDDVRRFRSPRSLMAYFGLVPSERSSGERERRGPITKAGNVHARRLLVEAAWNNRHRSGADLILKRRRQGQPPAVVAIAMKAQHRLYKKFWKLDERKHCHVAITAVARELCGFVWAILNAVPQN

SEQ ID NO: 397620 - protein, 465 aa, unidentified
MAKKKSSGKPKRRSRGGFPIDNAPVPQSLDTINLNAAGIDIGSTQHYVAVPSDRDSSHVRCFGTFTSDLASLADWLEECGIKTIAMESTGVYWIPVFELLEARGFEVKLVEPGKLKSVPSRKTDVLDCQWIQQLHTYGLLAGSFRPDSAICVLRSYMRQRAMLVANASEHIQRMQKAMMEMNVQLHHVISDITGTTGLAILDAIVAGSRDPHLLAKLRDPRCKNDESTIAKALEGNWREEHVFALKQALELYRFYGSKLSEVDSKLEEHLGTFSDRSDGEILPKLKAPKAGSNSPRFDMRNQLYRVLGVDMTTIDGISGQSAITLISEIGTDMSRWATEKHFTSWLCLCPGSKKTGGKLLSGKTRTSANRAAAALRTAAASLARSNCALGAFFRRIRSRLGSPKAITATAHKLAKIVYGMLKYGREYVDVGNDYYEQQYKKRAMENLAKRAAALNLRVVPNELAG

SEQ ID NO: 397621 - protein, 356 aa, unidentified
MDKVIREEAVRVGVDLAKRVIQVHAVDATGHVLTSRALPRARFIDWCVRLPAGCVVAMEASSSAHHWARKLIALGLDARIISAQLVEPYRMEGASGKNDANDAAAICEAASRPKMRFIPVKSIEQQSMLCVHRLREGFKEDRTACINRIRGLLAEFGLVFPQSPRELQAVLSDVLEDAGNELGTLARLTLQRAQAQWRELDDHLAWCDERIDAHRRSNPEVQHAATLIGIGPVTASAAIATVGDFKQFKNGAQFGAWIGLTPRQRSSGGKNNLGGITKRGDTYLRTLLIQGAKSAVMTAHRRQDKISSWVLALRERSGWQKAVVALANKNARILWAVMTRGDVFDPNHLSVKPTAC

SEQ ID NO: 397622 - protein, 340 aa, unidentified
MNRIGLDAHSASFTVAVLNDLGKVTRCLSRPTSAENLIRVVGEVPGPKELVVEESAVAQWVKDTLEPYVDKLVVCDPRRNRWIAKEDFNDDRTSAIKLAQLLRGGYLKEVHHLDDRQAQLRRAFCHYADLNEQLVRFKNKLKATYRQALIRASGAGIYSERGRGEWLARLKDAPALHRQAGQLFVLIDTVEAMKEDCRKALIAAARKDKGYPLLRTIPGVGSVVACGYIALIATPHRFSRKNKLWRYAGLGNSLHISDETVYQDRPSKSGNRLLKWVTTQHFMGAVERAQANNLFRRRYERLLREGHSKKLARRQVCRSLLSVVRAVWMKGEVYRETPLS

SEQ ID NO: 397623 - protein, 345 aa, unidentified
MKNYFIGIDVSKEKLDATLIHYESQSDSEQQLAYTTVANNPKGFRSLVSWSKKNAGRGVKTDTMLFCCETTGGYDRALCDWLYGNGLDIWRESALQIKRSMGLRKGKDDKADSEMIAHYALRFRSQAALYEPMDGNMRSLRDLFLYRQSLVAERQAKLVSSKEKQHISSKSKVDNFIYRNAQKAIDLLTKSIKECERRMLEIIKADEEMYRNYLHLISCKGVGLVTSVMLIVYTDNFKGWNAKKMASYCGIAPFYESSGSSVFHKANTGGYSNRRLKGILTQAARSAITHNPTLRQYYLRMKAQGKPYGVILNNVNNKLLHILFSLVLHDCDFELDHEAKRALLA

SEQ ID NO: 397624 - protein, 372 aa, unidentified
MNYNTVYVGMDVHKESFSLCAYTIEAEKASHYQRTEADYKKVLNYLEFLRTIYGDDANFICGYEAGCLGYTLYHQLTANNVKCIILAPTTMLEQRSKKRIKTDKRDAEIIAKCLAQHNYSPVHIPTAKDEETKEFLRMRDDHKLALKKVKQQILAFCLRHNYRYDGNSHWTAAHLKWLKALTPEALYKEILDEYLLTYQTLSDKLERLDKRIEELATQDEYKEAVKKLCCFIGVKTHTALSVLVEVGDFKRFASARHFASYIGLVPGEDSSGDDQNRLGITKAGNRHVRLLLTEASQCYARGQVGFKSKELKARQSGNTPAAIAYADKANERLRRRYYKMVLNKCKKHNVAKTAIARELACFMWGMMTDNIA

SEQ ID NO: 397625 - protein, 394 aa, unidentified
MTATRTPVIDQKTPALYLAFELGWSEWKLAFAAAPADAPRLRSIGARNTQTLLKEITQAKKRFGLPEDAPVRSCYEAGRDGFWLHRYLLAQGIANSVVDSASIEVQRRGRRRKTDRLDAAKLLNMLQRWHGGEQKVWSVVQVPGADDEDRRQLHRDLVELKAERAQHVNRLKGLLAGCGLALAQVNETFPEVLAGLRTWDGRPVPPALQQRLLREHERWRFVGRQIKDVENERDRTIRKSEEPPVSKVRQLLNLRGIGVNSAWLYVMEFFSWRQIRNRKQLGSLAGLTPTPYQSGDSAGEQGISKAGNRRLRTMAVEIAWCWLQYQPDSALSAWYQQRFAKGSSRQRRIGIVALARKLLVALWRYLEVGEVPKGATVVDWKTKYRGRKQAAAAV

SEQ ID NO: 397626 - protein, 388 aa, unidentified
MRPISPSTTKRSVRHQEYDATLYASLELSQAMWLVTSLSPSSEKMSKYSTPGGDGEALLGLLRRLQDRAEQIAGKPVGIVVIQEAGLDGFWVHRLLEASGIESHVVDAASIAVPRRRRRAKTDAIDGETLLRTLLAWQRGEPRVCAMVVPPTPEQEDRRRISRERAVLLQERVRHVNRIKGLLAGQGITEYEPLHKDRRAQLDLLKTGDGQPLPTRLKAELLREIELIELLLRQIAEVEADREAAVETDPVGKQSPVALLGRLKAIGPQIAAVLYFEGLYRSFANRREVAAYAGLVPTPWRSGTIDREQGISKAGNRRLRHIMIELAWLWVRHQPGSALSCWFRARVGAERGRIRRIAIVALARKLLIALWRYVTYGEVPEGAVLKAA

SEQ ID NO: 397627 - protein, 349 aa, unidentified
MVVIGTDVHKRSHTFVVVDEVGRKLAQKTVPATSAGHLQVIRWVRERFGAEVVWGIEDCRNLSARLETDLLGAGQRVVRVAPKLMAQARAGGRTRGKSDPIDALAVARAVLRHPDLPIAAHDQASRDLKLLVDRREDLVAMRTATINRLRQRIHELDPAVEAGLSSLHRAGVCARLADWLAGQPGVLAEIAREELADIIGLNERITELAERIGQRVQALAPNLLALPGCGELTAAKIVAETAGVHRFRSEAAFSCHNGTAPIPVWSGSTSGRVRLNRSGNRQLNAALHRIAITQLRLPDSDGARYYRRRLTEGKTPKEALRCLKRQLSRVVYTRLHLDHATHNPHQAAA

SEQ ID NO: 397628 - protein, 347 aa, unidentified
MRFYTGQHRYYCGIDLHARTMYLCILDQQGGQVLLHRNVRCEPALFLSAIAPYRDGVVVATECIYCWYWLADLCARENIPFVLGHALYMKAIHGGKAKNDKIDSRKIAGLLRGGMFPMAYVYPAGMRATRDLLRRRLFFVRKRGELFAHVRTTFHQLNLPAPSGQLLYKSNRVGIPETVPDPVVRASVEADLALAAHYDEVIRSLGHTLRRQARVEDPDTFALLQTIPGIGPVLALTLLYELHDIARFKRVQDFLSYARLVKSQKGSAGKVLGTSGAKIGNAHLKWAFSEAAVLFLRKNPRGQKLIRRMRSKHGKGKALSILAARLGRTSYYMLRRNVAFDMDRFMN

SEQ ID NO: 397629 - protein, 370 aa, unidentified
MAKRSMFVGMDVHKESIDISLAEEGRDGEVRHYGVISGDLEAVAKVVRALRAPQRRLRFVYEAGPCGFGIHRYLIAQGEDCVVVNPSSMPKRSGDRIKTDRRDGDALARLHRAGELTAIYIPTAADEALRDLVRARADAVGLSTQAKHRLKAFLLRQGRRYPGRAGWTRPYRRWLADLSFPLAPQHIALQEYRDTIDETERRVERLTDQLRQQTPAWRWAPVVDALQALRGVSFVTAVGLVVEVGDIRRFDHPRQLMAFLGLVPSEYSSGPSVRRGGITKAGNPHARRLLAEAAWAYQGVPRIGRQMLYRQEALPKIICDIAWKAQLRLTSRFRKLVARGKAKPKVATAIARELTGFIWAIAREVPPPAA

SEQ ID NO: 397630 - protein, 341 aa, unidentified
MKTNRTVVGVDTAKRVFQLHWVDMETGEIVDLRLTRAKFLDHFANRVPCVVAMEACGGSQHWARRLRELGHEVRLLPAKMVRPFVGGNKSDTHDARAIWTAVQQPGVKTVAIKSEEQQAILALHRMRQQLVKFRTAQINGLRGLLAEYGEVMPQGRAGIARSIAAALGRISERLPAMIVETLREQWARVIRLDEEIGDIERRLKLWHRDNADSRRIAEIPGVGVLSATAAVAAMGDPAAFRSGREFAAWLGLVPRHVGTGGRVRMLGISKRGDKYLRTLLIHGARSVLTNSKAPPEWAVRLAERRPLNVAVVALANKMARTIWALLAHDRAYQPNFVSQPA

SEQ ID NO: 397631 - protein, 441 aa, unidentified
MTYPNPLELPVINAHAAGIDVGSEKFFASIAGGPPRVFLTVTGQMQELVTYLKSSGVSTVAMEATGVYWLNVYGAIEEAGLKVVVVNGAHCRNFPGRKTDMKDCQWLAVLHAHGLLSGGFVPPADIRRLRDYLRVRTDLVSMAAQHVQHMQKALDRLNVKIHVVISDITGWSGLRIIKAILDGERQPEKLVELCHEQILATKKAPMLEALRGFWYPEHLFALELAVQSYEAYQAQIGRCDERIARVLQEMSAGKPTPELGKAKELRHNALVVADLQKQTAQIFGKDLTKLPCLNGSTVASLLAEIGHDMSQWPDWRHFGSWMALAPATAQSGKRRRREKRYMNRAGHILCQAVQCMAVGKHTWLASFYRRIRAKRGAQVAIKATAYKLAKLIFLVLTKGWEYVEQGIARYEARVRQMELKALLKLARKLNMVIMPKAIAKH

SEQ ID NO: 397632 - protein, 350 aa, unidentified
MDTTTLYLASIGIDIGKEVFHIVGFGADGKIAFRRKIKRLALAETFKKLPPCVVGMEACLSAHFVSRALRQLGHKPKIIPAIYVKPFVKGQKNDYNDAEAIAEASLRPNLRTVREKTQDQLDLQACHRVRSRLVSRRTATINQIRAFLIEQGIAVRTGATALRNSLLAILKNRRDEISPRMSGLIAGLYEDWISLDERINTIASEIEKISEKEANCQRLMSVPGIGPLISTAVVAAIGTGEAFERGRDFGAWLGLVPRQYSTGGRSILGRISKRGSKYLRTLFIQAANVILMRPNNWERFSFGTWLLNAAPRLHRNKLATALANKLARIAWSILRNEKTFDINRHEAMAI

SEQ ID NO: 397633 - protein, 404 aa, unidentified
MVESYAGLDWAKEEHRLCVLHADGKLLSERRVIHDEGGIASLCASLVELGVRRVAIERPDGLLVERLLEAGLVVLVIHPNQLKAARPRFRSAGGKSDSFDAFCLAELARTDHHRFRALTPDSDETKALKALTRAREDLVRTRIALANRLRAELEASWPGASVIFADLDSPIALAFLERYPSPQDARGLGEKRLSGFLARHGYCGRKQASELLARLRRAPTGTAGELEAEVHRTVVLALVAALRPLIEQIKLLGSQIAHAVRAHPHGEVFLSLFRNPNSTLTAARLVAEIGDCRERYPSAEALAADAGMSPVAIESGKRKAAAFRRACDKRLRDAVATLANTTRQHHPWAKDVYRRARGRGLDHPHAIRVLGRAWLRVIWRMWQDSVPYDPAKHGGLKRLSTAGG

SEQ ID NO: 397634 - protein, 418 aa, unidentified
MKIVFPTCCGVDVHKSFLVATIIKTPQDSLQPSYQKKRFSTFNSDLNHFANWLHENNCLDVCMESTGKYWVPVYNILEKRGIRVIIANPKWVKAVKGNKDDTKDSKWIGDLFRIGLVKSSFIPAKDIRILRELTRYRYKLTSMKSSEKNRFQNAFTVCNVALDSVVSDMFGKSATAITDYLTSDENFDAKHCISLLHHSLKKKADDVFQAIEGYEMTAEQKTRIGIVRDHLHYIDALIERVDSCINTMVDKYEGYIALLCTTPGIDRSSAITILSEIGIDMTQFNSSKRLCCWAGLTPGNNESAGKKKSVRISRAGVYLKPALVQVAHAAVKDKHSPYYALKYERIAKRRGKKRAIIAIARMILTAVFVMLSNLEEWNPVDLYRVDMPEHLKEKQLAKAVKQAVRFLETQGLTVLDSA

SEQ ID NO: 397635 - protein, 408 aa, unidentified
MNPLFVGIDVSSKSNVAYLMKPDGSKHSSFSVQNNLGGAKLLSERIVSALRSMQLSDVVIALEATSIYGDSLVYALWEDGGLCRFQRKIHVLNPKQVRKFKEAYPDLPKNDFVDAFVIADHLRFGRIAKEVYMDDYRYQALRTLTRARFDVIQNLTREKQRFANYLFLKCSGTAQDKDIQNTSATTIALMERFETVDDLANADLEELTAFVAETGRGRFVDPESTAKAVRAAARGSYRLPKTVNDTVNQAMAVSIASTRALEKQVKVLDKAIEQQFEIIPNTLTSIPGIGKVYSAGIIAEIGDIHRFDSQASVAKFAGLVWHKDQSGEFEAEHSRMIKSGNRYLRYYLPEAANSVRRCDSEFRRYYDLKFKEVNKFQHKRALALTARKLVRLVFRLLKDNRLYTPPEG

SEQ ID NO: 397636 - protein, 411 aa, unidentified
MQVIYHRCCGLDVHKRSITACRLKWLGSAWDREVRQFGTMTKELLGLADWLAQEGCTHVAMESTGVYWKPVYNILEGQFELLVVNAQHLKAVPGRKTDVRDAEWIAELLAHGLLRGSFVPPEPVRELRELTRYRSSLVRDRARTINRLQKVLEAANIKLANVVSDIDGVSARQMLEALVAGERDTEQLASLAKGRLKEKREQLVEALSGRLKPHQSFLIAEHLAQVDYLEGAIERLSQQIEERLRPFEQEIGWLDTIPGVSRRTAEVLWAETGGDMSRFASARHLASWAGMCPGNNESAGKRRSGRTRKGSPWLRHCLVEAAHGAAHTKNKYLSSQYHRIGARRGKKKAQVAVGHSILVIAYHLLTRKQPYSDLGANYFDERDRQAVTKRCVARLQRLGFQVSLEKLPVAA

SEQ ID NO: 397637 - protein, 350 aa, unidentified
MFPIVAETYQYVVGVDTHARKHVATVVNNLGVVIATRTVRVTAAHMQQFVNWVVKITDGSILFAVEGTSSYGETLTKLLLERRLRVIEVKPPKTKSRGGDGKTDQIDSELAALSVLRLPVDRLSTPRLGDTRRSLRIVLGARRQLVVQQVASKNALMALLRGIALDVDARKPLSQAAYKTISLWRVQSNSVDVLTVARTEAKRLAGDAMRTRAGLEQNKRVLTGLVSSLAPALLAEPGIGPVTLAQVICSYSHKGRIHSPEAFVALAGTAPIPAASGNTAHYRLSRYGDRQLNHALDIIVFARMRSDEQTKQYIAKRTGTGLSKRDIKRSLKRYVARSLFRQLEACNIKA

SEQ ID NO: 397638 - protein, 379 aa, unidentified
MRHVCGLDVHKDSVSVCILNEKGVVFQEKFGVLTPELERMVGVIMEHGVTEVGMESTSVYWMPVWRVIDPYVEQKLVNPYFIRQLTGKKSDVKDAEWIATCILKGLVRGSHVPEERIQRLRQYDRRIFDLNDDIVHKLTRLDAALQRCNIRLSNYVSTTDCKSYGDVVDAIARGETSPDALLRCVHGRIVNRNGADVIRSALTGVITPVDVDVIRQLREEIELARRHRDECQRRMDGLCSEWFPEQYANLQTIPGVKARSATATIAELGTDMSSFEDAAHLVSWAGLRPRNDESAGRIKARGITHGNKYLRKTLIECAWGASRTRGCFYSRFSHHQTVVRRKSRMKVQVAIARNMLSAIWFILHDGVAYRDFEGDANAA

SEQ ID NO: 397639 - protein, 434 aa, unidentified
MSQQNISTPSTPPVYAAFVGLDWGDENHALSLCAAGATVIERTTLPQTPEALAQWANVLRTRFPNGKIALCLEQARGALLAGLMQYEHIVPYPVNPKSLARFREALYPSRSKDDPIDADLLLDLLVKHREHLRAWQPDTVQTRQLTLLNEQRRHFVDHRTALTNELLSHLKAVFPQALELLGESLASRLATDFLKKWPTLQAVQKVKPAVLRQFYYGHNSRSEDLITQRLERVKNAVALTSDPALLAVHSLAIQTLAAQLQALRPFLDQHEQQIAELFAAHPDATLFESLPGAGSALAPRLLAALGSDRSRFPDALSIHCYSGIAPVTEKSGKTQYWVHLRWSCPKFMRQSWHEFANCSLKFSTWARACYEDLKKRMKHHEAIRKLAYKWQRIVWRMWQERQPYDEARYLRSLQKRGLKIYADLAPQPVALAGE

SEQ ID NO: 397640 - protein, 333 aa, unidentified
MDTEAGDCGEQRLEHCEGAEEFYRNLASQGNKVRVGMEASGHARWFEWLLEELNIELWVGDAAVIRAKRGRKAKTDRQDAQHILNLLLKDDFPQIWVPSWENRDMRQLLWHRHRMVQARTRIMNQLQAVALNEGLRCKKKLWREHGREQLETFRLAPWASRRREDLLELLDRLNPTIAQLTQAIEREAEKSPQARRLMTHPGVGTLTALAFVLIIGEVERFQCGKQIACYLGLVPLEESSGERRRLGHITKQGNSLLRFLLVEAAQATTRTIPEWRSKYIHLTMRRGRKIAKVAMARKLAVRLFWMMRQGWNYQQVMKFGSHVEQPGNRHGVQ

SEQ ID NO: 397641 - protein, 347 aa, unidentified
MRFYTRQHKHSCGIDLHARTMYLCVLDPTGAVLLHRNIPCDPTSFLQAIAPYRDDLVVAVECIFTWYWLADLCARETIPFVLGHALYMKAIHGGKAKNDKIDALKIATLLRGGMIPMAYVYPRDMRSTRDLLRRRLYLVRKRGQLLAHIQNTHHQYNLPGPSRKILYKVNRDGLAERFADPAVRRSIAIDLELVDHLDRLIRDLELDLVRTVKVHDPQTFFRLKSLPGIGKILSMTLLYEIHDIARFPRVQDFASYARLVKCARESSGKMLGTGGSKIGNVHLKWAFSEAAVLFLRANPRAQAFLQKLRRQHGKAKALSILAHKLGRAVYFMLQRETVFDMHKFLAA

SEQ ID NO: 397642 - protein, 343 aa, unidentified
MQIRSVGIDLGKTTLHLVALGDNGKVLLKKKFTQKQLLAYTANLQTSLIGLEACSGAHFLGRALRKQGHDVKLIPAQFVKPFVKSNKNDFLDAEAIAEAVDRQNMRFVPIKTDDQLDLQALHRVRDRLVARRTSVINQLRAFLLERGMVFAKTPFKLKQAMPEILENADANLTARMRNLVGLLWSEWKDLEQQIAAMNEEVEQIASSDPACRRLRQIPGMGPLVATAIVAAIGNGAAFHKGREFSSWLGLVPRQHSTGGKARLFGISKRGNCYLRKLLVHGARSAVLIVKRSRSPFGPWLDALEQRAPVKVVITAAANKLARVAWAVLSSGEEYRPPTTAIVP

SEQ ID NO: 397643 - protein, 389 aa, unidentified
MLYVGIDIAKRSHEATILDETGNKLTSSVKFANSVEGVQMLLERLEGYDQPISFALEATGHYWLALYERLTTSGYQVAVLNPLQTDAYRKSFLRKLKSDTHDSWVIADLLRIGRGQAAVIPDKQIFQLRELARFRFSLVDQIGDLKRKLLSILDRVFPEYETLFSDVFRKGSRAVLAQASTADELAQFELAELTELLSSASRGRFGEQKARQIKSLAEKSLGVSFLADACQIELRCLLSHVALLEAQVALVDEHLARLLVVIPEGQYLLSIKGIGTALGAAILGEIGDISRFPSPEKLVAYAGLDPSVYRTGQFVAEEVHISKRGSPYLRRAIWLAAGMARQYNPDLQEVYERKIAQGKHHNDAIAAVGHRLLNRVYIVLKHKRPYETR

SEQ ID NO: 397644 - protein, 348 aa, unidentified
MKTILAIDLGKRNSVFCKFDTGSLKTKYSTVKTSAEKFHEIFKELDIKDTIVLFEIGSQAGWLSDLLRAMKIDFKVANVNHSAWKWTNNQSKSDKNDAQRLAMMYHHGFFPEVYVPLAPVRQNRSLIYYRRKIVSRMTQVKNSIRAIMGTVDIDLPAGKNCWTHKHFEQMKEMALPFGRIDNYEFWRGQLYIELEQYDKLLECLDKTTGSLDELNKREPRVKLLQTAPGVGPRTAEAIVSVIDDPRRFKSCRQVCNYVGFTPRRYQSGEMDRTGRISKRGNPHLRALLVQAAWAAMRFPWANQIYNRVCRGSVKRRKIAIIAVARHLLIRCWAMLRDNKPWRYQVEEA

SEQ ID NO: 397645 - protein, 350 aa, unidentified
MLIIGCDYHPSFQQIAFVETETGELSERRLVHREEAEQFYGELKEQNAKVRVGMEASGHARWFESLLRDLQFELWIGNAAEIRTKRVRKQKTDRQDAQLLLRLLLEERFPRIWVPDSENRDLRQLLWHRHRLVQMRTRVMNQLHVVALNEGLQRKKALWRPAGRKELEKFELAPWASRRRQDLLELLDQLTPKIQGLSEALEAEVEKRPAARRLMTHPGVGPLTALAFELVIGTPERFRCGKQIASYVGLVPTEESSGSRRRLGHISKQGNVLLRFLLVEAAQVTVRSLPEWRSRFFHLAMRRGRKIAKVAMARKLAVQLYWMWREGRDYGQWKNFGSHAGEPGNPDGVQ

SEQ ID NO: 397646 - protein, 342 aa, unidentified
MNKYNTIGVDLAKNVIQVCVVSPANKELQNKELTRKKFAEFLLKQKPALVAFEACATAHYWSRVARRHGHETKIIPALAVAPFRQGHKTDQNDALAVAEAARRPNIKEAPIKTVEQQSMQAVQRSRELLIQNRTALSNHIRGLLMEFGLVMPRGFSSLHKNIPWILEDGENELPDSYRPTLNLLYERLCQLRIDLDFLDKQIALLVKENRACGRLMQLEGVGPISSILLFATLGTGEAFKNGREFSAYLGLTPKQYSSGGKTTMIGISRRIANKRLRAVLIQGARAYVHRIKEPKTVKDQWLWALIQRAGYGRAAVALANKNVRTAWALLTKDSEYIKVQYA

SEQ ID NO: 397647 - protein, 386 aa, unidentified
MFVHVQHICITSDWICTRIGLDLHKKTIGYCVKDASGKVHQQGKIGATRWELDTWLKTLPQPWTASMEATIFSGWIYDHLKPHAAAVKVAHPLMLRAIAASKKKNDQIDAGKLADCLRCDFLPECYMASTGIRERRRTLRCRHLLVRQVVQLKNRVSSLLMETGVSYNKQRLHRAGYFPELLASKDAIDKSIRPLLRLSRDSITRLQRIESALIRSLQRDPLLAERVRRLQTIPCVGRITALTWALEMGDISRFRSIRQAISYCGLCGDEKRSAETAVRTPLSKQRNKHIQRVLVEAAKLAPRYDPDLALFYAREKQSGNANRATHRGCRGGCLPSPSPLQIAGGTHPDSSAIHRVQFANNAVKAAAQSIVLVLVQKDQAPARRDS

SEQ ID NO: 397648 - protein, 389 aa, unidentified
MRNAQADDLSRALTVLEQDSTLIAVIEMSQASWLIGAIVPGLARNPLKKIAADETTLLPLLHRWRDEAVRAGRPIARIAVAFEAGRDGFWLARWLRARGIEAHVIHPSSVPVAREHRRRKTDRLDVNLLLRAFLGWLRGEPEHCSMAAIPSVAEEDAKRPCREHQSLTEEKTRIVNRMKGMLARFGIRNFNPKLRKAADRLAGLRTPEDEPIPEHALAELRREMARLALVKQQLKEIEEAREARLTQHPDEGTHPMVLLLARVTGVGLETADLLVHELMVRNLRDERAVARYAGLTGAPDESGSKRREKGLAKNGNARVRRTMLQLAWRFLMFQPDTELVRWFRARTAGAKSGTRKTMAVALARKILIMLWRLVKQGEVPDGLCLRPAV

SEQ ID NO: 397649 - protein, 466 aa, unidentified
MEQVVQKFYLGCDVSKGYSDFVIIDDQMNCVEENFQLDDTATGHAELSERISAFFEKHPSATLYAAVESTGGYEDNWYAFLLRQQGKFNLHAARVNPNGIAHDNKAGMIRNLTDKISARSVAEYQIRHPDKIPYGKRDPNKSLKKMWGRYRSLKKQMGVLLNELESLLYSANPELLPYYRSRMPQWLMLLLLKYPTAKMLARARVTTVASIPFLKKPLASVLVKNAKASTAEDSDDLTAFLVTSTVSQIASLAKQITIFEQRFEKECDWPEVQLLMSINGVGRMTAIVLMLYIEDITRFKSAKKLASFLGVHPELKLSGDGSKKGSYKMSKKGQKAPRAMLYMSVLAGLSKGSRNDVIKRIYDEKRASGMVAKAAIGVCIHKLVRLAYGVLASSKPFDPAIDDKNREKSKPAEKPVPLSKDRRYQGFDTAAPVSRRQNKKRMEQIKSQDSYAVECGIKDHAPRALQ

SEQ ID NO: 397650 - protein, 367 aa, unidentified
MKKVSTTVGKQGRKISQQKLTIGLDLGDRWSWYCLLDEVGEVLQEQKLGTTPKGMKEVFGAVPRCRIALETGMHSPWVSRLLSELGHEVIVAHARNVRLIGESRKKDDRMDAQTLARLARIDPQLLCPVRHRSAKAQADLTVIRARAGLVRARTALVNTARGLAKSYGERLRGCNVRNMSPEKAEGLSPELQRALQPLLAALESLSERIGEYNERIEDLAEQSYPQVTLLKQIKGVGTLIALTFLLTLEDPHRFRKSRDVGCYLGLQPGRRNSGQSEPQMHISKEGDPYLRTLLVQGAQHILGPFGVDSDLRRWGLKLAQRGGRNGKKRAIIATARKLAVLLHRLWVSGEVYEPLRNSNQRAMPAAA

SEQ ID NO: 397651 - protein, 340 aa, unidentified
MVLIGIDPHKATHTAVAVDETENSLGELTVKADRTQIERLLKWAIDFPERVWAIESANGLGYLLGQQLLAAGEDVVDVPPTLAARVRVLGSGKSQKNDPNEALSTAIAALRATRLRTVARDDHRAIFRMLGDHHHELGALRTQAICRLHSLIRCLVPGGTGIRLSADRASGVLRKVKPATSAEAERRRLALGFVADVRRLDAEIADSKARIIKAVRASGTSVVELNGVGPIVAAFLIGHSGDMQRFKNRDHYASYNGTAPIGASSGPKTRHRLNPQGNRQLNHAIHVIAVAQIRHPTEGRRYFDRKVGEGKSNKEALRALKRQISNAVYSHLVIDSSRCK

SEQ ID NO: 397652 - protein, 376 aa, unidentified
MNRIIYVGMDVHKDTYSLCSFDSKQSYVFSELTVKAETSSVLSYLKNVEKHFVNDDVLFVCGYEAGPTGFSLCRDLQKKDISCVVMAPSSLATSPDAKKRKTDKIDARQLALHLAHNSYKAVHVITPEMEAIKELTRTRASALKAQKRAKQNLLSFLLRKGMVYPFGGRARYWTQQFFSWLKTLEFSNPVERYSFEEYLSEVNHQISRIKRLDDKIAELAEDPLIKDDVKKLCCFSGISTLTAVSFISEIGDFNRFQKAVYFSNYLGLCPGIHKSGLSSQSLGITKTGNKNLRRLLIESAQSMSHSQICGKKSLRLLARQKNMDPLIVAYADKAVERIKRKRSSMIFRGVHINKATTAAAREMACFIWGMMTNNIS

SEQ ID NO: 397653 - protein, 419 aa, unidentified
MKLFVGLDVSKAKLDACFLLREDDTNTILWQETVANSESGATMIKDQILRFHEELDFDKILVGMEATGQYSMHPSLFFSNDPELKLINVETIVENPRVIHRFSKVWTEEKNDKLDAQIIAEFLTTGKHTKTQPREEKFVALLRFTRTRYQLIRQMTEAQQHYVENLYYKCNTLSSDLKAENISTSVFSSTMIQLMNGDISMAEIRTMNSVELAALLQKFGRGRFKDPVKLAKVIRKSVSDSYRLGKLAQDSIDINLGVQMRVIRGFEQEIKIIDKAIENIMETIDSAKTLLSIPGIGPVYAAGIIAEVGQIDRFNHEAQLAKYAGLYWPKHQSGNYQKEKTPMSKSGNRYLRYYLVQAANSVRRYIPEYEAYYQKKYKEVPKTQHKRALVLTARKLVRLVFALLSDHQLYIARSEAIES

SEQ ID NO: 397654 - protein, 362 aa, unidentified
MFTERTSVGLDVHARSIRASALDSLTGELFEQTVAPGEDYRPVMAWIARLPGPVAVAYEAGPTGFGLARVLGEAGIRCTVAAPSKINRAPGDRVKTDARDARLLARLLRVEDLSPVVVPTIEQESARDLVRLRFDNRSDLMSARHRLGKLLLRHGHVYCGGRAWTRAHEQWMNQIRFTDLGTRVAFSESRELVTHLQARRDRLDEQIAVLAASSSFAPVVTRLCCLRGIATLTGFALAVEVGDWTRFTGSSIGAFLGLTPTEHSSGGSRRQGGITKAGNTHARRLLIESAWLHKPRYVVGKVLQERWDAAPAAARVRADEGNRRLHHRWVQFETRGKKHTVATTAIARELAGWCWSLAVLEA

SEQ ID NO: 397655 - protein, 385 aa, unidentified
MSRITYIGMDVHSTSFTFCALEPNTSGQDQVFAYANAKPDYKEVVKYINMLKEQRGKDCRFICAYEAGCLGYTLYHQLTQCGIECVILAPSTMLSPVGKRIKTDKRDAENIARSLAYGLGSRLFVPTVEDEEVREYLRMRNDHKNSLKVLKQQINSFCLRHGHAYDSTKTKWTVVHLTWLRHLELSVLLRETLNEYLATYEQLTAKLNAMSARIEELAAQKRYAEDVKKLCCFLGIKTACALSLIVETGDFKRFAKGELYSAYLGLTPSEHSSGEKICRGRISKAGNTNLRRMLTEAAQGICKGQIGHKSKALLARQEGNEKEIIVYADRANERLRRKYYRMIRSGKKKNVAVTAVARELACFIWGMMTNNLELRGERPRLTLAS

SEQ ID NO: 397656 - protein, 406 aa, unidentified
MELTPIYKRVIGLDVHQAKISACAVTEQPDGSVCVVMREFGAYKRDRKALAEWAREFAPEIVVMESTGIYWKSPYAALEQVGIAAWVVNARHVKTVPGRKTDVADAQWLATLARAGLLRASFVPPADIRHLRLIARQRQKLGGMLASEKNRLHKLLADAGIRLNVLVSDIHGQTARAMIKSLIAGQTMSEILSHAGRLKASRAELFEALQPEELSEPHLFVLSEIMAHIEELEARMARFDQALLRGLSAWQPQLILLQTIPGIDRMGAAMLLVELGTDMQSFGSAERLASWVGICPGNNESAGKRKSGKTRKGNAWVRRLLCEFAQAASRSRCALKEKFAALNIRKGHKKAIVALAHKMLRILFAMLKNNTPYQDRVVDYEALSVQRNAPRWIKMLIKHNLMPASA

SEQ ID NO: 397657 - protein, 509 aa, unidentified
MARFRKLGSLQRLAPHQPHEWANGPARFNRARIYLQEDLRLIYSVGIDLHQGSHRARCLDERAQICDGFAFQTTPEGLAKLEERIFRDGANPIIVLEPAGLPWLMVAVYLRSQRPDCRLVKAKMQKVAALRRYLRGPVKSDRLDALTLAKMPFIDPEQLIEIYLPPAEIHALQRLTRQRKRMESDVSSRKVRISAILDGYLPGVRRAFSESWSSSFRAFLRGRVNPFAVVREGEESLHDCLSKASSRSRVQTHQVFLACQSVAHVCQMSMAAGTLNEDFFSDLQDEVARELKLLEIAEAESEALARRIAEIYKKLHPSDNLGTIPGVGPHTAPIFLASVGDPARFRNQAAFANWEGVVPGARQSSNVEAKGLRMTKAGPSILRMALYQAGEIGRRNDPGLAAVYYREMVHHGKNHRQAMGAVMSHLGARMLRVFKENRPYEIRDLEGKSIDKNEAKKLILSQYYVSEEVRRERRRRNTKTNRKREAATVSIYEAVDAPQAEQAKSVSQK

SEQ ID NO: 397658 - protein, 478 aa, unidentified
MGNSTTTNIRGLRGDQRAKELEGLDLSRVIALAIDTARDYPKALIFDYFGRVLEKPFFFDVNQYGILSLHHRVQHWAGCVKAQRIFVGVEVAGCYHNAIVEALEKLGYEVNLVNSFTTSTERRKMLDFSKTDDKDLRAIGQAILANNGLSPRRVTGFYEQLQLVCRTRRRHVNEASALKTQLRQLMTLVFREFQGLTNPAELEQKKIFDSFWGRKSRLIMRHCPLPEQILQLGETGLQELAKFENTRLKDDEIRLLLQAAERALVASSVEWAQFQSEQVIFRLQQLETLEEQIAALELKMEQMLVKSPAVLLLSIKGIHVITAAEFIAEVGSIFNYTYNRQLIKLAGINPVLSQSGGKKTKAYQISRQGNPALRYIVTLIGKNLCSKNCANTYFRTYYQRLAKRGKSPSQIYNAAANKFIRIAFAMLQNQTLFYIPGFEDSSSDILRKLSCQKNREAAKKALEFLNATENLKKQLLCS

SEQ ID NO: 397659 - protein, 477 aa, unidentified
MGTPVRIIACQRYIPLEHFYHLKKNAMKKKIVMEIINPNAAGIDVGSRSHFVAVGQGSDDVKEFGVYNEDLNSLVQWLLLNEVTTVAMESTGTYWQSLFAVLQNAGFKVILCNGKFTKNIKGRKTDVQDCQWIQKLHTIGLLTGSFLPDEATEQLRTYCRHRANLLDQAADTTRKMQKYLRLLNLRLDVVVKDITGLTGLSIIEAICTGETDAAKLASLRNGNCKKSEEEIAKALQINGRTDYFFALKHEYKMYQYLQSSIKECDIEIEKLLSNQINNSDDKREHFLDKKVHKRINKNTPKNMDLNLMAYQYFEGIDLLAIEGVSYSTVLSIMSEVGLEGIKKFATAKQFASWLRLAPIIKISGGKVLSHKIPKGSSRLKIALRNAANAIGNLKDTPLSNFFCRINYRKGRVSAISATARKLAIIIWNMIVKKQPYNNEHGYEFLDQKRKRKVQEMKKLIHKFDIKTDELGLQLNGL

SEQ ID NO: 397660 - protein, 410 aa, unidentified
MHYKQNHIYVGLDLHKDTHTAVIIDCWNEKLQTIVIENKPSDFTKLLNKVKKVAGNLTPVFGLEDVHGYGRSLAVFLLEKEQIVKEVNSALSYSERMSYPTTKKSDDWDAQCIANVLVRMLEKLPDANPLDLYWTIRMLVNRRNAIVKSITTLTNQLHGQLCNNYPSYKKFFSDVNSKTALVFWENYPSPHHLKGVTDEDLAELLRKPSHNSCSTRKAKTILEIVESDGDTLREYQEARDFIIQSIVRDIRFKSEEIEKVEAEMKKLLALLEFKLETIPGIDTVTATTLVAGIGDINRFRNADKLARFAGIAPVNFSSAGKGKDKQSKQGNRQLYATIYFLAVQQIQVSKGKKTPRNQAFLEYYNRKVSEGKTKVQALICVMRRLVNIIYGMMKNKTEYVMPTVELKEAV

SEQ ID NO: 397661 - protein, 408 aa, unidentified
MTVVGIDVSKSKSMVAAMKPGGELVAAPYEVRHSDIELSHLALDVLCMEPDTCVVMEATGRYHEPVAALLHSEGIFVSILNPLLIKQSGAGSLRKVKSDPKDALKIAKYGLDNWSTLREYTPMEAIRQQLKLCARQCDLYNKSIVMLTNNLISLSDKTFPGVNELFSSPEKADGHLKWVDFYRSFWHCDCINRMSPDAFEERYKKWCKRKGYHFSADAADALYAASCGLYTTLPRDNNARLLVTVAADQLIALRENQSKLEAEMLNLCKQLPEYETVMAMYGVGKSTGPHLMAELGDVRRFPHRSSIVAFAGVDPGVVGSGKMQLSSVTTSKRGSPQLRKALFQVVSTYVKCKPENEAVYQFYAKKRDEGKPFFVCTTAAANKFLRIYYARVKECLNAAESATQVEEG

SEQ ID NO: 397662 - protein, 343 aa, unidentified
MGKSIRNLSTVTRVGLDLAKRVFQIHTLDAKDEIVVARKLTRSQLLPFFATLPSCVVAMEACASAHHWGRALIALGHEVRLLPPAHVKPYVRRNKNDAVDAAAICEAAGRPGQRFVPVRSIDNQAELMRHRARELLAGQRTAALNALRGHLAEIGVVGPQGVQHAYDLKRLAGDGFNENGEIVVPDCVRGALHPLVGQIDALDEAIGAIDRELAASVKADETAKRLMTIPGVGPVTASAIMATIQDARAFASGHEFAAFLGLTPRQNSTGGKTRLGRITKMGDRYLRKLLVIGACATLRHRRGHNDALRLWASGMLERKTVKYKFKLTAVALANKVARTSATE

SEQ ID NO: 397663 - protein, 331 aa, unidentified
MDIKEVIGIDVGKLKNEARIHSNQKALEFDNTPEGIKKMEKWVMNCTSCQKQQLMFAFEHTGLYSYPLSMFLTENQYFYIVIPGLELKRSMGIARGKNDKIDAKRIALYTYEKREKLIPFEMPTDEIIQIKRLLSLREKLVKQCAGYKGTLGEYKYFLKKKDNKMLFDVHERMIEELTKQIKKVEKQLGDIIKNNGQLKQMYGLITSIKGVGPQTALFMIAFTNGFTLFKNWRKFASYCGIAPFPNTSGISIRGKTKVSNLANKKIKTLLDLCAKTSIQHNQEMKLYYEKRLDEGKSKMGTINIVRNKLLSRIFAVVQRSTPYVNTFGYAA

SEQ ID NO: 397664 - protein, 387 aa, unidentified
MQVAERRSEAPTAIRVDLAAIFVSLELSRSKWLVTSLSPGAGERMSKFVVTGGDVPGLLACLAELQRKTKAHIGNSFQIVSIQEAGLDGFWIHRILEREGIESYVVDPASIATSRRRRRAKTDKIDGEALVRALLAYKRGEPRVCAMLRVPTPEEEDRRRLARERKALTNERVRHVNRVKGLLFGQGVSDYQPLNRDRRKRLEELVTGDGRPLPPALKAQISRELDRIELVIEQIKDVEKARDAMMLAAQTLSPAPALLLNLKGIGPQFAAVIWTEGLSRHFDNRRQVAAYAGLAPTPWQSGKVDRDQGVSKSGNPRLRTTLIQLAWLWLRHQPESALTAWFKERVIQNGGRQKKATIVALARKLLVAMWKYVNAGVVIEGDVLTAN

SEQ ID NO: 397665 - protein, 412 aa, unidentified
MAVVEGGACWSGPRVRSTPEDLEVFAQSLGPEDQVVLEATGGALAIARILEPHVARVVMANPMAVRAIATAKAKTDRLDARTLAKLLAAGFLPAVWLGDERTRLLRRLVSRHAQLIRQRTRAKNQVHAVLQRTLKGRPPASDLFGKRGRAWLAEQDLPADERETVQAALRHVDFLDGELRLVDRTIAEQVLSWPEVRRIMTIPGMGAMAAAGVMAAVGDIRRFPTPRHLVAYLGLDARVRQSGSAPARHGGISKQGSSEARHLLVEAAWAAIRTPGPLRAFGERIRARRGANIATVAVARKLAVLCWHLLTREEDYAFARPSLVRQKVRLLQLAAGDVRRIGYRNPVRIFATPAQHRLEREVGAQAEKAYRRFVKDFKATGKRGAGAATGARISSARKGQAARQGQAPNPAL

SEQ ID NO: 397666 - protein, 431 aa, unidentified
MEQSTRFIGMDVHKDTIVVAVTATGDIGKATAYGTFPNTAAALEKLVRRLRQAGDGPLKFCYEAGPCGYGVHRTLTKLGEDCVVVAPSMIPRKSGDRQKNDRRDAASLAVLHRGGLLTAIWVPDAAHEAMRDLIRARLAAVRAVRAARQQLSAFLLRHGRLYPGNRKPWTKAHRGWLADQSFAQPAQQIVLEESIDVVRLGEQRRDRVDDYLRAQIPNWSLFPLVRNLCALRGLDTIASAGLAAAIGDPSRFASASNFMAYIGLIPSEHSSGTQRHLGAITKTGDVHARTLLIEAAHCYRFPARIARHKLAAVDAVPDAVRVTAWKAQTRLCQRYRRMMAKGKPRQLVVTAIARELAGFVWAIACITSDAPAKTPASEEVGLTSRRTIIVSSRNGSERRNEVARPAMRHGDARHRRLAEPEEMIAQHRSTG

SEQ ID NO: 397667 - protein, 346 aa, unidentified
MTKIIRIGIDTSKSVFVLHGVDPAEQVVLRKKLRRKQVLEFFARLEPTRIGLEACGAAHYWARELQKLGHQVVLLPPQYVKPYVKRNKNDAADAEAICEAMSRPTMRFVPVKTAEQQAALMLVGVRDQLIARRTQLSNMMRGYAAEFGITAARGLDKIEPLLARIATDPGVPETAKELFDALAAEYAELKLKLRKIEAQLLAWHRQNELSRRLAEVPAIGPIGASLLVMKVPDPHGFRTGRDFAAWLGLTPKDHSTAGKQRLGVITRAGDEAVRSVLVVGATSVIQHANKARGKPSPWLMALIKRKPPKLAAVALANKTARIAWKLMVSGERYDPNRAAAVELIAA

SEQ ID NO: 397668 - protein, 452 aa, unidentified
MEEQEISMEVVNPHAAGIDVGSRSHWVAVGQQEKDIREFGVFNQDLFGMADWLKEKNVRTVAMESTGTYWQNLYAVLISKGFHVILCNGKFTKNIKGKKTDVKDCQWIQKLHSLGLLSSSFLPDGKTEQLRTYCRHRANLLHSAASTSKKMQKYLRLLNLRLDVVVKDVCGLTGLSIIRAICQGESNPAKLASLRHGNCHKSEAEIAAALQSNGRKDFLFALQQELDTYDHLQKKIAECDVMIDQMLNEIIDNDDNKKQHYIDPKSYKRINKNTPKDIDLNLKSYQMFEGADLLSIEGMSYSTVLALMSEVGIEGIRKFSSAKHFASWLRLAPNNKISGGKILSSKVPKGSNRLKIALRNAANAIGNLKDSTPLRDFFQRINFRKGRVSAISATARKLAVIIWNVVVKGIPYQNPEGYLFLDQKRKLGIVKRIQKQIDKFALTNEDLQFANH

SEQ ID NO: 397669 - protein, 320 aa, unidentified
MRNAVGLDISQNTFDAAAIVNGQRKQALFDNSINGFESFKSWLDGFDCELHICMEATGNYFEDVADYIGQFYTVSVINPYKISEYGKSRFHRTKTDKQDARLIAEYCHTAMPKDLPVRQKISIGHYRLKRLLALYDQLKTQKTAQKNRLKVAKEDFVRKIHQAQIQELDQHIQQVEEEIQAITNSNQDLKAVSDRLQTIPAIGKLTAAILTNYLLSGDFKTANQFTAFAGLNPQQKESGTSVKGRSSMTRYGNRRLKSALFMPAMVALNRDYFHDFVKRLKAKNKPKMLILGALMRKLLVVAYYVYKTQKPYNPERYKPA

SEQ ID NO: 397670 - protein, 339 aa, unidentified
MEYCGMDLHQDNSEVCILDEDGEVLEKAHLRTTRRALSRYFKGKTRMRVVMEAGGSSPWVSRLVAKCGHEVIVCSSRRVRLIAESTLKTDDIDAEILARLGRIDPGFLGSVTHRSEEAQVLRSKLTVRSALVEARTKWINTVKGILRGFGYKVPSGTSKHFHQRAAKADLPPELREVIQPLLTQLEMVSAEISKREEDLEVVAKDLPVVEHLRRIPGVGLIVGLYFVLTIDDPERFRRSRDVAAFFGLRPTMRSSASVSYFGRITKQGDPEMRRLLVQAAHGLMRTRAPSHLQVWAAELAGRRGKGKAIVALARKLAVLMHRLWVTGEVFQAFPNRKVA

SEQ ID NO: 397671 - protein, 369 aa, unidentified
MGESTTFIGLDVHQGSVMAAVWRPGTSAPAVAPAPVEVPKLVRWVQREAQTHRVHVAYEAGPCGYPLVRALRRAGVTCTVVAPSLIPQPAGGRRQRIKTDRRDALQLVRCLRDGSLTAVTVPGEADEALRELTRARQQLQRDVVRARHRVSKLLLRHGQRWTQTKPWTRAYRVWVRDLVWPEAGVAVVCRTYLDALESAETRLTALDARLATWEIPSPLAAPVAALQCFRGIDRLTAVTLAAEIGDGRRFASARAFMHYTGLTCWEWSSGARRRQGGISKMGNAHLRRALGEAAWHYRYKPALGTRLRVRQRGQPEAAVQLAWRAQERLHHKAQTLLRRGKRPTVTTTAVARELAGFVWAVWRLETPPA

SEQ ID NO: 397672 - protein, 345 aa, unidentified
MKYYSGLDVSVKETSVCIVDETGKICREVRVVSHPEDLIAALNDPAWQIERIGLEAGPLSQWLFEGLANAGLPVICIETRHAKAFLKAQVNKTDRNDARGIAQMMRVNLYRPVHVKTLTSQKRRALLTARKLLQEKVIAIENDIRGLLRNFGHKVGIVGTVGFNDRIRELLDDMPDLVEIMEPLLLARQKLRETFKVLHSKLLSIVRDDEACRRLMTIPGVGPVTSLAFTSTIDVPARFSKSRAVGPALGLTPVLNQSGESHRVGRVSLCGDSMMRALLYEAAQVMLSRVKKWSWLKAWAMNIAKRRGRQKAIVALARRLAVIMHRMWSDGTQFRWTRENTPAAV

SEQ ID NO: 397673 - protein, 424 aa, unidentified
MAELSARISRAAGICLAHFGSLIRRLSTAYGDVTRHRIVPMCLNTRTGTGSLNGRLSLSITLEGEITALSIVAKTHPYVVGVDTHARKHVYTILTANTGERIDTRDFPTTTAGINRAISWVARRTEADADTLWVIEGAASYGAILTGAVASHGYPVAEAPRMNSKQRYGTGKSDVLDAHRIAAAVLPMSVDKLRWPRLNDGVRQAIQVLVTARDSMTTDRTRSVNALTALLRSNDLGLDSRKKLSQTQIREVSNWRPRDEELSLSIARGEAVRLAKHVLNFDEQLADNESRLTELVHISQAAPLLEETGFQAISAAKCLTAWSHHGRVGTEAEFASLAGVNPIPASSGNTVRHRLNRGGDRKLNSALHMVTVTKMTHDPETRAYVDKRRAEQKTDREIRRCLKRYIARRVFRTFNASATMLQPA

SEQ ID NO: 397674 - protein, 338 aa, unidentified
MTIVMGLDQHRAQITAEWLDTSTGELSRTRIAPADRAGVRAFAARFRGEQLEVALEATTGWRFVVEELQATGAGVHLAEPAETAARRGTKKRAKSDRADARHLRELLMVGRLPESWIPPEHLLELRARVRLRHTLVDQRREWQQRMQAVLYHHGVPPRRWLMSAESRAWLAGLALPAAAREHITIALTMIDAHDAQLAPLDQELRDHARRQPGCRALMRHYGIGPLTSITILAELGDARRFSSSREAVRYAGLDITVHQSDARRAPGRLSRQGPPALRWALFEAAQCARRPGSPDHHYYLEAAARLGGNRACLAVARKLLKRSYHTLRELGEEALQPA

SEQ ID NO: 397675 - protein, 532 aa, unidentified
MDSNSARAGFYAPRPDTISRVIQPVARRAHGSSPQPTVNNSAATKILRPGKVNTGRIALRGSRSSSASLTKTRDSLPAPSAAAVRMSERTIAYEAPCISMTPDSAAVRATKGKSMKPWTDITHYAGFDWARDHHDVVIVDRQGQIVADFRIEHSLAGWQQFRDKVKSYSSLAVAIETNQGASVDQLLSLDCVIYPVNPLSAKSYRERKAPSGHKTDRLDAWSLAEALRVDGQQWKALQPLDPLTQQIQLLCRDEISLIEQRTGLINQLQQSLVEYYPAALQAFEDWTQPYCWDFIIQFSTPEKLATAGRRRWEKFLHTQKLWRPETAAKRLEIFQNARQFCGSAAVTSAKSLLALSLAKLLNALQLQLDQYRQQIESLFQQHPDHDLFGSLPGVAQTLGPRLLGEIGGPPQRFADTEALQCVAGTAPVSFQSGQIHRVHIRYQCNKVLRHTVHLWAHCATQVCPWAEVYYRQKRAEGKSHACALRCLGQRLLKILWRMIQTHQPYDADLHARNQKQHGSWVLALMKPEPKAG

SEQ ID NO: 397676 - protein, 345 aa, unidentified
MKITTVGVDLAKNVFQVHGIDERGKAVLRKQLRRAQVAVFFANLPPCVIGMEACGSAHHWARTLVRFGHTVRLVAPQFVKPYVKTNKNDAADAEAICEAVGRANMRFVPIKSIEQQAILSVHRVRQGFVKARTAQANQIRGLLGEFGLVIPQGIYNVAKRVPEVLEDASNELPVPFRQLIDRLTEHLKELDRQVKEFEREIIAWHRSSELSCKLEKIPGIGPLAASALVASIADAHSFANGRQVSAWLGLVPRQSSSGGKPTLLGMSKRGDAYLRTLLIHGARSAILVAKNKVDNTHGWLTNLLKRRHPNIAAVALANKNARTVWAILAHGREFRADYVPSRMAA

SEQ ID NO: 397677 - protein, 320 aa, unidentified
MSEEIFVGIDVCKAWLDSAQLSDTSIGAPGELTPRVDNNEVGRAALVKQLKRLEPTLVVMEATGGFEAALAGELCAAGVAVAVVNPKKVREFARASGIFAKTDRLDAKVLAQFAQRIRPPVHKLPDEAQQEIAELVNRRAQLVTMCAQEKTRLSTVKHVARTSVRQHIEWLEKRIKEIDEDLDGRLKDSPVYRHKYELLDSVPGIGQVTARMLLGRLPELGTLGRKSVAALVGLAPYADDSGKRRGQRYIRGGRADVRAALYMAALAAARCNGPIREFYRRLREAGKPVKIALTACMRKLLVILNAILKSGQPWRNLQGA

SEQ ID NO: 397678 - protein, 387 aa, unidentified
MDERHYVGIDVHQGKCVWCLVDAVGTVVGEGTVRTDLAGLDRMTREWRQLGASEVRVGLEASTAGKAVARHLREGGWDVWMAHPRALKAITTSETKTDHNDARTLAHLIRLDYFPRAYLPSEDIERLRNVVRMREEQVDKFRRTKQQLRSLLVGHHLNHEAARYDDLFGVQALRWLKSVELPEPIEQQRMTLLLEEGELYQRQVEVLTDELAKVGADQEMVRILQSVPGINYVLALTILAEVGDVKRFSNRKKFAAYCGLVPKNRDSGEKIGVHAKLRHGNPRLKWAFSVAVQALLKTKRGRFVTQFRRLEKRLGRPKALMAVAHRLAFSVYGLWKTGRLYEEGSASLYMRKRAQLARRATKSTTLPLRGELLEKLIRRAAMAGRPT

SEQ ID NO: 397679 - protein, 317 aa, unidentified
MTVWVGIDVSKETLDLAWFGEEGKKHHQVSNNEEGFRKLVKAAPGGAKFVMEATGTYYLNLALFLHEEGHHVAVVNPIRIKGHMKSELMRTKSDKADAYAIAKFGEEKRPGAWFPVSSQVAHLKQLVALDELLTKECISLSNLMESQVCTAFMNPETIQRIKRLRRYMELEREGIKAEQEALLMGSLSHTVDLIASIPGIGRATAIKFVSTVGDFRRFPDSRKLVSFLGMSPMSKQSGTSVRSKGHISRLGGTRLRGALYVCAWTAIEKNASCKAMWERMKEKKIHGKKAIVAVMGKLIRQAYSLVIHDRFYDPNFA

SEQ ID NO: 397680 - protein, 345 aa, unidentified
MLHAGLDLSRRRLDVCLIGDDGEVVGRLAASPDADGLRHLVDRVGPGGRVRGVIESMTGARFVRDTLAELGWEVLVADAQKVKGLAPLACKTDRIDAQVLAVLSHRDLVPAIWLPDPQVRAEREQARFRLHLVKHRSMLKHRIHATLISFGHPCVVTDLFGVAGRALLDRLAIPEPWRGTVEASLSLIDDLDAEIDLVNRQLRLGGAEHRYIPLLLTVPGIRWVLAFTIAGEIGDIHRFASPKKLCGDTGLCPRVNQSGDRDRRGPLTKQGPRYLRWAMIEATMHALRHPAYAERYQATKRRLGPQRGAKVAQIEVARRLTEAVWHMLSRNQPFAPAGATLRLAA

SEQ ID NO: 397681 - protein, 432 aa, unidentified
MERIRENAAGIDIGAQKVFVSIEGQEVKCFFTFTEDFEKLRYYLLENAIETVAMEATGIYWNILYDILEESGIDVWLVDGSQTKQVPGRKTDVKDCQWIQQLHSYGLLNRCFVAESDIKELRIYQRLREDHIRSAAMHINHMQKALTEMNIRLPEVLNQIHGASGLAIIEAILQGERDKEKLLSLCNARIIKHKKDDVLKSLNGRYTKSGLFALKQALDSYSFYQNQIKQCDAMLGEVLKRISKSKSDQTTSSKRKAIRHHKPDIDNLGITMLKIFDGKDATSLSGITDYTWMRLLSESGTDLSRWETEKHYTSWLGLAPGQHRSGKMKKNKRKSGRPKAGQIFREAAQSLLSSKNIALGAFGRRLRSRKGAPIAIKAIARKLAIMYWRIMVKGADFVEKGIQNYEAQLMAQKQRSLIRLAKELKMQVVSFE

SEQ ID NO: 397682 - protein, 357 aa, unidentified
MSERIKQEIERTVGVDVGDCWSQLCVLDEESGEVVEEGRVRTCAEALGRRFRGARMRVVLEVGCQSPWISRLLSGLGHEVLVANARRVALIHGSCNKSDRVDAESLARLGRYDPKLLRAVEHRGEQIQIDRVRLKARDVLVRSRARLIGHVRGVAKSLGGRVRRSSSECFAVRAGEDLPEALQPTLGPILEQIQQLTATIRGYDREIEWLAQECYPETALLRQVDGVGPITSLAFVLKIEDPRRFGRSRTVGPYLGLVPRRDQSGMRDPQLRITKQGDPFVRRLLIQCARYLLGPFGKDCALRRHGLRIAERGGAHAKKRAAVAVARKLAVLLHHLWLTAEVYEPLHNLDEEQHRAA

SEQ ID NO: 397683 - protein, 411 aa, unidentified
MDVFCGIDWAEDHHDIALVDHDGKLLARQRISDDAAGLARLLELLAEHGDSPEDPVPVAIETPRGLLVACLRVTGRPVYPVNPMSVARYRDRHSVAGRKSDKGDSAVLASVLRTDRHAHRPLPADSELVQAIAVLARAQQDAVWDRTAAHNKLRSHLREYFPGFIAAFAGTRDGIMRPEARAILAAAPTPGEAATLTLAQLRALLKQAGRVRGIDAEAQRLHQALGTEQMRQLPLVEHAMGRQALALLRQLETACANARDLEQAAAESFNQHPDAGIITSFPGIGTLTGARVLAEIGDDRSRFQHARGLKAYAGSAPVTRSSGKTRSVTHRKVKNNRLASTGYTWAFAALTASPGARAHYDRRRDAGDRHTAAQRHLFNRLLGCLHHCLATGQHYDETTAFPNQAATKTAA

SEQ ID NO: 397684 - protein, 343 aa, unidentified
MNVKTIGLDIAKTIFHHIGLDQHGNQVLKKKLRRGQLLHYFAKLETCTIAMEGCASSYYWQRELIKLGHTVKLLPAQHVKAHVRGNKNDYNDALAIAEASRVPGMREVRPKTIDQQSMQALHRLRDSTVGDRTALINQLRGILAEFGIIFPGGKAKIKQGLYSVLEDGENDLTYTLREALADKYSQFKQLDEQVAKLDRLIKQAGSEHKEVPLLQSIPGYGNIASSAFYSEYGNCATLATSRDAGAATGVVPRQHSTGGKTVLLGISKRGDSYLRKMLINGARSVVNHAHKKDDALSVWVTQLVKRRGKNIATVALANKLARIGWAVIVSGKPYQENYGVKVN

SEQ ID NO: 397685 - protein, 370 aa, unidentified
MATFYVGLDVHSKQSTFVVQTEAGAEVGSGSVPTSTDGLKGMRDRFHLPPATPVGLETGTVSFFVARQLQRLGLVPVVIDAREVRAKAHRPTQKSDRRDALAICDGVRSGQYRSIVHVPPLAISALRDALSRRRHFIRQQTSEVNAAKRLVRAAGLGHLVRSSLRTRVGWTRLVRWLRDEPELCGHVELHQAAWQSAAAQVSVLETRLCELAVPHAQDLSRLQTVPGVGPIVALTTIAIFSDVQRFPSAKHAASYAGLVPSTYQSGDRDAHGHITRRGSAELRAMLCEAAHHACRPQHPLHPYFARLCALRGHRMAVVALAHRLCRILFAMLRTGSEFDVSRLGVEPGPFEKKVVRYWRLKRMAPVTDRI

SEQ ID NO: 397686 - protein, 347 aa, unidentified
MRFYTQQHKYYCGIDLHARSLYLCILDQVGKVLVHRKLACDRAELIKTLRPYRKDLCVAVECLFCWYWVADLCEEQGFAFVLGHALYMKAIHGGKAKNDRLDSYKIAALLRGGNLPFAYVYPRQMRPTRDLLRRRLFFARKRGELLAHIQNTNTQYNLPPLEQRPDKTKDRGAIVEHFEDNTLQMTVAVDVTLLDSYDQVIRDLELYLIHEVRQDHNRDFFLLRSIPGIGEILSLTLVYEIHDIGRFPRVQDFLSYARLVKGKHESAGKTKKLAGAKMGNVHLKWAFSEAAALFLRGNSTGQKYFARLEKKHGKGKALSILAAKLGRAVYYMLLRSRPFELQRFVTV

SEQ ID NO: 397687 - protein, 376 aa, unidentified
MENDSTLYVGLDVHKDSITVAYALGSGEVELLGKIGTTQTDIDRLCKRLQSKAPRICVVYEAGPCGYGLYRQLVQKGLDCMVCAPSLIPRKPGERVKTDRRDAVKLVRSLRAGDLSAVYVPTVDDEAFRDLARAWVSAKDDLKRARQRLKAFLLSHGVRYTGRADWGPAHRRWLSAFSFDSVWQHLAFDELQRTIEDRLAQCGRLEAALREAVINWRFYPAVLGLQTMRGVQFTTAVGMLAEFGDLSRFAHPRQLMAWLGVTPCEYSSGDKRRQGSITRNGNSYARKLLIEAAWSYQHPARVSPQIQSRHEGIPKPIVDRAWDAQVRLCRRYRKLVARGKQKNIAVVAVARELSGFIWDISRLAMSLAIPREELTA

SEQ ID NO: 397688 - protein, 353 aa, unidentified
MSYIIGCDAHKHYSQFAVYEGDNSRGRQVRVEHERGAIRAFLSEFPEGTPVALESIGNWYWIVEEIEQAGCQALLAHAAKAKVMMGNVNKTDKLDARGLATLLRNGTLPTVWIAPSQVRDERELPRTRMALCKIRVALKNRIHATLAKYNLSLPTESDIFAPKWSSQLNQVIEQLPAETQNCLQQELELLEKVQEQIRVMEERMKVRISLTPSMQLLKTLPGVGDILAIVIGSEIGLVERFSTAEQLASYAGTVPAVKSSGGKVRYGHTPKESNHYLKWAFVEAANAPAQYRKHPHWQSRHVTRLYERVRLRKGHSVAVGAVARHLAEATFWILNKQEPYREPIRQKVLPRQA

SEQ ID NO: 397689 - protein, 370 aa, unidentified
MACHGGNPRQAAGDRIEPTQSSLWLPRSVIVVSTFIGPGWLPEQLGSLHKAGSTKMTQTNMTTAGIDTSKAKLDIAVHGRAERWQVANALPGWRALAARLVKAGVTRVGIEATGGYERGVVQHLQAAGFAVLVMQPMQVKAFGRVHLRRAKNDALDAVLIAACAATLDQPRIAPDPRLAELAQYLTFLEQTEEDIRRLKTRLEHIDEPRLRRMVLGDIARLKARRTTQIRDIARLLRCHHDLAARLDLVLSIPGIGERTALALLIRMPELGRVSREEAAALAGLAPFDNDSGQYKGQRRIAGGRARLRRSLFAAALPAAFRWNKAVMALYARLTAAGKAHNTALVACARKLLIYANTVVQRGTPWTEKAA

SEQ ID NO: 397690 - protein, 409 aa, unidentified
MNNTLFVGIDVAKLTNHVYCLNLNRDKLLSINIPNTQDGANQIETHLLKLLEKHKLTKVIVILESTGIYSAHIATYLSASKYLSLFDIKVYIINPKISRNYRRSFADMDKTDPKDAYVLADIARVGRCDELTPFKGSQRLALERLTRHRLHIAEKLSNEKSYALNNVFLKFSNFETLFSNNFGTTAVDFLLEYKSIDDIINSSLEDLADFIAKSSKNRFDSSTDVAVKIQKAARASYRLDKTTYDPINFSLASSINVIRCYQNELKSIDKAIANQVAGFNHNHYKILTSIPGIGKVYAAGILAEIADINQFDSHSALAKYAGITWRKNQSGKYTSDDTHMTKTGNKYLRYFLIQAANMARMNIPEYRDFYHKKFNEVTTHQHKRALALTARKLIRLIYGLLSTNRLYKL

SEQ ID NO: 397691 - protein, 365 aa, unidentified
MKKIAYVGIDYHLNSLSLAVVVKGKNEPVDMVRLKNDDKLIRKYMSKLSERFEIKTCYEASSNGYSFQRKMAAWGYPCEVIAPSLIPRKPGDHRKNDFRDARDLAQNYAHGTLSIVHPPSEEEEAVRSLVRCRFAFKEAAKRVKQQINSFLLAQDQHWNRSKWTSQHRKWLWEMRMPNAYLQQVLDEHLAHLDYLETRLAHLDDQIEQVATSPVYAPSVKKLAAMKGIKTMTAMLLIAEITDFRRFPNPRALMAFLGLIPSEDSSGDKRKDGAITRAGNKRCRSALIESVQHYARSPHMSAQMKSDLSQLDAHSAGVAVKCLKRLHKRFWALTLKGKLRPVAITAIARELVGFIWAMMQPQPAIA

SEQ ID NO: 397692 - protein, 388 aa, unidentified
MQVAADRTDASTAIQTDLPAIFVSLELSRSTWLITSLSPGAGEKMSKHSIRAGDVAGLLVRLAQLKEKARGRTGRDFPIIAIQEAGLDGFWIHRVLQSEGIESHVVDAASILTSRRRRRAKTDGIDGETLVRTLLAYKRGEPRVCAMVKAPTPEEEDRRRICRERKTLVGERVEHVNRIKGLLFAQGVSDYEPLKRNRRARLEELKTGDGRPLPAHLKAQISRELDRLELVLPQLKAVEAERDALLKPVSEGCPAPAAMLAQLKGMGPEFTAILWSEGLFRSFSNRRQLAAYAGLAPTPWQSGSVAHEQGVSKAGNPRLRTTMIQLAWLWLRHQPTSALSVWFQERVQSNGGKMRKTMIVALARKLLVALWKYSTSGVVIEGAVMKTI

SEQ ID NO: 397693 - protein, 460 aa, unidentified
MRILGIDLAVVAKHRAILADERGRFIGRLVKFRTCQADLERVYALARRGMTPDEPLAVVLEATDIVWYPVAIFFQQRGATVYLVNPRMAADLARFYQRYAKSDRLSAQTLARLPVVNPDSLYPWVRWGPDYLALQRSCKEVERLTTQASAIQNRLRSTDHLGWPDLHRRVFANPFSRAARWFRDHFYDPRCVVEAGVSGLRQAWRAAEVYDGDEDWIEPLLTLAQEVLSLYGEQGSYLDYRALAEEVQREQRRLAKLEADAHFVRLQVMRPRYRQLHPSRNLETIKGVGQDGAAVHVAFVGDPSRFASNRAFRGWSGMVPYSDQSGEREGKGLRITQAGPDPVKKYAFLEAESARQWDPQIAAIYHDQMVNKGNHHTQAVCACATHLLDRIRVILTQDRPYELRDVDGTPVTTQQARAIIAERYTVPEEVRRRNTRRARRERAERRAERKEKKKRRSRSR

SEQ ID NO: 397694 - protein, 367 aa, unidentified
MEKHNTARKSSCGGKRTTGKLTIGLDLGDRSSRYCLLDEQGEVIEEGSLPTTRKGLDRVFGAAGRCRLAMEVGTHSPWVSRYLARLGYEVIVANARRVRLISESSRKDDKLDAKTLARLARIDPELLSPIRHRGVQAQADLMMIRARAVLVQTRTALINAARGLTKSYGERLPSCATYQMGTDQAELLSPAIRAALEPLLAEVETVTERIREYDKQLEQLCQTRYPETKLLKQVHGVGTLIALAFVLTVEDPHRFRKSRAVGCYVGLRPKRRQSGQSRPQLGISKEGDVYLRTLLVQGAHHVLGPFGKDSDLRRWGLKLAAQGGKNAKKRAVVAVARKLAVLLHKLWVSGETYEPLRLANRAQTVAA

SEQ ID NO: 397695 - protein, 342 aa, unidentified
MSEVSVIGLDLAKHVFQVHGADKAGRVVLRKQLRRAQVLEFFGRQPRCVVAMEACGGAHFWGREIGRLGHEVRLIPPAYVKPFVKRQKSDAADAEAICEAAQRPTMRFVAVKSEDSQAAAVIFRSRDLLVRQRTQLINALRGHMGEFGLVVPQGAARVTELVAAVADPDTLVPKAARPALQVLVSALEWLEAEIKGLEAEIVRRAREDETACRLMTIPGVGPLIATALVALAPPPQTFRRGRDFAAWLGLTPRQHSTGGKQRLGATTRMGERSLRRLLILGANSVIIKRHVHAAARPGSWLARMLTRKPPLLVRVALANKMARIVWALMRKGEDYRAPAVVA

SEQ ID NO: 397696 - protein, 346 aa, unidentified
MSHYVGLDVSVKSVSICVVNAKGAILARGETTSDPDQIASFIAKHAPDPERVVHESGILAIWLTRELEKRGLPIICIDARLAHKVLSGRINKSDAGDAEGLAHLARTGWFTQVHIRSEASERVRVLIGTRERLIRMRKDLEGHVRGVLKIFGICMGAVRRTKQRQGFRDQLAEAGTTDPAISVMVEMFNPIHKALCAATDAMNEELKIITRKSDLARRLMTVPGVGPVVALSFIATLDDAARFKKSKDVGAFLGLTPRRHQSGDMDWSGRISKCGDRDLRRLLYSAATTLITQVKKPSPLLTWAKRLYERKGFKKAAVATSRKLAVIMHSIWRDGTVFETKVEAIN

SEQ ID NO: 397697 - protein, 429 aa, unidentified
MTSNAFITAPTVWVAIDVAKFMHQVVSELPNGRRCTMRVANTKAALDGFVEPLQALGQRCAIAFEPTGDYHRPLAYVLGRAGVHVAQVSSIAVARTREALYNSWDKNDPKDAQVILHLLKHGTTQRYLDPLITGHLDVQEMANTYQQVSWRKARLQHSLLTHHVPLYVPEAERYLHRSRAEWVTSLLLFTPCPAAVRQFSNAALVTAASAQITGRKIDRARWLADVYEAACHRIGLPVMPDSEAVRMLRVVLEEYRALWALRKPLEGDIATRLANQPDFVRLQTLPGIGPILALIILAEARDLRRFGCARQFLKYGGFDLCTEQSGQFRGLTRLSTRGNARLRYAFWMAGTVAIRLQQNSFRRKFEDDIRPDPTNADRRRKGYTAVAAKMARVTYAVVTTGTDYRRFPEATRPGGRIPSPRAVEAQATS

SEQ ID NO: 397698 - protein, 336 aa, unidentified
MLYVGVDLHRKASQVAVVDEQGKLLFNRHVPSQREDLLRIFGEAGPVESMQVAYEATYGWGWFADLLEDVGIPAHMAHPRANKAIASARVKNDAVDAKTLAQLLRTGLLPESWIAPPEIREARRLVRMRTAMVRIRSRLKNQIHALLADRGLHPEGSDIFAGDLTRMSKQLPAVTKQRAEANLRLIEELDKEVDLADSHIHKFFARDEGVRRLLPIPGVGIITAAIVVAEVGDIARFPTARQFSSWCGLTPTEHSSADNIRRGHISKQGSRWLRWVLVEAACHAYRNRELSSFEAGIASRRGDKIARVALARRIATLCYHALRSPQGCRAFPARTR

SEQ ID NO: 397699 - protein, 359 aa, unidentified
MSAWYEGQQFVGIDLHRRRTVLVRMSEAGELLAPMVRFPSTAEALRREMTPAITAGGPPPQVVVEATYGWYWAVETLQQLGAQVHLAHPLGIKGFTHRRVKNDERDAADLADLLRMGRLPEGHIAPAPVRALRELVRHRAKLARWRGTVKSSVHAVLAKRGVVVPMSDLFGVEGIALLNSLCTVSGRSRLEPAYAARVTSLRTILALLEDEITLFDRRIAAALNGHRGYRAIQQISGIGPVFAGVFVAEIGEVTRFSGADKLTCWAGLTPRHHESDARVHRGRVTKQGSKLVRWAAVEAVQRSHAPGVADIRTRIAERRGRPGARGGRNVAKVAAARVLLKQVYYGLRDGEIRALAATA

SEQ ID NO: 397700 - protein, 434 aa, unidentified
MQSYYSILFITLDIGKNVHWLAAYAGFELKPVIEPLKVRSDKAGFERVTRLIDGLLSSGEYERVILGHEPTGIYHEAWARALAERYEAYRQGQCQPVLEYRFINPLLSKRQRETSGNGRKRKSDKLDLKAMALCLREGQGQPAFLPSAQALRFQLWGQAYRQNRRELRCLNVNLLSQLDRLWPGMLVNTKRFQKMHPELEVPVPLVLSKPLERQRVRVIIQHCPNPHQFLGLGQGGIQSFFRQHLGRCGEATASLAYPLVQQALLPPSELADLLADQLQLDFEYYLSLEQRFETLAHQAESLVPDSPAAVLTTIPGVSSLLAARYLAHLGHPQRFQKAAEVWALAGFDPLTEESGDFRRVGHISRKGDPDLRDTLFLIGLHTANHLPAIAQVKQRARQRGKGDIGATLHAAQKANRICHHRLYHQLPFDPARLR

SEQ ID NO: 397701 - protein, 368 aa, unidentified
MSKTENGRLCVGVDLHKTQFTVCAIDEEGEYLLERKYPTTEEGYEVFSQEMHGREEEGYSIELAVETTGNARYFKNRMEKEYFAVKVVNTNRFKVITLSTKKTDANDAATLAYYLMKEMLPEANLCSQTSEEIRRMLKTRTILVQSMVKIKNQIHGMMLGYGIETKAAQFQSKKKRQELMNDLADHEYSAFTASSLKVMLQIIDDLSEEIKRVEAQLAEMVKENEDVELLMSIPGVGINTATTIAAYTENLERFDGNYKRFASYIGIVPSVHNSNETKHLGRITKHGPQELRTAFVQAALGMVRLTKVTSEWRLIKDYHRKKDDKGSGRAIIALARKISRIVFVMLSKRETFNPDLMRITEQNFQQTA

SEQ ID NO: 397702 - protein, 421 aa, unidentified
MEVPHPRCAGLDVHKETVVACVRIVSGGEVSRAVRTFETTTVGLIELAEWLEASGCTHVAMEATGVYWKPVWQVLAGGGFELVLANASHVKNVPGRKTDVNDAMWIADLVACGLIKASFVPEQEIQELRGLLRTRKQLVREKASHVQRLQKTLEEPNIKLESVLSDVMGRSGRAMIQALIAGETDPAKLAALAHPKVRAPQARLREALRGRVKRHRRFLLDLHLQQIDALDAGIAAIDREVDAGLASFRDAVKQLSIPGVSELSAQVILSEIGTDMSRFATAAHLRSWAGLCPRNDESPTGQARGLKAHGKRRSTRLRMGAPWLKATLVQCGWAAARTKATYLNAQFVRLRTRRGPKKAVCAVAASILTAAYHMLKDGTFYEDLGAAHFDRRRPDAQARRLVKRLADLGFSVELKLPVAAS

SEQ ID NO: 397703 - protein, 403 aa, unidentified
MTTFFAGLDWASRSHAVCVIDEHGAVCKQFEVAHSATGLTELQRQLRTCGSPAVAIERPSGLIVDTLIEAGFTVVPVHPNVVKASRPRYRSHGGKSDTSDAYLLADLLRTDGHRFKPLAPQSDEIRALRALVRGRDDLVATRIQLANQLRALLQSFWPGAAAIFFEIDSPIALAFIQRYPTPDRAACLGPKRMAAFCAQHAYSGRRSPEELLARLRQAPVPACAGLEIEAKGALARSLACTLEHLVDQIRLLTARIEQHVAALDDGRILMSFPHAGRVCAAQILAELGNVRERFDSDEHLAAEAGVAPVTYQSGKSKAVTFRWACNHRLRAALTRLADNSRHASAWAANLYAHARARGCDHPHAVRILARAWVRVIWRAWRDRKTYQPQLHRGAAHLLAAAGG

SEQ ID NO: 397704 - protein, 356 aa, unidentified
MKKYIGCDMHKKFSVFVTMDERGRVEAPVKVANDSLELQEYLHSLATGTPVAVEASGGWYWFVDALEEAGLDVRLVHPLEAKKRMPGRNKTDTIDATGLAMLLRNGTLPEVWIPPATLRDLRGLLRTRLALRQHTTTLKNRIHGALRRYGQYEVGEPRNLFAGKGRVQLSVYVGALPPETRLATRHEWELVDQVEAHIRELEMRIRVGLGQLGYVRLLKTLPGVGEILAATIYLEIGEVGRFGHAQQLASYAGLTPTVYASGDKKRLGPTSRMANHYLKWAFVEAANCVVMHKQRYAQRHVVKLYERLRASKNHGKAAVAVARHLAEASWWVLTKKQVYREPAPASMSSSENGSAR

SEQ ID NO: 397705 - protein, 415 aa, unidentified
MATHLEINQYSAFVGIDWANAKHDICLHDPSNNKREFSVIKHSVEDIEKWALSLKKRFGGLIAVAVELTKGPIIYALQRYEFLVIVPINPTTLSKYRSAFKPSKAKDDPTDAEIALELMLRYPEIFTPLKIQSLNIRKLMYLVEKRKKLVNDKQRFVNQIINNLKQYYPQAIDWFPKKETNIFCNFISRWPTLQQAQKARRTTLQSFFNDNHIRSPEKVEERINEVKSALPLTDDEAVIETHAMMVLALVEIISILMKHIKCFDKKIAELMKILPDANLFETLPGAGVCYAARLLVAFGEQRDRFSSANEVQQYSGIAPVTERSGNKCWVHWRWQCSKFLRQTFVEWAAHSIYSSYWANIYYQKKRESGSSHQAAVRALAFKWIRIVYRCWKDRKPYDEVKYLNALKQRGSPLLG

SEQ ID NO: 397706 - protein, 331 aa, unidentified
MAQNEVVVVGIDVAKDKVDACIRSLSQRQTFASTAEGRRALIRWLRKHRVGKAAMEASGGYEQDWAKALREARIEVRIVDPKRVRSFARSAGRLAKNDPIDAEMIAWFAETFTEAPGQAYDAARERLVKIVNARQGLLDLQTNLKNSGEHTVPDVVQKMQARLLKKIAVEVAKLETAIAAQVKATPHFAELAEIIESVPGLGKITSAGLIATMPELGQVNDNIVAALLGVAPYDDDSGQRRGSRHIKGGRRKARNLFYMPCMGAATRHNPVLKAFYERLIAKGKEPKVALTACMRKLIVILNTMIARRQKWDANRYKVSDPARLPPSACPA

SEQ ID NO: 397707 - protein, 332 aa, unidentified
MQYKAFIGIDVSKRTIDAFIYGHNLYQQFSNDREGHRTLINWALKNLNIVIHTELLICFEHTGLYSLSLAAYFDEIKVPFSMVSALQIKRSSGITRGKTDRIDSKRIAEYAYLYRESLAVTKLPSKAILQLQPLLTLRDRLVRDRSGYEATQKEQLRFLKDQYLSALYDSYSQVIEVLKNEIKKVEKAIKEILDSNEELKQVFELITGIKGVGFIIGAYMIVYTHNFTRFGTWRKFACYAGIAPFEYQSGTTVRGKTKVSPLANKQIKRMLHMAALKAAHSDKELSTYYHKRIENGKSKLETLNIIRNKVVSRMFAVVKRKTAYVDLMKFAA

SEQ ID NO: 397708 - protein, 351 aa, unidentified
MRTSQKITGIVTTIGIDIGKNTFHLVGFDQRGAIILQQKVSRGQLERRVANIPRCLIGMEACSGSHHIGRQLAETGHDVRLIPAQYVKPFLKGHKNDYRDAEAIAEAVQRPTMHFVTIKTPEQMDLLALHRVRSRLVGRRTGVINQIRGFLIERGITVRQGPMPLRKALPEILSSDTGALSPRMVGLIADLAQDWRRLDERIAAVSAEIEALAEQDDSCQRLMTVPGVGPIISSAVVAAIGNGTGFKQGRDFGAWLGLVPKQESTGDRTILGKISKRGNKYLRTLFVQAAHVVLERRPSAAMRGLWPWVEQASKRLHRNMLAIALANKLARVAWAVLARGGTYQPRITHAA

SEQ ID NO: 397709 - protein, 466 aa, unidentified
MYNQRYFLQESLAIVKFITVTARGHASGDACGSLCNCEHLPCVVPPAIVGLQDICQPNSRFDSTSPVNALLRWDEKAGLHGMRYAPNNRRARSTRERRPAVKKISTVAKRGNEIFEEPKLTIGLDLGDRTSHYCLLDEAGNVILEHSLPTPPKGIQQVFSRISRSRIALETGTHSPWVSRQLTRLGHEVIVAHARNVRLGGESSRKDDQFDARTLARLARIDPDLLGPVRHRSAKAQIHLTVIRARAGLVSARTALVNTARGLAKSYGERLRKCGTGQVGRALAGGLSAALRDALDPLLQGIESLNERIAEYHRRIEQIAKEVYPEVALLKQVKGVGTLIALTYVLTLDDPHRLRRSRDAGCFLGLRPGRRNSGMSEPQMHISKEGDRYLRTLMVQGAHYILGPFGEDSDLRRWGLKLAERGGKNAKKRAVIAVARKLAVLLHKLWVSGEVYEPLRNNHKVVSAVA

SEQ ID NO: 397710 - protein, 342 aa, unidentified
MKEFIRIGVDLGKRYIQIHALESKDGRAVKRKLPRSKFLEFFADVAPCLIGMEACGSAHYWARQLRAMGHDVRLMPPAYVKAYVKRGKNDAVDAAACCEGVSRPDMRFVPVKSEEQQATLTLHRTRELLVRQRTMCVNALRGHLTEFGLVAAKGIGRAGELIDMAGNDAALPEIAKSVVKIFAGQLAAIQASIAALEKEIAGVHAQSPMSQLLAGIPGVGKIIASAIVASVPDPQVFKSARDFAAWLGLVPRQNSTGGKTKLGPITKKGDRYLRKLLVLGATSALRVAGKRKGALRDWLAALLEKKKSARLASVALANKLARIIWAMMTSGETFRKDMFEPA

SEQ ID NO: 397711 - protein, 326 aa, unidentified
MFFIGIDVSKAKLDCCLSLDVEGTKRRAKSVPNSKPGILGLLAWCAKHQLAAQDLHAIMEGTGVYHEQAALALTDAGVTVSIVNPAQAKDFGRSLGIRTKTDGVDSLVLARFGALLNPRPWTPPAKEARVLQALLSRREAIAQDLRRERNRLEKADATDTPASIRQSIVDAIIFLEKQLAKLQQDIDNHIRKCPKLKADRDLLVSIPAVGPQVGNHLLAVVHNHHFQSAGQLAAYLGLVPIERQSGSSILGRPRLSKAGPARIRAVLYMAAVVATKHNPHIKALYQRLQERGKSKMSALGAAMRKLVHLCFGVLKTRQPYQANYAI

SEQ ID NO: 397712 - protein, 311 aa, unidentified
MTDDTIGIDISKATLEIYRLSDGKAMSFSNCPAGFKSLARFCAKTAVARVVYEATGAYHSGLERALGAHLPLVKVNPLQARRFAQAQGVRAKTDAVDAKMLAEMGNVFALEPDEPAGKIQHDLKELRSFRAGLLKDRTGIICRLKIQTLSITRRHSKARLAQVDKQISEINDEVARLISSSDTLAHSMKILRSIPGIGAVCAATILTEMPEIGSMDRKQVASLTGLAPMTRQSGQWRGKSFIQGGRKIVRDALYMPALVAMRHNPEFRAKYQALIKAGKPPKVAITALMRKLIELANALIKADRNWEPKRT

SEQ ID NO: 397713 - protein, 370 aa, unidentified
MAKRSMFVGMDVHKESIDISVAEEGRDGEVRHYGRIAGDLEALAKVVKALRAPGRQLRFVYEAGPCGFGIHRYLTTQGEDCAVVNPSSMPKRSGDRVKTDRRDADALARLHRAGELTAIYIPSADDEALRDLVRAREDAVTLGTQAKHRLKAFLLRQGRRHPGRAGWTQAYRRWLADLSFPRAPQHIALQEYRDTIDETERRIERLTEQLRQLTPAWRWAPVVDALQALRGGSFVTAVGLVVEIGDIRRFDHPRQLMAFLGLVPSEYSSGPSVRRGGITKAGNPHARRLLAEAAWAYQGPPRIGRQMLYRQEALAPAICAIAWKAQLRLTARFRKLIARGKAKPTVATAVARELTGFIWAIAQEVPPPAA

SEQ ID NO: 397714 - protein, 345 aa, unidentified
MEYFAGIDVSLEVSHVCVVDGVGKIFREARVMSEPVALVDFFRRLEVKVTRIGLEAGPLSQWLHAGLTGAGFATELLETRHAKAALSAMTVKTDRKDARGIAQLMRMGWFRSVHAKSASSQEVRALLVVRKQLQAKLIDVELSIRGILRGFGLKVGHVTRKNFAARIQELVAGQAMLERVAGAMLSAQAILREEFNKLHKALLSIVRSDVVCRKLMTVPGVGPVVAITFKSAVDDPTRIKKSKAAGALFGLTPKKYQSGEIDVTGGITRVGDETVRCALYEAANIMLSRVTRFSALKRWAIDVAKRRGMKRAKVALARKLAVVLHRIWIDGSAFRWSKTQPAVAA

SEQ ID NO: 397715 - protein, 406 aa, unidentified
MKVYIGIDWSENKHDVCFLDETGEVLLVKQIAHTIAGFRQLDQARQSLGVGRQEVIIGLETAHNLLVDYLWDQGYEQIYVLPPAVVKSAQKRYRQSGAKDDRWDAHLIANLLRTDQRCYTPWRPDQPLTRQIRAEVRFAQQLGQEGVRDGNRLRSLVLRYYPAALDAFPHLDSLVFLAFLQAYPTLSQAQALSFEQLKVFLREHHHTQVRSWPTIYAGLHSDHPVSNPDLDAAYAPLAVAQARILETLIRSRNACLARLDKLFQLHPDHEIYDSLPKAGTLLAPALLAKLGDDRARYPTPAVLQAVAGTCPFTKRSGKHAYVLFRKACDRDFRHIVQQWARLSLDASPWAATYYHTVRPHCRTDNDAVRRLANRWLEILWRLWVDRKPYDEALHLKQHTLRNQIDY

SEQ ID NO: 397716 - protein, 279 aa, unidentified
MKDMMIGVDLAKNVFQIHGALRAGEIQFRKKLTRKQFTAFMARQDPCLVIFEACGSAHYWAREMASLGHVVKLIAPQYARPFVKRQKNDAADAEAIVIAARQPEMRFVAPKTVEQQSQAAVFRGRERLVHQRTADVNALRALLYEHGYVFPAGIRYLDRMTALVEDEASDLPALIREECQDLLAQIAEKTARIIERTAKLKTLAAQSDRARRLQTMPGVGPLTAIAVEAFGPDMAQFKTGRAFAAWLGLVPRQHSTGGKVRLGRMTKAGQADIRRLLII

SEQ ID NO: 397717 - protein, 355 aa, unidentified
MNSVRYIGMDVHRDTISVAVLDQSGRLMMESVLQTRAAAILDFIHGVRGTLHVTLEEGTYSAWLYDLLVRRVARLVVCNPRKNALLKSGSKSDAIDARKLAELLRADMLSAVYHGETSGLEVQHGARSYTLLTEDTTRVMGRLKAVFRGQAVACAGKKLYGKRHREDYLAQLGVGGLRRRAECLYRELDALQQLRRQSRRELIVECRKHAAAPWLQSVPFLGPIRAALLIGRVQTPHRFRTKRQFWTYCGLALETRDSGEYRVLNGQVERKRKAALIRGLNWNHNHEMKNLFKAAATTASMRPGVFREFYLGLLAKGMRPEMARLTRARKIAAIALQIWKKGEAFDAEHLKLQAA

SEQ ID NO: 397718 - protein, 341 aa, unidentified
MQITTVGLDIAKNVLQLHDIDGEGRAVLRRKVRRDQLLKSFGGLEPCLVGMEACATAHHWARELGALGHEVRLMPPAYVKAYVKRNKNDAADAEAICEAVTRPTMRFVPIKSTEAQSVLMLHRARHLLVRQRTAQVSAMRGHLAEYGVVAAKGLSRLRDLLPVLDAGAGILPELARQTLLLIAQLIEALTVQIRKIETELLAWHRSNPASQRLETIPGVGFITATALAATVLDAGAFRSGRQFAAWLGLVPRQNSSGGKDRLGGISKMGDRYLRHLLVVGATAVVRYTRRKATTISIWASRLLDRKPARLVTVAVANKMARIAWAVMARNENYRTTTAVAA

SEQ ID NO: 397719 - protein, 402 aa, unidentified
MNCVGIDVSKGKSMIAVMRPFGEMVVSPFEVHHTANELSELARLLKSLDGETRVVMESTGNYHTPVAWLLHDAGLYVSVVNAMLVHDYGNNSLRRAKTDKKDAIKLANYGLDHWLTLPRYIPEEDTRLMLKICYRQYQQYSKVQTMLKNNLISLLDTTFPDANRLFTSPPRADGSEKWVDFVATFWHCECVCGRSEKAFTTQYQKWCRKHGYNFSEDKALDIYASACRHFGVIPKTDTAKLLVEQAISQLQTTSSALAALKQEMQSLAASLPEYPVVMGMFGVGPTLGPQLLAEIGDVRRFHSKKALVAFAGIDAPPYQSGQIDVRSRSISKRGSASLRRTLFLVMSVILQCAPIDEPVYQFMDKKRSEGKPYRVYMMASANKFLRIYYASVKAYLESLEHD

SEQ ID NO: 397720 - protein, 350 aa, unidentified
MQYLGIDWGTRRAAWCALTASGELTEGTIAADEDGLTRLVARLGTDVRGCIEMMSGAVWVRDSLQACGWTIEIADARKVKAIAPLACKTDRVDARVLADLVRRDLVPTVWVPPLDDRAIRERLRRRSHLIRLRTSSINRTFGLLTQWGLRRNLTALRQPGALGELAERGVPEVWRHSITTLLAVIDDLDRQLAPLERELRPLARSDERARLLMSIPGVAELLGLTIASEIGDISRFPSARKLVGYSGLTPRIKQSGQSTRIGRLSKAGPDTLRWAAVEASQQAWRPNNPWHELYTDIKRRHGKANPAKAAVARKVLIASWHILSLGEPFKPSAPRATDPVPASSSIRLAA

SEQ ID NO: 397721 - protein, 341 aa, unidentified
MEDVTLVGIDLGKHVFHLHGQNTAGKAVFRKKVSRKQLVEFFATLHACTVVMEACAGAHYMARKLTTFGHQVKLISPQFVRPFVKGNKNDFVDAEAICEAAARPSMRFITPKTESQQTLLALHRVRESLMHDRVRATNQIHGFLLEFGVSLPKGEAVIKRLASVLAEHPLPPRLIAVLERLHAHIKYLNEELDEINGELARQLADDDLGQRLLTIPGVGPVTASVLTAAMGDGKQYGCSRDFAASLGLVPRQYSTGGRSNLLGISKRGDKHLRWLLVQCARAAMRWLDRQCGPMADWVRSMLTRRHPNVVACALANKLARVAWALAAHNTTFNAGSAVLPA

SEQ ID NO: 397722 - protein, 334 aa, unidentified
MENIALIGIDLGKNSFHIHCQDHRGKAVYRKKFTRPKLIEFLATCPATTIAMEACGGSHFMARKLEELGHFPKLISPQFVRPFVKSNKNDFVDAEAICEAASRPSMRFVQPRTESQQAMRALHRVRESLVQDKVKTTNQMHAFLLEFGISVPRGAAVISRLSTLLEDSSLPLYLSQLLLKLQQHYHYLVEQIKDLESQLKRKLDEDEVGQRLLSIPCVGTLTASTISTEIGDGKQYASSRDFAAATGLVPRQYSTGGRTTLLGISKRGNKKIRTLLVQCARVFIQKLEHQSGKLADSVRELLCRKSNFVVTCALANKLARIAWALTARQQTYEA

SEQ ID NO: 397723 - protein, 308 aa, unidentified
MTTIYTGLDIAKLNLQLHLAGRIHDLPNTAAGHRRLLKHLATHAGAHVVCEATGGYERDVVAALHEAKVPLSVLNPARVRHFARATGQRAKTDDIDAAVLTAYGQALQPKPTAPRTEQEQQLAELIRRRVQVLEILVAQRQQVQRLTLPTLRRQAQSLVRRLERDLEQIEGQLKTLRTQAAALDERVQKLEAITGVGTITALGVLAELPELGTLNRRQAAALAGLAPHPRESGQWHGRRSIGGGRAPVRRALYMAALVAAHSNHQLKEFYQRLRAAGKPAKVALTAVMRKLIVLMNLILKNPNFALQN

SEQ ID NO: 397724 - protein, 343 aa, unidentified
MTIVAGFDVHRRQITFDALDTETGELTRGRIDATPAAVERWVARFEGREVQVALEACTGWLFVSRALERAGALPHLAEPVETSALRGRKRRAKTDREDARWLRTLLSEGRLPESWIPPEHVREWRSRARLRKTLVEERTQWLQRVQATLFHHGIGGAPAELHSDAGREFLRELELPADARERIAIALAMVDSLEGQLRPLESELRKLARRQTGCRALMAQFGMGELTALMTLTELGDVQRLSASRKAVRMAGIDIGVHRSDRRSRVGKLNRQGSPHLRWALYEAALSATRPRSPDHEDYLALKARGLSHTRASLTIARKLARRSFHILRELGPAALDPITTTN

SEQ ID NO: 397725 - protein, 337 aa, unidentified
MEYFAGLDVSMAETHVCVVTRNGEVIHNAKVPSTPADIAGELAQVPLCRRILFETGRMAPMLYHGLSQLGLPVICIESRQAYMALKLLATHKTDRNDARGLAHLARTGFFKPVHVKSLPAHAVRSLIIARKKLVGQRVTLENQIRGLAVVFGVRLPRALSPAFIRQALQASEGIPGLSAAMRGLVAARTAVLAAIVAIDGDIRRMVRASDACRRLMSIPGVGQLTALAFTAAVDDPGRFRRSRDIGAYLGLVPRRYQSGEVDYTGSISKCGDRRVRTLLYEAANVMLTRYKGPLKLKDWAFAIAKRSTMRKARIALARRLAIIMHAMLRHGTEFKAA

SEQ ID NO: 397726 - protein, 316 aa, unidentified
MSLQPCFVGIDVSQASLDIAVRPTAETWQVSNDEAGITTLVTQLQALAPTLLVLEATGGYHGPVTAALATASLPVVVVNPRQVRAFAQALGILAKTDRIDARVIAHFADAVRPPPRPFPDAETQELRALVLRRRQVIAMLTAERNRLGTAPARIQPAIQQHMAWLEGQLAALNDDLTATIERSAVWQAKADVLRSIPGVGPVLSRTMLAQVPELGTVGHKQVAALLGVAPFNRDSGTLRGRRTVYGGRGEVRAVLYMGTLVATKHNPVIKAFYTRLLAAGKCKKAALTACMHKLLTMMNAMVRDLTPWQPREVAIA

SEQ ID NO: 397727 - protein, 408 aa, unidentified
MRTVHERCCGLDVHKKTVVACVLTSTSKETRTFGTMTHELLEFVEWLEQERVTHVAMESTGVYWKPVFNLLEGHDFELLVVNARHTKAVPGRKTDVKDAEWLADLLRHGLLRASFVPDRSQRELRELVRYRRTLIHEKTRLITRVQKVLEGANIKLGDVASNVMGLSGRAMLKELAAGNTDAAAMAELAMSNLRPKRQRLAQALEGTVAAHQRFLLRSQIELIEMMEKQIEAINVEVEERMRPFQPALDLIDQIPGIAQHGAEQIIAEIGIDMSRFPTPAHFASWARVCPGTNESAGRRSKTGTGDGNPWLRSALIEAALGAVRAGRAHPNFFAARYRRLAGRRGPKRAQMAVAHSILIAIYHMLRDGTHFVDLGPEHWDQRHKESVARRSIRRLEQLGYKVTIEAVA

SEQ ID NO: 397728 - protein, 314 aa, unidentified
MKKKAERFVGIDISKSWLDVAVHEQGETFRSRNTDEEIAVLVKRLKKLKPTLIVLEPTGGFEKLVLAELTKAGLPAVVVNAKRVRDFARATGQIAKTDALDAKVLAHFAAAVRPAVRALRSEEEEQLSALLTRRKQILDMLTMEKNRLVTVRASMRSEIKAHLQWLTASLKALDKEIDTFVESTALWKEKDDLLQSVPGVGRVTSATLLGMLPELGQLDRQAIAALVGVAPVNKDSGGKHGRRRVYGGRADVRSVLYMAALAAKKFNPVIRIFYTRLIQHGKEKKVALTACMRKLLVILNAMVRSNTPWRFQPA

SEQ ID NO: 397729 - protein, 436 aa, unidentified
MSKKLPILDALAAFVDVGSEHMHVSVGGAAPAVFGAVTSQLHALRDWVLAQGVRCVAMEATGVYWLPLYAVLEAAGLEVRMVNGRQTRHAPGRKTDMADCQWGATLHMHGLLRAGFVPPADIRRLQDYLRLRAEHVGAAAGCVQLMQKALERMNIKLHDVIASLAGMSGLAVARAIVAGERSPQALLALCDVQIRRKKAQAVIESLRGTWCDEHVFALGQALQSWDHYQRLIAECDARIAAVLPAHDPSQPPLQRSAKRAGVNAPEIAKLREILAQMCGGRDLTRLPAHTHYGVLQLIGEVGTDLSVWPTEKHFTAWTGLAPTNHDSGKRKGRTRRGRNRAGQLFCMMAQSLVRSKDIALGGFYRRLAARRGGLVATKALARKLAAWFWRVMVKGDDYVERGLADYDDRVRKTKERALRRLAKELGQQLVPVNSTA

SEQ ID NO: 397730 - protein, 441 aa, unidentified
MANVGGRLQAQFMARIRGLDPERCLEVPVDVGKSAAMSLIADHYGDMVVAPFEFALTETGFAVLAAAIARAEATRSAEVVRVGVESAGHYHRTLVARLRTGGHEVVELNPAAVKEARAQQLLRRLKSDARDLGAMAELMIRGAGRPPAVRTDALATQAAWVAHRRRKVAAWVSLANQVIGQLDLVFPGLDGCFADLLGARSGRVIVTDICDPDRVRRLGVEGLRRFVARRGVALSGPKAAQVVEAARVALRLPSAERAVLGRVLAADVALLSSLDTEIVMAEASLGEVLADTPAGILTSLPGVAVVRASNYGAGIGDPARFSNAAAAYRASGLVPTSYESAGRARGRQHISREGSVELRQAIIELGRGLSQHEADFRDYRRRLLDAAKPASVAAVAVGHRAHRLAFAMLRDQQPYDPARWTTSVAAGMTAMAKPLRATRTT

SEQ ID NO: 397731 - protein, 316 aa, unidentified
MSFSQSSYDCFLGFDVSKDEITVFNSRTDKVTTVANRKAALADFLRDYGQESYAICEPTGGYETLLLSELQTAGITTHRADTIRVKAFIRSLGTIGKTDAIDARGLSLYAQERWKDLARWTGKDKSIDKLQALVLRRQDLVAIRVAETNRAKAPGNAILKPSFRALLKTLENQIRLIEQKIEETVTQSEELSRVSLAVRTLPGIGPVTAHTLCALMPEIGTVTGKQAAALAGLAPHPKDSGTLNGYRRVRGGRPQIRKAIFMAAMSAIRTTGKLKFFYNRLIERGKKKMVALVAVMRKIIVIANARVRDSYIAQQS

SEQ ID NO: 397732 - protein, 394 aa, unidentified
MKLIGIDIGKNKHFFCVMDQQTGEIISQPVSFSNDKEGFDFLVQKIKSYPKDSILIGMEDTGHYHFALLKYLLDLQYTVALINPKTTDFNRKMQGGITKNDKLDTINICDVLDTPERKKQYRITKVNSFDLYEQKQLTRHHHNLKEEENVYKNRLQKCIDIVFPEFNKLFNSKYGIVYMNILKMFGSAENIANTDIRTIRKCFEIEGRGNRISLTPERLKECARSSIGISSSAEVIQIKHLTAQIEPIEEQLTEIDKKIEEFSIQNNSPILSIPGISHFSGTSILAELGDISNYSKPSQIIRFAGVAPLHYESSQFNAQHTSITKKGSKYLRKTLYQIILPVIKHNPVFYKYYQLKISQGKGHRCAQGHCVRKLLRIIYHLLKTNQQFDHQLLR

SEQ ID NO: 397733 - protein, 332 aa, unidentified
MNMHLQGGVAKGDRRPNAGVDVSKHHLDVCFNGQTHRVANDAQGWDELTARLRREQVDLIVLEATGGYERGLLCALQSAQLCVARVNPRQVRDFAKSMGVLAKTDRVDARVLCDFADVLARHAGRERYVAPMLEQARQTLAELMTRRRQLVDMRVAEHNRLEHAGPKAQRSIRSVIKLLDRQLESIDRQIDDHMDEHFKQQRQLLDSVKGVGPVTILTLTAMLPELGQLGRRQIAKLVGVAPLADDSGTRQGKRMTWGGRAEVRSVVYMAAIVAMRHNPVIRVFYERLVAAGKPKKVAIVACMRKLLTILNAMLRDQATWNAARHLSLTIGA

SEQ ID NO: 397734 - protein, 326 aa, unidentified
MKKNFIGIDVSKLKLDVYSNTHSQHCIFPNDEEGFDQMIKWLKSMKISVKSMAFCFEHTGIYSEDLALYLSSKKICFYMVSSLNIKYSIGLQRGKNDKIDSKRIASYIALHAEQLNPTVLSKTAVAELRKLLSMRSHLEKEKIGIKNRLKNSSKTTGLDLVFQIETDLLKTFKDKLKMVENEIKSLIKSDVHLCQVDELVQSIKGVGPISSWYLIATTNGFEYFENARQYACYSGIAPFERSSGSSIKGKTQTDRRSNRKINGILTMAARSAVLNNPEMREYMERKIQEGKHYNCALNAVKNKLVARVFAVVKRKTPYVDLKKYAA

SEQ ID NO: 397735 - protein, 344 aa, unidentified
MKPTTIGIDLAKQFFQVHGVDEAGRALFNKQLRRKQMAEFFVNLPPCLIGMEACSSAHYWARKLQGFGHTVKLMAPQFVKPYVKTNKNDAADAEAICEAVARPNMRFVPIKNVEQQGVLALHRARQSFVKARTAQANQIRGLLAEFGIAIAQGIGRINREVPDLIEDASNELPGMFRRLVQRLLDHLKALDKQVDEIEAQIVAWHHQSAQSKKLEKIPGIGPLTASALVASLGDARSFESGRQVAAWLGLVPRQHSSGGKQNLLGISKRGDCYLRTLLIHGARVVIYHASKRVDSGSWINQVVARRNKNVAAVALANKNTRTVWAMLAHDRQFQSDYTPALAAA

SEQ ID NO: 397736 - protein, 419 aa, unidentified
MAFKIFRKNCCGLDVHKTWIYACMGITDTNGRTEYKQARFSSFTKGLQKLADWLAKYDCNDVCMESTGKFWIPVFNILEKTCWVTLAHPKYTKPQKGNKTDRKDAKWICDLYMCDMVNPSFIPPPDIRQLRDLMRYRSKLTNIMTSEKNRALNCLTVSNLKLDDVFSNVFGKSSRSIVQHILEHPGEQFDVAPFLDRRCKHSVEDVQAAVDGAMSREQAAKLRECLLHIDQLNGHRETIETEILRLAQPYSHQLELLRTVPGFSAAPLTAVALISEIGVDMSVFPSAKHLASWAGCCPRNDQSNNKVKSTRISRAGCYLKPLLVQIANAVIKSDKYPECKERYRRIKARRGHKKAIIAICRMLLTAIWNVLSKLEPYSAKGYLEDKLTEHSVVISKSQGLELLRKRGYIFKDEVSADSG

SEQ ID NO: 397737 - protein, 365 aa, unidentified
MASVTSAPGPIHLGMDTSKKTIVVAVLMPGEEIPVLDRIWNEEGSVRHLIGRLGGAGALRACYEAGPCGFELHRLLSSVGVACDVVAPSLIPRRAGERVKTDRRDASRLARLHRAGELTAIRVPTEAEEAVRDLVRARAALMADRRRAQQRITAMLLRHGRVWRGTSWTEAHERWIAGQRFGEPALALALAHYRAALDTRRAELDAVEAELAAWAGKPPLGEAVARLGCYRGIAALNGLTLAAEVVDWRRFPAARAFMGFTGLVPAEYSSGERTRRGSITKAGSAPVRTALIEAAWAYRFRPAIGVTLRRRQHGAAPDTLARSWQAQRRLHARYKAMTARGKPAGVAVTAMARELAGFVWAEMTS

SEQ ID NO: 397738 - protein, 341 aa, unidentified
MESTTIAVDLAKSVFQIAVSPQPGQVRLERRLTRDRFLPFFAQQPPATVLLEACGSAHHWARELQRFGHEVRLLPAHDVHRYVRRNKTDRGDAKALLEAARNDEIRPVPVKSVDQQTIASLHRLRTTWLATRTSRLNTVRGLLREFGIVIPVGAQHVVPMVHALGDDARVPPLLQSVLAATATEIRALDAQLDAVDQQIAQLARAHPTAVLLQSVPGIGALTATALVAAVGDIHRFPSGRHFASFLGLTAKEASSGEQRHLGAISKRGDGYLRMLLIHGGRSLLWSAKQRRRPDALRAWGLRLEQRRGHNVAAVAVANKLARIVWAVWRHGTPYRGGAVPD

SEQ ID NO: 397739 - protein, 412 aa, unidentified
MEERIGADGIGVVGGVDTHRDTHVGAVVDTTGRLLGSAQFRADATGYGRLVAWMESWGRISRVGVEGTGSYGAGLARHLIGAGIAVVEVNRPNRQLRRRRGKDDHVDAEAAARAALSGQATAVPKSGDGPVEWIRMLAVVRRSAVKARTQAANQLHALVVGAPESIKDQLSDMKFNAQVRVCARFRPSGESSVSYAKQALRRLARRYQTLDTEIAELDVEIKRLCANANPALLATKGVGPDTAAKLLVAAGDNPQRMKSERSFAALCGVSPVQASSGRTVRHRLNRGGNRQANSALWRIATTRMRTDAATKEYVTRREAEGKKRTEIIRCLKRHIAREIHRLITNPPPTPNCAKLRSQRRQARITITQAARAIRTQPSRISALELGRDHNHQLATQYQNWLQTHHPDPSTST

SEQ ID NO: 397740 - protein, 399 aa, unidentified
MTESTLIVAGADTHADTIHLAAISMTGAAIGDREFPTTRAGYAAAIRFLTSLGQVERIGVEGTASYGAGFTRTLTAAGIEVVEVTRAVKSTRRLKGKSDPLDAYSAARTALAGDGLATPKDDTTAGLRALHIARRSAVKHRTAAINQIKAMVVSAPDAVREKYRGLTTLRMIEAIARCRPDAQADPWAQSVLTAAKMLAQRVQFLETQAEALEAQIDAFVAEANPGLRAAYGVGSDTAAQLMITAGANPHRLHSEAAFAALCGVAPVPASSGKTNRHRLCRGGDRAANNALFRIALVRMSHHQPTKSYVQRQLALGHTRMEILRKLKRAIAREIFKLLTRQIAVPEYRDLRPARQAKNITVTAAANHFGVWPTVISRLERGLQRDDAFADTYRNWLKAA

SEQ ID NO: 397741 - protein, 312 aa, unidentified
MYYIGIDVSKKDLAVFDGKKDWKFINKEGLKSFKKYLKKKVNFSDLVIIFEPTGVYSLYLKEFCAQNSIKAYIVNPKKSHNFTRALGKRSKTDKIDARILYQFHKHIDSKDIKVPKIDQQAKVLASYLTSYEFALKQRISLSNHLESLRDKRLMALMRKDLKRAKKLEDKIFNDILEYVSKNQNLKEDYQRLLTISGVGDKAAIALLTLFKTYQGTNRAQITALAGLDPIRRESGTSVKGKVKISKNGKGIYRKILYLPTICATVHNQKIRVFYQRLLAHHKIKKLAVIASMRKILLIAHAMYRDKTEYVAA

SEQ ID NO: 397742 - protein, 403 aa, unidentified
MNAVGIDVSKGKSMVAVMRPLGELVVKPFEVHHTANELKDLSDLLRGLDGEVRIIMEFTGRYYQPIARYLVEAGFFVGVVHAKLIHDFGNNSIRKVKTDRADAIKIANYGLSTWISLKRYTPEDETRLLLKTCNRQYNQYMKLKVSLKNNLIAILDQTFSGLNEMFTSPVRADGHEKWVDFAEKFWHCEIVSSMSRAKFTTQYSKWCQKHGYNRSDSKASALYELALNQVATLPPTTQTKALIVQAISQLNFVSVSLAELRRQMQQLAASLPEYPVVLAMSGVGETLGPQLIAEIGDVRRFSHKGALVAFAGVDAPPFQSGVFESASRSISKRGSPALRKALFQVMKSILKNSPSDDAVYQFLDRKRAEGKHYYVYMVAGCNKFLRIYYARVKEYLITLENIS

SEQ ID NO: 397743 - protein, 416 aa, unidentified
MKIVRPICCGMDVHKNIIVATIGITNKKTRITEYIQETFSTLNPDLLNLKQWLINHKCFDACMESTGKYWIPVFNILEDEINIYLTHPKYVKAIKGKKTDKKDSKWICDLFKHDLIKFSFIPPKEIRALREISRYRYKLVGMRSSERNRYQNCMTVSNIGIGSVFSDPFGKSAQAIMKEVLESDIIEDEKILKCIHGSCKNKDKILDSIKHCNIETDQRFKMNESMTHMEELQVHIDNCEIEMMKRAAPMFDRFMHITQLPGISTLSAILIISEIGVDMKQFESDKQLTCWAGLAPANNESANKKKSVRISKAGQYLKPLLVQCALGAIKDKEGYFGIKYSRIKKRRGHKKAIIAIARMMLVSIYHMILTGETFNPSDYESFRNPNPPIKQQVLTEESAIEFLKKSGFDVSKLTKP

SEQ ID NO: 397744 - protein, 278 aa, unidentified
MKLYVGLDVGLEETSVCIVDGDGLTVREVKVSTEPEAIRSAVEGCADRLDRVGVEASSLGFWLYRELQPAGLPMIVVEARHMRVSLSTMRNKTDRNDARGIAQMMRLGWYRAVHVKNIEMQKMRSLLANRKLLKRKPIDLENHIRGTLRAYGLMVGAVGRGGYEAQVRELIEHSDPVFSVMIEAMLDVRRAIFEGYERLHKVFLQVVQHDTICRRLMTVPGVGPVAALSFKVGVDDPLRFARSRTVGAHFGLTPRRHQSGTSIDFEGRITKQGDVAVR

SEQ ID NO: 397745 - protein, 342 aa, unidentified
MGQITTIGLDIAKSIFQVHGIDATGDIVVRRRLSRARVAPFFEKLAPCLVGIEARATSHHWARELRKLGHDVRLMPPSYVKAYVKRQKNDTADAEAICEAVTRPTMRFVEVKTREQQSVMVVHGTRTMLMRQRIQLSNVIRGHMAEFGVVAPVGREGLLTLIDTLHEETDDRVPAEARHCLRMLAAQLRLVNVQILENDRWIRASARATDVGRRLMGIPGVGPVLASAFVATVPDPHAFRSGRSLAAWIGLVPRQNSSGGKERLGGITKQGNRYLRQLLFVGAMAVIRYAERHGTRRPWLVQLLARRTTKVAAAALANKTARMVWAIMTSGQPYREPKLRAA

SEQ ID NO: 397746 - protein, 347 aa, unidentified
MRFYTKQHQFYCGIDLHARTMYVCILDQHGTILVHRNMKASPDMFLKAIAPYRADLVVCVECIFTWYWLADLCAQEGIPFVLGHALYMKAIHGGKAKNDKIDSQKIAALLRGGMLPEAYVYPAEMRATRDLLRRRTHLMRKRAELLAHVQNTNSQYNLPEIGKKIAYKANRAGVAERFEDVAVQKTIEVDLALITYYDDLLKDLELYIRKTAKQHDANTLYLLQTIPGIGKILSLVLLYEIHDIRRFPRVQDFASYARLVTCSKESAGKRLGTSGKKIGNAHLKWAFSEAATLFLRQNPAGQKLLGRLEKKHDKGKALSILAHKLGRAVYHMLKRKVAFEMDLFLRS

SEQ ID NO: 397747 - protein, 345 aa, unidentified
MQIKSIGIDLGKTTFHLVALGARSQVVIRKKFSRSQLLTYTANLPSSLIGMEAGVGSHFLGRALREQGHEVRLIPAQFVRPFVKSNKNDYCDAEAIAEAVERENMRFVPIKTEDQLDLQALHRVRDRLVARRTSVINQIRAFLLERGISFRKGPASLRRQMPEILENADEKLSTRMRRLLDFLWQEWKGLQLQIENLNTDLEQIATSDPTCVRLQQIPGVGPLVSTAVVSAIGNGAAFKKGREFAAWLGLVPRQWSTGGKPKLLGISKRGNPYLRKMFIHGARAAVLRVKRDGSTLGKWMSGLETRAARNVVIVATANKLARISWAVLATGNPYQARHQAAAVSN

SEQ ID NO: 397748 - protein, 360 aa, unidentified
MRYCTSIGIDTHAKKNEVCALDTQTGEVFSATLSDDPAQLIIWIGQHNFAQPLCCCYEAGPTGFDLARKLKAAKIRCIVVATSKLPQRIDRKKNDRVDAEWLARMLAAGSVRPVHVPTVEEESLCHLSRLRGEVAMDLRKSKQRVQSFLLVTRTNYTLTKTYWSKTFYRWAESYEFSCPADTLVFRHKMSAVLRLSERLAQIEDEICRIIEVDPALASKMARFRCIHGIGKVTAFSLVCEVYDFDRFSSGRALAAFMGLVPSESSSGQKITRGRLTKTGNAHLRRILVEVSNCYSKPFKIAKSEDAGVPEGVRAKAAKCSSRLRKRRLALKERGVMANKAKVAVARELCEWIYYIAVMPA

SEQ ID NO: 397749 - protein, 320 aa, unidentified
MMSEIILGIDVSKKTLDAALIFENRILCKQFQNSCDGFKELAAWLAFLKITCVHACLEATGVYGEAIALFLHESGHRVSVVNPLRIKGYASANMQRNKTDRLDARLIASFCRTQKPDAWQPPSEEVKQLQSLVRRVEVMAEMLQAEENRLANAASEIKPSIGRIIGFLSEEIKELEQQIKRHVDQHPNLKEQNQLLQTIPGIGRRTANLLLSEIEFERYSSARSLAAQAGVTPRKRQSGTSLKQTNLSKLGNARIRRALYFPAIVAKQHNKIIREFAERLKKNGKTPMQIVCAAMRKLLHIAFGVLKHRRAFDASLAFSA

SEQ ID NO: 397750 - protein, 367 aa, unidentified
MEKSSKVFVGMDVHKESIDITLAEQGGEVRRLGQIGGDRSSLLRMVRKQQSRGQELVFVYEAGPCGFWIYREIAALGERCMVVSPALVPRRAGDHVKTDRRDSERLASLARAGELEAIHVRDIRDEAIRDLVRGRDDAVIAQRRVRQQLKALLLRNDMRYVGRTSWTGAHRRWLSELKLPEPAQQIAFEEYVDAIAVATGRIERLTRAIETEVATWRFAPVVAALQAMRGIQFVHAVTLIAELGDLTRFHSARQLMGYLGLVPREDSSGEHRRQGSITKAGNSYARRALIEAAWAYRHPARVTRIIATRQTGLPKTACDIAWRAQLRLSAKYRRLNARHLNHNKIVVALARELSGFVWAIGQSVKPH

SEQ ID NO: 397751 - protein, 355 aa, unidentified
MDSLKYIGLDVHRDTISAAVLDHHGTLIMQSVLPTRTSSILEFLHGIRGTLHVTFEEGIHSAWLYDLLQRRVARVVVCDPRKNKLLKSGNKGDLIDARKLAVLLRNNALSPVYHGELSALEVQRRARSYTMLTEDTTRIMSRLKAVFRSQAIPCHGRSVFRPDHREAYLAQLPTPGLRQRAELLYQELDAVHLLRLQAKREMLAECRKHPAMKWLQSVPFLGKVRTAVLIGRVQTPYRFRTKRQFWSYCGLALETHDSAQYHVVQGQVQRKTRFVQVRGLNWNHNHDLKGVFKSAATMAAHREGVFREFYCGLLAKGVRPEMARLTLARKIAAITLKIWKEGGTFHAEQVKAKAA

SEQ ID NO: 397752 - protein, 268 aa, unidentified
MIKYHKHIGIDIGKYNFVVGIEGIKDTKEYENTSFGIFEFINDNKDILANSLTVVETTGGYELELLYSLCERGYVVHRADARKVKNFIRSYGNSAKTDKLDAKALGLYGKERADKLEVFKPESKQNIQLFRLVQRRNDLKQMLVAEKNRLQQANTDKFVKNSCINMIDVLSNQITEITNQVEVIISSDQLLKAKHEILKEINGIGNIVAFELLILLPELGKLTRRQIASLAGLAPKANDSGKYQGYRKVGHGVEQESSYTIPCCYVSP

SEQ ID NO: 397753 - protein, 407 aa, unidentified
MEVLYPRCAGLDVHASSLTACLRLAAGHEVTYQHRTVATTTAGLLELAEWLEATGCTHVAMEATGVYWKPVWHILEGHFTLVLANAMHIRNVPGRKSDVNDATWIADLLAHGLIRSSFVPPAPVQALRDLTRTRKQLVGEIARHTLRIQKTLEDANLKLTRVVSDILGTSGRAILRALIAGEADPERLADLTTGRLKAPRAQLVEALHGRVTAHHRFLIELHLTQIETLETAVQKLERHLGEALAPFRAAVDLLITMPGVSETAARVLVAEIGTDMTRFPTAGHVVSWAGLCPRLDTSAGKRHSTRIRHATPWLKTTLIQGAWAATRKKDCYLHAQFVRLKSRRGPKKAIVAVAASMLTAAYFMLRDGVEYADLGGAYFAHRDVEETKKRLLRRLRDLGVEVEVKVA

SEQ ID NO: 397754 - protein, 318 aa, unidentified
MNKTIAFEQVIERGCGIDVHKKVLVATIRGTGLKEDTRSFDCFTEDIEVLRDWLKANEITHVAMESTGVYWKPIFNILEEDFEVILVNARHIKNVPGRKTDKADSKWITKLLLSGLLKGSFIPPKPTRELRDLTRYRRKIVGQIASEKNRLHKILEDANIKLSSVVSNMSGATARKIIAAMIDGEDDINELTKLRHGKLKVSKEDLAKALKGHLSEHHKFMLITIKSSIEEKQSIIETLDTRIEEQLKAREQTLSSELLQTIPGVGKDAAAGILAEIGNNMDQFPSEGHLASWAGMSPGNNESAGKKKVAAPPMETNT

SEQ ID NO: 397755 - protein, 360 aa, unidentified
MKKDIKTESGLTVGVDLGDRWSKYCVLDEHGQILEEDTVATTGRAFRKLFSDRAAARVVIEVGTHSPWVQRLLQELGHETITANPRYVRLIYSSRNKNDKLDAERLARLARVDTKLLHPIQHRGGTAQADRALLRSRNALVECRTKLINHARGIVKSIGGRLPSCSTTCFHKRVREDLPDELKPALSPVLDTLAALTKKIQCLEARIARLAAKRYPETGLLRQVSGVGPLTSFSFVLTLEDPERFKNSRAVGPYLGLRPRQSQSGESDPELRITKAGDTDLRRLLVGSAHYILGPFGPDTDLRRWGLALAARGRRNAKKRAVVAVARKLAVLLHRLWVTAEVYEPLRNNKSLIVPEAVSA

SEQ ID NO: 397756 - protein, 363 aa, unidentified
MTVVGIDAHKNWHTLVAVDDVGKRLAVLTVEARAVGHRQILTWLEQFDGVAVAVEDCRHLTRRLEADLLNAGHQVVRVHTRLMAGMRRSGREPGKSDPIDAEAVARVALREDGLPTAELPGASREIKLLTDHRRTLVARRTAMQSKVRWFLHEIDPDLHIPARALRRYQLLDDLQERIACRDGVVAEIARDLLDDIRSLTRRINDIERRLATLVRAGHPSLLEVPGLGVLGAATIVGETAGARRFRSRHAFARFNGTAPIPVWSGNTVRVRLSRGGNRTINTALHMAAVTQLRLGGQGAAYYAKLITTGKTRTEALRLLRRRISDRVFAAMSTDELVTKTTPPATAAATATPRAGAVDLGRAA

SEQ ID NO: 397757 - protein, 424 aa, unidentified
MPAEPSTQSGHFDGRDSVTAQPQAVWIGIDIGKTHHQAAAIDNTGRQLWSVRVHNDQHSIERLLDKARTTDGSPVIRWAVDLTSPESALLLAVLVAADQTVTYVPGRVVNRMTGAFPGEGKTDAKDAVVIAETARLRRDLTTITTPDDVVAELGLLTAYRADLMGEWVSRINRLRALLLRIFPELERAFDYTTRTGLALLTRYCTPAAIRTAGTDEIGTHLRELGVRRPTIPGMVTKALAAAEAQTVAVQAESTTEQLVIRLAEQLLDLDHEIKALDKQIVERFRSHHQAHIIESVPGIGARLGAEFLAITAGDLAAFGTAAKLAAYAGLAPVPNDSGTRTGILHRPKRYHRRLRHILFMAAFSSAQREGPSREFYQRKRAEHQRHVQATIALARRLVDVLWALLRDQREWRPSGPLGVASVAA

SEQ ID NO: 397758 - protein, 379 aa, unidentified
MKKDTRHVGFDVDSEKIAVAVAEPEGEVRSLGEIPNREESVRRLVKKLGPASRLRVCYEAGPHGYGLYWLLSGLGVHCDVVAPTLVPVRSGDRVKTNRRDALKLARCYRSGDLTAVWVPDAEYEALRDLVRAREVSKKDQLRARHRLGKFLLRRGLRAAAGMKSWTGKHLLWVKTLRFEHAAQEATYLDYLHEVEHAAERVARLERAIDQAIEALPAEMRAVVAGLQALRGIKQMSAVTIVAEAGPLSRFARPKQLMGYSGMVSSEDSTGSSVRRGAITKTGNAHLRRIAGEAAWAYQYRPAMSLEMKKRQEGLSEEVKEIAWKAQSRLCTRYRRLVAKGKLRQKVTTAIGRELLGFIWAIGTQVEREQRNAKLARRVA

SEQ ID NO: 397759 - protein, 409 aa, unidentified
MQVVHERCAGLDVHKRTVVVCVLVPEGREVRTFGTMTRELMEMVDWLLGKRVTHVAMESSGVYWRPLFNLLEGRGVELLVVNARHVKAVPGRKTDVKDAEWLADLLRHGLLRASFVPDRSQRELRELVRYRKTLVEERARMVTRIQKVLEGANIKLSSVASNVVGKSGKAMLEQLAAGNEDAEAMAELALSNLRSKRGQLREALFGSMGEHQRFMLKSHLHLVEEMDAEIEAVNAQLGERMRPFESQIALLDQIPGIGTTSAQQILAEIGVDMSRFPTADHLASWARVCPGMNESGGKRHPASTGAGNPWLRSTLIEVALAAVKAGRRQPNFFSARYHRLSTRRGPKRAAMAVAHSLLIAIYNMLRNGSYFVDLGPTHYDQRRRDLIAKRSVRRLEDLGYKVSIEEAVA

SEQ ID NO: 397760 - protein, 373 aa, unidentified
MKYSTVYVGMDVHKESFSLCCYTNEKEQAEYPQKVDGHYSKVINYIEAMRFHYGDDALFICGYEAGCLGFTLYHQLTDHNVKCVILAPTTMLQQKGRKKVKTDKRDAALIARCLAHHDYSPVHIPTEQDEQTKEFIRMRNDHKLALKKVKQQILSFCLRHNYRFDGTSTHWNQTHLKWLRALKPEGLYMEILQEYLLTYDYLTDKLERLDKRIEELASDGTYQENVRKLSCFIGVKTVTALAVLTEVGDFKRFASAQHFASYIGLTPGEDSSGDDQNRLGITKAGNRHVRSLLVEAAQSYSRGQIGFKSKALKARQAGNSPEVIAYADKANERLRRKYYRMVLRNNKKTNVAKTAVARELACFMWGMITGNVA

SEQ ID NO: 397761 - protein, 385 aa, unidentified
MSKLNHTDTSAAAEYATVYVAFELSKAKWHLGVILPGSQKLSRFRIDGGDLAALSGHLAKWRAKAGAAGKPVRIVSCYEAGYDGHWLHRWLTSQGVINYEIDPASIQVNRRARRPKTDRIDLEQLMSTLLRYLRDEPRVCSMVRVPSPEDEDRRRASRERDRLLKERSGHTNRITGLLHAQGIRDAKPFQRAFIASLESMRTGDGRALPPKLKEEIVREHERLCLVQQHLTALEAKSRAEMRAPARGSVEEKINHLVDLRGIGVVGGRKLMHEVFYRSFDNRRQVGSFVGLTNSAYDSGNSHRDQGISKAGNRRARTLAIELAWLWLRYQPESELSRWFHARVGDLKGRIRRIAIVALARKLMIALWRYVTTGVVPTGAVSRQSI

SEQ ID NO: 397762 - protein, 371 aa, unidentified
MAKRLKYIGLDVHKETIAVAVAEGERGGEVRFHGTIPNEDDAVRGMVKRLAGPGITLDFCYEAGPCGYGLQRLLTRQGQPCIVISPSMMPRRPGDQIKTDRRDAMTLARLLRAGELAPIWVPDEAHEAIRDLISARLSAKEETSAAKPSVRRFLLLHDRRFSGKSAWTKTYWRWLSEQRFDFAHQQLAFEEAKRRVLEAQARTARLEAALVEAVDGWRFAPLVRSLQALRGVRLIVAATLVAEVGDLTRFQNPKQLMAYLGLVPSEYSSGARVQRGRITRAGNAHARTMLVEAGWTYRLPAREERRYRDRVADLPEDIQAIGWKAQVRLCQRFRRLSATGKPQPKVNTAIARELVGFAWDIARRVQPVVAV

SEQ ID NO: 397763 - protein, 313 aa, unidentified
MYYIGIDVSKKALTVFDGKTSLEFENKKGLKPFYRYLKKHFKQFDNLVLIFEATGIYSDNLREFCNIHKIKVYILNPKQSHNFAKSLGVRSKTDKIDARIIWRYQSLIPQEKIQIPLIDPEAKMLASYLTSYQFIQGQRVGVSNHLESVTDPTLRKLLKVELKRKQQLEDKLLSDIKTYISKHPGLAKDFKRLMSISGIGERLAFSLLALFRHYQGTNRAQITALVGLDPIYKESGSSVKGEIKISKNGNRYIRKMLYLPTLCAIKNNKKIAVFYQRLINNHKPKKVAVIAAMRKLLLVAHAVYNNKTEYVPG

SEQ ID NO: 397764 - protein, 417 aa, unidentified
MTVDSVARKRSVIKSDTLVIGIDLAKHTHVARARFYNGSYTRPMKVPNTRAGFLALTEQIGAWKPRPDSAVIVGVESTGSYGVNLVRWLSEHGCRVVLVPSLHVCREKELLDNGRGTSDDKDALIIADLVARGEYLGFVTLSGACLGLRPLVSLRARLVGEHTGWINALHQTMDVLFPEFETVFVDLSRASVRLVLGRFGTVAAARAYSPTKMRRLLARDGARVSLAKLKRLQAAAAESIGPLAVSAGQERSLREMLETLATLEGRIVGLEAEIVRLLGQLPEAEYLMSVKGVGAMTAAVILSETGGLTQYSCARAVLKLAGLNLYQNSSGQYQSGRRISKRGRSQLRRALYMVAVQHARRGWPLRPYYAALVERGKPKTVALTAVCCRLVRLLYALVRDGRCYSECPPEVSRPQAA

SEQ ID NO: 397765 - protein, 445 aa, unidentified
MRDHSEAFIGIDTSKLRNAIAIAEGGRGGEVRYFGEIDSADAATRKLVSKLAVKYRSLTFCYEAGPTGYGLYRLIRSLGHECVVAAPSLIPKKPGVRVKTNRRDAVELAKLSRAGELTAVWVPDERHEAMRDLSRARQAAKKHLTSKRQQILSLMLRLGRHYPGKKTWGTAHMNWLTQQKLEHREQRIALEELLEGMRQEAERVERLEQAIREAVPEWSLAEVATALQAMRGIDLVAAVTVLAEIGDLSRFQSPRELMGYLGLVPSESSTGDKVKRGGITKAGNGRARRILVEAAWSYRHPARVSREKQPKVAAAPRRVREIAWKAQTRLCGRFRSLTRKGKLPSIVATAIARELSAFIWAINHEVMAPGEGLEIRNVPIARSVTPCSPPSRRGLATADEVAGAPRRPALTAAARGVPAAARVGTKKRAPRSNKETGSEAESAGL

SEQ ID NO: 397766 - protein, 463 aa, unidentified
MKSKKQAKQKNRPRNKQVDWKALDIVHPDAAGIDIGGSEHWVAISPDRDEHPIRCFDCFTADLQELADWLIAKGVRSVALQSTGVYWIPVFEVLQQRGLEVYLVNARHTKNLPGRKSDIEECQWLLKLHTFGLLNNSFQPTDEIRITRTLWRQRGGLAEQARSTIQRIQKVLTEMNVQLSNVLSDLSGASGMAIIHGILKGERDARVLAALADAQVKASKEVIAKSLEGNWRQELLFVLAQEVELYGVYQDKIAECDRQLQTQLRTMAPKVDLESNPLGPRPKGKRAQGNAPKFDLRTELYRLTGVDWTQVNGIDVTVAQSVIAETGVDLSPFPSEGNFTSWMGLCPANDSSSGRVIRKSTPHVASRAATAFRQAASSLIRSQSYLGAQYRRLRTRLGAPKAITAMARKLACLFYRLLRYGQQYVDKGMQFYEEKYRDQQIKSVTRRAQQLGLQVIQPKASLA

SEQ ID NO: 397767 - protein, 359 aa, unidentified
MHYIGLDVHSKNFAIAITDRDGRLLFEGQQPTSERNLRAVIATVSGAKVVALEETTVAAWVYRVLKPHAQRVIVCDPRRNELIAKSGHMTDAQAARQLADLARGKFIKPVHHPVDEGRQAFRELVQSYHQLSRELVRVKNQLKAKLRQQGIPCAGSDVYQPHQRAFWLAQVKHEDVRFQVAMMMDTVAHLTEQKIAYLQRLKQRAKAFPEIAAFQALAGIGLVHAATFAALVDEPQRFANKKRLWSYCGLGIAQRSSDGMSSPPHLNRNGNRLLKCVAKSAAQMAVRHDDNPFARQYQRLIANGVKSTNAQLTVARAIIATMYASGAKARLTSRARSDGSFLTCRSSARRRAALDETRA

SEQ ID NO: 397768 - protein, 392 aa, unidentified
MIYVGIDVAKDKHDCFITSSDGEVLFKPFTIPNNRDGLETLFQRIISVSNDLNKVKVGLEATGHYSYNLLGFLLDKGLPTYVINPLHTNLYRKSLSLRKTKTDKVDSRTIATMMMSDVNLKPYSDTSYHNEELKSLTRYRFDKVKERAKLKSSVSRLVCILFPELEKLIPTLHMASVYALLSEFPSADAVANADLTRLSNLLSESSKGRYGKDTAVMFRDAARRSIGSYMPAKSLELKHTIKLIQELTYEIDEIETAIKRIMDETIQSPILTIPGISYRMGAMIIAEIGDFSRFDSADKVLAYAGMSPSTYQSGQLDNCYAHMEKRGSRYLRYALYNATKYVCHWDESFGAYLEKKRSEGKHYNVALSHATKKLVRLIFAMEKSGQAYVPAA

SEQ ID NO: 397769 - protein, 394 aa, unidentified
MLHDHPCVGPTAIRTQFGAIFVSLELSRSKWVLTSLSPGNGEKMSQYSLTAGDIGGLLARFADLKRKAKERTGSAYPIITIHEAGLDGFWVHRVLQNEGIESHVVDAASIATSRRRRRAKTDKIDGEALLRALLAFKRGEPRVCAMVVAPSPEAEDRRRVCRERQTLIEERIIHVNRIKGLLFAQGISDYAPLRRDRRKRLEGLSTGDGRPLPVHLKAQISRELDRLELLIDQIRSVEAEQEALLAVESKAGPEKAGPEAEPRNAVAMLLAVKGIGEHSGAILWSEGLCRQFSNRRQVAAYAGLAATPWRSGAVIHEQGLSKAGNPRLRTLMVQLAWLWLRHQPQSALACWFRARGERGRKGSIVALARKLLVALWKYVTHGVVIEGAAMKPAA

SEQ ID NO: 397770 - protein, 426 aa, unidentified
MKNLDVLSTLFVGIDVSATSNVVYAMDFHSNKLLEFSVSNNRPGAVKIAERICTLMDGSSLKTVIFALESTSFYSIHIANFLASDQSLMSFNPFVYCLNPKMTANYRKSFIGMDKTDPKDAFLLADFARVGRINTQPWRGSQFLALQRLTRHRLHIVEAMSREKSYMVSNIFLKFSELSVLKEDQHPFTSNYTATAEAVLTEMLTVDELVNIPVVELISFICNASRNRFHDPEKVAAILQKAARDSYRLDKCLYEPLTISIASSFNLISAYQTEIKSIEKAIEKTIRGLNPSEYQCLLSIPGIGPVYASGILAEIGSVSAFRSQDAIAKYAGLVWKQNQSGNFQAEDTSLSKAGNRYLRYYLIEAANSVRHHIPEYNNFYHKKYTEVKTHQHKRALALTSRKLIRLIYGLLDKNQLYSQMRVVLTT

SEQ ID NO: 397771 - protein, 348 aa, unidentified
MQIAVLGIDLGKNSCSVAGLDATGRIVLRRRMNREGLIKLASRLPTCVMAMEACCGAHHLARIFQAGGHQVRLMSPEYVQPYVKAQKNDERDAEAIAEAATRPTMRFVELKSETQLDIQTLHRARSRLVSERTALINQLRAVLLERGITVAQGRRRLEQYLTLALDCENSSPLPLSPRMRLLIDDMRAQWRELDRRIAVFDAEFVTVARSDETARRLASIPGIGVLNATALVAAVGDARTFARGRDLAAWLGLVPRQATTGGRPRLLGITKRGNKYLRTLLIHGARAALPSLATTDGSLGNWLRDLGARAHRNTVVVALANKLARIAWAILRSSTTYNAARGGQPTAA

SEQ ID NO: 397772 - protein, 470 aa, unidentified
MNHRRLVGIDLGVATAHTVRVLDGEGTVVAKRKAWPTVESLTAVEAAALAGCPEGTRLEVVIEPTGPAWLPIAVFFSARGHRVFRVSSQKAADLRRFLSRHAKSNGIDADTLARLPLFDPAGLAPLVLPGAERAALDRRVRATDRLTQLAAGHKTRIKDLARQLLPASPLTGDLGAADLAVLERYADPRALLRLGAARLTALIARASHNHQGAERARQWLHAARASLDLYRGHPAVDFTGLAAEIATEVRLLRATCAELATHAAERETRYRQVDPAALARSLPGFAEVGGPALTACMGDPARFATGKRFRSFTGLTPKASETGETDRKGQPMSKAGSSLLRTTLVRAADTARKQDPQLARIYYLQMTERGKDHLGALCVVAACLAERAWTVMRRGTPYVIRDTDGRPVTTAQAKTIIAERWTVPPEIRARRRSKKTGKAPQQVLEGQHARGSLPRPTTSSPRRRSVKPVP

SEQ ID NO: 397773 - protein, 357 aa, unidentified
MTRISAGVDVSKNRSTVCIIDQDGKVIMRPFLVWHSTEELDFLADTLKRLNGEVRVIMESTSIYQYPIALHLKEKGIFISIVNAYKVKKFANTDFRGGKTDKKDSRTIASYGISYWDKLVEWQIPKDTYFNLDLLNRTYMNAKKHRQIILQELQHYIDCAMPGMDKELHSLILNTKKDFMLDFVEKFWHRDEIVNMTEAEFTEVFTAWAKEKGYRPGKGKAAKIYAIAKSCIPYYPANPTVKTILQCIVDKLSGVNRTLVTIVTQMIEEAKKLPEYQIVREMPGVGDPLAARFFGSAGDIRRFKNSKALVAYAGIDSPPDESGDLSSTHRHITKKGSKVFRDTGYEIMMALRSQKRT

SEQ ID NO: 397774 - protein, 332 aa, unidentified
MTYCIGIDVSKQSLELWDGTHEEEVPNEKGLKTLKKLLKKKYGGEWDQQVRFIYEPTGPYSNYLRAFAAEHEVRVVEVNPKKSANFAKVLGNRSKTDTVDAKMLYSFHLLLKESEFSIPKTDEIAEQLGAELGSYEMIQKTRTMLSHHLQSLEYKSGVTRKLKESLEKELKHLGAMEDQLENEIEAVAEEHQETREDLHHLLSMNGIGVISAIHLLYLFRKYPGANRTEITALAGLDPVRRQSGSSLNGGRKISRAGDPMLRKVLYLACMNCIQHNERIQAFYKHLVSDNHKKPKVALVACMRKLLLIAHHLYVTKSTYRTLEHDAEPCLTS

SEQ ID NO: 397775 - protein, 409 aa, unidentified
MEVLYPRCAGMDVHKETVVVCVLTPGPGPDPHKEIRQFATTTGDLRKLAEWLKQEGVTHAAMESTGVYWKPVFNILESSCELILVNARHIRQVPGRKTDKADSAWLANLLRHGLLEASFVPPLEVRELRDLCRMRTTLVRECVQVGNRIRKVLEDANVKLDSVVSDTLGVSGRLMIQALMEGEQDPAVLAELARGRLRSKLAELTAALEGQVRPHHRFLLRQWTRLLSSLEQHIVEVEQEIERHMPPFEWAAALLVQMPGLDRTAACALIGEIGVDMSRFASARHLASWAGLCPGNNTSAGQSRSGKSHRGNPWIKGLMTEIAWAASRTKESYPAALYKRIAVHRGKKRALVAVANSSLQVVWHLLAHHQPYRDLGPDHFDRNNRQHLTQSLVRRLQKLGHTVTLTPAA

SEQ ID NO: 397776 - protein, 408 aa, unidentified
MELLHARCAGLDVHKETVVAGVRIVEDGVVAEHLATFATTTKGLLQLCEYLTSHGVTHAVMEATGVYWRPVWHILVGDFELVLANAAHVKNVPGRKSDVKDAIWLAGLLAHGLIRGSFVPPQPIEELRQLTRTRKQLVREIAQHSLRLQKALEDMNIKLGNVVTDILGASGRAILRKLSEGVTDPQILADEARGSLKQKRSALVEALRGRVTEHHRFLLKLHLDTVEMLERQVEQLDQRLGGALEPFRDAVAQLQTIPGVGELMAQILVSEIGVDMSRFPSAGHLVSWAGLCPRTDESAGRKRSTRIRRASPWLRTSLVQAAWGAARSKGTYLQAQYFRIKARRGSKKAAIAVAGSIITAVWHMLSYGTLYNDLGPNYFVTRDKTKAAKSLVKRLEHLGYTVSLSAAA

SEQ ID NO: 397777 - protein, 373 aa, unidentified
MKKVRFLGLDVHADTIAVAVAEPDGEVRSLGIIPNREESVRKLVKKLGPAEQLQACYEAGPTGYVLYWQLTALGVKCEVVAPSLVPVKAGDRVKTDRRDATKLARSYRAGDLTAVWVPNQEHEALRDLVRAREAAKQDQLRARHRLSKFLLRQGRRVPSGFKVWTQRYQDWVKEHVHFEQPAQEYTLWDYLHEVEHMDDRIRRLDLAIAEAVKLAPPGMQEVIQALQALRGIAQISAVTVVAELGKISRFDRARQLMGYSGAVSSEHSSGKRMQRGQITKTGNAHLRRIAMEAAWAYRHRPAIGPRLRKRQEGLSEEVKEIAWKAQHRLHKRYRNLSAAGKEKQKVVTAIGRELLGFIWAIGVQAERNSKRVA

SEQ ID NO: 397778 - protein, 343 aa, unidentified
MAIAVLGIDLGKNSCSVAGLDGTGRVVLRRRLTRESVVRLAGTLPACVVAMEACCGAHHLGRVLREQGHEVRLMSPEYVQPYVKAQKNDERDAEAIAEAATRPTMRFVELKSEAQLDAQILHRARSRLVGQRTALINQLRAVLLERGIVVTKGRRREEYLIGLLDGDRPATLSPRTCLLIEDMRLEWSELDQRIAALTAEFVARAREDQAARRLATIPGFGALNATALVAAIGTGETFRRARDLAAWLGLVPRQATTGGKPRLLGITKRGNTYLRTLLIHGARAALPSLSASQSPMGEWLRGLIGRAHKNKVIVALAGKLARIAWAVLRSGESYVKEGRPVTA

SEQ ID NO: 397779 - protein, 341 aa, unidentified
MDHYAGIDVSLECSSVCVVDATGKIVREGKVASEPEALIAWFGSCGLELARIGLEAGPLSQWLFAAMREAGLAVELLETRHVRDAFKAMPVKSDRNDARNIAQLMRLGWFRPVHCKSMAAQETRAMLTARKLVQSKLRDVEMSLRGILRGFGLKVGKTTPKRFEARIKELVVGHPSLQVVTKALLAVRVVLLREFNGFEKRVRSMARHDAEARLLMTTPGVGPIVSLTYAAAIDDPARFKSSKMVGAHFGMTPKKYQSGQTDVTGRISKIGDKEVRTVLYEAAHIILTKPIKGSKLKSWAARLAKRIGMQKAKVALARKLAVIMHRMLADGTPFNPAAAAA

SEQ ID NO: 397780 - protein, 355 aa, unidentified
MNDIKYIGMDVHQTSTSIVVLNASGRILVSAVVETQGQALVAFIQGLRGTLHLTFEEGIYAAWLYGLLVSHASRLVVCDPRRNALLQAGSKSDPIDAHKLADLLRLNALRPVYHGENGLGTLKELSRSYLVLVQDSTRVMNRIKALYRSRAIPCAGTKVYLPRQRARWVDQLKEAGVHKRAEFLYRHLDLLSLLRREAKLALLAESRKHTVTRLLRAVPGLGPVRIAVLLAMVQTPFRFRNKRLFWAYVGLGLVTRISAEFALVNGQLKRSGKAPALRGLNPNHQRELKEIFKSAATAAVQRPGPWQQFYQQRVQAGRKPELVRLTVARKLAALTLHLWRKGERYDVKHLKPTAV

SEQ ID NO: 397781 - protein, 323 aa, unidentified
MSPVVGIDVAKRSFDLAIDLANGKYRTKAKLPNDPKGFQILQTWLQTHAQADSWIVMEATGTYHEALAEFVYGLGYRVCVLNPAQMALYARSQLTRVKTDRSDAKLIASYGQRHAAQLRPWQPDPPALKRLKALVRRRDDLLQMLQMERNRLDVAALVVRDSLLENIGQLQARIAQIERAIDDQIDQDPTLRGQRELLVSIDGIAGTSAALMLAELGNVERFAHASAVTAFAGLNPRLQESGKRQGQVCISRTGSPRLRAGLFLPALVAMTHNPVVRALKQRMRERGKANKQIICAAMRKLLHIAYGVLKSRTPFDPQKTLVC

SEQ ID NO: 397782 - protein, 361 aa, unidentified
MFDQATGEVVTRRVVGRPHELLAWLRGVARPARMVYEAGPTGYGLARRALAEGIEVGVCAPGKTERPPADRVKTDKRDAIRLARLLAAGELTLVRIPSVEREQLRDLVRCREDIRLDLMRARNRIGKFLLRREIYWEGTGEAWSRKHRSWLTSVRFSDQASRATLADYLHAHDVLIARRDQVEAELAKLATCVPCAHTVARLRCLRGIDTLSALGLCSEIGEWERFDHPDQLSAYLGVVPSEHTTGAQRRLGSITKAGSTHARRLLVEAAYHYRRGPAVGEALERRQRGQAPEIINISWKAQRRLNARWRQLKDTRRKPGGVVAVAIARELAAYCWEIATCPTALEPTPTPTTRRRLTNSR

SEQ ID NO: 397783 - protein, 373 aa, unidentified
MREFNKFIGLDVHKSTIAISIAPEDGGEVRYFGEIKNTKEALTNFANKISQGSLKLSFCYEAGGCGYEVYRLLRNIGHDCMVVAPSLIPRKAGQRVKTDRRDSLNLARLHRAGELTGVWVPDAMNEALRDLTRAREDMKHLQRQAKQRLLAFLLRHGWTYSGKSNWTKDHFNWLETVKFQHEAQQIVFQEYVDTVKYCGKRVESVTQQIEICSRESACWPVIESLMALKGIDLITAATIMAEIGDLTRFDSAPKLMSYLGLVPSEHSSGSSVRRGGITKTGNSHVRRVLVEAAWTYRFPARKTAHTQKRAKVTTEAVQEISWNAQKRLCQRYKELNANGKIKVQTCTAIARELAGFVWAIGQTVPLKQSANAQ

SEQ ID NO: 397784 - protein, 343 aa, unidentified
MTHFVGLDISQKMTAICVVDNTGRRLWRGQCASDPEQIEKVVRRQAGEDARIGLETGPMTPWLVHELRGRLLDITCLDARHARAALKMQINKTDQNDAEGLAQIMRTGWYRSVHVKSFDAHRARALLGARAQLVGMTTRLSNNIRGVLKIFGMLPGAMRGLPFDRRVEAMLVDRQDMAPIIRPMLVAWRDLRVQIAAFDKAVRQITKSSPTCRLLMSVPGIGVLSVLAYVSSVEDPARFSRSRSVAAHFGLTPKQYQSGEMDRSGRISKYGDKLTRTLMYEAATVLLRRVKRQSSLQDWAQAVARRSGEGKARVALARKLSVILHSIWRSGEPFRWSEQQSAG

SEQ ID NO: 397785 - protein, 317 aa, unidentified
MIVAGIDTGKGKLHVCLLPTGERFSVNNDEGGIATLVAHCRAAGVVRAGIEATSIYHRAAAQALREAGIETAELQPRQAHGLAVALLKRAKNDTIDAFVIAKLVELLNGPWKQPPAAQLEALAEALTFIDMLDERLVVLKTQRERFTAKRFLAGLDKAIKALEKQRRGELRRLIACLRKDQMLGERLDLLLSIPGLGERTAASLLIRMPELGSLTREQAASLLGVAPFDDKSAQRDGQRHIAGGRARLRKTMFMAAFAAALHWNGDLKVFYQRLRAKGKAHNAAVLACERKLIILANAILMRGTPWHNTRGMPCLAN

SEQ ID NO: 397786 - protein, 394 aa, unidentified
MIYVGIDVAKDKHDCFIVSSDGEVLFDVFTIQNNMDGFEDLLFKIKSAEKDSGNVKVGLEATGHYSCNILGFLKNKGLPTIVINPLYTSLSRKSISLRKTKTDKVDARTIASMIMSDVSLKPYSDKLYHNEDLKSLTRYRFDKVMQRAKLKQSVSRLVNILFPELETLVSTLHGKAVYELLLEFPSAQHIASANLKHLTHLLNTSSKGRFKRVTADEIREAARKSISSYLPAKSLELKHTIKLIREITLEITEIEAEIKKIMDAIDSPILGVPGIGQNLGAMIIAEIGDFSRFDSADKILAFAGCSPSTYQSGQLYSSHAKMEKRGSRYLRWALLNAAAYVCNWEPTFAAYLQKKRSEGKHYYVALSHAAKKLVRVLYHLETTGEIYSPTAILS

SEQ ID NO: 397787 - protein, 349 aa, unidentified
MSPKLNAAIAVIGIDIGKNSFHVVGLDWRGAIVLRQKWSRGQVEGRLANLPPCLIGMEACVGAHHLSRKLTSLGHDARLMPAKYVRPYSRGQKNDFRDAEAIAEAVQRPTMKFVATKTAEQLDLQALHRVRERLVSQRTGIINQIRAFLLERGVAVRQGLRFLRAELPRILAMSCDVLSPRMVRVLEDLACNWRRLDERIEGLSSEIEVLARQDAGCERLMSVPGIGPIVSSAMVAAIGTGDAFTKGRDFSAWLGLVPKQISTGDRTILGKISKRGNRYLRVLFVQAAWVVLIKPKSWDRHGLKPWLEAAKKRLHHNVLAIALANKLARIAWSVLARGRAFEASKIQVA

SEQ ID NO: 397788 - protein, 536 aa, unidentified
MEHEARPPADTVSTATHPLARRARKSSPQPAVNNCAAPKMKCSEKLLRSRYDCRDRIAPGGTRSLPCDPARIKTSSPARPAASVPKSERTIAREAPGIRLTYDSATMPSMKGKVMKEWQCITHYAGFDWARDHHAVVIANRQGQIVADFEFQHTQAGWQTFRDKTAAFPNLAISIETNQGAAVDQLLQFGYTVYPVNPVAAKAYRQRKAPSGAKTDHLDAWSLADALRLDGQGWRALQPTDPLTVQLRLLCLDEVTLICQRTQLINQLQQALVEYFPAAIEAFDDWTLPACWDFIIEFSTPELLVKAGKRRWEKFLHVHKLWRPATTDKRLEVFARADQFAGSAPITQAKSRLALSLCKLLRTLQQQLDEYRKQIEELFGRHPDHDLFGSLPGAKRVLAPRLLAAIGSDPDRYGNDAAVLQAFAGTAPICFQSGQRNQLKMRWACDTFLRHTVHLWADCFRHASSWGEVYYQNKRRDGMSHACALRCLGQRLLKIVFRMISDKKPYDADLHARNQQKHGSWILTLANKTPSAAAGE

SEQ ID NO: 397789 - protein, 319 aa, unidentified
MGTVMNQTSSSLYIGIDLSGSTLDVAIHDTTEHFSVDNETAAIEQLVQRLIALGPTLIVMEATGKLELAVLRALCQAGLPAVAVNPRQVRDFARATGKRAKTDRIDAFVIAHFAAVIKPVVRPLNDVQTEQLQALLLRRAQLIDMLVAEKARLERAHAAAKESLNDHIKWLKQQLTVADRDIDSFLRASPAWRQKEDLLRSVPGIGPGAAATLIAFMPQLGSLNRREIAALTGVAPFNSDSGKHTGKRRIQGGRAIVRRALYMACIPALRFNPTIRAFYERLRQAGKPFKVAMTACIRKLIVTLNAMVHNSTPWNPSTN

SEQ ID NO: 397790 - protein, 397 aa, unidentified
MYIVGIDIAKRKHEAAVIDGDGAVIIKPFSFTNNCSGYNRLLAMLAKAKLPLDEVSFAMEATGHYWLALFTRLQKEGFRVQVINPVQTNSIRSFYIRQAKTDPRDALLIAEVIRFGHFSESTLHPENIYELRELCRGRHAIVSMQADVKRKVVALLDQVFPEYETAFTNLFGDTSMAILQTCPTPKELSEMPLEELCHLIEVSSHKRFRMAKAQELQALARNSFGFAMAGDVFSTMIRLYAKHLDFLKQQVREMDCKIAEIMETLDTPITTITGIGPTLGAYILSEIGDINRFSSAAKLAAYAGIDPTMRQSGEYNGVRNRMSKRGSPYLRHAIWLAASSAVLHDPALKFYFQKKRDEGKPYMASVGHACRKMVSIIYAVMRDNKAYTPYIPNEISA

SEQ ID NO: 397791 - protein, 344 aa, unidentified
MEHTTIAVDLAKSVFEIAVSHHPGRVAERHRLSRDKFLSFFAERQPATVLLEACGSAHHWGRQIQALGHRVLLLPPHKTRPYVTGNKTDRSDAKGLLEAERNEQIQPVPIKSLDQQALAALHRLRSAWLAARTARINTVRGLLREFGVAIPLGAKRVVPVLQHLLEDADSGLPDSVRPALDEARTEILELERRMATVELQLRALARQMPVVHRLRTIPGVGLITATALVGFVGDVGRFPSARHFASYLGLTPRERSSGLRRRLGAISKRGDAYVRMLLTHGARAVLWKAKSREQPDRLRAWALKVERLRGHNKAAIALANKLARIVWAVWGRDIEFAEHAAPAA

SEQ ID NO: 397792 - protein, 338 aa, unidentified
MDTETGERQERRLQHREEAEKFYRGLAAQGMKVRVGMEASGHARWFERLLGELQLELWIGDAAVIRTKRVRKQKTDRQDAQLILKLMLKDDFPQIWVPSWENRDLRQLLWHRHRMVQARTRLMNQLQAVALNEGLRCKKRLWREQGREQLESFRLARWASRRRHDLLELLDRLNPTIAELSQAVEQEAEKCPEAQRLMTHPGVGPLTALAFVLIIGRAERFQCGKQIASYLGLVPLEDSSGNRRRLGHITKQGNSLLRFLLVEAAQVTVRSLPEWRKKYAHLMMRRGRKIAKVAMAGRLAVALYWMWRKGWNYEPSKSSVRTRASSEQAMVCSKTPSN

SEQ ID NO: 397793 - protein, 491 aa, unidentified
MTGPSLGIDLSINGAHDCTILDATGQVTQRFTFDSSEAGMRKLEHHVCAIEASQGAPVVVMEPTGLAWLLPCLYLRAQHPAVKIVRIKTSKVAALRRYLKQDAKSDRLDSFTLAKMPFVDPEKLYAVDLPPAVLQGLDRMTRQRARLVEDLTRRKNRLQALLRGYLPGLMDVVGKPWEPPFRAMLTVSLNPITLAGQDAAALRKALQATLSRTPRFEELIPRLRTACAQLAQLYRPIIEAGRLTQAFFDDVGNEVARELRLMDVEQQELKDLEAAIARRYQEVAPNDHLGTMKGLGNVTAPTILAAVGTPQRFHSQAAFRGWTGVVAHASQSADSDAKGLPMTKAGPKRVKLALYQAAEVARQWDPQLAKIYYDQMVHKGKPHYKAIGAVMSHLASRIHAILTEQRDYVLRDVDGREVATREARTIILTRYQVPAEIRAERRTSKRRKRDVSTGAHRGNATRSSRRSSTSSHVHSTGAQEVDQSGTTAIAH

SEQ ID NO: 397794 - protein, 339 aa, unidentified
MQLYAGLDLHSRNTYIGIMDKEFKRIFNKRVSNSLSLILTTLKPFQDQLKGIVVESTFNWYWLIDGLMDAGYQCVHLANPSAMKQYEGIKHTDDQHDAFFLAQMLILGILPQGYIYPKEDRPVRDLARKRLFLVRHKTSHILSLQSLIARCCGQRVSANEIRKFTVEDLQRLLEQEYIVLSAQANLDTIVFLKQQIQQLEKAIQKKVKLNKAFQQLLTVPGIGLILAMTIMLEVGDIGRFAQVGNFASYSRCVPSNRLSDGKSKGHGNRKNGNRYLSWAFTEAAHLSRRYNESFRSYYNRKVAQANTSLATKALSNKLARICYYLMRDQVPFRQELLSH

SEQ ID NO: 397795 - protein, 342 aa, unidentified
MKNTTIAIDLAKSVFEIGISYRPGHIARTHPLSRTELAAFVAAQPPATIVMEACSSAHYWGRKFEGFGHDVKLLPPFAVRPYVQRSKTDRTDVKGMLEAWRNSDIRPVPIKTESQQQLTSLHRVRSTWMAARTMRINSARGLLREFGIVFPAGAATLPDHVQGLIEDADAPVPMLLRDLLHQLVLEIGELESRVKTVEKQLEALASQTPVIDRLLTIPGIGLLTATALVGFVGDVTRFPSGRHFACYLGLTPREHSSGGRRTLGRISKRGDLYLRMLLIHGARAVLWSAKSKSDPGRFFSWALDVQRRRGHNKAAIAVANKMARIVWAVWKFGKPFESQAAG

SEQ ID NO: 397796 - protein, 338 aa, unidentified
MKGFCISLDVSKGSSFYQWFKGFDEPITKSKKIEHNLEGFKELLKLKETIRKEYNEDYVVVFESTGIYHRSLQTYLDEHNFKYTIINQLLSAKVSKSDIRSTKTDAKDCASIAKVFFLKELRIYSKIDEIYDDLKEKSRYYDFLMDEMKRWKIEFRRLFDIIYPGFDRVYDDLYGDFIQTFLLEYSHPEMIRKRRLDTIAKFLEKHTCHKEAYCIRQAQTLKEYVENCASGCSSKSYLVRQFDTVIHNLNAQIKHLEIVLEEIVELAKTLPNYDSIRSIPGIGNNLAGRILAEIGEVNRFNNASQLVAYAGIDPQIYQSGQISGLHLKISKKGNKKLR

SEQ ID NO: 397797 - protein, 362 aa, unidentified
MEFFCGLDVAIEETAVCVVDDRGEVHLTVKVASEPEALFAVLKPFVARLRRVGHEAGSLSPWLHPELKKLGLPVICLETQHVRAAMSAQRNKTDEKDALGIAHIMRTGWFKAAHVKTESCYRMRLLLTHRRNLKRKFLDLENAIRHSLKSFGIKLGGTSRGKFDQAVREAVAADPLSCELMDAMLSARAVLWKQYCRLHDLVVKVVAQSELCRRFMAIPGVGPVTALSFMTAIDDPTRFRRSRDVAAYFGLTSKRWQSGTSIDVKGRISKAGDADVRRALYEAASGLMTRFKGKDKVKSWGQQIAKRSCHRKAVVAVARKLAVIMHAMWSDGTFYIGDQKASEADMAARAQIKDRKLLGAHA

SEQ ID NO: 397798 - protein, 363 aa, unidentified
MIIIGVDYHPEFQQIALLDQDTGELQEKRLSHPGEAEKFYRALAVSQKVRVGMEASGHARWFERLLGELQFELWIGDAAAIQSKRGRKQKTDRQDAEHILKLMLKDDFPRIWVPSGENRDLRQLLWHRHRMVQARTRIMNQLQAVAINEGLRCKKRLWRTGRQQLALLRLAPWASRRRHDLLELLDRLNPTIAELSQAIEQEAAKCAEARRLMTHPGVGALTALAFVLIIGDTERFQCGKQVASYLGLVPLEKSSGNRRRLGHITKQGNSLLRFLLVEAAQVTVRSLPEWRSQYFHLLMRRGRKTAKVAMARRLGVDLYWMWRSNEITSRKVRFARRTARNRRWCAIEHREIDWASCSPSRGV

SEQ ID NO: 397799 - protein, 404 aa, unidentified
MKGPIVSIDVSKGKSDYQAFKNLNVKYTGSRSIKHTKEGFDEIVNLVREMEKKLETEVCVVYEATGVYHRVLKKVLEDNNIKQFIINPLLSAKTRKNDSLRCPKTDKLDPKSIAKTYYSHSLHNSHKPETIYHELRELSRYYEDILVHIRKDKVAFRAQLDVVFPGYDTLFDDLYGPVALAVIEKYPHPEMLQKKKINTVSKVIQSKTCHRQAVSDTMADKAIEYSKTIYSGCDKDDIEVLILQRFIKKLKEDMAEAERTICEMIKLAQELPNFSIIKSIPGIGDNLAARIIAELGDMTRFKKKNELVAFAGLDPRISESGKNDGDHMHITKKGNKRLRCLLYLAVTCSIRLKRDDNSIKDFYIKKKQQSNPMCSKAAKTACASKLVRIIYSMCKTGELYQYNK

SEQ ID NO: 397800 - protein, 307 aa, unidentified
MSGIGIDVCKKSLDAAVFQGEARQFSNTASGHCKLVHWLRTLPVRQVVLEATGGYELAALDALHQAGVPVARANASRARHLANGLGLAKTDRLDAGMLACMAEKMELHPYVPLPPWQRHLGEHVRARRQLIDLLKTAKQQLLQVADKPLRKLLQANVNQLVRSVARLDELIAGQLKTLLIEQPHLAALKTLKGVGPVLLAVLACRLPELGTLNGKQISRLVGVAPLSRDSGKMRGKRGIGGGRADIRQALYMAAMSSARHEPRLRDFYRALRTRGKEGKVAIVAVMRKMLVILNARVRDERAATQPA

SEQ ID NO: 397801 - protein, 326 aa, unidentified
MTASQSSDNSFIGIDVGGASFDVAWHRGDCAHYANRPDGVAALLAKLKAGPAISRIVVEPTGGYEKPLVKTLRRAGLPVEIIHTSRFSAYRVMVGARAKSDSSDARLLAAYAAAPDDVRGRKPHHVEVPEDAIRDELAELASRRDQLKHMIHGETCRLTTVRSAKLHQAITAHLDVLKAEDAQTHKTMLALVRARVDLKRAQGLLKTIKGFGDKSALACIALVPELGHIDNRAAAALVGVAPFTRKSGTMTAPARIHGGRAAVRNILYMAAVSASRYNPVLRQFYQRLLARGKKAKVALIAVLRRLVVFANAVLKSGQPWRGVTAS

SEQ ID NO: 397802 - protein, 394 aa, unidentified
MTATRTPVIDQKTPALYLAFELGWSEWKLAFAAAPADAPRLRSIGARNTQTLLKEITQAKKRFGLPEDAPVRSCYEAGRDGFWLHRYLLAQGIANSVVDSASIEVQRRGRRRKTDRLDAAKLLNMLQRWHGGEQKVWSVVQVPGADDEDRRQLHRDLVELKAERTQHVNRLKGLLAGCGLALAQVNETFPEVLAGLRTWDGRPVPPALQQRLLREHERWRFVGRQIKDVENERDRTIRKSEEPPVSKVRQLLNLRGIGVNSAWLYVMEFFSWRQIRNRKQLGSLAGLTPTPYQSGDSAGEQGISKAGNRRLRAMAVEIAWCWLQYQPDSALSAWYQQRFAKGSSRQRRIGIVALARKLLVALWRYLEVGEVPKGATVVDWKTKYRGRKQAAAAV

SEQ ID NO: 397803 - protein, 468 aa, unidentified
MKKQKMPLTVINPHAAGIDIGSRTHYVAIGQEHKDVKSFGVYAGDLTELTQWLLDNKITTVAMESTGAYWQNLFVALINSGIEVVLTNGKFTKNINRKKTDVLDCQWIQKMHALGLLPSSFLPDHTTEKLRTFARHRTNMIRQRADSIHKMSKFLKYLNFRLDVVVRDVAGLTGLKVIEDICNGNLDPLSLAEHRHHNCRKSKEEIAKALVSNKREDYLFGLKQEFERYQFYTTMISECDKEISQFLEQTIQKKEAVVDDIPDRKFFKRQNKNAIKGIDLNIVSYQYFDGVDLLSIPGVSHSTVLTLMSEIGPEGFSKFPTAKHFSSWLKLAPNNKISGGRVLSNRIPQGSNRLKIALRNAANAVGNLKDSDLAKFFRKIAFKKGRQTAINATARKIAVILWNMITKKQPYMPKNNYLFLDQKRRIVSRMRKQIADLGLNPDDLGFSRANRDKIAAHITPDNQVLSLR

SEQ ID NO: 397804 - protein, 337 aa, unidentified
MTLYCGIDLHANNSVVAVLDESDRTIYEKRLPNDLATIIHVLCIYQAELAACVVESTYNWYWLVDGLMAAGFPVQLAHTSALPQYAGLKYTNDFSDARQLAHLLRLGILPTGYIYPKEERALRDLLRRRLLLVRQRTLHHVSLQSLIARHSGQRLSAYQIKTLTLPQIADYLQGLTLLGGEITHQARCWLDGAIKRIERELQHQIKPRQDYQLLQSIPGVGPVLGTTIVLETGTIERFASPGNYASYARCVKSEKISNGKYKGQGNKKNGNKYLAWAFMEAAHYGAIWNPRIKQYYRRKQAKAHILVAKKAVANKLARACYHMLKRGEKFDVTRAFG

SEQ ID NO: 397805 - protein, 341 aa, unidentified
MLIIGCDYHPSVQQIAMMDTETGECQERRMAHRAEAEQFYRTLRQQSASVRVGIEATGHSRWFERLLAELGFEVWIGDAARIRAKQVRKQKNDRKDAAHLLHLMLKDDFPRIWMPSAENRDVRQLVWHRHRLVQMRTRVMNQLQAIAMNEGIRRKRGLWTRRGRAQLEELSLPSWTSRRRQELLELLDRFDPNIEQLTEAVRQEAERRPEVERLQTHPGVGPITALAYVLVLGTPDRFRCGKQVSSYLGMIPCEDSSADHWRLGHISKQGNGLLRFLLGQSALSAIRLDDDWRRQYTHITMRRNHAVAKIAMARKLAVRLFWMWRREWDFEQWKKFGSHAG

SEQ ID NO: 397806 - protein, 396 aa, unidentified
MISVGIDVSKGKSTVCIMKPCGEILESPFDIGHTADELDSLISLIKSFDEETRVVMEDTGHYHLPVATYLSSHNIFVCCVNALRMKKFCSQSIRRAKTDKIDSIKIASFGITYWNELVKAYPSNVIYDELKFLARQYYQVTGMLVKSKVNFSNLLDQVMPKINDVLSNQGENHKLTEFVSRYIHFQNILDMGEMKFTSDYCKWAKKKGYRLNERKAAEILALAQNGIPTLPNSQSVKIAVSEAVKLIHSIEESRNTILAQMQDLCNTLPEYSVVKEMDCIGDTLAPRIIAEIGDVRRFKNKHSLIAYAGIDAPPYQSGAFHASERHISKRGNSYLRKTGYEIMQSLIKHKPADNAVYDFIQKKRSEGKCGKEVMIAGLNKFLRVYYGKVMEFYSEH

SEQ ID NO: 397807 - protein, 343 aa, unidentified
MQTVSTIGLDIAKSVFQVHGVDANGQVVIRRQLKRRYVLAFFEKLPPCLVGIEACASSHHWSRELQALGHTVRLMPPAYVKPYVKRQKNDMADAEAICEAVTRANMRFVPTKTPEQQGGLMLHRTRHLFIRQQTSVINAIRAHLAEFGVTAPVGRKGMEELLRVIADPSDKRVPDVVRACLAALGRQLLSFKKQILDFDRMIMAWHRSNQTSKRLNCIPGVGPLLATALVANVADPKAFRSGRNFSAWIGLVPKQHSSGGRDRLGSISKQGDRYLRSLFVAGALAVIRYAELHGTKHRPWLTALMARRPTKVAAIALANKLARMAWAMMATGERYNYPAALRV

SEQ ID NO: 397808 - protein, 525 aa, unidentified
MFYRPRRSGRVQRKLKPRVNPTLQKPNGVISPRVQKVGGERFGIVCVDPAKHRSEWMMADYFGNLLLEPRTLQHRAANFKLAIELIRQTQKEHDIQDTIVVLERTGNYHLPPKRAFASAGFETRIVHPFATKQFRMPADPGNKTDHTDLYAQHRAAVAGFGLCDVELESPYRELQLRGRHRRSLVEKAAALACQIRDHLHLSMPGYANLFDRLFESPALFLAARCESPAQMIELGRDGLSQHLAENRIRHQLRTIDKVLTWAKQAVSESIHSGPMHHAIWTDLHDLYQGFHRKITAHEGEMAGDLVQTPYVRLLAISGINVVSAAELAAEMGPISHYANANAITGRCGLYPSRYQSDQTDHDNGPIIRQANRRLRCVLMRIADNLACHCHYYRGQAELDEAGGIDKRASRVKIAKRFSRLALACVAGDVPMRHPCFQKPDSILEKLRSFHREHETPISRVLADLEAAVGQLPYHTRNHEAEVVAEVLQQHANRRRGPAPIGDLLPAILARLNVNQSQSNKNGDRS

SEQ ID NO: 397809 - protein, 357 aa, unidentified
MSKQAQYIGMDVHKAMTVIAVLDSAGKTRAEATVETKASTLVQFLRGLEGDLHVTLEESSYSAWLYEALLPHAAQVVICDPRKNAAYIRMGNKSDKIDAHKLADLLRTNMVSAVYHGNASGRALQELARAYGCLVEDATRVMSRLKAIYRGRGIPCGGTRVYSVEHRGKWLEQLREAGVRRRAELLYQQLDLLLPLRRQAKDALLAESRKHAVEKLLRTIPGIGPLRAALLIALIQTPHRFRSKRQLWAYGGLAVVTQDSAEYGLVGGRIQRTKKRALVRGLNRNHNPKLKEIFKGAAATGSACSPLWQQFYQKRLAQGMKPELAQLTVARKIATIVLELWKKGERFDPQHLNAQAA

SEQ ID NO: 397810 - protein, 342 aa, unidentified
MDHFAGLDVSVKQTSICIVDDTGRIVREVKVPSEPEALLKVLGNQAYRFKRIGLEAGPLSQWLFSALAEAGLPVVCVETRHMQAVLKAQINKTDRNDARGIAQMIRAGLYRPVHVKTLRSQKLRMLLTHRKLLQSKAIAIENDLRSTLRNFGLKVGMVGKVRFETRIQELVENFPDLAGLVEPLLIVRRALREQIVILHRRLLAIVRDDEVCRRLMTTPGVGPVVALTYRATVDVPARFRKSKSVGAVFGLTCSKYQSGEIDWSGRISRCGDEMMRVMLYEAAQSMLRSKKWSWLKAWAMQIARRRGMKKAIVALARRLAVILHRIWVDGTEFRWTRETAAA

SEQ ID NO: 397811 - protein, 432 aa, unidentified
MKYKLKQKQNQRITRITDSTLVVGADIAKKTHVARAVDFRGIELGKDCVFQNDQEGLTKLASWMKELEQVHGKTEIVFGIEPTGHYWFPLAAFLKEQGITIAVVNPHHVSKTKELEDNSPTKSDYKDAKVIADLIRNGKYSEPNLPTKEFAELRILMNLREKVVVNSNQVKARISHWFDRYFPEYSVVFKDWEGKASLMTMRQFPTPEEIVSTGARGILTHWKTEVGRGVGIKRAEKLYATATESIGLTEGLSAARIELESLLEQYDLYAKQVETIMGEAMLVLERIPGTTQMLTVPGVGVVTIAGFLAEVGDLSGYDHGQQIIRLAGLNLKENSSGKRKGKTGITKRGRSRLRALLFRCMLPLVAHNEEFKALHKYFTTRQDNPLKKKQSLIALCGKLIRVLHTLGTKQKDYDANDVLGPVRKVQLQQSAA

SEQ ID NO: 397812 - protein, 421 aa, unidentified
MKPSNAEFTAFVGLDWADAKHDVCVQAAGCEEREFDRFAHHPEHIEQWAHSLHQRFGGRIAVALELAKGPIVYALQKYDYLVLYPINPSTLAKYRQAFKPSRAKDDPTDAELALDLLLRHRERFQPLKPQSVPMRKLCLLVEQRRRLVGDKTRCVNRLCYTLKQYYPQALEWFEQRDTVLFCDFISRWPTLKQVRRARQTTLIIFFKAHNVRFERVIEARLCAIKAATPLTQDAAVIEAHQLLAEVLVEQLRLTLKAIARFDQEIAATAAKLPDYALLFEPLPGAGPALAPRLLAAFGEDRQRYAGAGQLQMYSGVAPVTERSGNKTWVHWRWQCPTFLRQSLVEWAGQTVNKSFWAGAYYRQQMAKGSSHQAAVRALAFKWVRILYRCWQTRTPYDESKYLEALRRRGSPLLKQLGETMQ

SEQ ID NO: 397813 - protein, 344 aa, unidentified
MSIKTIGLDLAKNVFQVHAVNERDGIVLRKQLRRDQVAPFFARLEPCLIGVEACGGAHFWAAKLTALGHRVKMMAPQFVKPYVKTNKNDSLDAEAICEAVARPNMRFVPVKSPEQQSVLALHTTRESFVHARTAQANQMRGLLMEFGIVVPQGIRHLPERVPALIEDASSDLPGRFRLLMHRLLVHLKELDRQVGELEREIQLWHRDSEVSKRLETIPGIGPITASALVASAGDPSNFKNARQFAAWLGLVPHQNSSGGKTQLLGISKRGNVYLRCLLIHGGRALVELARTRPDRAGTWLGRLAARRHHNVAAVAMANKNARLAWALLSSGKAYEPDHVSPKAV

SEQ ID NO: 397814 - protein, 403 aa, unidentified
MQHVIAFDVSMGKSYMVIYNAQKQCIFESEINHSKPDFEELRKRIDQLMNENKKSPHIVFEATGVYSRQLERFMQDNKFEYFLLNPLEAKLQCDSLRIHKTDRSDAHQLALTHFTASRREKTGTDNLFYQLKSLSRFYNELDDELSLIRSRMHKVIQLTFPELEQIFITKSDLFLNFVQLFPHPDFVQNLSKTVMKNQIRKNTNKNISIRIAEKKAMEVLEAARYSYPAVRQDDVLCEQLKSYAKRYQELLHQKEQCITKMVRLAESRTEYPIILSFPGIGPNTAIRLLAEIGDITRFKNNKQLNAFAGIDIRRFQSGKTFFKDKINKRGNKHLRKLLFLIIQNMIKLRRYGQNHIVEYYDKLKTQPYNKCHKVASIACVNKLLKLLFYLITHNIHYDYRLTA

SEQ ID NO: 397815 - protein, 356 aa, unidentified
MQTQVTKKINFKDKDLFIGLDVHKKSWSVTILVEGMEHRTFTQPPDPRALFNYLQKMFPGASYYSAYEAGFCGYGIHRELNSLGIKNIVINAADIPSSQKDHLEKRDPIDSRKIARALGKGLLRAIHIFDRDMEELRSLNRTRFYLMRDLRRSKNRIKSFLQYYGESIPPEFDNNQWTLKFISWLKNVKMQTLSGQEAFSNLIHSYEYHREQILTLSRQIRLRIREYDNELYSLLKTISGIGPLTSSALITELGDINRFPHIDHLSSFVGLIPRVKQSGESSYSGGITFRCNEYLRTLLIEASWQAIRQDPALMQYYHEHLINNKGQKVIIKVARKLLNRVRYVMKNRQPYVTGVA

SEQ ID NO: 397816 - protein, 347 aa, unidentified
MRFYTKQHRYYCGIDLHARSMYVCILDPQGEILLHKNMPCTPELFLKAIAPYREDMAVAVECIFTWYWLADLCSKENIPFVLGHALYMKAIHGGKAKNDKIDAHKIAVLLRGGMLPMAYVYPPEMRATRDLLRRRMHLMRKRSELLAHIQNTNSQYCLPQFGKKIAYKANRQGVAEQFSDLSVRKSIEMDLSLIDHYDKLLTEVELYITQTTKVNDVNVFYRLRSVHGIGKILALVILYEIHDIERFPTVQDFVSYARLVKCAKESAGKRHGTSGKKIGNVHLKWAFSEASVLFLRGNPAGQKYVDKLTAKHGKAKALSILAHKLGRAVYYMLKREKAFDMNQFFSS

SEQ ID NO: 397817 - protein, 356 aa, unidentified
MPIPIKRYKGMKKIFIGIDFSKEKFDATVIKAEGVEECAERQHEVFDNKVSGFRRLIRWVKSVVDEQDTGLWLFCGENTGGYSRALCNYLYGSGYDMWLENALSIKRSSALQRTKSDKADAGVIAEYAMRNYDQMRLYKPLDKNLERLREVFLYRHNLVKLKASMTVRKGEKKLTQEKSDISRFMAMSSKHLISEFNKKIAECDMRIEKIIHEDEDLRRNFEIITSVPGVGTQNAVCLMVYTDNFSRFDFDSRKIACYYGVAPFGRQSGTSVNTPPHVSPFANKLIKALLTQAALASVNFCPQMAIYYHRLVEAGKKKPVAVNNVKNKLLHVITAMVRKGEKYNPDHDYYAALNAA

SEQ ID NO: 397818 - protein, 330 aa, unidentified
MSIVGGLDIHRKQITFDYVDTETGEARRGQICPADREHLAKWLARFAGQDAHFALEGCTGWRYVAGEIIAAGLTPHLADPAEAAHLRGPKRRAKTDRADARHQRVLLEQGRLPECWIPPPRVLECRALLETYLDLREQRTGWVQRIHAVLFCHGAPHIAGQRLGTAEGAAALRAAAARCSPAGQLQLAIAAQMLAVYDERLHQVRRQLLDRARHTRGAAELTARLYGVGPVTGLALTCWLGGAGRFSSSRKAVRFAGLDITVRSSDGKGPPGRLSRQGPPSPRHLTPTNSPSMTRSPRTSPPSPGWEPRSWPTSPETWSAPCAATSPPTG

SEQ ID NO: 397819 - protein, 335 aa, unidentified
MKHYAGLDLSMESTQVCIVDENGRKLVSEKVESSPEPIAAMLERYGPIERAVIETGRMSPAICLGLRELSVPVVCIDARQAHQSLKAMKANKTDPHDAAGLAQLARTGFYKEVHVKSPAAHGVRSVITARGHLVEARVRLDNMIRGLCATFGYRPGSGQGRAFLERVMQAAHIPGLGEAIASLLAVRAELVEQIKEMDRRLRIIASQSQACEILMTIPGVGVQTSAAFAAAVDEAGRFRQSRNAGAYFGLVPRRHQSGELDWTGRITKQGDGTVRKLLYEAANSILTRSRKTFALKTWAMKIAKRRGLKKARVALARRLAVIMHAMLRDGTLFQA

SEQ ID NO: 397820 - protein, 349 aa, unidentified
MVCVGIDVAKDKHDCCILDSDGMVRADCFTIPNNMDGFKQLLQTIRNCTQKSDKIKVGLEATGHYSYNILGFLLDKDLAVYVMNPLHTNLYRKSLSLRKTKTDRVDARTIATMLLSDVDLKSYTDTAYHNEELKSLTRYRFDKVRERAKLKQSVSRLVTILFPELEKLVTSLHIASVYALLSEYPGAKQISEIHLTKLTNLLATASKGRYEKEKAIQIREAARTSIGSVMSAKSLELKHTIKLIKELTSEIDEIEDSIQQIMDELHPPILSIPGMGVHSAAMILAEIGDFSNFDSPDKVLAYAGCSPSTYQSGKLTNCYAHMEKTRFSLSAIRSLQRNQVRLPLESRLC

SEQ ID NO: 397821 - protein, 377 aa, unidentified
MTTTDAAAETRETVYAAIELSKKTWILGIAHPDRDRPSIHRVSGGNIAELVSRLRVAARNNRRILVCYEAGYDGFWLARALAKMGIECRVLDPASIQVNRRARRVKTDRIDVLALLRALIATDRGERHVCAIVRVPSVEEEDARRSHRERQRLVRERTGHINRIKGLLFAQGIRDIKPKLRRTRIDFAALETAEGHPLPDRLRRELEREYARLSLIATQLREVEKERDTADAQDPVVEQKRQLLVALHGVGATSAAILAREVFARSFASRRQLGSYLGLTPSAYDSGSTTRCQGISKAGNSWARRILIEVAWLWQKYQPASPLSHWYIQRTAGQSSRIRRIMLIALARKLAISLWRYVETGLVPEGVAIAKAKLRPA

SEQ ID NO: 397822 - protein, 410 aa, unidentified
MTHMVSTIDVHKKILAVVAADTAQEGEVQFVRRKFGARAGDLRVLSAWLTELEVKEVVMESTAQYWKPVWQGLEGKFHLELAQAQSNRGPKGRKSDFRDAERLWRRYDADELILSYVPDPEQRIWRTQSRTRMRWTRDKSRLQNRLEALLEEMGIKLSGVVSDLLGVSSTRMLRGVADGETDPQRLAEMADPNLHATKEELCDALHAVSKLDPRYRFVLKQFLDRLDLNERQSQELKEELAKSLKPHADPVERVAEIPGMGTDSAQQSIAEIGPQAEKFDSAADLASWVGVCPGENVSAEESSSDRSPKGNEAMRRILDQAANAAVKAKGTVFEARYRRIRGRDPKKHGVAIWAVAHHICRVIWKILHDGVRYEERGGQRDPRAVKRRATRLLRELKTLGYNVVRAEAQA

SEQ ID NO: 397823 - protein, 424 aa, unidentified
MKVTFQTCCGVDVHKSFLVATIIKTSSGIEPSYQKRRFSTFNNSILEFKKWLPENECLYVCMESTGKYWIPVFNLLEDEINVTIANPKWVKAVKGNKDDTKDSKWIGDLFRLGLVRGSYIPCKKIRILREFTRYRYKLVSCCSSEKNRYQNALTVCNVALDSVVSDVFGKSSTSIIEYLLEQSGTSIDHEVIASKLLKRLKAKEDAVIESIEGYQMTDSQKYRMHLIRAHMDYITAAINDVDSEIESLIASDPDYENAVELLCTIPGVKYDSAITIISEIGIDMSQFYSSKRLCCWAGLTPGSNESAGKKKSVRITRAGVYLKPALVQCAHAAVKSDKSSYYKKKYESLVKRRGKKRAIIAIARMILTAIFQMLTTGETWNPCDLYKIDMPEALLEKQKQKAIKQAQKLLIREGLLPPTEPIAS

SEQ ID NO: 397824 - protein, 369 aa, unidentified
MKKDSTLYVGLDVHKDSIVAAYASSEGGDPVHLGAIGTRQCDIDALVRKLQSKGARLVFVYEAGPCGYWLYRYLTGKGLACLVVAPSLIPRKPGDRVKTDKRDALTLARLARSGDLTPVYVPQVADEAIRDLARAREDALGDLNDARFRLKALLLRHDIRYTGRANWGDEHRRWLARFVFPTPAQQIVFQEYVRTVTERTELLGRLEAALLEQAKTWRMYSVVEALQALRGVQFTVAIITVAELGDLTRFERPPELMKYLGLTPSEYTSANRRRLGGITKAGNGHARRALVEAAKAYRHRAKVSEQIQARQQHLPRAICDIAWRAQVRLCGRYRKMLARGKHPNTIAAAVARELIGFMWAIAKEQPVAA

SEQ ID NO: 397825 - protein, 359 aa, unidentified
MIVIGIDPHMKTHTAVALDATTGVSLGTRTVTCDGRGHDELLAWARDLGQERYFAVEDCRHVSGRLERHLLGHGERVVRVPPKMMAKARSAARTYGKSDPIDAACVARAALREPGLPEAHLTGPEHDVRLLVDHRDDLVDERKRIQKRLRWHCHDLEIGLEMPPRVLDRYVWLDRLRDILEALPESTRRRIALAELSRIRELTVQIRDLEREIRGLMREQAPELLAIPGCSAISAAHLIGQTAGSSRFSGEAAFAMHVGVAPLPVSSGKTCRHRLNRCGNRKLNSTVHMIALTQARMHPPAIAYMQRKQADGMSYREALRCLKRLIARTVFKTMLRAERAAAGTVVRADFGAASVALAV

SEQ ID NO: 397826 - protein, 347 aa, unidentified
MRFYTGRHRYYCGIDLHARTMYLCILDHESGEKLLHRNLRCDPDLFLQAVEPYRDDLVVATECIFCWYWLADLCAREGIDFVLGHALYMKAIHGGKAKNDRVDSHKIAVLLRAGALPKAYVYPPGMRATRDLLRRRLFFVRKRGELFAHVRTTHHQYNLPTPSGQLLYQCNRAKVPDAFLDPIVRTSVEADLALAGHYDGIIRSLERTILRTAKVEDPETLDRLQTIPGVGPILALTLLYELHDIARFKRVQRFLSYARLVKSQKSSAGKVLGTSGAKIGNAHLKWAFSEAAVFFLRKNPRGQKHIDRLRSKHGKGKALSILAARLGRASYYMLRRSTDFDMDRFMN

SEQ ID NO: 397827 - protein, 348 aa, unidentified
MLRTIVGGVDTHLATHQAAVLTSLGEVVGSREFAATRTGYEDLLAWMRSLGALRSVGIEGTGSYGAGLARHLLDRDVEVLEVPRPDRRLRRQLGKSDPVDAEAAARAVLSGSRLTASKVADGPMESIRMLRVARSGAIKARTAATNSLRSLVVTAPEALRMRLRGLTRGQLVAVCRRFRVDGSVVGDPDQVAKIALRSIAERAHALGLETDSLDRELARLAAHAAPNTMALFGLGPDTAGALLVAIGDNPDRLRSESAFARLAGVAPIPASSGQTRRHRLHRGGNRAANSALHVAIIVRLRYCPRTRAYANRRRAEGLSMSEVIRCLKRYLAREVFAALRADYALMAA

SEQ ID NO: 397828 - protein, 347 aa, unidentified
MQGKEASEQETKGKSSAGIDVSKSWLDVHVVPAGATLRVANTRDGIRKLKRWLMQFDLGLVVIEATGKWHRDVRRSLHAAGIAVAVVDPFRVRMFAKACGVLAKTDRVDARVLAQFAAVMAPTVRAPAPQAMEELAELVTARASAVAEETALKNQLSAAITPFLKRQLGRRIERIGKDIGALEREILRCIHADPGLARRYDILISVTGFGPVVAMTLIACLAELGTCSRKQISMLAGLAPVADESGERQGVRVVWGGRPNVRRILYLAAITAARCNPDMKAFFDRLTADGKAAKLAIIAVARKLVVLANTLISDNRTWQPHSPKYACHVSLRFRILHSHGGPDLAAG

SEQ ID NO: 397829 - protein, 383 aa, unidentified
MKIFVGIDIAKLNHFAAAISSDGEILIEPFKFTNDADGFQLLVSKLESFDKNSIIIGLESTAHYGDNLVRYLVAEFYQVCVLNPIKTCQMRKNNVRKTKTDKVDTFVITKTLMMQDDLRFITFFDLDMMDLKALGRFRQKTIKQRTRLKIQLTTYVDQVFPEIQYFFKSGLHQNAVYALLKEAPSPKEIASMHMTHLANLLKVNSHGHFTKEQAKELRVLAQKSVGANDSAISIQITQTIQQIELLDSQLEKIEAEMTDIMKFNDSVIMTIPGIGYINGGMILGEIGDIHRFSNPNKLLAFAGLDPSVYQSGNFQAKTTRMSKRGSRVLRYALVNAAWNVVRNNATFKLIMMPRGLKAGLTTMHLGTVPASLSESSGRCSLTK

SEQ ID NO: 397830 - protein, 389 aa, unidentified
MLPNGDKHSNFSVANSHEGSTLLVKKIYSALTSHSLDTVLIGLEATSVYGDNLVYFLREDATLAPFNRKIHVLNPKQVKKFHDTYNDLPKNDYVDSFVIADCLRFGRINKEVYLGDYRYKALQNLTRARFFAVQNLVKEKQRFMNVLFKKYSTMTQEKVFSDTFSTTALAVYDEFESAEALANMDLHELTDFIIEKGKNRFPDPDAVAKAIQKAARSSYRLPKTVNDSVNQVLSISITSMKALESQIKEFDKAIKAQMELLPNVLISIPGIGPVYSAGIMAEIGDINRFNSQAALAKYAGLAWKQHQSGGFESEVTRLIPSGNRFLKYYLCEAAFSLVRCDKEYSDFYHLKYKEVNRCQHKRALALTARKFVRLVFRLLKDNRLYCPAK

SEQ ID NO: 397831 - protein, 341 aa, unidentified
MNITTIGIDLAKNVFQVHAVDERGKALIKKQLKRDQMVTFFANLKPCLIGMEACGSAHHWARKLSEFGHTVRLMAPQFVKPYVKTNKNDMADSEAICEAVTRSNMRFVPVKNIEQQSILAMHRVRQGFVKARTAQANQIRGLLSEFGLVVPQGITHVTKKVPAQLAEAESVLPDEFRHLIDRLLNHFKELDRQVGELERHIQQWHRSNEMSRKLEKVPGIGPITASALVASIGDAKSFDNGRQLAAWMGLVPRQHSSGGKPVLLGISKRGDSYLRTLMIHGARAVIYASERKLNAPEGWLKNLLLRRNKNVAAVALANKNARIVWALLAHERDFSPQYAMA

SEQ ID NO: 397832 - protein, 482 aa, unidentified
MKKRNIYQNQSQEIISLFKKAGNRTKIMCIPMDYAKKDHVVMFCNGHGDVIRKPFSVKNSLEGKNYLIDQVQRTCRHHGIKRQHVFYGGEDCGAYADNFIAALRSDNWMVAGINACDAKKQRDNKQASTDRLDLLGICKMLLSCRGNCSPAQTGIYWNMRTLVRQRRKLVSTATGVKSRIHSIVDQIFPGFLDEKKSGIFPFSKGSLALMGNKFSVHQIRRRNRSTLSKFLARNLVHHADRCAEHLQKYTSQVLQPPAKHIATLQLALQQQVKLFTCIQESIQQLEEEIAEHLAQTSGVFLTSIRGIGIVLAAGVCAEIGDPDRQKSLKKLVSYAGIIPRIKQTGGVQGKTKVKKVGKRCNRILKDYLVRSGYHIGIQGPEELKLDYKRRDAQGQHADFGMSRRYLRMAMCLMKTYQTYLPKRLRDTKIPMKERAQYYLTSWPTLHKKWERIGALDFAFDKDRPLGQWRNVIQDLYGIKLEL

SEQ ID NO: 397833 - protein, 445 aa, unidentified
MKSHPDIFFLEAAPMKSKPVPVAGVDVSKEFSDMCILTPDNAVFERVKIYHDKASMTQSVKALARAGAAFGQRPVVVMESTSHYHRTLQQFLTRHKYQVITINPLQSSAFKNVTVRKIKSDPTDAYRLALAYRTQALRPNLVPSDKIENLRLLTRQHFDLKRDITSYVQRLQCVLDQVFPGFRKQFERLHCETSLIILEQYPTPEALKRARTSSIAKIFQCAARRSPEYCRKRAEALKAEALKALEIRVSRESADLLIKAYVSVLRALEQTIRQVDDEIHRVIQSDPKLLADVELLCSIPGVAEFGAAVIIAEIGDFSNFRKAKQLVAFFGLEPSVHQSGKYVGKNNQLSKHGSRFMRKMLHLIVQTNIAHLPGKPDVYRNPVISDYYKKKCESKAKLAACCAVMHKLVNIIFAVLRDRKPYEIRTPEEHIKLMQARCVAAVTAA

SEQ ID NO: 397834 - protein, 337 aa, unidentified
MEYFAGLDVSMEETHVCVVTRNGSVMHEAKVPSTAASIAAALARVPACRRVLFETGRMAPMLYHGLSRLGLPVVCVESRQAYQALKSLATHKTDRNDARGLAHLARTGFFKPVHVKSLPAHAVRALIIARKKLVGQRVTLENQIRGLAVVFGVRLPRALSPAFIRQALQASEGIPGLSAAMRGLVAARAAVLAAVVAIDGDIRKMARASSACRRLMSIPGVGQLTALAFTAAVDDPGRFRRSRDIGAYLGLVPRRYQSGEVDYTGGISKCGDRRVRTLLYEAANVMLTRYKGPLKLKHWALAIAKRSTMRKARIALARRLAIIMHAMLQHGTEFTPA

SEQ ID NO: 397835 - protein, 416 aa, unidentified
MNAVGIDVSSRKSTVAVLRPLGEVVCLPFDVTHDIAGLASLAEKLKALDGETRVVMEHTGRYYEAVAKALHEAGLFVCAVNPLLIKEYGANSLRRVKTDKADAVKIARYALDNWADLRDFTPMDAIRYDFKTLNRQFQLASKQRTASANNLIALLEQSFPGIRKCFDSPVRSDGTQKWVDFAHSFWHVDCVRKQPFPAFCERYRKWCKRHAYFFKLSNAEEVYALAKRAVVLTPKSKVVKVLVQEAANQLISISRSVEVYRAEMDRLAAMLPEYPVVMAMYGVGKSYGPQLMAEIGDVRRFERKQALVAFAGIDPMPNQSGDKNVRSNKSSKRGSPYLRKTLFNVIRTYLQCAPQDEPVFQFLNRKRAEGKPFYVYMLAAANKFLRRYYAKLRDYFASLDTLQPVYPIPTILKATL

SEQ ID NO: 397836 - protein, 467 aa, unidentified
MKNNDYNLFVGIDVSKGKADAAVLAVPELRSVKPRFLRKKLSFKFIKADVVEFLNTVRKYSSDPHCLHTYFALEVTGIYSTNVYSFIKENCNSDEEIHQLNTDFVNKWRESHNISKSDPLDAQTISTIVGTDDDVRYVSDSVFENKNGYQDLKALVHRHYQIKKLYSQETNRLIALCDCYFPELQYVFEPKSAAFLAVLSQYPTSHDIINASKNEVFSLVYEATKHRCSLDKIDKLFNYAQDTLVPHVSDHIRCVISNTVESIVNIRAQLKLIEKDIRKLAATFNVYSLLMTITGCGPLTAAVIIAETGDIFRFNNADHYVSYSGSSPRNKRSGKSVEIMGKISKKGSKYLRHALYMIAEFARRHNPVLKHLFERVKNENKKRHKLAVIAVANRIARYIYSIMKSESSFIIMHENIMRLPEETRNTFFNSISLDFPKNTRKQIYQYSDVNGEIHRFVYKNETTESIA

SEQ ID NO: 397837 - protein, 455 aa, unidentified
MSRPQVIDDQEHERVHERVAAIDVAKDTGMVCTRTPHPARPGARRATVQSVRARMNAIRALGRQLHKDGIEIVTLESASGYWRIWFFVLGACGLAVQLVHAAQAKNLPGRPGTGKLDAMWLARLTELGLLRASFVPPKAIRDLRDCTRARTRLVQERTRCWQRLEKLLEAALVKVSSAAGKLTTVSAQDMIKAMIAGQRDPEVLSALARGRMKAKRDDLVRALDGMFDDHHGELAGLLPDQIVFPDARIAQLTARAAELTAAMPAAWGVDGDGTGGPGAGTAPDAPVLPAVARLAEIPGASENLARSIIAEAGLDMTRFPTAAHLVSRAGLCPPARQSGPRVPAWQEGPGRHLAARQPGPSRRWRFPHRYLPRRALPPDRPPPRQGQGPGRRGPLHPDHHLAPAEEPRGPVHRPRPRLLPGPHRHRPQDPQPHPPDPGARLRRHHHPGRVTPYRR

SEQ ID NO: 397838 - protein, 410 aa, unidentified
MRYYLGVDWADKTHAVWVVDEQGTKVASRAVPHTAVGLSEWGRELDEWRAKGIELWAAIERPEGRVVDFLLDHGVVVYPVNPKALDRARDRFRPSAAKSDPFDARVLAEFLRTDHRHLQALQPSSEAAQELKYLTEDYRRHVRQQTRLVNQLTATLKAYYPRALEVSELTTALARQFLQAYPTPVAVTALTAKRWQRWASAHRLSDVRTHELWGILQRPQLPVPDHVVRAKARLMLTLVEELTAVVAAVGQYREAIDAFFAGLPEAQWIRTLPIGNHGVTAPTLWALLGDAPRRWESWQHLQGHAGTVPVTIRSGQQRVVRFRVACDKALRYVVDQVAFLSLGKSEWARAYYDQQRARGHDHHPALRALGAKWLKIIFVMWDRQIPYDEEHHLATMTRQQLRQRGQKKVA

SEQ ID NO: 397839 - protein, 280 aa, unidentified
MGKISKGIPVRTVGLDLGDRFSQVMVLDADGEVIEESRVATKESALRQRFSGCPRMRIALETGTHSPWVSRVLEDCGHEVVVANSRKLRLIYENPSKDDRVDALYLARVARLDPALLSPVEHRGPGAQKDLAILRSRDALVAARTQLINHARGLVKSVGGRLPACSSPAFAKKVLGSLPESVQPGLLPVVEMVASINDRIKALERLLEVLARESYPETKLLGQVVGVGPLTSLAFVLTIQEPGRFPKSRTVGAFLGLVRHARSRETRIRRCASHGTGIPS

SEQ ID NO: 397840 - protein, 450 aa, unidentified
MKKENHSSDCSQSRFTQGLPVVNHHAAGIDIGDSKHDVAIFDINGDLISREYGSFTSDLEELVSFLKEKGVTTVAMESTGVYWICLFILLEEAGIEPYLVNAKHVKNVTGRKKDDTDSIWILKLHSCGLLQKSFQPDLDIRVLRTYIRQRKKLVSLCSDTVRRMQKSLELMNIKLHLVISDILGKTGMGIVNAIMDGERDPEKLLQFKDSRIQASDELIVESLHGIWKEEYLFMLKQNHNGYMFYQSQIQECDIKIEGVLLEIAAKKQNGDISNLQSIKKNPKKNDLTFNARPILKVIVGVDLCNVDGMSEVSSVELISEIGTDMSKWKNSKHFSAWLNLVPNTKITGGKLISSKMQKKKNNAGQTLRMACCNLSRSKVPIGDYARKMKSRLGKKGGVVATAHKLSRVIYTMIKEQKEFNKSLLMEDQERWKLKKINYLEKELIKLKKAS

SEQ ID NO: 397841 - protein, 412 aa, unidentified
MARFHVGVDVGRTQHVARVLDTTSGHLNRSFGIPISQEGFDAFQRYLEGFSSNPEDFFLAVEATGAYHIPLASYLWHHRYTLALVNPARSKAFRKAQGHTAKTDRIDAGVLCHMISGVGLRATEPRPAAQERLRTLTRWYFRLQEERTRAINRVSATVDMIFPEFWQVFSDLTHVTPRAVLQAYSTPDEILRADKKELNNLIHRASLGHRSPKDGEHLKALALRTVGVRDIYEPAALQIRQALTQIAVIERQEKDLVPYIEREFRALGFSAEEFPIGDVTTLATLVAHLPSPQTTPSVQALHAYVGWCPADHQSGQYRSAHPRMGRGCPQLRWALYGLTLAALSHVDRYKQYAEQRRSQGKAGGHILIIVGRKLLDRIWAIANEKPAFTAPVSVCYKLNKSNTLIRPLVEVS

SEQ ID NO: 397842 - protein, 341 aa, unidentified
MYYVGLDLGLKKTAVCIVDEDDKIIRRGDIDSEPEAIALWLYEQKLTYKRVGLESGMMHEYIYFGLVKAGYPAIVINSADSRNFLKNKINKTDKSDAHGIARMMRMKHYREVYVKTEESRRQRALLASRKLAIAKMRDTETHIRGIIRHFGFKLGKVTRKQFEPRVRELIEHDAMLMATVEPMLALARAAREQANTLTRQVLAIVRACPVCQILITCPGVGPIVALMFKTTIDLPTRFRNAKAVGAAVGLTPRRWESGDTKRMGRISKIGDEELRTSLFEGAQAFLAMNKRPCWLHTWAQELKEKKGHYKAVIALARKIAMVLYILWIEMRPFRWDDQPVA

SEQ ID NO: 397843 - protein, 345 aa, unidentified
MKITTIGIDLAKNVFQVHGIDESGKAVLRKQLKRKDVASFFANFEPCLIGMEACGSAHHWARKLAVLGHAVRLMSPQFVKPYVKTNKSDRNDAEAICEAVGRANMRFVAVKTPDQQALLSVHRARQGFVKARTAQANQIRGLLAEFGIVIPRGIGHIAKALPEILEDGENALPGMMRELFARLGENLKQMDQQVEELERQIKLWHRENEQSRKLEAIAGIGPITASALVATLGDAKSFKNARQVPAWLGMVPRHEGTGGKAKLGRISKRGDVYVRTLLIHGARAVIRQLERKPDSPDGWLKKLIARRNKNVAAVALAARNARIAWALLAHERSYVHGYTAKRPGV

SEQ ID NO: 397844 - protein, 402 aa, unidentified
METVFGIDVSKSTSSIAVLADTIKIKEFKINNDLIGFERLKSNLHSFTDPKVVFEATGVYSRRLAYFLQCNNVSYVQLNPLQAKKELDGLRKNKTDKNDAFHLAKTQFILNRQMAKMQNPIYVELLDEDRFYQELVSDFVSEKNRLHRVLQLTFPEIEQLMSSPTGPWYWNFVKEFPIPSQVLKFNIDQLNAIAYECSNEKGGHEKSNDIALKLFNLAKISFSSVNPNSLTVEQVKYHANRLIEIDKLKKKVIKLLVKLSKKLPEYNTLCSIPGIGDITSVFLIAELGDIRRFSNSNKLNAYIGIDLRHYESGNYTASDRISKRGNPYARKTLYKAVLNMVSVARYQPTHINDYYRNKKKQSSKKETKKIAIASISRLVRTIYHLVIKNETYDYKIASHARH

SEQ ID NO: 397845 - protein, 340 aa, unidentified
MEASMVVGVDTHKDSHSAALLDAVGALQAAFEVPATASGYRELLGWARARSRARAWVVEGTGSYGAGLAAYLGSQGEAVYEGDHPKRSWRGPAGKSDQLDAIWVAKDALSRRQLGWPKRRGEREMLRVLLSAREGAVRAQTQGLNQLYALVVAAPEALRRRLHRRRGVALVKACLQLRRRGDPETALTAATMRSVALRVKALLAEADDYERQIRVLVAGLAPSLLGELGVGPLTAAQLLVSWSHGGRVRSADAFAKLAGVAPIPASSGRVQRHRLNRLGDRRLNRALHTVAITRARCDRETQAYVARRTQEGKSPREIRRCLKRYIARRLFRILERLDKT

SEQ ID NO: 397846 - protein, 390 aa, unidentified
MEVINPQAAGIDIGSRSHWVAVGQTEQDVREFGVYNQDLFGMADWLKERNIKTVAMESTGTYWQNLFAVLISRGFHVILCNGKFTKNIKGKKSDVMDCQWIQKLHTLGLLSSSFLPDEQTEQLCTYCRHRSNLIHSAASTSKKMQKYLRLINLRLDVVVKDICGLTGLLIIRAICDGESDPLKLAALRHGNCRKSEEEIALALQSNDRKDYLFALQQELETYDHLQQKIEQCDVEIEKKLAQIIDSDQDKREHFIDPKPHKRINKNTPKNIDLNLKSYQMFEGTDFLAIEGMSYSTVLALMGEVGFDGIKRFKTAKHFASWLRLAPNNKVSGGKVLSSKIPKGSNRLKIALRNAANAIGNLKESTPLRDFFQRINFRKVRVSAVSATARN

SEQ ID NO: 397847 - protein, 340 aa, unidentified
MNIVFLGIDLAKNVFQLCGLNQAGKPVYTKRTGRKELLQTVANIPACLIGIEASTGAFYWQREFEKLGHKVKVISPQYVKPFVRGQKNDGNDAQAIAVALMQPTMQFVPPKSPEQQDIQALHRARQRIVNHRTATVCQIRGLLLDRGITIGAAVSRVRHAVPLILEDAENGLSTRMRRTIAELYDLFNDLGRRINFFDKEIEAVFRQSEACQRIAKVKGIGPKTATAVVAAIGKGTEFKNGRHFAAWLGLVPRQHSSGDRQVLMNMTKKGDKHLRTLFIHGARAVVRVATNKNDSCLHQWVNQLRERRGFNKTTVAVANKNARIIWSMLRNDTEYQAAGS

SEQ ID NO: 397848 - protein, 407 aa, unidentified
MFSARNSSPLTYTFYEPQIESKELGRALHPRKGTRAGHQKRWFVSVLSATVTKTDHPMNPLKQVVGIDCAQNELVCRFGELTPDLESICKASKTYPNTVEGITALIKWADGLGSGTVAPLFVVEATGIYHQKLAYGLYHRGRPVVVVLPSRASHFAKTLKVRTVTDSSSAEALMHMGLEKNLDLWQPPDPVFARLKGLTRERKRLKDEINRLKNQRHADEGAVESLPETLRRIDQRLQLAEKHIGAIEQQIQALIAEDEQLTRRFGYVCSIKGVGLMTAATVVGEADGFSMTRNARQLVSYAGYDIVEKQSGTSVKGKARISKKGNSYIRRALYFPAITAARHDQHLGDFYERLHGKHNIKMKAYTAVQRKLLVLIYTLWTKQEPYDPNYQHKKVEQPVPAAPHELT

SEQ ID NO: 397849 - protein, 355 aa, unidentified
MTKNRPIVIGGVDTHGYTHHAAVIDTSGRILGSEEFEATSDGYRKLLAWIRRFGDLDRIGVEGTGTYGAGLCRHLLDQGVQVVEVDRPNRRMRRQHGKSDSIDAEAAARSVLNGTATAEPKHRDGVVESIRVLRVAKSGAVKARTAATNALKAMLVTAPDELRSTMAQMSTAEMVDTCSKFRPSAGRLSEPTQGVKLGMRSLARRVIQLTEEIKELDAAMRPLVRHAAPRTTQLLAIGTDHAAQLLITAGDNPARMRSEASFARLCGVAPIPASSGQTQRHRLHRGGDRSANRALHLAVIVRLRHCEETRAYVERRTKEGLSKREIIRCLKRYVAREVFHTISADLRSLHGLDGI

SEQ ID NO: 397850 - protein, 514 aa, unidentified
MSEGTAQPPFSRLCPRLLRKHSAWLIRHIPLTQKFHPQPLAPARMADWVHAHYARVRSPYAAQDKPFASGFTNPDRNGGDIMVKINYMSTLFVGIDVSSKTNSVYAMDFEENKYLSTSFGNNQPGADELVNRIAACMQKHKNLDTLLIVLESTSVYSVHISNFLASSEVLMPYKPYVFCVNPKTTANYRKSYIGMEKTDPTDAYLIADFGRVGRTKKLEPWRGGQFIALKRLTRHRMHLSECITREKTYMVSNLYLKFSELQLLEGDDKPFGNLYGATSSAVLTEFLSPQEIIDMPEEDLLAFLAQKSRNRISDLSKTSELLRKAARDSYRLDKCMYEPLNISLASSFNCIQAYQKEIRLIEQAIDKCIKGMNTNALIILQSIPGIGPVWASGILSEIGDITAFHSSDALAKYAGLYWPKGDSGDFISEDNQMSKAGNPYLRYYLGEAANSVRKHIPEYADFYARKYAEVSKHQHKRALALTSRKFVRLVFGLLAKNQLYTGEKLDAEYNIEPN

SEQ ID NO: 397851 - protein, 311 aa, unidentified
MTEIVCGVDVSKTRLDAHVVPLGIEESFVNDAAGVAALAAFCRERRVQLVVMEASGGYERSAFLLLWEAGIACALTNPRSVRRYAQAMGVLEKTDRLDAAMIARFAIAKALKPTTPPTPLQQRLNALVARLRQVTDDLVVNKQRRSTSINDETAASIDEVIALLKRQARTLQDEIGSLINDDPLWARLDAALRVKGLADRTVARLLAELPELGIYSNKAVAKLAGLAPLANDSGAKAGRRHIQGGRAGIRSILFLVADIVRRFDQSLGAFHRKLTEAGKPKMVVRIAVARKLLVRLNAKARDARNEFALAT

SEQ ID NO: 397852 - protein, 347 aa, unidentified
MAIVGGFDIHRRQVTFDYLDTVTGQVRRGRIEPACRDTLGVSLARFAGRDDVSFAVEGCTGWRFVVEELQRAGITALLAEPAETAHQRGPKRRAKTDKADSRHLRTLVAEGRVPVSWIPPEQVRELRVLLQLYRDLREEHTAWAQRIHATLFHQGVPSLAGRLPDPQARAVLERGQDIGLSPAGAQAVAAALRRMDDLEAEMVPVHAQIAAFARRQAGCKALARELYGVGPLVAAIVWAFLGDTRRFSSSAQAVRHTGLDVTVYSSDDKRTPGHLSHQGPPILRWALFEAGHQGSRASSPDHRYYTDVAARIDANRAALSVARKLARRSHHILRRLGDQAYTPLPGW

SEQ ID NO: 397853 - protein, 375 aa, unidentified
MATIARLGIDTSKSLFQLHGVDEREEAVLRKQVRRGQFLGFVAKLAPTKIGVEACGASHYWARQLQALGHEVVLLPPQHVKPYVGRNKNDKIDAAAICEAMSRPRVRERFVAIKSAEQSAAQMLLGTRDGLLHRRTQLSNTIRGHAAEFGLVTPKGLAHIKPLLERITADQTVPALAKELFATLGEEFTELGPRIARLDKKLKAFQRSDELCRRLVEVPTIGPVIASSMVVKIGNPAAFRSGRRCAAWLGLTPKDHSTAGKMRHGGITRAGDEGLRAALVSGATAYIQQVKRGRTRPSPWLAQLLKRKPEKLAAVALANKTARIAWKLMVSGERYDRARAEAREGLGATQYQGSTPSPSLHPHTADHGASTMTGA

SEQ ID NO: 397854 - protein, 342 aa, unidentified
MRDHSEAFVAFDTSKLRNAVAIAEAGRSGEVRFLGEIDNTAGATANLVKKLAAKYDRLSFCYEAGPTGYGLYRQIRQLGHDCIVVAPSLIPKKAGDRVKTNRRDALGMVTQFRAGELTAVWVPDARHEAMRDLTRAREAAVDDLRSKRQQVSSFLLRLGLHYAGKKTWTRMHMNWLAKQKLDHAEQRIAFEEMLLAVRQAQERIARLEEAIRVAVPDWSLAEVVAAAMAMRGIDMISATAFLAEIGDLSRFRSPRELMAYLGLVPSEHSTGDTVRRGAITKSGNRRARRILVVFVELPPSAPGGKEEAGQGCGRTARGSRDRLEGAAPALRPLSGAHPQRQA

SEQ ID NO: 397855 - protein, 338 aa, unidentified
MNKFSGIDLHSNNSVVVVSDEADRIVYRQRLPNELSAILQGLEPHRSELVGVVVESTYNWYWLVDGLQAAGYKVHLANTVAIKKYDGLKYSGDFTDAAHLAQLLRLGILPHGYICPPERRVVRDLARRRMQLVRLRTTQVLSIENVLSRQTGHRLKSHEVKRLTPEAVEALGLPADVILSVKANVVVMRTLQEQIDTLEERLRERVKLEPAFALLKSVPGIGETLATVIMLEICDIARFAGVGNFSSYCRCVRSVHESNNKKKGEGNTKNGNEYLSWAFVEAAHGALHCCPLAKRFYERKKRQRNATVASKALAHKLARACFHILRTGKPFEEQRCLA

SEQ ID NO: 397856 - protein, 412 aa, unidentified
MTETNQFAAHVGLDWADKKHDVCVQFKNGERVFDVIEHTAEALDAWLTELHQKVKGRIAIALELKKGPVVYALQKYPFITVFPVHALSLARYRQAFSPSGAKDDPQDAELALELMLRYPQKIKAIEPDNADIRLLQQLVEQRRQLVEDKRRFVNRIINTLKQYYPQPLEWFSHRGSLLLCELIIRWPSLQQLKRARRDTIRNFLNAKGGRAMALTEQRVASIDNAIPLTTDPSVIEANALMATALATQIKVVSEIIKTYDERIEALFGTLPDAGLFKSIPGMGPCMGPRMLAALGDNRDRFNSAEEIQNYAGIAPVTERSGQKSWVHWRWQCARFVRQTFVEWAAKTVNSSYWARLYYQGLREKGKSHQSAIRALAFKWIRIIYRCWKTKTQYDEAKYLLALEARKSPLLKP

SEQ ID NO: 397857 - protein, 369 aa, unidentified
MRTNVVYVGLDVHKDSIAIAVAREGREPAETWKTIPYDGVRLRKALKMLVKSGELLKVCYEAGPTGFGLCRRLRKAGIDCIVAAPSLVPAKPGERVKTDRRDARKLAHFLRSGDLTEVHVPEEAVEAIRDLERARDDAKNAERAARHQLSKFLLRHDRRYEGSTWTLKHRDWIRTQQFAYPAQQRVLEDYLKTVEDLAERVGRLTQALEALVQETVLAPMVKALQAFRGFSVVSAVTIAAEAGDLRRFPTPKHFMSYVGLVPSEDSTGKRRRQGPITRCGNRFLRRILVEAAWHYRHVPAMSKELRRRNQGVAEGVRQIAWKAQKRLHQRMYRLIYAGKSTQKAATAVARELAGFVWAVGQQPSLLEAG

SEQ ID NO: 397858 - protein, 399 aa, unidentified
MLAVGIDISKSKSVAAILNQDGSMHTSPFEFHHTQPELDAFIKYILNSNQSATILMENTGHYHYPVLKAFREAGLPVCMVNAYQIKKFGDMDLRKAKTDKKDAVRIARYALEKSYSLVPYTSMEQKYEDLKFLARQYNQRMLTLKTNKVFLLNLLDETMPGITNILPLTTRTPETSLSVLFINRFKSYDRIKKMGKSRFLDAFEKITRKSRNRQTKTYGLAIYEAALRNITTRGENEYTLAAQDQCLELVCESQKAADSIILKMQTLAETLPEYAVLRSMAGVGDRLGPLILAEIGDIRRFHSGKALNAYAGNDPPPYQSGTFESYNRHISKRGNAALRKYCFEVMQALKLTRPQDDPVYLFLLKKEQEGNPYNVAKMAGVDKFLRIYYARAMETLKQQ

SEQ ID NO: 397859 - protein, 384 aa, unidentified
MYNNNIIFIGLDTHKTFTQVAVLQDNRGAKTKSLGKINTNKSSFIKLARQLQSRFPKATLHFIYEAGPCGYWIYRLLTSLNHCCYIVAPSLIPKKSGDRVKTDKRDAAKLAKLFKAEELTTIYVPEAEDEAIRDLSRARETAMKDLKDAKFQLKGLFLRNNIQCEVKDNWSKQHLRWLTELVLPHPSQQIVLQEMIQVITERTKRVSRLVNELEHQAKHWRYYPVVKAIQAMRGVRMLVAVGVIAELGDLRRFDHPRKLMAYLGLVPSESSSGDKRKLGKLTKCGNGRARRLLIEGAQTYKHKANVSTELQKRQEGLSKEIVDIAWQAQMRLCRRYQRLMHKGKHRNLVVAAIAREMIAYIWAISREVVITPIDPRTRVARVPA

SEQ ID NO: 397860 - protein, 343 aa, unidentified
MFAESVDVVIGVDTHRDSHALALVDAGLGALIAEERVDANRAGYRRALKLASGCGRRRLWAVEGTGSYGAGLARYLQHQGERVLELERPVRSGSRGRAKSDALDALRAARAALTGEPLAELRSGGQREALRVLLVSREASVAVRRRGLNQLRALVLTAPAELRERLQGLPKRALVKRCVALRPRSGQQPQLRGTLLALRSCSRQVELASREAAVLERELAALVKQLAPQLLSHYGVGPITAAQLLVSWSHPGRLRSEAAFARLAGVAPIPCSSGKTIRHRLDRGGDRQLNRALHTIVLARRRSDEQTIAYIHRRTREGKTEREAIRSLKRYIARSLYRLLERA

SEQ ID NO: 397861 - protein, 425 aa, unidentified
MTRISAGVDVSKNRSTVCIMDQDGKFIMRPFLVWHSTEELDFLADTLKRLNGEVRVIMESTSVYQYPIALQLKERGLFISIVNAYEMKQFANTDFRGGKTDKKDSRTIASYGISYWDKLVEWQIPKDTYFNLDLLNRTYMNAKKHRQIILQELQHYIDCAMPGMDKELHSLNLNTKKDFMLDFVEKFWHRDEIVNMTEAEFTEVFTAWAKEKGYRPVEGKAAKIYAIAKSCIPYYPANPTVKTILQCIVDKLSGVNRTLVTIVTQMIEEAKKLPEYQIVREMPGVGDPLAARFFGSAGDIRRFKNSKTLVAYAGIDSPPDESGDFSSTHRHITKKGSKVFRDTDYEIMMALRAQKRTWEKVRKNPEVYDYMLKKEAEGKPRKVAKIAALNKFLRIVYARIKELCDNMALAERAKTKTRAKTKVTA

SEQ ID NO: 397862 - protein, 473 aa, unidentified
MAKPTKKTKKNENAKTQTSAGAIPAAKAKRRPLLAVHPRAAGLDVGATFHVVAVPPDCDPQPVRSFNSFTGDLHELAGWLEAVGITTIAMESTGVYWVPVFEILEARGFEVLLVNARDAKNVPGRKTDVNDAQWLQQLHEHGLLRGSFRPRDAVARLRALLRHRERLVEYAASHIQHMQKALMLMNVQLHHVVSDITGMTGMKIIRSILDGIRDVNLLANHRDRRCKSSVETVRKALRGNYRSEHVFSLRQALELYDFHRSKIDECDTEIEGALAELNVDRETPTAPLPKVRHSRNPSEPKFELRTALYTLLGADLSQIHGFGPHTILRLIGECGDDMRRWPSVKHFTSWLCLAPGNKISGGRVLSSKTRRSSNRAAVVLRMAAINVGKTHTALGAFFRRLAARAGKAKAVTATARKLAVLFYNALRFGMKYIDPGENHYEQNYQDRVVHQLHRRAKQMGFTLVRENAVAGVS

SEQ ID NO: 397863 - protein, 327 aa, unidentified
MTNLDQHGKVHLGIDVSKRTLDACILPEDASQEGESFVVTNDQEGVEEILSRLAKLGTSVELAVMEATGRYERLAATMLAANGISVAIVNPRQARDFAKAIGKLAKTDKIDSFVLARFARAVEPRISVIPDEEAQRLQGILARRRQLIDMLVSENNRTRMAPKALAKRIRAHIEWLEKEIERIDADLDRAIEDNAAFKANEALLRSVPGVGRVLSRTLLAELPELGTITHKRLCALVGVAPFNRDSGQRRGKREAWGGRAPVRAVLYMSALVATRHNPHIKEFYERLVAAGKPKKVALVACMRKLLSILNALMRDRATWRCPHALTP

SEQ ID NO: 397864 - protein, 333 aa, unidentified
MTTAATEGTTSSTNGGILHLAFELGRKKWKLGFTIGLGQKARKKNVKGGDTAAVLHETAAAKRRFGLPAEARVVSCYEAGPEGFWLHRWLLSIGVENVVVDSASIEVDRRKRRAKSDGLDVEALLKLLCRHTMGEPKVWGVVRVPPPQIEDLRQLHRELATLTEERTRIRNRMRGLLAVHGASIRRWSTVREEVASLRLWDGSALGDGLRQRLEREIERLEIVQRQLRSIKHEMEAELQAAAEPGSALAMMQRLVSLRGIGTQGARIMVVELFAWRGFRNRREVGGCTGLTPTPYQSGNSSHEQGIDKAGNVWLRRAAIQLAWSWGAGNPTVS

SEQ ID NO: 397865 - protein, 460 aa, unidentified
MKKKRTYGSLDVEKIDPLSIVQLVLTIGCIVAVDVAKTRFVAAIANAAGEVLRILRFEHPRQTLAFLRVIESLKASKLAPRVVMEPTGTYGDALRYQCDKRGVRVEMMSPKHTHDIAEVLDGVPSMHDPKAAVALAKLAVMRPGRAWQPDSEEKREVRALLDRRWPMSKTCELYHGHLEAMLARHWPELASLLEVREQRSWMALLKKYPGPHLVAASSGDAAETLRKASRGRLAKECIAAVVDSASTTLGVPMMKGEETRLRFIVEQIERETRGLDAVDMEIAERVAKDAMMSLLAVIVGPACAASILSHVGSPLAFVSASALEKAIGLNLKVKSSGEQLGNVHITKRGPAQVRQLLYLAVLRLVQSDPIVAAWYRARTSYTPKSKQKAIVAVMRKLARALWHVARGATFDASKLFDVRRLKVAPNSEIASDAAPVAKVSAPACTLPKQRKQGGVSQPHA

SEQ ID NO: 397866 - protein, 355 aa, unidentified
MDSRKYIGMDVHKESISIAVGNAAGKIVMECVIETKASMILQFIGGLCGDLRVTFEEGTWAAWLYDLLKPHVTKLVVCDPRKNRSMREGNQSDKIDARRLAELLRLDHLNPVYHGEHGLRTLKELVRSYLTITKDLGRVMSRVKALYRSWGIPCTGKQVYTSRHRAEWIGKISEPGVRRRAEFYYQQLDALRILRQEVRRDLLAESKKHKAWKRLGQIPSIGPIRSAELLGILQTPHRFRTKRQLWTYCGLGIETHSSADHRMVEGQLQRAKKQVEIRGLNENCNHDLKNLFKGAAVVAATKPGPFEKFYAELLAKGMRPEMARLTLARKIATIVLIVWKRGVSFDAQHLKPQTA

SEQ ID NO: 397867 - protein, 344 aa, unidentified
MNEVITIGVDVAKSVFQVHGVDDEGHVVIGRQLRRSRVLPFFKKQAPCLVGMEACATAHHWARQLIELGHEVKLMPPHYVKPYVKRSKNDAADAAAICEAVTRPSMRFVSVKGTEQQSVLMLHRARELLVRQRTMLINAIRAHMAEFGIVAPVGVPQVKKLLRIIADTDDARLPSLARTCLDGLARQFLSLDKEINAAEKRIHAWHRSNEVSRRLETIPGIGPIIASALAASITDPEVFKNGRELAAWIGLVPRQNSTGGKQRLGKISKQGDQYLRWLLVAGAMSVIMHAKRRGTTYRPWLADIIARKPTKVAAVALANKTARIVWALLRHGGTYQKAVAVQAT

SEQ ID NO: 397868 - protein, 360 aa, unidentified
MKKVSKQMQKMEATDKPEMTVGLDLGDRYSHYCLLNADAEVVEEGRIQSTEAALRRHFEGEPCLRIALECGTHSPWVSRLLKALGHQPIIANTRKIRAITASQSKNDKNDAEQLARFAAHDPRLLSPIEHRSPERQSDLNLIHVRSTLVRVRTALVNDLRGLVKSAGSRLPACSTESLPARAMAAIPAPLVDAATPLVEQIAQLSTRIAAMDKQIAKLAAKYPEIALLRTVPGVGPIVAAAYVLTLDRPDAASNRSAGAFIGLRPAQSQSGDADPQKRISKAGDKCLRSLLVQSAQYILGRFGPDSELRRWGLKLAATGGKRGKKRAIVAVARKLAVILHAMWRNGERFKAFSQPAEVAA

SEQ ID NO: 397869 - protein, 403 aa, unidentified
MAKVFIGVDPHKLSATIEVVDGRERVLATGRFGTDKAGYAAMRKQVASYPNRVWAVEGSNGTGRPLAQRLLADGEYVVDVPAKLSARARLLDTGHNRKTDAHDAHAVAVVAVRTKNLRVLSYDADLEVLRMLVDRRDELSKSKVQAVNRLHRLLSELVPGQSKKDITALQAKAILASVRPRDSVGKTRKRLALEQLAEMVAIEKKMKASSKELKTLVIARGSHLMDLTGVGPVVAARILADVGDVARFTDRNRFASWTGTAPLDASSGEQIRHRLSRAGNRKANHVIHIAAVNQIRLDTPGRAYYRRKLAAGKTPLEALRCLKRRISDALYRQLRADARTAATTDANAGPGGHRGASHVSSAAGSHPHTDTSDQPLPGPAPTTLPASTPTRKTTILRPLEPAS

SEQ ID NO: 397870 - protein, 343 aa, unidentified
MDYFAGLDVSVKETSICIVDDAGKIVREVRVASEPEALLQVLTNTIYRFKRVGLEAGPLSQWLYSVLAEAGLPVICVETRHMRAVLKAQINKTDRNDARGIAQMMRVGLYRPVHVKTLRSQKLRVLLTHRKLLQSKAIAIENDLRATLRNFGLKVSRVGTVKFEARIRELVESLPDVAVLVEPLLVVRRVLREQVGILHRRVLAIVRDDEVCRRLMTVPGVGAVVALTYRATVDVPARFRNSKAVGAVFGLTPARYQSGENDRTGAISRCGDEMTRVMLYEAAQSMLVRSAKWSWLKAWAMKIARHCGMKKAIVALARRLAVIMHRIWVDGSEFRWTREVAAA

SEQ ID NO: 397871 - protein, 376 aa, unidentified
MTTTTRSGFSSVSEPTLYVAFELGKKEWKLAMTSGFGVAPWLRTVASGDLRAVARALEQGRRHLGLPAQAGVVSCYEAGRDGFWIHRALVQMGVANRVVDSSSIEVNRRARRAKTDRLDALKLVQMLVRVCYGERRVWSEVHVPTVAEEAARQVSRERTALTDDQTRLINQMRGWLATWGCTLPARRRPGWWTTMRDWAGAVLPVELQARLARAEARLEVVEGQIAELEARQQAAVTTAAPASALRQLVRVKGVATTSASVLLDEGLVWREFRNRRQIGGLLGFAPTPHDSGGSEREQGISRAGNHRLQAISIQLAWNWVRWQPDSALTQWYRAHFGTGKRARRIGIVALARKLMIALWRYVTTGVVPAGAILKVA

SEQ ID NO: 397872 - protein, 365 aa, unidentified
MPELTHIGLDVHKETIAVAVLRPGESECEERVVANTPEALRRLFARFPDRAALRTCYEAGPTGYDTWRLLSSLGVPCEVIAPSLIPKRSGAHVKTDRTDARNLARLLRAGELTAVRVPTPSEEALRDLVRTREDLKSDRRVAQQRVRSFLLRYGRRYPVPRGRWGVRYELWLQTQSFEEPAAQAAFDHLVGAASVRGAQLTAIDRQIEEAALSGPLAEPVARLRAFRGIDTLTALTVVSETCDFARFPTAAGYMAFTGLVPREHSSGASRRQGSITKAGNAHLRRVLVEAAWAYRHRPAVRGKLAGRQEGLPPELLAYSWKAQQRLHATYRKLAARRGANKAAVAVARELSGFVWGAMTGRMGAA

SEQ ID NO: 397873 - protein, 350 aa, unidentified
MLIIGCDYHPSFQQIAFVDTDTGELQERRLEHREEAEKFYRGLGDQGMKVRVGMEASGHARWFERLLGELNFELWIGDATEIARKRERKQKTDRQDAQHILRLLLKDDFPRIWIPSWENRDLRQLLWHRHRMVQARTRIMNQLQAVALNEGLRSKKRLWREHGREQLESFRLAPWASRRRQDLLELLDRLNPTIAELSQAIEQEAEKFSEARWLMTHPGVGPLTALAFVLIIGEADRFQCGKQVASYLGLVPLEDSSGNRRRLGHITKQGSSMLRFLLVEAAQVTVRSLPEWRSKYFHLMMRRGRKIAKVAMARRLAIRLYWMWRKGWDYEQVKKFGSHAGQLGTGDGVQ

SEQ ID NO: 397874 - protein, 388 aa, unidentified
MMADPSATPIEATTRPDAGRLFAALELGKSRWLVTVDAPGSDKLSRHAVAGGDGAALLDLLARLRTTAERRTGRPVEVLAIQEAGLDGFWLHRLLERNGTSSHVVDPASIAVNRRHRRAKTDTIDGEMLLRTLMAWARGERRVCSMVRPPSPEEEDRRRLTRERATLLKERIQHTNRIKGLLCGQGIVDYEPLGKDRLARLDALETGDGRPLPERLKAEIRREIERIDLVCSQIAAVERERDALIEATSEAAGPGTPAAALARLKGIGGELGSLLWLEALFRRFDNRRQIAAYAGLAPSPWQSGGTEREQGISKSGNRRLRHAMVELAWFWLRHQPDSALSAWFRERVGPGRGRVRRIAIVALARKLLVALWRYTTQGVVPQGAAFKA

SEQ ID NO: 397875 - protein, 412 aa, unidentified
MTVTNQFAAHVGLDWADKKHDVCVQFKNGERVFDVIEHTAEALDAWLTELHQKVKGRIAIALELKKGPVVYALQKYPFITVFPVHALSLARYRQAFSPSGAKDDPQDAELALELMLRYPQKIKAIEPDNADIRLLQQLVEQRRQLVEDKRRFVNRIINTLKQYYPQPLEWFSHRGSLLLCELLIRWPSLQQLKRARRDTIRNFLNAKGGRAMALTEQRVASIDNAIPLTTDPSVIEANALMAAALATQIKVVSEIIKTYDERIETLFDTLPDAGLFKSLPGMGPCMGPRMLAALGDNRDRFNSAEEIQNYAGIAPVTERSGQKSWVHWRWQCAKFVRQTFVEWAAKTVNSSYWAKLYYQGLREKGKSHQSAIRALAFKWIRIIYRCWKARTCYDEAKYLLALEARHSPLLKP

SEQ ID NO: 397876 - protein, 295 aa, unidentified
MAILPHEQAFSVSNDKAGWAELIEALRRFSLAAIGIEASGGYERGTLRALLATGFSVRLVNPFKLRQFAKACGILAKNDRLDARMIARFVATMPTRPAQRNKAVERMAELLTARRQLVEQKVAAENAARLFEDAVLQRLYRRRVARLAADIVLLDKRLAEIVTADAALAQRYRLLTSMPGVGPLLACTIIALLPELGQMSRKQVAALVGLAPYDFESGKLKGARCIWGGRAPIRRVLYMAALIGCRCNPVLKVFHDRLAITGKRSKVVIVAVMRKIVTILNAMARDNVEWQRQPA

SEQ ID NO: 397877 - protein, 389 aa, unidentified
MVFVGIDVAKNKHDCFICNSQGVVLADVFTIDNTKTGFDFLLSKIRSCSEMGEKIKVGLEATGHYSYNLLGFLLDNDFCPFVINPLHTNLYRKSLSLRKTKTDRIDAKAIASLLMSDVSLKPYNQALYHNEELKSLSRYRFDKVKERSKLKASVSRLVNILFPELEHLVSTIHTASVYALLSEFPSAKDVSTAHLTRLTNILYSASYGRHNRDTAIHIRDVARDSVGTYFPAKALELRHTLKLIKILDEEVDEIELEIKRIMDKINSPICSIPGISIITAAMIISEIGDFSNFSSPDKILAFAGLSPSTYQSGQLSNAYSHMEKRGSKYLRYAIFNATQHVCVWVPDFSNYLEKKRAEGKHYYVAVSHASRKLIRVMYALENKKESFKR

SEQ ID NO: 397878 - protein, 429 aa, unidentified
MNVVDSIRLEEFRQIRKEIRGSNEHLIVGIDVAKFKHYAFYGTATGKTLLKRMIFENNLEGFRKLRAQEDALKVRYGLDKVIYGFEPTANYHKPLGEYLIRSGRHVVLVAGTAVKNNRKTIDGRWDKNDTKDAAVIADLICQGKFLFYEYPSMPLRDLRNLLSLKRRLKRQEHGQKVRIRNHLLAQYFPELDVYYGNWGKEGLAIVRWCLDPSVIAGLEYEDFVRRVAPDARGSSYKQERLRAVWEKAVDSIGCRAGESLDVEAKLMVEGLAYIRDSIREVEDNIEEVCSCFPEYSYLLSIPGFGPDIASRVIAAIGNPFRFDNQRQVLKMAGMDLSANRSGKTSDNATPRLSKNGNAYLRYALYQAAMVASYRSTPFIRYFTEKLRGREKEKGIKTKMRVKLAAKILIISWTLMKKREPFDPKYLSRD

SEQ ID NO: 397879 - protein, 388 aa, unidentified
MFFLGIDVGKNTHVASLLDEKAKIIFKAYSFANTLDAAEALLVKLEPYKDSLEIGMEATGHYWLSLYSFLAEHKFIVHVLNPIQTDGWRKGIEIRKRKTDVIDSVLIADLIRYGDFLETSLADEDILSLRNLSRFRVYLVNSVSDLKRKAIAVLDQIFPEYASVFSNVFGQTSKELLKSLSLPSDYENLSATKIEEVLSNITQKKKASKTISTLSDKARRSFGIAFCKDSFAFQLKLIVEQICFIEEQISSVELEIEQLMSKLGTNIKTIPGVGSVIGAVILGEIGDIERFDNPSKLVAYAGLDVSVSQSGEYESSSGKLSKRGSPYLRKALYMAAQRAEFCDPVFHAYYEKKRNEGKHHLVATNAVARKLCHTIYAILKKDIPYEVQ

SEQ ID NO: 397880 - protein, 310 aa, unidentified
MSPHPIIGIDIAKDSLQIDDGTCRRVVRNHPAALRRWLRGLPAQTQLICEPTGGYERTLLRLAHQAGLPASLVNARQVRAFAHGVGRLEKTDRLDAAVLRHYGQCVQPRPLPPPDPAWLRLQQWTRTRAHYAGLRQAEHNRLELLEDPALRQLTEQQCAHWDQLILGLDAQIEAHVAAHPALQDRVQTLCLVCGVGPQTALTLVAEFPELGRLTPRAAAKLAGLAPLSHDSGQWQGRRHVAHGRASVRRALFQAALVAARHNEHLRPFYQRLRSHGKPPKVALIAVLRRLVVFANAVLRSGQPWKGASAT

SEQ ID NO: 397881 - protein, 349 aa, unidentified
MKIIGCDFHPSYQQIMMLDQATGEMVEKALSHERKEEVRAFYAGLEGPVRVGIEASGQSQWFERMLAELGHQVWIGDAAKIRASCERKQKTDRRDAELLLRLLAEDRFPRIWVPTAAERDDRQLLLHRHKLVRLRTQVKNQLQAQALNQGVQRKGKLWSEAGRKQLESLPLLPWASRRRAELLQLLDQLEASIAELDRAVAEQASARLEARRLMTHPGVGPVTALAFALTMGPAERFQRGKQVASYLGLIPSEHSSGGRNQRLGHISKQGNPFLRGLLVEAAQSAVRLEPEMRRAYQRLAQRKCRALAKVAMARKLAVRLYWMLRLQMDYAQLIQGSHAGQPGTFCGRG

SEQ ID NO: 397882 - protein, 349 aa, unidentified
MVIVGIDAHKHSHTAVVVDVGGRRLGVRTVSASRAGHLELLRWARRWRSRRWAIEDTRHLTHGLEADLLAAAEDVVRVPPKLMAGARRSAREPGKSDPLDALSVARAALREPDLPVARLDGVERELRLLVDHREDLLVDRTGHQDRLRWFLVELGIAEPPARSLDRRVVLDRLEAELVPRTEPVARFARDLLGRIRELTVAVNAFEREIEELARRVAPSLLALPGCGPLTAAKLVGQTGGVGRFRSRAAFARHNGTAPVPVWSGNTVRHRLSRGGDRQLNVALHRIAVTQLQREGPGQAYVAKRMATGNTKTEAIRALRRHLSNVVFERLLTDDAARAAAAAALTAAAA

SEQ ID NO: 397883 - protein, 437 aa, unidentified
MLPTINPHAAGIDAGSRQFFVAVPEGPVSSYESHTADLYRLREHLLAHKVETVAMEATGVYWLCLYEILEAAAITVCLVNGAHVKNLPGRKSDVQDCQWLQQLHACGLLRASFVPPDEIRTLRSYTRLREDHIRTAAMYVQHMQKALDLLNVKLHTVISQIQGASGLAVIRALLGGERDAVKLAGLCDPRILKTKRAAVERALHGRWKEEHLFALRQALAGWEFCTAQIAQCDAEIARQLVEQTKDLPPPPERPAPKTGRHHVPDVPGLHGHLLVLSGAQDAAVLPGFTPTSWLKLLSEVGTDLSRWRDEKAFCSWLGLSPGKCQSGQSERRLRRRPKPLAGQILRLAAQSVGRSSYLALGGFYRRLKARTSAAVALVATARKLAVLYYRTMRHGLAYVERGLAAEEHAYLTRQRRHLQQRAAALGLAVTTLSPSPT

SEQ ID NO: 397884 - protein, 428 aa, unidentified
MEKLHEHAGGIDIGSRKIYVGLEGKEVVSFETFTSDFIKASEYLKEKNIKTVAMEATGVYWIVLYDILIQAGFDVWLVDGRQTKQVPGRKTDVKDCQWIQQLHSYGLLNRCFVAEGVLKELRSYQRMREDHIRSSAMHIQHMQKALIEMNIRLPEVLSQTNGKSGLAIIKAILAGERNANKLLSLCDTRLQKNKSAEILKALEGFYTSQGLFALKQAYQSYLFYQQQITECDNQISEIFIELNKADSFDNSIKRKPIRHNSPKVKHLGSHMIHLFEGKDATKLSGITDYSWFQLYTEIGADLTKWGSEKHFTSWLGLSPGQNDSGKKKKNVKKGHPKAGQIFRTIAQSLLNSKHIALGAFGRRIRARKGPGIAVKAVARKLAVQYWRLMVKGLDFVEKGVEKYEQILLLQKQNSLKRLAKELKVELVM

SEQ ID NO: 397885 - protein, 383 aa, unidentified
MHDGTNLPVPERTGIPGDCATLFVSLELSRSTWVATSLAPGSKKMSKHTLVGDDGRKLLDLLARLKTRAEQRIAAPVKVVAIHEVGLDGFWIHRLLEANGVESHVVDPASIAVPRRHRRAKTDAIDGETLLRTLMAWQRGEPRVCAMTVPPSPSEEDCRRVSRERATLLRERIQHTNRIRGLLFGQGITNYNPLHKNRRECLEELRTGDGRSLPTHVKAEILREIDRLELVLRQIGEVEAERDEILRPAEASSPAALLMRLKGIGAEFATVLYFEGLFRHFENRRQLAAYAGLAPSPWKSGSIDHEQGISKAGNPRLRTTMVELAWMWVRYQPDSALSGWFRQRVGSERGRTRRIAIVALARKLLIALSRYVTHGERAMARSW

SEQ ID NO: 397886 - protein, 360 aa, unidentified
MSVQGTSVGLDVHALSVVAHAVDEVTGEVSRARLCPDYGEIMCWLSQLRAPVRVVYEAGPTGFGLARALNDARVECLVAAPSKLQRPAGDRIKTDARDAAHLARLLRLGEITAVRVPDADIEAVRDLVRAREDARADLMRVRHRLSKLLLRQGIVYFGGTPWTDAHELWLRRQRFADIHLKAAFDHGFDAVLAATAARDRLDEQIAEVATSPRFADPVNRLGCLRGISALTGLALTVEIGDWSRFTGSSIGAYVGLVPSEYSSGNSRVQGSITKAGNTHVRRLLIEAAWHHRKSYSTSGPTLRARWAKVDPALRARGHAGNRRLNKRWRSFTDRGKNPLVANVAIARELAGWCWSLATMQ

SEQ ID NO: 397887 - protein, 348 aa, unidentified
MLCKNATFNKIWGGVMYIGLDISKKTVVAVCKDKEGNKVWEETFETNGCGLDNLIKKLQKDDEIVLEASTSGIFVYDYLVENNFSVKVANPYNLSLIYRSEKKTDRTDAEKLVDLLRTNMLPTSYIPSKESRQLRDIIRHRRSFVITNTIWKNKIRSILAREGISLDVTDILGDKALKLLEEVELGNVQKEAIDKILSIALYTETKIEEYDKELYSEFKTNKQAKLMDTIPGIDYYSAMHIMSAIVDIKRFPSDEQLASYAGLAPRISQSGEVAYTKGLMHGDGLLKWILIQNAHAAIRCSKRFRKLYLKKKRKNGSQRAIISVARKMIEIIYCMLTRGEEYREDYNN

SEQ ID NO: 397888 - protein, 432 aa, unidentified
MTVRNVYFRVFYRFHAGRKAMSYKVAGIDVHKKVLMVVVAEVEASQSEWSLQRRRFGTTTSELRQLAGWLREQEVAEAVMESTAQYWKPVWYELEPYLRLQLAQAFSNRAPRGRKHDFRDAERLVRRLVANELILSFVPAAEQRAWRTMTRMKCQLAHDRVRLHNQVECLLEEMRIKLSSVLSDLLGASGQRILRALAAGESDATRLAALGDERLHCSQQQLIEALTGKPEAMHQQLLGLYLQRLRLIEEQSQQLNGMIAQAMQAHHDAVVRLAEVPGFGADSAQQVIAEVGAQASTFASAAQLTSWVGTCPGQQESAEQNHSSRSAKGNKFVRRVLTEAAQAAVRTKGSHFQLVFRRLLPRLGYKQALWAIAHRLCRVMWKILHEGVRYIEQGAERDPKARKQRAQTLARYLRKLGYKVEITPLTPATAEL

SEQ ID NO: 397889 - protein, 416 aa, unidentified
MKKNSNSQTKNGQKTKTAKARGPVQRDSKEVMAELVAKLTERLDPKPALENATAEKPRGVPAPNRDRLTVGVDLGDQWSNYCILGLEGETLVEGQLRTTREDVAEFFRALLAARVILEVGTHSAWVREVVVGCGHEVLVANPRLMDGTKRRKRKNDRIDANQLARLGRIDPQSLFPMEHRSTEVRQDLVVLRARDALVSVRTQLINTTRGLVKSMGTRLPKCSSPSFPHQVEEALPAEVRESLLPLVRLAEALSDCIQVYDERIEKLGQEKYRHTELLRQVKGVGPLTSLAYVLTLENPDRFAKSRDVGPYLGLVPKQEDSGDSQPQLGISKAGDVMLRRLLVGSAHYILGPFGPDTDLRRYGLRLCERGGKNAKKRAAVAVARKLAVLLHRLWISGEVYEPLRHAPPTAEVQEAA

SEQ ID NO: 397890 - protein, 371 aa, unidentified
MKSIVDIGMDVHKKTYSLCAILKETGEVLAETKISADTKLIMKFIENVKKMVDDPEVEIKTGYEAGCLGYSLYWQLEEKGIDCDILAPSTMQRSVKNKVVKNDRRDAKNIAENLRSGTYKAVHVPTAEDVEVKEYIRMIHDFKIESKKVKQHINAFILRFGHQYPEKSRWIPSHIKWLRELELKDMYREILDEYLSQLESLTEKIERFQNRLEELSQKETYKEKISKLRCIKGIDTTAAMTLQVETSAFDRFPNANAYASYCGLTPGEDSSGEKNRRLSITKQGNSMIRSTLVEAAQVLVRGAAGKKGKKLKSKQMGQDVKVIDYADKAVLRLQKKYHQMIYRGVNRNIVITAIARELACFVWGMETGRID

SEQ ID NO: 397891 - protein, 334 aa, unidentified
MKSDTVYIGVDVSKAKLDVYVPPKKEGLRAVTKELENNVKGFRELRNIARVVNATVCIEPTGGYELELIAVMHRFKVPVAYADALRVRQFAKAEGNLSKNDTIDAALISRFADKIGVRIINENDIDTVELKRKTKFRQTLMDSRTALICKLETEIDKEIRTMIGEQIKHLNKLIKKIEASCMETAEKNQSMKNLVSRFTEIGGVGNLTAVSILAELPEIGRINDAKLNRLAGLAPEEKQSGSKEWQRRIWGGRKDVRNALYMATVAGIMWNSILRDYYRKKRAEGHPHKWAIVPTMRKLLSLLNRIARDPDFRPTPEPESTKRLAGVRRKRKLA

SEQ ID NO: 397892 - protein, 343 aa, unidentified
MTIKVLGIDIAKNTFQLHGADDAGKAVLKKRLPRNRLSPYVANLHPCTIVMESCGGANYWARVFQRSGHTVKLISPQFVKPFVKTNKNDANDAEAIVEAASRPSMHFVPIKRPEQQDIQSLHRVRSRLVKNRTALINEIRGLCLEYGVIIALGAARVKKSLCAVVADSGNGLTPSSRDCMQELYEELVDVEARLKKLDARNRQLCRQNDSCRRILSIPGVGELTATAIVAAVGDAQAFKNGRHMSAWLGLVPRQSSSGDKRVLLGISKRGDRYLRTLLIHGARAALSHYKTTDNDYGLWLDRKKTTLSFNKAAVALANKNARIIWSLLNSGEEFNYGVQTAAA

SEQ ID NO: 397893 - protein, 340 aa, unidentified
MQAIRFGLDVAKTVFQVHGVDAAEQVVVQRRLRRGQLLAFFARQEPALIGLEACGSAHHWARELTVLGHEVRLMPPAYVKPYVKRNKTDARDAEAICEAVSRPGMRFVAIKSVAQQCARSLHRARDLLVRQRTQLANAMRGLLYEMGLTAAQGQGGLQSLVQGVEASDEAIPPALLASLAPLARQWRSLAAEIAQLDATIKAEARRDERARRLMTVPGVGPLTAHAVLAAVGEAEPFASARDFAAWLGLTRKNHDSGGKRQRTGRISRAGDRAVRRLLVLGASSWLRQVRARPERGSSWLTGLLARRPVKVAVVAQAAKTARILWALLGSGESYRAPATA

SEQ ID NO: 397894 - protein, 387 aa, unidentified
MPQPNDLSRSLVALDQNSTIIAVIEMSQSSWLVAGMLPGIERQPRKKLEPNPERLLGLLHRWQGEVVRAGRTITRIAVAFEAGRDGFWLARWLAARGIEAHVIHASSVAVSREHRRAKTDRLDTELLKRGFLGWLRGERGHCSMARVPTIAEEDAKRPNRERDCLVGERTRIVNRIKSTLARLGIRNFKPTLRKAAERLATVHTPEGVPLPPNTLAELQRDMARLGFVVGQIREIEEARQKRLEQQPESGPHAMVRLLARIVGVGVETADLLVHEVLSRPMRDRRAVARYAGLTGSPDESGARRREQGLARAGNARVRRGMIQLAWRFLMFQKESALALWYRARTADSRSGTRKTMIVALARKLNIALWRFVTAGEPLEGVVLRPAS

SEQ ID NO: 397895 - protein, 419 aa, unidentified
MIKTNDSQILSVVHPICCGLDVHKDQVSACLLFTDETGQPASEIKEFKTFTDDLFSLRDWLIAHECPILAMESTGVYWRPIHNVLEHHLEVILVNARHVKNVPGRKTDISDCKWLAGLLRHGLLKGSFILPQYAREWRELWGVRQSYVRTTGDFGRRIHKILQCANIKIDSVVSDLFGATGRNLMKLLIRRQSDITLEEIEQCARGKLRQKTLELHRSIKGFFSNHHAHLLSTLLTTVEYLEAQIEAVTRRLRALMADHAPLIERLDEVPGINEIGAMGILSHIGIDLKAFPTEDAFCSWQGICPGNNESAGKRHHGKPTVRKHPLKTLLIELAWTSIKKKGSYYKEKFHRLKARIGAKCAITAIAHKLAKAIYHIVKEGASYRELGEEFLSRQKTAARLNRLRFQAKALGYLLTPILP

SEQ ID NO: 397896 - protein, 359 aa, unidentified
MKCNPAVATIAIDLAKTVFQVLAVDAHGNVLESHRLSRSAFIAFWHNRAPVRVVMEACGSAHHFGRWLSSLGHQVTLLPAQYVRPYVRRSKTDAADCLAMIEAARAIDLKPVPIKTELQQTIQLLHRARQQWQETRTARINLARGLLREFGIVVPEGAERGRQAMRAALGHEALDQRLRDLVAALLEEIRALEQRIADVDRSLASTAKDDPVIAQLESLPGIGWVTATAVRASIGDIHRFKTGRVLSSWLGFTPKEHSSGSTRQLGRMSKCGDVYCRTLLIQGARAVLAAAKRAQAAGKPLDRLRAWALALAERRGFNKAAVGLANKIVRIVWATWHHARTFDGDYGKRFDQEIAMTSV

SEQ ID NO: 397897 - protein, 366 aa, unidentified
MEARRFVGIDLGKRHYEACVLHAGEKIIRWRGTTDAEGRNELAGKLEAGDVVALEAGALSFTLARRLAQVDGVQVKILHSAKLAVIYSSMRKTDKEDALKLARVLQGTAEECLPEVNLPSQEDEDARRLANHQIFLNRERTGIINRFHAACIEHGMTEITKKDLATEKGRMAVLERMAGIYRMLAEQYCVILAAIESQRVLVKEQVRQALLKREKEAEILLSIPGVGPTAALAYLGFVGTEDRFENPAQVSYYVGMVPRVELSGTSIHHMGHITKQGSPALRRALVQAAWAAVRSPMGAHFRAVYDRIADRRGKRIAIVAVARHMLELMYTLLSKHEMYHFCTEEERLRKLRFYKLSSLGTVEILT

SEQ ID NO: 397898 - protein, 351 aa, unidentified
MMIIGVDYHPSFQTIAFFVEETGECGEQELNHSDGQAEKFYRDLKQRGICVRVGMEATGYARWFERLLAELGFELWIGDPAEIKAKRVKKQKFDREDARLLLRLLRENNFPQIWVAGPENRDLRQLLWHRHRLVQMRTRIMNQLWALAMNENKCWKKKLWSERGRAELEKLPLGFWASRRRQDLLELLDRMNPKIEELTATAEQEAKKRPDALRLMTHPGVGPLTALAYVLIIGTPTRFARGKQIGTYVGMIPSEESSGGKQRLGHISKQGNSLLRFLLVEAAQAAARVHPDWRRRYMHLAMRRHKSIAKVAMGRRLAIKLYWMWRNGCEYSQSGKCGSYAGQLGTGHGGK

SEQ ID NO: 397899 - protein, 423 aa, unidentified
MICHSGKRAKCHAGASRLQRNMKGLPTFGQRRRCAKIEGASHQSAAIERGSPVDKITRGVAARVGVDLSKRVIQVQAVDACGRVLTNRTLGRDKFLPWCAQLPAGCMVVMEVSSSAHHWARKLLAMGLDARIVSAHLAAPYRSEGHVGKNDANDAAAICEAASRPHMRFVPVKSIEQQSLLCVHRLREGVKADRTACINRIRGLLLEFGIAVATGVRALQTTLHDILEDAGNELNGLARMTLQRAHAQWRELDEHLAWCDARLAAHAADSADVQRAADLMGVGPITASAAVATVGDFKQFDSGAQFGAWLGLVPKQRSSGGKSNLGTITKRGDAYLRTLLVQGAKSVVNTAHTRTDPISRWALALKQRSGWQKAVVALANKNARILWAVMTRELRFDRHHVSTKPTGAMQPPRSADPSSAAMA

SEQ ID NO: 397900 - protein, 365 aa, unidentified
MPTVAHFVDAVVGGDTHVDTTSLCVVSPVGAMLAEITIDNDEDGYAQAVTWVLQVVPSERFLVGLEGTRSYGAGLCRALQAVGIRVVEVERPSRGERARRGKSDAGDALLAANKVLAMPVDRVPQPRTGDGVREALRLLTIDREQMTTQRTRLVNQLLADLLTGTAEQQALRKKDLTSGTLRKLAGARGRPGRPIDEQARLVVLRRKAQDIVRLDQQIRENERQLRTILGEVAPQLLEQVGVGPVVAAQLIVSYSHHGRCRDEAAFAALAGVSPVEASSGRITRHRLNRGGDRRLNRALHVVAVTRVKHDPRTRDYIQRRRKDLTDREIRRMLKRYIARTMFKILQTIDALNPTNNTGNTAVRAA

SEQ ID NO: 397901 - protein, 332 aa, unidentified
MYLGIDVHKRYAQVAVMDEAGTIVEEVRVENANLDDLAQRYAGAQAVLEATSNYYHIHDTLSEHLDVTVAHPKKINQIADTDKKTDRVDAKELARMLRLNSVPESYVPTEEVREARALVRGRQTLVENRTKYANKVHGLLSDHGITEDVKPLTVEGRESLRGLSIPTPFDALLESYLDLIESLTEEIQKLDETIEQRAGSLKETQLLMTIPGVSYYTALTIYAELGGIDRFDGDKEVVSYVGLNPVIRESGDSRIEGGISKRGSGRVRWLLVQAANTAVHTSNDEYLSRFYDRLASRKNSQKAIVAAARKMLVSIYHMLDRGEAYDPPGVTA

SEQ ID NO: 397902 - protein, 292 aa, unidentified
MAFDQHAASVMAAVLMPGDRTPALHPLPPDLPSIRRFLERLAVPAVRCCYEAGPCGFDLQRSLHAQGIACDVIAPALIPRRVGNRVKTDRRDAAQLAVLYRAGALTAISIPTEQEEAVRDLLRCREDICTDLLRAKHRLSKFLLRHGRRCPDGRAWSKRYFAWLRGQQWALAALEQTFTSYRRAIDDTVARLRSVDGDLQTALTFAPIAPRVARLRCFRGIDDLTALTIAVELGDATRFPAARQVMGFTGLVPSEYSSGATQKRGGITKNRECAPAPSPGRSRLALSPPPGG

SEQ ID NO: 397903 - protein, 349 aa, unidentified
MTKNSAVWLGSTMGVDLGDRSSRVCVLDAGGDIVEEASIPTTRAAFERKFGGLGRARVVIETGTHANWVHDLLAESGHEVVVANARKVRAISANERKCDELDARMLARLGRADVRLLAPVSVRPEQLRVDMALLRARATAVEARTTLINSVRGLSKAAGQRLKTCSSASFHKQPPEASLQAALSPLMASIEQLSKSIAEYDKHIEQLCRSRYPQTKLLSQIKGVGPQTALYFVLMIADPARFKRPRDVGAYLGLVPRRDQSGGSDPALHITKCGDRMGRTLLVQCAQHILGAFGADSDLRRFGLKLALRGGKSAKKRAIVATARKLAVLLFALLRNAEVYEPLRNSAAH

SEQ ID NO: 397904 - protein, 349 aa, unidentified
MPHQSTPSTVATIGIDLGKNTFHLIGLDQRGNIVLRLKTSRNQLERRLTNIPRCLIGMEACSGSHHIGRQLDSLGHDVRLIPAQYVKPFLKGHKSDYRDAEAIAEAVQRPTMHFVSIKTPDQLDLLALHRVRSRLVSQRTGVINQIRGFLIERGVTVRQGPAPLRKALSDILCSSSQTLSLRLVRLIADLVEDWRRLDDRIATVSAEIEALAEQDSPCQRLMTVPGIGPIISSAVVAAIGNGTGFKQGRDFGAWLGLVPKQESTGDRTILGKISKRGNKYLRTLFVQAAHVVLARRPSKAMLGLWPWIEQASKRLHRNMLAIALANKLARIAWAVLARGHEYQPRVSQA

SEQ ID NO: 397905 - protein, 391 aa, unidentified
MPQPNDLSRSLTALDQDSTLIAVVEMSQSSWLVGAIIPGVERRPAKKLDASEGMLLALLHRWRDEAAKAGCTIDRITVAFEAGRDGFWLARWLRQRGIEAHVIHATSIAVSREHRRAKTDRLDAALLQRAFLGWLRGERGHCTMVAIASLAEEDAKRPSREREALVGERTRIGNRMKSTLARLGIRGIRPGLRKTAERLEQLRTPEGAPLPPNTLAELRRDLARLRLIHDQIGEIEAARVERLRQQPDEARHPMILLLARVVGIGIETADMLVQEVLSRKLRDRRAVARYGGLTGSPEESGARRREKGLARAGNARVRRGMLQLAWRFLMFQKDSALAQWYRARTADARGATRKTMIVALARKLLVALWKLVTTGELPNGVVLRPAIQAVL

SEQ ID NO: 397906 - protein, 346 aa, unidentified
MRILALDLGKYKTVACEYEAESGQHRFATVLTTPKALHDLIVDREPQRVVIEICSIAGWVGDLVRSLGIELQVANTSDERWQWRKVKQKNDRRDALKAAQLSAVNQLCPVHVPELTMRQWRALIAYRSKLVQRRTKVKNHIRDLLLREGQLLPRGRTAWTQAGMATLAALAQPFATLDSEQLWRGELGLELAQLNELQQQIMTVHAKLDELAAADARVQLLRTIPGVGPRLAEAIVTMFDEVTRFSTAGQVGAYIGMVPKQFDSGETQRSGRITRHGNRLVRSLLVEIAWASLRHNPWARQTFQRISGGKKSRRKIAIVAVGRKLLVRCWGMLRHQTPWHWQPGVA

SEQ ID NO: 397907 - protein, 423 aa, unidentified
MEQNDDNRLKEFRQLKREIRMSGEFLVIGVDIAKERHHAFFGTPTGNTLLRRLVFENTKEGFEDLCFQADTLKTRHALKKVVFGLEPTADYHKPLAEYLIRQRHMVVLVGGAAVKKNRELLDGRWDKNDTKDAANVADLITQGKCLFYDFPSSDLRELRNLLSLKRRLKKQKQGYRVRIRNHLIAQYFPEMDDYFSYGEGPAIVKWCLDPAELTNLPFEEFVRMVSSRNGGENQRRRLLEIQKKAASSIGCKVTPSVSFESKTLLEELQQLHRMIQETDKKIVGICERFPEYTFLLSIPGFGPDISAKVLGAIGNPHRFDNERQVLKMAGLDLSADRSGKKSDVTPVISKKGKADLRYGLYQAALIASTRNRHFMTYFTNKLKGREREKGILTNRRVKLAAKMLVIAWTLMKKKEVFDPGYIK

SEQ ID NO: 397908 - protein, 343 aa, unidentified
MKKSLFIGIDFSKKTFDVCLIDGNNPNGIPDYKQFENTKEGCNQLLKWVKLWSKIPASEWLFCGEHTGLYSVLLSEFLIKKDLFVWLENPLQIKLSTGIKRDKNDKVDSREIALYALRFQDKAKESQLSDKSLKSLELLLGFRDRLIGNKHALLVSAAELRDVLNRDVTARYIYEQSQKDIERINKEIKCVEAKMKEVVDSNDAIKETYEVVSSIKGVALINTVAIIVATKNFSRFENSRQFACYAGMAPFGKQSGTSIKTGPHVSHLANKRIKTLLTQAAQCAIRHNSDLKQYYTRKVAEGKNKWIVLNNVRNKLIHCIFALVRDKQLYQEGFLQHMEKSIA

SEQ ID NO: 397909 - protein, 431 aa, unidentified
MLKINPLSTLYVGIDVSSKSNYVCALDFYKNKYINSSFANNQPGAEELALKILECLKEHPDITTIVAALESTSVYSIHIANYLSSCEELMRFKPYVFVLNPKCTANYKKSYIGLGKSDPIDAFVIANYARAGNIESEPWRGSQFLALKRLTRHRLHLVECMTREKTYLVSNLYLKFSELQMLEGDDQPFCDIYGATSSSVLMEYFSPEEILDSSEEDLIAFLAKKSRNRIKDISKTADLLKKAARDSYRLDKALYEPLNVSIASSFNCIETFKREIKVIDNAIEKEIKGLNPNAFIILQSIDGIGPVFAGGIIAEIGDITAFHSSDALAKYAGLTWKSNQSGDFDGEDTPMIKAGNRYLRYYLGEAANSMRKHNVEYGTYYRKKYNEVPKHQHKRALALTSRKFVRLVYGLLARNQLYSGVSLDTSIKDSN

SEQ ID NO: 397910 - protein, 368 aa, unidentified
MSEIIRIGVDTSKSVFQLHGVDAAEQPVLRKKLRRRDLLAFFERLPATKVGMEACGGTYYWARELTALGHEVKLMPPQHVKPYVRRGKNDRNDADAICEAMSRPRMSFVAIKTAESQAAQMLMTTRERLVAYRTQLINTIRGHAAEFGLTAAKGPAHVEPLLTRIAEDGRMPELAKELFAMHGVELSRLKIELREIEAKLKAWHRQNEMSRRLAEVDAIGPIGGCLLAIKAPDPQAFRCGRDFSAWMGLTPKDHSTAGKMRLGVITRAGDEALRRTLVVGATSVIKQVSNGKGHPSPWLRDLVARKPPKLAAVALANKLARIAWKLMVSGERYDAARAGIVSPTARIAPCSRRQGRGAPPAAVACGQP

SEQ ID NO: 397911 - protein, 393 aa, unidentified
MFYIGIDIAKHNHEASIIDSDGSLLCESISFSNSQKGCEKLIALLERFSVNPDNCIVGMEATGHYWLSIYSYLFELGFDLKVINPIQSDAFRKMYIRQTKNDSKDSFVIAQVMRFGQFSSSSLSDENIMALRQLSRYRFCLVDDCSDLKRKVICLLDQVFPEYSSLFSDIFGVTSKELLLKYPTPEDMLSVSATKLSNFISKCSRGRYGRSKAEEIQSAAKSSFGIKFASNAFSFQIKQMIEQIKFIENHLKELEKEITELLIQTNQVITTIPGIGNVLGGVIIGEIGDISRFESAPKLVAYAGLDVRVSQSGQFTGTQMKISKRGSSYLRRAIWMAATVAAFSDPVLSEYYQSLRARGKHHLTAIGAVSRKLCNIIFAVLRDDKPYEPMPKR

SEQ ID NO: 397912 - protein, 318 aa, unidentified
MGEDVYVGIDVSKTELVVALRPSGESFTRDYDRAGLKQVVGRLSKLQPKLVVVEATGGLQRQVVAALWTAGVAVAAVNPRWVRSYARGSGLLAKTDRMDAKLLALFAQREQPTPRPPLGTETQALQELATRRDQLLEMRVAEQQRLQRAGAQVRKELRQHIVYLEGRIAQIDDDIDKTVGRSEAWRRKSEVLRSFPGVGKVFCTTVLAKLPELGTLSGKAAAALVGIAPFPDDSGGRRGRRIIRGGRHPVRSKLYMCALSAIRWNPVLKQFYERLRARGKLEKVALVAVMRRIIVILNAMLKTNTTWTQPCAAALEKN

SEQ ID NO: 397913 - protein, 405 aa, unidentified
MEVVYERCCGLDVHKKSIVACLVTGKQKQTKTFGTMTADIVDMSSWLSENNCEAIAMESTGVYWRPIYNVLELFGWDLIVANAHHIKTVPGRKTDVKDAEWIADLLQHGLINPSYIPDRDQRETREMVRYRKSLVEERSREMNRLEKILEGANIKLSSVVSELTGLSSRNILYGLVNDTLNKDTIGDMLHGQLRGKADELLKACEGVLSKTQKVLVKAMLAHIDDMTRRIEEMDDFLNGKLQEYDEAIKRLQEIPGVADRSAQVIIAEIGVDMSRFPSAKHLSSWVGLCPGNNESAGRKKSGKTSKGNKALKTTLIQCAQVASRSKNSFFKAQYDRLVVRRGSKRAKVAVAHSMLIAIYHMLKNGTAFQDPGEDYYNCFNPERKINYHLNKLSQLGWVPSVSVTA

SEQ ID NO: 397914 - protein, 306 aa, unidentified
MNQTIYRGVDVSKQLLEVDGLTRPVKNEAAAIGAWLAALPANVQLVCESSGGYEQVLLRTAWQADRKISVVMPRRVRAFAQSCGQQAKTDRLDCALLSRFGTERRPCASVAPNAVRQRVRELLRAREHVLALQLLEHNYREHLPQQRSLQQASEARLGGYTEQLKAVEKQIEAVLNAEEPAKREVARLRQVKGVGKITAWTVWADLPELGQLEPGQPAALCGLAPYPDDSGDCRRPRHIQHGRATLRRVLYMAALSASRHNHVLKPAYERLRARGKPAKVALIALARRLIELLNRLLKDPNFLLAS

SEQ ID NO: 397915 - protein, 372 aa, unidentified
MKEHSEVFVGLDVSKLKTSVALAEDGRNGEVRFFGDIDASPTAIAALAAKLAKRGARLHFCYEAGPTGYDLYRQIIALGHDCAVMAPSLIPQRPGDRVKTNRRDAVSLAKLHRAGELTPVWVPDVGHEAIRELVRAREGAMEALRRARQQLLSFLLRHGRVYTGRTPWSKAHSSWLCGQTFEHLAHQIVLAEYRHAIEEAEVRLKRLTAQVTETAGSWSMAPVVKAYQAMRGVAFMIAVTFVAEIGDVRRFDNPRQLMAYLGLVPSESSTGERVRRGGITKAGNSRARRVLFEGAWTYRFPARMSRLIQGRQDDLPKAVREIAWKAQVRLCGRYRKLIAAGKLKAVTVTAIAREMAAFLWAIGQLVVPVLAA

SEQ ID NO: 397916 - protein, 318 aa, unidentified
MENISQWVGIDISKATLDVYLRPLGKAMKVANTKEDISKLVETLKSYTVNLIVLEATGGLETELVIQLQEADLPVALINPRQGRDFAKATGKLAKTDAIDAQILAHFGEAMQPQILAVESEESRQLGDLISRRRQLVEMRTAEKNRRERARGKALADIEAHLEYLDNCLEKLNQEIEELTQANQQWLEKVNLLKTVPGIGQVISTTLVSDLPELGQLTAKQISRLVGVAPINHDSGQHKGKRMIQGGRAQIRATLYMGAVVAMRHNPVIKTFYERLVGRGKSKKLALTACVRKILVILNAMVRQNQPWQLADNLPPCS

SEQ ID NO: 397917 - protein, 407 aa, unidentified
MQVLYERCAGLDVHKDNVVARVRCVSEPKHDEVKSFATTTSALLDLKDWLALQAVTHVAMEATGVYWKPVWHLLEDDFELILANAQHIRNVPGRKSDVNDATWIADLLAHGLIRSSFVPPTPIQELRDLTRTRKQLVREISQHSSRIQKVLEDANLKLGSVLSDVLGKSGRAILQALIAGQSDPEKLADLAQGTARKKRSELLEALHGRIRTHHRGLLKVHLELILALEQAISEIDATVGKTLAPIHESARLLTTLPGVSQVTAQVLVAEIGVDMARFPSAAHLVSWTGLCPRSDESAGKRRSTRVRKGATWLKTALVTAAWAAVRVKNSYLQSQFHRLRSRRGAKKAILAVAASMITAAYHMLKNHVPYHDLGADHFTRRDRSKTIKRLVRRLNDLGCQVQLELTS

SEQ ID NO: 397918 - protein, 399 aa, unidentified
MRIIGMDIHRSFAQVAFLVDGQVTKEARVDLAHDRFLKFAKTLEPTDEVVIEATGNSSAVERVLRPFVKRVAVANPRLVRAIAYARVKTDKIDAVILARLHAAGFLPEVWVPDDDTIRRRRTITERSGIVEHMVRVKSRIHAILHGNLIPKYEGCLFSKAGRAWLARLPLPSQEQAILTRLVAELERVSVQLAETDKGIAQQALDDPQARRLMTIPGVGTVVALTVLASIGTISRFPTPEKLSSYFGLTPTTQQSGDHPARHGRISRQGNAAARAVLVEAAWSAKMAPGPLRAFFNRVQKKAGAGAAAVATARKLAVLIWHVLSDDKDYAYARPAFTAMKLRKAALKAGAPREYGKAGPGRDYWIKEIRQREAEYVERAERAYERMVEAWKERPSAPAG

SEQ ID NO: 397919 - protein, 391 aa, unidentified
MIYVGIDVAKDKHDCFITNQYGEVIKSHFTIKNNRKGFNELYKKITSSTKRLSSVKVGIEATGHYSFNILNFLISKNLTVYVLNPLHTNLFRKGLSLRKTKTDEIDAKTIATMIRTNIDLKPYSDISRKNENLKSLSRYRFKKVQDRAKLKTSISRLVNILFPELETIVSTINLSSILALFQEYPGATYIANANLTKLSNLLHKASKGHFDKDFCIKLKSLAKSSIGSILPAMSLELKHTATNILYLNQEIDDINSQIKQLVDELKSPILSIPGISYSMGSLILGEIGDFSRFDNPDKLLAYAGLSPSTYQSGQLDNCYAKMEKRGSTYLRYALFNATIYTCKWDITFKSYLNKKLAEGKHYYVAISHTCRKLVRVIFHLVKSNETYKKIA

SEQ ID NO: 397920 - protein, 360 aa, unidentified
MKRHRTSVGLDVHARSVVGCALDGDTGEVFERRLTPDYRDVLEWLRSLPGRVAVTYEAGPTGFGLARFLVAAGVMCLVAAPSKLQRPSGDRVKTDARDAAHLARLLHLGQIVAVTIPSADQEAARDLVRAREDCRGDLMSSRHRVSKLLLRQGIIYSGGRTWTGKHEAWLRAQRFEATPLQLAYDTALDTMLATVDRRDRLDAAIAELAADSAYTPVVTRLGCLRGVSTLTAFGLAVEIGDWGRLTGRSIGAYLGLVPCEYTSGNSRSQGSITKTGNGHARRLLIEAAWHHRQPYRPGVDLRRRWDAASPPARARGQQANRRLHHRWVSFDARKKRPVVANTAIARELAGWCWSLAVLDT

SEQ ID NO: 397921 - protein, 336 aa, unidentified
MEEVQSVVGIDVSKKSMDIALLRNGKVKSKSLGNTPAGHKELLEWLIASKADMATIHVCMEATGVYYEALALAMHDAGLKVSVVNPSCVKGFGRSENIRNKNDTIDAALIARYCAAMKPESWMPVPLEQRQLRAWSLRVQSLKDIRQQEENRREAHIVSGMLDVAAHVAEHVRWIDDQIKKLENEIDDHIDRHPGLKRDSELLASIPGIGKTTVARILGHLGDVRRFKSAKALAAFLGVTPKHNTSGTSVKGRSVICRTGSTSLRAALFMPSMVACRYNPIVKQFAERLLATGHPKKAVICAIMHKLTHLIYGVIRHGKPFDANYLSKPLAIQDGI

SEQ ID NO: 397922 - protein, 348 aa, unidentified
MFLIGCDFHPSSQQVCWLDRTTGETEEKKLIHAPGEAERFYRQFPAPTLIGMESTGNCQWFVEMVTALGHEVWIGDAAKIRASDSRQQKHDRRDAQLLLRLLAEGRFPRIWTPSSGQKDLRQLLIHRYKMVRLRAQAKNGLQHLAMNQGLQKKRHLWSKKGQKLLRELPLRPWASRRREDLLSVMKMLDQQIESLDLAVIEAAEKDPNARLLMTQPGVGPITSLAFVLTMGDVSRFQRGKQVASYLGLVPREYSSGGHQRLGSISKQGNRFLRMLLVEAAQVAVRCDPQMRQEYLHRCHEKPKGVAKVAAARKLAIRLYWMLRTQKEYPEIVSLESSSPVPLVVRHGG

SEQ ID NO: 397923 - protein, 340 aa, unidentified
MNTPDTPFTTFIGIDPAAESFTVCAYHQAPTHTFANTTDGRAAFLKWLDQHPRQTTLVLVENTGVYSEALAYELHEAAWPLVVVDPFKVWKAFGTSGPKTDPVDSRKIAEYGLRYTDRLTLWQPNAVIVEQVKVLLTTREQLVEQKTALINTHRMLKRKVIQTPLAMQALEQSIAQLKQQIRRLEQQVRVLIEQNPRTGQMLALVLTAPGVGLLLAAHLFVLTKGYKEGGRYRRLANYLGIAPHAYTSGTSVRRRARSRGFGPAKTRKLLHLAARSVCTHKAKYRRYYERKREAGKAPVLVYNNVANKLLRVLCSMLVNERAYVADYKSIQPRLLHASSS

SEQ ID NO: 397924 - protein, 334 aa, unidentified
MQNVTLIGIDLGKHSFHIHCQDKFGKTMLRKKFTRPKLMEFLAGCTSTTVVMEACAGAHFMARRIADLGHDAKLISPQFVRPFVKSNKNDFVDAEAICEAASRPSMRFVQPRTETQQAMRAQHRVRESLIKDKVKTTNQMHAFLLEFGISLPKGEAVIKRLSLVLAEHDVPDYLSRLLMKLHAHYLYLVEQITTLELELKQSIKADDATQRMMTIPGVGPITASLLSSQLGDGKQFSCIRDFAASMGLVPRQYSTGGKPTLLGISKRGNKNLRRLLVQCARAFMMRLEHQHGRLAEWVQAQLSKKHSNVVACALANKLARIAWAITTRQNEYQA

SEQ ID NO: 397925 - protein, 342 aa, unidentified
MDIVVLGIDLGKNVCSLAGLDGRGQVVLRRRMKREMVAGFARRWPSCVVAMEACCGAHHLGRGLAAQGHEVRLMSPEYVRPYVKAQKNDDRDAEAIAEAATRPTMRFVEVKSAAQSDMQSLHRARERLVAERTALINHLRAVLLERGITVPQGRRKLEKELPGIISDETLSLSPRIRQLVSDLREEWQVLDDRIAVFDTEFVSQARMDEATRRLTTVPGIGSINATALVAAVGDGKAFARGRDMAAWLGLVPRQMTTGGKPKLLGISKRGNRYLRKNLIHGARAVLPGLAGRDTPLGKWVRGLLARAHKNTVVVALANKLARIAWAVLAHGRSFDAAHAVAA

SEQ ID NO: 397926 - protein, 453 aa, unidentified
MQEEKQIKMDVVNPYAAGIDVGSRSHFVAIGQKETEVKEFGVFNEDLFALVKWLKGNSIKTVAMESTGTYWQALYAVLSDSDFQVILCNGKFTKNIKGKKTDVQDCQWIQKLHSIGLLSGSFLPDLQTEELRTYCRHRAGLIEGAASTSKKMQKYLRLLNLRLDVIVKDICGLTGLRIIEAICNGETNPLKLASFRNGNCKTSEADMAKALQTNGRKDYLFTLDQEYKIYKNLQEQIKLCDVEIERLLNEQINNNEHKKQHYIEGKAHKRINKNTPKNIDLNLVGYQYFEGVDLLKIEGFSHQTLLTLMSEVGLEGIKKFETAKQFASWLRLTPNNKISGGKVLSKKVLKGSNRLKIALRNAANSIGNLKESTPLRDFFHRINFRKGRVSAISATARKLGVIIWNMVVKNIPYHNPVEYLFLDQKRKLAVLQRVQKTINKFDLKTDIKDFVKG

SEQ ID NO: 397927 - protein, 356 aa, unidentified
MNARKVQDFVVANKEIFVGLEDSKRTWKVAVRSDKMVIHRTSMEAKYPGLIRYLRNKFPECTIHVMYEAGFKGFNLYDQLTEDGIDCVVIPPHMVTEPKTNKVKTDKRDANRLAFVLENHDFKDACHVPDKERREDRQISRTLIGIQKDIVRTRNRIRKFLDFHGIEVCLPDRWGRQEFRALKKLSLSEPLRISLDILLTQLEELWIHQTSLRAALRRLCRKERYEKVFEIARSLPGIGWFTAIRLILELGEDLSHFTSGKKIASFAGLTCSEYSSGETEWKGHITGMGSGFIRTTLVENSWAAIRKDPVLLAKFSRIWRASGSKKKAIVAVARMLIVRLRTCLLSGTPYATGVVH

SEQ ID NO: 397928 - protein, 379 aa, unidentified
MRSVKFIGMDVHKNSITIAIAEQDRDSEARLYGTIANNLHALDKFCRKMISTASELYFVYEAGPCGYGIYRHLTGKGLDCMVAAPSMIPKKSGQRIRNDHRDALMLARLHRAGELTPTYVPDCQDEAMRDLSRAREDAVIAARVAKQRLQGFLLRNGITYSGKSKWSNAYFNWLSDLSMPHPAQQTTLQEYINAVRESLDRVERLTDQIGQMVPQWRLAPMVSALQVARGVSLIVAVTMLAEIGDLSRFKNPAQLMAFLGLVPSEHSSGQSTRRGSITKTGNRHARTVLIEAAWAYRMQARVSRALLKRQQGVPERIRQISWKAQLRLCTRFRRLCAQGKPKQVVVTAIARELAGFLWAIAKHVQPLTNPQAGCGYTEA

SEQ ID NO: 397929 - protein, 321 aa, unidentified
MNRILVGVDVCKDFLDAHARPAAVQQRFDNTPDGIEQLVAWLHTLKPERIVFESTGPYQKAAVGALLAAGLPAVVVNARQVRDFAKGTGQLAKTDTIDAGILAYFGEVVATIVRPLPSKEVVEFRDLCDRRSQLVRMLAAEKNHRHAARSASAKVVKNIDKHIAFLKRQIDDLEERMDGIVSASETFKAKDEILQSIVGIGPQVSRTLLVHLPELGQSNRQTIAALVGLAPFADDSGTSSRTRHIRGGRAKVRIALYQAAVAAIRYCVTMKAFYASLKARGKASKVALIAVARKLLVLANALLRDGTPYKARTNSVCPETA

SEQ ID NO: 397930 - protein, 320 aa, unidentified
MAKKKSKFFIGIDVSKQHLEVAVHESDCQFRCANKVNAFGKLIVELIDWRPALVVLEATGGLEIPVVNALQAAGLPVVVVNPRQVRDFAKALGQLAKTDRLDARVLAHFAAAIKPPLRPIKSKEEQELAALTGRRDQLIEMLVDEKNRRTSAASDTVRDQIKEHIDWLEGCIAELDEQLKALLQCSASWQAKDDILQSVPGIGPVVSFSMIADLPELGTLNRQQISKLVGVAPLNRDSGQQRGTRHIYGGRAELRRVLYMAALSASRYNLVIKEFYERLCAKQKPFKVAITACMRKLLSIINVMVRDNTCWKSPQQSVSA

SEQ ID NO: 397931 - protein, 395 aa, unidentified
MRAVEPNETQSYMRKEPVVKNFTRYIGLDVHQDLIAVGVCETDGSATSLGTVPNLPDAIARLMRKLGPADKLRVCYEAGPCGFVLYWQLCELGIDCTVVAPSLIPLRPGDRVKTDRRDALKLARCHRNGDLVAVFVPDGAHLALRELVRSREAALRDQRRARNRLRLMLLRYGIKPQEALKRWTAPYMGWVQTVRMATAAEQYSYDDAVAQVMHQTERVAAIEPELEQAVQQAPVELREVIGALQSLVGVKVLTAATVAVEAGDLCRFDKAPELMSYAGLVPSEHSSGGPKGQRRGGISKAGNAHLRRVVVEASWHYSKPCRSDGPVAKRRRGQDPVVVQIAHKAQKRLRKRYVQLTARGMPNARAVTVVARELLGFMWGIAKRVQQQHSEKAAG

SEQ ID NO: 397932 - protein, 340 aa, unidentified
MVHVGVDLDKRSSQIAVLTEDGEVAQQRLPNDVARLEKFFAELPPHTPVAIEASGTWWWLVDLLEHLGHDPILSHPKQTKAIAAARLKNDRVDAERLALLLRGDLLPTVWIPSAALREARELVRHRVQLVWLRGIVRNRLHAMLARRNLQPVSTKTWLTQRGQRELQRLPLADTPSRIREDCSALLPLLDAQIRRLDSELGARWGGDPRVQRLTTIPGIGPFIAIVLVLELGDIARFPSAKQVASYVGLTPRIRASAGRIRAGHISKEGNRLLRWVLVLAATQAVRRPGPLRTWFHAVKKRRGKKVARVALARRLAEIVFHVWKHECDYFAVVRHGVVRG

SEQ ID NO: 397933 - protein, 329 aa, unidentified
MDYFAGLDVSVKDTSVCIVDDTGKITREVRVASEPEALLAVLRNPTYRFKRIGLEAGPLSQWLFSALAEADLPVICVETRHMRAVLKAQINKTDRNDARGIAQMMRVGLYRPVHVKTLRSQKLRMLLTHRKLLQSKAIAVDNDLRATLRNFGLKVGMVGTAKFETRIKELIENLPDLILLVEPLLVVRRVLREQLDLLHRRLLAVVRDDAICRRLMTVPGVGPVVALTYRATVDVPARFRKSKSVGAVFGLTCSRDQSGERDRPGRHIPLRGRDDAGHALRGCPSHAVTFGKMVLAQGLGDADCQTARDEKSDCRTGAAAGRYPAPHLD

SEQ ID NO: 397934 - protein, 343 aa, unidentified
MDHFAGLDVSVKETSVCIVDDTSTIVREVKVSSEPDALLAVLTNPAYQFKRIGLEAGPLSQWLFSALAEAGLPVICVETRHMRAALKAQINKTDRNDARGIAQMMRVGLYRPVHVKTLRSQKLRMLLTHRKLLQTKAIAIENDLRGTLRNFGLKVGVVGAVKFEARIKELVENLPDLAALIEPLLIVRRVLREQIGILHRRLLVVVRADDICRRLMTVPGVGPVVALTYRATVDVPTRFRNSKAVGAVFGLTPAKYQSGEIDRTGGISRCGDEMMRVMLYEAAHIMLVRSTKWSWLKAWAMQIAKRRGLKKAVVALARRLAVIMHRIWVDGTEFRWTREAATA

SEQ ID NO: 397935 - protein, 412 aa, unidentified
MALTEAMFFVGIDWAAKTHAVCILDAAGRGVAAFTVEHTAAGFARLAARLARLADDPESVPIAIERPDGRLVDALLEAGHPMVPVKPNAIKAWREGEVISGAKSDAGDAEVIAEYLRLRAHRLRPAVPYSDDTRAVRTVSRTRTDLVEARVAASNQLAALLDAQWPGAKEVFSDVASQSSLAFLTRYPTPASAAHLGVKRMAAFCTKHRYSGRRSPEELLERLRAAPAGITGPAQTEALRDAVTAHIRVLTALNTAIRDLDRSVAAHLTDHPDGQVFASLPRAGVVNAAQILAEWGDARDAYDGPEAVAALAGLVPVTRASGKHRGVGFRWACNKRFRVALTTFADNSRHQSDWAAEIYRRARASGKDHPHAARILARAWVRVIWRCWQSGTPYDSALHAGAQRHRDTVEAA

SEQ ID NO: 397936 - protein, 402 aa, unidentified
MIFINCLGIDISKSESVVAHYKDEVLVKEMVIQNNQNGYRYIKNYIKHLDSLFILFESTGIYSRGMKRFCEIHKIDYLEMNPLEAKFKMSSLRSWKTDKSDAHKLALLAFRMKDSKVQRHPEEIYFELRERARFHLEMEINQNRLKVELVETLHQTFLGLEKLFTNRYSKIALNIAQAFPHPDFVSTLPHDELVEKVLHSTDKGISVNKAHKYVQKLIEIKINSFPNVDKSSFLIKKVQYLCDKLLIGMEEMKEFDQEMIDLAKNTTEFENIISIPGIGELTAALLIGELGNIREFKTNKQLNAFVGIDIKRYQSGTSKSRDTINKRGNKKARRLLYLIIMNIIRGRNHYQSHIVDYYYKLREQPHGKTHKTAVIASINRLLKTIHYLIVNNKLYDYQKAPH

SEQ ID NO: 397937 - protein, 342 aa, unidentified
MKSATTIGIDLAKNSFSVYGVDDKGKTVLSRTLTRAGVVRFFANLPSCLVGMEACASSDYWARTIESLGHEVRRIHPQYVKAYLLGAKNDTNDAAAICEAVQRPNMRFVPHKSPEQIDIQCIHRTRQGYIKSRTALVNQARGLLAEYGIIIRQGISAIRNQLPLIIADEENALSGLMRRNIASLYESICFFDSQILEQDKLLKTVAKGNEACQQLMQVPGIGIMTATILLTVAGVASNFKNGREFAAFLGLVPRQNSTGGKTRLLNISKRGDCYIRTLFIHGARSAITRILAGQTPKYRPNPWVIELIARRGRNKACVAMANKTARIAWSMLAQGTEYRHAA

SEQ ID NO: 397938 - protein, 432 aa, unidentified
MPHIATRMGLPRFNVSAIAPEKEYAMITVGIDIGKEKHAVAAIGAAGEVLMPPRFFDQTAEGFAALLARLGKLGRRADIRIGMEATGRYWIPLRHALAGKGYRVESVNPLITSAEIAKDVRGRKTDKADALAIATALLRNRHNPAPAEDAATDALKSLTRHRTFPVRQRSNAKRCLHAALDVTFPEAGKVFGQLFSATALAVLEAFPSARLLARANLKTLSAIVSKSSRGRLGAERARLFRDAARASVSVSIANEGDEAALVSLIAQIRFADAQIEQAEEKIRSMPAPETAELLASVKGLGTLLPRVIACEIGDMERFRHPPSGKPPRDMDKRILAFAGCEPRLRESGKWKGRTKISKRGSPALRTALWQASAMCRLHNPLFAAVYERQKSRGKPHSVALFYVARKLVEVLCGMHKTGRPFSLQTAGGAICL

SEQ ID NO: 397939 - protein, 374 aa, unidentified
MGWTPPTRTGIDVPKWKCQQALELKGASTMKISTVGIDLAKNVFQVHAVDEHGKVAWRKQLRRDQMTAFFVNLPPCLIGMEACGSAHHWARTLQGFGHTVRLMSPQFVKPYVKSNKNDVADAEAICEAVTRPNMRFVPVKSVEQQAVLSLHRARQGFVIARTAQANQIRSLLGEFGLVIPKGICHIAKQVPQLLEDVSNQLPGTFRRLIARLTEHLKELDKLVDEFEDQIKAWHRSSELSLRLEKIPGIGPLGASALVASIANANSFDNGRQLSAWLGLVPRQHSSGGKPTLLGISKRGDVYLRTLLIHGARSAIVAAQRKAVNTNVWLASLLNRRHPNVAAVALANKNVRTVWALLAHGREFRPNYVPPQLAA

SEQ ID NO: 397940 - protein, 400 aa, unidentified
MFAHSKGLTFFNLFEFEQNVRNTAQLYIQDNQPGDKTEGDFSLFQSKKIGMKKIVKQVAGIDVAQKELVVTLGRMYEDWTPELYSHKTFANTETGFAALVTWVKKQSVEHTTVRFVMEATGVYHEKLAYYLSDNGCTLSIVLPNKISNYFRTLEVKTITDKTACEAIARFGLERQLDDWQRPAKVFKNLRQLTRERNQLVEERTMVKNHLHAEQSEAQPNDSSIDRIENRIALLDRQEKEIKQEIAALVKQHEKVKNTVELICSLPGVGALTAVTVLAETNGFELIRNKRQLSSYAGLDVKEKQSGTSVKGKPRISKKGNKYLRKAMHLPALAAIRSEDRFKAIFSRLVARHGIKMKAAVAVQRKLLEMIYILYKTNTPYNKDYIKKLESDRSHSLNRLA

SEQ ID NO: 397941 - protein, 354 aa, unidentified
MSQKSKSAIAVIGVDIGKNSFHVVGFDQRGAIALRQKWSRGQVETRLANLRPCLIGMEACVGAHHLSRRLQALGHDARLMPAKYVRPYAKGQKNDFNDAEAIAEAVQRPTMKFVATKTAEQFDLQALHRVRERLVSQRTGIVNQIRAFLLERGVAVRQGLRFLRVELPQILASRTDVLSPRMVRMIEDLAGDWHRLDERIEGLSAEIAAVAHHDPACERLMTVPGIGPIISSAMVAAIGRGDVFSKGRDFGAWLGLVPKQISTGDRTILGRISKRGNRYLRALFVQAAWVVLIKPQSWERHGLKSWIEAAKKRLHHNVLAIALANKLARIAWAVLAKGRDFEIRKADDVVVRPA

SEQ ID NO: 397942 - protein, 322 aa, unidentified
MPDTTLGIDIAKATFVVCLRRADGKRRHKTFANTAAGHHGLVQWLAEHTRGPVHACLEATGTYGEAVATALVDAGHTASVINPAAAKAFAQSQLRRSKTDTVDADVLADFCQAHRPPAWRPWPLEVRELQGLVRRREALSEMLTQERNRLAAGGLVPAVITSLKRHIRVLERALAQLDAAITRHIDTNPTLRQQRDLLVTIPGIAGTTAARLLAESRAIADFDNARAYAAFAGLVPRQQQSGAWRGRATLAKTGSARLRFALYFPALAAIRHNPPLAAFAQRLRTAGKHRMVIVAAVMRKLLHIAYGVLKHQRAFDPTVCGA

SEQ ID NO: 397943 - protein, 375 aa, unidentified
MKQYSKYVGLDVHKEKIMVAVAQANRRAPVYYGEVANTSEAIGKVVRKIAGQEETGFCYEAGPCGYGLYRQITAMGHQCEVAAPSLIPKKSGTRVKTDKRDALALAGLYRAGELTPVWVPDKAQEAMRDMTRAREDMKMMERHSRQRLGGFLLRHGKVYPGRSKWTQGHFRWLEGIRFETASQQIVFQEYVDMVKHTQGRVAAMEADMRKALDSYTLKEVVEGLMALRGIDLIAAMTIVAELGDISRFTSPRQLMAHLGLVPSEHSSGGKRRQGGITKTGNSHVRRVLVEGSWSYRLPARKTAHLQRKAAKASKAVQEIAWKAQKRLCSRYWYLVYKGKLPVESCTAVARELVGFIWAIACEVMGNKRALPVGKG

SEQ ID NO: 397944 - protein, 340 aa, unidentified
MRMFAGLDVGFKRTAVCVVDEAGRIVWRGMVDTHPEALSRALQHWGEKLAKIGLESGSMTPWLARELAKMGFPVVCMDARAAADAVKSRRVKSDKADAYALAEMLRTGWYRTVYVKSEDSHRLKAMLGARDQLVRAKRALGNQVRGLLRPFGIRLPSRQGTKKFAEAAHQAVRRDNMLHASVTALLEALAAIEGQIARLDEQLKELARRSSVCWRLMSVPGVGPIVALAFMAAIEDINRFRRMRSVGAYLGLTTRRYQSSETDVVLGISRQGDAMARHYLYEAANVLLTTVRGPSALKSWGLKLMKRRGPKRARVAVARRLAILLGRIWKDSTHFDPMPA

SEQ ID NO: 397945 - protein, 326 aa, unidentified
MEHELHYIGIDTAKEKLDVDVLRPDGRHRTKKFANTTKGHDELVSWLKGHKIDHAHICIEATGTYMEPVAECLYDAGYIVSVINPALGKAFAQSEGLRNKTDTVDARMLAEFCRQKRPAAWEAPHPLERALRALVVRHQALTDMHTQELNRTETAREVQRPSIDAHLLWLETELKRLEKQIKDLTDDDPDMKHRRKLLESIPGIGEKTSAVLLAYIGLKDRFAHARQFAAFAGLTPRRYESGSSVRGASRMSKAGHVSLRRALYMPAMVATSKTEWGRAFRDRLAANGKKGKVILGAMMRKLAQVAYGVLKSGVPFDASRHNPVAA

SEQ ID NO: 397946 - protein, 405 aa, unidentified
MQHHIFSLEVFVMVVSVGIDVSKNKHDCFIVSSEGEVLADVFTIPNNMDGFYALLEKIRACTTPQDKIKAGLEATGHYSYNILGFLLDNGLATYVLNPLRTNLYRKSLSLRKTKTDRVDARTIAAMLLSDAGLKPYTNTAYHNEELKSLTRYRFDKVRERAKLKSSISRLVCILFPELEKLMSSLHLATVYALLEEFPGAKQIAKAHLTRLKTLLENSSKGRCGRDMAVTIRSAAQNSVGSCMPAKSLELQHTIRLIRELDAEIAEIEAEIETMMDKIQSPITTIPGMGFRMAAMILAEIGDFSRFESPDKLLAYAGMSPSTYQSGQLKNCYPHMEKRGSRYLRYALYNATKYVCHWDPTFAAYLAKKRDEGKHYNVALSHATKKLVRLLFALERSRQPYCSLAA

SEQ ID NO: 397947 - protein, 347 aa, unidentified
MDKISVVGLDLAKNVFQVHAVNAQGRVVERKQLRRSEVLSWFAKIEPCRIGLEACGGMHYWARKLSELGHTVRPMAARFIKPYLKSNKSDMLDAEAICEAVQRPGMRFVSVKSAQQQAVLHLHHSRRLLVEQRTALINHIRGMLLEFGIVIAVGPSALRKRLPELLEDTGNELPPMCWDLAAVLRDQLSALDERIALLEHRIQQWHVSNEASQRLAGIPGVGVISATAIAAAIGDARAFTNGRQFAAWLGLVPRQVSSGGRQRLLGISKRGDRYLRTLMIHGARAVIRHLRARQQAGKPPGNAWIAQLLARCHPNVATVALANHNARVAWALLAKNETYRARYAAEA

SEQ ID NO: 397948 - protein, 343 aa, unidentified
MSIIGLDAHSASFTVAILNDAGKLRQCLTRATSQKALIDVVAAAPGPRLVVVEESPIAQWVKMSLEPYVDKLLICDPRQNRWIAKDDFCDDRTSAIKLAQLAWGGYVKEIYHPDDAGAELRGLFLHYFDLNCQLCRFKNKLKATFRQAAVKPTGGRIYACDHQERQAWLQTLSPYPHLRHQAGHLFSQIDLLHEMKEQTHRALAKRVRHQKAYELLKTIPGVADVIAAGYLAMIITPHRFSRKNKLWRYACLGNTFHQSDQVVYHNAPSPSGNRILKWLLTRHFLVAVHRCKSPNRFQTQHARWLARGLSPKEARRQTCRALLSTVRAIWMKGEPYREMPLTE

SEQ ID NO: 397949 - protein, 413 aa, unidentified
MELVHARCAGIDISKKDAKVCVRVQGTGRRRTAASVTTWGSMTNQILALREHLLAEKVTCVVMEATGAYWKPFYYLLDDGLDVMLVNARDARNVPGRKSDVSDAAWLADLGAHGLVRASFVPPPPIRELQDLTRARTVITRERSREAQRLEKLLEDAGIKLSSVATDITGASSRRMLEALIDGQQDPTVIADLVHWRMRPKIAALMEALTGRFSEHHRFMTRLFLDRIDAHSADIARLDARIEAAMEPFASARDLLMSIPGISRITAEAFIAETGADMSVFPTAGHLASWCGLSPGSNESAGRVKSTKTRPGNPYLKGALGVAALSVVRRKDTYFWAKYRRITVRRGPMRALVAVEHAMVVAAWHMLTNGEFYHEPGPDYFTRRMPAKTQARAVAQLESLGYKVTLEPLADTA

SEQ ID NO: 397950 - protein, 344 aa, unidentified
MDYYSGIDVSLERSSVCVVDGSGKIARETKVASEPEALINWFGSLGFGLARIGLEAGPLSQWLYAAMKQAGLAVELLETRHVSDAFKAMPVKSDRNDARNIAQLMRLGWFRPVHCKSITAQEIRAMLTARKLVQSKLLDLENSLRGILRGFGLKVGKTTRTHFAGRIEELVKGHPNLQTITEALLRARAVLLAEFNGFEKRVRAMSRLHEKARLLMSTPAVGPIVSLTFACAIDDPSRFTSSKQAGPHFGLTPKKYQSGETDYTGRISKHGDASVREALYEAAHIMLTKPVRGCSELKSWAMRIARRAGTNKAKVALARKLAVIMLRMLKDNVPFNPAAKAATA

SEQ ID NO: 397951 - protein, 330 aa, unidentified
MSQNHIHPTFYLGIDVSKDFLDLDPDKIPSLQKLDNSSTGFAKLIRALQRLQKKGALPHVVLEATGGYERPLVLALHRHQLCVSVLPPKRVKDFASAIGRPCKTDAIDAAVITRFAEAVRPEPSAPPSAVLVELADLVKRRNDLVASRVQELNRQKQYASASSLESIEKLLCFLDGQIEHLGQKLKDLVLSDPMLCAKFNVLTQIEGVGPLTAFGVLASMPELGRVSRQQIASLAGLAPKNHDSGQFTGRRFIKGGRCEARKALYMAAVCARRFNPVLSPLYQHLVNAGKPPKLAITALMRRLLTHMNSKLREFLNSHSSHPPISSPQPA

SEQ ID NO: 397952 - protein, 306 aa, unidentified
MQIICGVDVAKCWLDAWVLERHRRFANTAEGVEQLLGFCRDHGVELVVMEASGGVEQDAFLALWKQGMPCAIANPRAVRSFADAMGFLEKTDRIDAAMIAGYAAAKKLVATPPPSDQQRQLNALTVRLRQVTSDISIQKQRLHSTRDPKALASLKEVIALFNRQLKALAAEIGALISVDPVWAALDKTIRSVKGVADRAVTYILADLPEIGTISNKAIAKLVGLAPLANDSGKRTGKRPVRGGRATVRSVLYLVADIARRYDPDLASFRERLIAQGKSKMVIRVALARKLIVKLNAKVRETRAAIA

SEQ ID NO: 397953 - protein, 462 aa, unidentified
MPTSPPAPEPSAKRTPPREGSNIRSRPSQVPAPLRAARIMNPNWNQQPYFAALDWAKDHHDVIVVDRVGTIVADFQFAHTAQGWEQFNCQMQPFGKCPITIETSVGMAVDQLLQRGYTVYPINPLAAKEYRRRKAPSGNKTDRHDAWCEADALRTDGQAWRPLRLQDEATATLRLLCRDEISLIETRTALVNQLQATLGDYYPLALESFDDWASPGSWAFVRTFPTPADLAKAGQRKWQNFLHLHKLWRPETAPQRLERWAQGQQLNASAATLNAKSLLALSLVKVLEALQRQIQEYRSRITQAFKQHPDHDIFGSLPGAKQTLGPRLLSLIGARRDVFPDADSLMCQAGVSPVAYQSGKLRKAHLRFACDHFLRHTIHLWADQSRKKCAWAQTYYQAKRDKGHNHASALRCLGKRWLKVLWRMWQDHTPYDEAKHLGALQHHGSFVWQALQDAAGPQPACE

SEQ ID NO: 397954 - protein, 400 aa, unidentified
MNAVGIDVSKGKSTVAVIQPFGVIVAEPFDVFHTDSGLKKLVSFIKSLSGETKVVMEYTGTYYEPIANALHYAGIFVSVVNPLVLNDYDTNRVRKVKTDKLDALKIASYALDKWIKLRKYEPAETVRKTLQIMNRQCIKLNKILVMQKNSLIALLDCCFPNANTLFTSPRRVSDGHEKWVDFAMKFPHVDSVAKLSLSAFKAKYQSWCKKEHYNYSESKADQIHAYARTIVSTLPMTESVRKMVSDAAKLLNSTLEALGTLHSEMDALASQLPEYETVMNLYGVGKVFCSQLIAEIGDVTRLKSNKSLTALAGIDPPPNQSGKDDPKSRRISKRGSPALRRTLFLIMTIYLQHQPADEPVYQFLDKKRAEGKPYKVYMIAAAHKFLRIYYARVKEVMPKE

SEQ ID NO: 397955 - protein, 353 aa, unidentified
MTGPKYIGMDVHKESISIAVRNAAGKLVMECVIETKAITILEFIHGLRGELQVTFEEGTWATWLYDLLKPHVTKLVVCDPRKNSRQGNKNDRIDASELSDRLYMNKLSSVYHGEAGVRTLKELARSYLTISKDLARVMTRVKAIYRSWGIPCAGKQVYAPRHRAEWLAKITELGVHRRAEFYYQQLDALRSLRHQVRRDLLAESKKHKATKLLCQIPSIGPIRAALLIALMQTPHRFRTKRPLWKYSGFAIETHSSADYRNVNGQLERTKKRVSVRGLNRDCNHDLKNLFKSAATIASVKPGPFQEFYASLVAKGMRPEMARLTLARKIAAIVLIVWKKGVCFDAKYLKPQTA

SEQ ID NO: 397956 - protein, 352 aa, unidentified
MQAQIKKLDFTGQNFFCGIDMHRKNWAVTIETEDVSMRTFVQNADPELLIQHLRHNFPGASITAGYEAGYFGFWAQRKLEEAGIKCLVINPADIPTTHKEKEQKRDPSDSRKIARAIRNQDVNAIWVPPVSLQEDRQFIRTRKMLAKDLTRNKNRIKALLQLNGIQYPAPFAQPGSHWSRRFIKWLEGIRLTEETGTESLQTLLRNLLYLRSELLVISRKLRKLSQSERYRMAYERLIEIPGIGLIVSMTILTEIGDITRFRNTDQFRSYLGLIPTAHDSGEKEHPGRITKRANKPLRALLVEATWSAIRTDSSYLSIYRAYKKRMKENHALIRTAKKLANQIYYAIKMEKN

SEQ ID NO: 397957 - protein, 412 aa, unidentified
MEVVYECCCGLDVHAKTVVACLVTKGHKEIRTFATMTDELLQLGDWLSSAGCTHVAIESTGVYWKPVFNILESLLTVILVNARHIKAVPGRKTDVRDCEWLADLLRHGLLKASFIPPLEIRELRELVRYRQTLVTEHTAVANRIQKLIESANIKLGQVASDVLGLSGRLMLRALAEGEQDETKLAEMAQGKLKSKKAELRRALAGRLTQVQRWVLAEFLTRVEELEAARTRVEARIGEEVTACADPFVPEAVELLESIPGVGVRTAQAIVAEIGVDMGRFPSAKHLASWAGVCPGNHESAGKRKSGQTTKGNKSVRTVLVEAAWAATHAKGTFLQAKYHRLVKRMPKQKALGAIAHRLLVISYHLLSRRVPYAELGTAPLDPQQVDRQRRRLVEQLKTLGVTVAIEEGATAA

SEQ ID NO: 397958 - protein, 365 aa, unidentified
MQQDKVTKVRFDGQHVHVGIDVARKSWKVCIYVGQSYHKRFSQVPDPEALVDHLHHHFPGAVYHTVYEAGYFGFWIHRSLTKLGVHSMVINPADVPTTDKERHTKTDRIDAAKLAWALATGGLRAIYVPERAAEEDRSLVRMRASFICKQTRTKCQIKAMLRYYGEQVPDEIGDRYWSRAYIAWLESRMFEHESGRAAFQALVQELLSLRATLAALTKQIRLLSRTERYQRPSELLLTVTGISLTAAMTFLTEIVTLDRFKDLSHLLSYVGLVPGQHSTGDAEDDTGLIPRRNAALRYMLIECAWIAQREDPALLQAFTEYCKRMPKSQAIIHIARKLVARMRYVLKHEEPYVTGVLSSGRPWAA

SEQ ID NO: 397959 - protein, 482 aa, unidentified
MKKKNIYSNQSQELLTLFEEAGNGAKVMCVPIDYAKKDHVAMLCNGNGHILRKPFSVKNSPEGIVYLTEQVTRSCSHRQIDLKHVFFGGEDVGSYAENFVNTLRSGGWIVAGVNAHDAKEQRANMQASTDRLDLMGIASMLLNRRGNCSPAQSGIYRNLRTVVRHRKKLVAMSTEVKNRMHTVVDRLFPGFLDEKKSGILSFSKSSLYLMEDRFSPRQIRRRKQPKLIEILHRYGTKKAEDTAKKLKGYADCVLGTPNEYISTFQLSLTQHVNHFRCLRGSIEQLEHEIAVWLAQTEGAFLTSIRGIGIVLAAGTAGEIGNPHEQEPLNNLVSYSGIIPRVKQTGGSEGKTYTGKVAKRCNHILKDYVVQSGNHMGLHGPEELMADYKRREAAGQHADFGIGRRYLRTAMCLMRTSQIYMPEQLRNTKVQPEERAGYYLSIWPYLRRKWKKAGALDAAFEKDRPLGQWRCMVQELYEIKLKL

SEQ ID NO: 397960 - protein, 370 aa, unidentified
MSSITYIGLDVHTTNYTICSFNGYDGKYFGEVTVKPEYQQIEKYVKRLEKQYEPGHRFLCGYEAGYLGYSLYHELESVGIECVILAPSTMCDTKTNRQIKTDPRDARNIANCLAYGLYSAVHVPTEQDDAVKEYMRMRDSAAAELKAIKQQILAFCVRHGKRFEGKSTWTKKHLDWLDKLDFGNPILQNAFWEYLRRYYHAQEMQDIYDAQIAEYAQMEEYRQKVSELRCLIGIETHTALALITEVSDFRRFGKADQFAAYLGLIPGEHSSAEKTNRLGITKTGNKHLRRLLVEAAQHYGRGAVGRKSVSLKKKQEGNRREVVAYADRCNTRLRRKFFRIASHAPRNVAKTAAARELACFVWGIMTENIA

SEQ ID NO: 397961 - protein, 333 aa, unidentified
MHYVGIDVSKRSLDVCLLAEGSKGSRKTKTLSNGQDSAQNLAKWLILQKCELSQTHVIMEATGIYHEYLACGLHQMGILTSVINPCRSREFAKAMGIFTKTDAVDAYVLTFYGCLKQPEAWTPPEEEVRKLRALLQHRDSLLNDKLRIDNRLNTLKSTEAVQEVMDSLSLVNQYLKSEVARIERLISSHIAQHPGLKRDLKLLMSVDGIGKQIGWNMLAVLRGNNFKSAEQLAAYLGVVPVERRSGTSVHGRARLSKIGSSNIRAKLYMGALTAISKNSHIKALYERLLAKGKMKMSALGAAMRKLVHLCYGVLHTQQPYDEKYKAKIINFSS

SEQ ID NO: 397962 - protein, 362 aa, unidentified
MDFLAVDTTHVVEALVILGVDTHADTHVAVALDGLGRRLGSKTVSATDTGYAELVAWAEGFGRLDRVGVEGCGSFGVGLARFLRARGVPTVEVNRPNRQHRRRFGKHDTADAEAAARAVQAKTATGEPKSADGPAEMVRTLQLVRRSAVKARTQAANQLRALLVTAPEELKTGLLGLSTAKLVGKAARFRSGGLPEDLRASTKLAMRSVARRYQQLSEEIAELEGQIARLVSEAVPALTSLRGVGTDTAASLLLAVGDNPERLKSEASFARLCGVAPVAASSGKTTRHRLNRGGNRDANRALHVLALGRMSWDERTREYVAKRTAEGKSKREILRCLKRYLAREVYRVLVAAGTPTASLSRP

SEQ ID NO: 397963 - protein, 351 aa, unidentified
MLQKTNAVAVRTIGIDTGKNTFHLIGLDQQGTIVLREKLARGRIGRRLANASPCLIGIEAGMATHYVARELLALGHDVRQVPPAYAKPFRQGPKNDFRDAFAISEAVLRPSTRCVPVKTDDQLDLQALHRVRSRLVGQRTAVINQIRSFLLERSIAVRQGPRFLRQQLPEILAKRIDVLSPRMIGIIEDLGGDWRHLDERIERVTEEIEQLAHGSESCRQLMTVPGIGPLIASAMVAAIANGAAFAKGRDFAAWLGLVPKQMSTGDRTILGHISKRGNRYLRTLFMQGARVILLRSANWARHSFGPWLTAAAKRLHHNVLATALANKLARIAWTVLAQRRNYETRVVTEAA

SEQ ID NO: 397964 - protein, 386 aa, unidentified
MQRNDLSRSLVAFEQNSTLVAVIELSLKTWLMAGLVPGLARQPLKKQGADPDALLALLHRWRAEASKAGRKIDRIVVAFEAGRDGFWLARWLRARQIEAYVIHPTSIPVSREHRRAKSDRLDTELLMRAILGWLRGEAKHCSMVAVPTLAEEDARRPNREHETLVKECGRIVSRMKATMARLGVKGFNVKLRKAVEKLAGLRTPEGVPLPANTLDELRRDMERLRLAHQQTQEIEKARLARLKKAPQAGAHPMLLMLAKVLGIGAETADMLVHEVLSRELRDDKAVGRYGGMTGAPDESGSKRREKGLARAGNARVRRGMIQLAWRWLMFQKDSPLTQWYRARTAGAGQAVRKTMIVALARKLLIALWRYVRTGAVPAGARLRAAI

SEQ ID NO: 397965 - protein, 421 aa, unidentified
MLKIHRFNCAGLDVHKNLIVATIGITDKKTHVTEYIQKDFSSLNFDLYNLKNWLIEHECFDVCMESTGKYWFPVFNVLETEAKMNIVLVHPKYVKAIKGKKTDKRDSKWICDLFKHDLLKSSFIPPKDIRELRDLSRYRFKLICMRTSERNRYQNSMTVSNIGLASVVSDTFGKTAQAVMNEVLSTEVIDEDKITKLIHGKCKNKDKIVESLKSSKIEPDQRFKMAEIQSHMNELNQHIEAVEVEIIKRASRYFDDFLHITEIDGIQLMSAILIISEIGVDMTQFETDKQLCCWAGLSPANNESAGKKKSVRINKAGQYLKPVLVQCALAAIKNKNSYFGQKYTKIKKRRGHKKAIIAIARMMLVSIYHMILTGEKFNPSDYESFKNPKPQKEKNNYTVETALDFLKSQGFDVSTIQDIPK

SEQ ID NO: 397966 - protein, 349 aa, unidentified
MDRYIGIDAHATSCTLVVIGPSGRKLTEQVIETNATALVEYIQSVPRPRHLCLEEGNQSAWLHQVLSPHVDELVVTGTTEKRKDHKNDRRDALARAQELRLGAFEKIVFKAPNQFALLRHLASTYDLITRDVVRTQCRLRALYLSRGLHSTSKTLYGAAHRDEWMGKLPASCQPSAQMLYAELDAQRELKDRAEKQLVAESHRYPISHMLETCPGLGPIRVALMIPVVLTPARFRTARQFWSYCGLGIVMRTSSDWVRQDGRWIRAQVNQTRGLSRSFNHRLKYVFKGAATTVICRLPDHPLHQHYDRMLAAGIKPNLAKLTLARQLAAIALAMWKHEEEYDPARHRKP

SEQ ID NO: 397967 - protein, 369 aa, unidentified
MTFYVGVDLHKTQFTVHVRTEEKIESMNEIRMYPTTEIGYAEFCKRIRTYKETGAVVKLAVESTGNTKHFKNQMEKAGAEVIVVNTVKFKVINESVSKTDKHDAATLSEFLKDYKLPQSYLCSKETENMRRLIKSRERLVRAQVGQKNEIHALLVSLGLSDEPRSLQSKKGRQKVLDALESNNDYVLEAQSVKLMLDIIDTFAEKIKIIEKQLEELTKDDDMVKLLLTIRGCGKITAWIIRAYTEDISRFSNSKKYASFSGLVPKVRDSNETVHHGSITRHGPVELRTAFVQLFMGMRRCKDTKSWRMMQRYEYMKKNKGSGKSIISGARKVAEIVWALLTAKTEFDSARMTGTYKPMNLPEQALSVAI

SEQ ID NO: 397968 - protein, 417 aa, unidentified
MDVLHDRCAALDVSKAEVTVCLRTPGKRRNTRHTEVRTFTTMTNALLAMRDWLVAERVSLVVMEATGDYWRPPFYLLEDGLNVELVNAKHVKAMPGRKSDVADSVWLCQLAECGLLRASFVPPEPIRQLRDLTRYRQVLLEERTREAQRLEKELEDAGIKLSVVASDILGVSGRAMLGALIDGERDVEILADLARGRLRPKIPDLQQAMIGRFGPHHAFLCRLHLDRIDALDRDITTLSRRIEAVMAPFHQLLTRLDTVPGVNQRVAEVIIAETGGDMSRFPTAAQLASWAGVCPGNHASGGKRKSGKTRKGDRWLTASLGVAALAALRSKDTYLAARYRRLVRRLGNKQKALVALQHSILTSVWHMLSGNIDYHELGGDYYLRRDPQRERRRAITALNKLGYVVILNPIEPAETTA

SEQ ID NO: 397969 - protein, 348 aa, unidentified
MSKHSVAAGDIAGLLRRFAQLKEKARARTGRESPIIVVQEAGLDGFWIHRVLQSEGIESHVVDPASILTSRRGRRAKTDRIDGETLVRTLMAFKRGEPRVCSMARAPTLQEEDRRRVCRERNTLIGERVRHVNRIKGLLFAQGVFGYEPLRAGRRERLEELRTGDGRPLPVHLKAQIVRELDRLEVLLEQLKTVEAERDALLKPTTDEAASPPAMLVRLKGIGPQTAAVLWSEGLFRRFDNRRQVAAYAGLAPTPWQSGSIDHEQGVSKAGNPRLRTTMVELAWLWLRNQPTSALSLWFHERVRRLGGRMRKTTIVALARKLLIALWRYTTAGVVIEGAVMKVAPTTT

SEQ ID NO: 397970 - protein, 390 aa, unidentified
MLYVGIDIASKKHDCCIMGSNTELLAPVFTFENNAEGYGILLKNIRSHERDFSQVKIGLESTGHYGSNLISFLTSKGFELVVFNPLSVDLYRKAGSLRKTKTDKADAQFLARMLLSTENSSYVPNVPEIADLKALIRHRSRLKSIRSRLKISVSRLVTVLFPELPGAVWSIHQASSYAMFLEFPTAKAISECHLTRLTNLLSSASRQQYGKEKALEIKVLASKSIGPDSRVIGFELQQTIRIITNVAAELKILDKEITALMKRIGSPILTIPGISYNLGSVILSEIGNIKNFANPSKLLAFAGLEPSTYQSGNYQATKTSMVKRGSPYLRWAILQAAKSVSRYDPTFKAYADKKSSEGKHYFVVLNHVGRKLTRVIFHLLKNNQAFNPTV

SEQ ID NO: 397971 - protein, 355 aa, unidentified
MDSTKYVGMDVHTEAISVAVRNSAGKVIMESILETKANTILEFLQGLRGNVHITFEEGTWAAWLYDLLKPHVTKVLVCNPRKNALLKDGNKGDKIDARKLSELLRLNHLKPVYHGEHGIRALKELSRSYLTISKDLGRVMNRLKALYRSWGIPCKGQQVYAPRHHSEWLNKITEAGVRRRAEYLYQQLDALQPLRQQVRRDLLAESRKQPATKLLRKIPCIGPIRAALLIALIQTPHRFRTKRQLWNYSGLGIETHDSAQYRFVRGELQRSKRPQQLRGLNKNHNHDLKNIFKSAATMATISAGPFHDFYEALLVKGRKPTMARLTLARKIAAITLIVWKKEVSFDGKHLKPQAA

SEQ ID NO: 397972 - protein, 408 aa, unidentified
MRIIGLDIHRVFAEAVAWEDGKLRRMGRVDIRRDLLEKFACSLSPEDIVVVEATGNASAVSAVIAPHVKRVAIANPKQVKIIAHAKIKTDTIDAGVLAQLYACGFLPEVWVPDEATQALRRQVSRRQQIVKQRSRLKNIIQSILHAHLIPPCPAADLCGTKGRAWLSGQRLPEDERLAINRHVREFDRLGDDLKVIERDLAQSALEDGRAKRIMTIPGIDMIVALAIVAAIGDAGRFETAEKLVSYLGLNPSVRQSGSGPAHHGRITKQGRGHARGMLVEAAWAAARAPGPLRAFFLRVRSRRGQHVAAVATARKMAVLIWHLLRKGESYAWARPALYAKKLRDLELRAGCKPNRGQKGAASAYNIKSHRDEERRWAEQAETAYARFVAGWNARGPKVRTAAAKEERR

SEQ ID NO: 397973 - protein, 478 aa, unidentified
MTPRKGKGFAKDVAAARQHAGMELLRPHAAGIDVHSRQHYVAVPAADVPAAWINPDPNLPAGVRIFGTNTGDLEALAAWLIDCGVKTVALESTGVYGEVLLVILEQHGLEVVLVNPQQTATAPGRPKSDVLDCQWIQRLHSYGLLRASFRPSAEIRELRNYQRHREMLTRYAASHIHHMQKALEQMNVKLTEVVSEITGQTGMNIIKAIVRGQRDAYKLAKYRHARCKASEAEIASALLGTWSEAALFDLEQALKAYEFYQRQLQECGERIKTCLQQFADRSEGKPLPKPVRRLGGKKNRGVFDNARQMLYQLAGVDVTLIEGIDETTALVLLCELGYDLSKFPTERHFTSWLGLSPNHRGSAGKIKSRRVRPGANRAARALRVAAQGCHHAKHALGAFYRRIAARCGGPKAVVATARKIAERFWRLLTKGTAYVRQGMDEYEKNYHVKLTRRLAQRAGELGYKLVPLTLEPEPEPQP

SEQ ID NO: 397974 - protein, 351 aa, unidentified
MELIAFDSHKKYTLASIESEDGRTRREARIDHGPGVIRRFLERCPKGSPVAVETIGNWYWIVDEIEAAGMVPQLVHARKAKLMMGHTNKTDRLDARGLNRLQRTGTLPTVWIPPMDLRDLRELLRTRMDLVVQRTQLKNRIHAALARYCLSLEEANDAFTIEGRKELAQLFEKLPPQTRFANSLLMEEIDAVQKQIDRLEARMEEVLEENSTIQLLRTLPGVGKILSAVIALEIGDIKRFPSAGNLASYAGTTPRVSSSGGKTHFGKLRGDANRFLKWAYIEAANVTARFHKKHPETHLSRMYSKLRKDKGHAKAIGAVARQLAEATYWMLTRNEAYKEPARTGTGSSTEA

SEQ ID NO: 397975 - protein, 344 aa, unidentified
MEHYAAIDVSLEWSSVCVLDAAGQIVREAKVRSEREALAAFFTESGLAFARIGLEAGPLSQWLHAGLVEAGLPAILIETRHVKAALKAMTVKTDRNDARGMAQLMRMGWFRPVHAKAPMVQEIRALLTARKLLVAKLRDVESSIRGILRGFGLKVGAVSKGKFEARIRELVTGQVMLERVAEPLLRARAALRTEYTTLHRDLLRTVREDAVCGRLMTVPGVGAVVAMTFRSAIDQPERFAKSKAVGAHFGLTPKKYQSGEIDRTGRISKVGDAMVRTALFEAANVMLTRAVRFSTLKAWALRVAGRHGMKKAKVALARKLAVVMHRMWVDGTSFCWGEASVSAA

SEQ ID NO: 397976 - protein, 315 aa, unidentified
MTSTQVFVGVDISKAQLDLALRPEGQFSVPNNEAGFAQVLEHLNAVHPTLVVLEATGGLEIPLTGVLAAAGVPVVVVNPRQARDFAKATGRLAKTDALDAQMLAHFAEVMRPEPRPLPDEQTQALAAILARRRQLVEMLTAEKNRLGTAGKPVRKSLRTHIAWLERELSHTDRGLAQTIRESPVWREKEALLRSTPGVGPVVTTTLLATLPELGTLTGKQIAALVGVAPLNRDSGTWRGKRTVWGGRAQIRAVLYMAALVAARCNPVIRACYQRLRAAGKAKKVVLTACMRKLLIVLNAMLKHRTPWRAELVQCA

SEQ ID NO: 397977 - protein, 345 aa, unidentified
MGISTIGLDLAKNVFQVHGVDERGSALLRKQLRRDQVVPFFARLQPCVIGIEACSGAHYWAGKLRELGHTVRMMSPQFVTPYVKTNKNDAIDAEAICEAVARPNMRFVAAKTPEQQAVLALHTARAGFVKARTAQANQIRGLLAEFGLVIPQGIRNVYKCVPAMIERAETWLPGRFRALVERLLEHLKRLDRQVQELEREIVGWHRESEISRRLEAIPGIGPITASALVASAGDARNFKNARQFAAWLGLVPRQRSSGGKSLLLGISKRGDVYLRTLLIHGGRTVVRYAAAHTGKASSWLTHLIGRRHANVAAVAVANKNARVAWALLASGRRYDTSGKARAAAA

SEQ ID NO: 397978 - protein, 318 aa, unidentified
MTHTTQTTALYVGIDVSQNTLTVAIYPTDEVWTLVNDPHSHTALVQHLAQLPVQRVLLESSGGYEKAVVSALQQAGLPVVVVPAQRARYFAKSMRGDLKTDRADARMLAYFACCYPVQPVAPCAPVQAELKELWARREQLVQEVEREKKRLHTVQSEAVRASLERMLAVLKDEIAQIEARVAELIASDADLSQKAALLQTAVGVGRVVAYGLVAELPELGQVSHRAIAALAGLAPVRCESGAWVGRARVRGGRPRVRRLLYQAAVVAATHDGRWRAVYEALVGRGKAKKVALCAVARQLLVVLNAMVRDGRAYERVQE

SEQ ID NO: 397979 - protein, 409 aa, unidentified
MRVIGLDIHRGFAEAVAWDDGKLKRLGRVDMRRHLLEVFAKGLSKEDVVVVEATGNAASVAAVIAPHVKRVVIANPKQVRIIAHAKIKTDTIDAGVLAQLYASGFLPEVWIPDEPTQALRRQVTRRNQIVRQRSRLKNIIQSILHSHLIPSCPHADLCGTSGRAWLFNQVLPEDERMAVERHLREFDRLAEDLKVIERDLARSALADEAAQRLMTIPGVDMVVALAMVAAIGVVTRFDRPQKLVSYLGLNPSVRQSGPGPAYHGRITKQGRGHARGMLVEAAWVAARAPGPLRAFFLRVRARRGQHVAAVATARKLAVIIWHLLSKGESYVWSRPSLHARKLRDLELKAGHKSERGQKGAAHAYNIKSHRDQERRWVEQAETAYARFVAGWNRRGPEQARTDPATEVRQ

SEQ ID NO: 397980 - protein, 367 aa, unidentified
MENHSIVWVGMDTDAKKNQIALYRGWEKEPAAEWEAGMDAKGIKKLIERLEREEQEIRCVYEAGPCGYELYRKLRKAGIHCDVIAPSLTPRKPGDRVKTNRRDAQNLARLYRAGELTVIGVPDEKQESLRDLTRAREDVREDLTRRQHRLNRFLARQGYHYQDGDKWTQKHWAWIRKIHFEDANAETVLEESIRAADQSQEQLKTYDAKIEENASKPEYAKKVQRYETLRGVRTVTAMTILAEVWDMRRYGEAPQFMGSTGLVSSEHSTGDHERRGKITKAGNAHLRRVLVEASWHYRHGTSAGKAIKKRRKGQPAAVVSIAERADQRLNRKFRRMVDRYNKKPVIAAVAVARELAGFIWAIGQFND

SEQ ID NO: 397981 - protein, 341 aa, unidentified
MMIIGCDFHPRFQQIAYLDQETGEYGERRLSHPEEGERFYRSLARRQVRIGAEATGNFRWFQRLMQELGHEFLLGDASAIRACCPRKQKTDKRDARHILNLLVEDRFPAVWQPPLENQEVRQLLLHRCRLVRMRTRIKNQLDAMAKNEGLLRPRVWSPQRRSEIEALPLPGWYAHRRVDLLGLLEELDKRIRPLDEAVREAAEDSREACLLMTHPGVGPVVSLAFVLTIGDWRRFPRGKQVGSYLGLIPAEESSGDKRRLGHISKQGNTLVRWLLVEAAAIAQRYDASWHRQYVRLSMTKHHGVAKVAIAHKLAVRLYWMLRSGQDYSNVMERGSHAGQSE

SEQ ID NO: 397982 - protein, 352 aa, unidentified
MEHIAIDLGSRESQICVRDVAGAIVEERRVPTARLGSHLSRRKPGRVIVETCAEAFEIADRALACGHEVRVVPATLVKSLGVGARGIKTDQRDARTLSEVSTRVDLPSVHVPSAKARDRKALCNSRQTLLISRTTMTNYVRGYLRRHAITLGPRNPSRFVERARVALLAHPLGLPSHIERVLSIIEALNTQIESADAELAEIAEGDEVCQRLMTVPGVGPVVALRFVAAIDEHQRFSSSHDLMSYLGLTPGENSSSQRKRRTGITKAGAADVRAVLVQGAWSAMRSKTKDPMACWALRIAERRNKQVAAVALARKIAGILYALWKNGTRYEPRRAALPPQDVTATSEATTNA

SEQ ID NO: 397983 - protein, 345 aa, unidentified
MEVLIGIDPHKATNAVAAIDERGELLEYAVFATNSAGLRSLKRWGKRFSDRRWAVEGAGGLGCSVAQHLAASREKVVDVPAKLSSRIRLLSTGNARKNDRVDAAYVAMAALGNERLAGVSEEEHAAVLRMLSDRREDLVKERTRTLNRLHGLLRGLLPGGAAKNLSADKAARVLRGVRPRSGPAHARRRLAADLIRDVRRLERQVRDLESRIREAVEEAPTGLTQLFGIGPILAAKIVGRVGAVARFPGKAHFASYTGTAPIEASSGDVVRHRLSRAGNRQLNHALHMIAICQVRHVTEGRAYYRRKLAEGKSEREALRCLKRRISDLVFRQLRTDSEKLPSAST

SEQ ID NO: 397984 - protein, 338 aa, unidentified
MKLYGGIDLHSNNSVLVLIDEEDRVVVEKRLKNDLALMLAELVRYRKRIAGLVVESTYNWYWLVDGLMEAGFAVHLANTAAIKQYEGLKHTDDRHDARWLAHLLRLNILPEGYIYPREARAVRDLLRRRHRLVQQRVGNLLSIQNQFARVGMNGFSAERLKRLAPAELEALIADGNVRSAIAANLALVDCLNGEIARLEREVLAQVKLAAQFEPLLSVTGIGKILALTIMLETGEIGRFAKVGHFASYARCVDAQRFSNEKKKGSNNAKCGNPYLAWAFVEAANFAIRYSPRIKRFFDRKCARTNKIVAFKACAHKLARAAFHVMRDRVVFDETRAFA

SEQ ID NO: 397985 - protein, 325 aa, unidentified
MQNQTIVGIDISAASLDICIAGKEQRSVVIKNDPAVIRRFFDAYKCECLVIGMENTGRYNWALYEVLKDLDHQVYVISPLHLKKSLGLVRGKTDKVDATRIAAFVAKNQAELPRWRPSSPTVQKLKILLTERNARVKSKRQLLRQQGDYAKMKHLGLDKPLQKLNKQQLSILNEQLRIIEKQIEQLIKQDEPMQKQATLIRSVPGVGKVLCWLMLSKTESFTTITEPRKMACYGGVVPFSYQSGTSIRGKDRLSNYADKALKAILHMAAMSAIRLPNDLRDYYLRKVAEGKNKMSALNAVRNKIVHRIFAVIKNQRPYQLNLILS

SEQ ID NO: 397986 - protein, 343 aa, unidentified
MAEYVALDVSMTSTSLHIVDEQGRCLWRGTCATDLDALTTTIRKHAPLVERVGLETGQLSTWLCHGLAEAGLPVVCMDARQAKAALSCRVNKTDANDAEGLAQLLRTGFFRQVRVKGKSTMLVRMLLSARRQLVRVELDLANQIRGLLKIFGLRLPRGGGRIFEAAVRAHLRASPRLAMILMPLLEVWRSVRAQTLELDRLAYAAAKRDPRCRLLLTAPGVGTITALAYVAAVESPEAFSNGRAVSAWVGLTPTRYQSGQIDAAGRISRRGDVHLRTYLYEAANTVLTRSRPDTALKRWGLGLKARLGHKKAVVAVARKLAVVLHPMWSAGQPFRADVATGAT

SEQ ID NO: 397987 - protein, 408 aa, unidentified
MKRYYIGVDWGDRLHQVYVGDHEGKKIREMKVPETVEGLAEIGRWLDEQRADGFELWAAIEKPAGRIVDFLLDHGVEVYPVNPKAVDRVRDRYRMSGSKSDAFDAYVLAEFLRTDQAHLKALRPSSENAQELKMLCRDQHRVVRLKSRLLNQLTTTLKEYYARPLEVFQDIETEVALDFLTRYPTPAHLSALKRKEFNRFATQQHSLSKQRCEELWEKLEKPQLGVPEHVVRAKAQLVEVLIDQLRASIKAVKTYHHKVESFFASSPAAHLAKTLPGGKSGTLVAAIWAELGDAQGRWESSGHLQAEAGAVPVTKASGKSHVVHFRFACNKQLRYSMYWFSFVSLNNSEWAKLYYRGQRDKGHNHPQALRALGAKWLKIIFVMWRDHKPYDEQFHLANIALQKMRQAA

SEQ ID NO: 397988 - protein, 425 aa, unidentified
MNYKQNEKINQVKESTLVVGIDIGSTTQYARAFDWRGIELGKVFPFSNSREGFESFKAWMQHLQDKYRKSDVIVGIEPTGHYWFDLGAYLEDEGILLVMVNPYAVKQSKELDNNSQSKNDRKDPKVIAKLVTEGRYSAPYTPDGVYADLRIMVANRKRLIREMTQIKNRFARWFAIYFPEYTDVFGDYEAQSSMLLLKKVCTPEAIVELGAEKINQIWRDAKLRAVGMKRATTLCETAKRSIGLKKGSSAARYEMKLLLEDYEYKKAQLDAVMEEIEKLCRKIPESEQMLAIKGIGVITVAGFLAEVGDVRRFESPRQIQKLAGLSLRENSSGKHKGQTSISKRGRSKLRAVLFNAAIPLIAKNPEFKSLHEYYTTRANNPLKKKQSVIAISCKLIRVFYAILANGVTYDAQKMLSDIHRQPQAA

SEQ ID NO: 397989 - protein, 378 aa, unidentified
MPRYLGLDLHARYVHVCEWLPIEQKEEHSRFPNTAAGWDRFLQTVGPDCRVALEVTGNAFEVYDRLSPHVGEVLLANPVALRRLGSGRHTDDAARLAKMLAMGTLPTVWVPPQPVRELRRLLRYRERLSAQMTRLRNQIRAVLRRYDQHLPRGADLDRHLDPALLEAMSAADRVIVLSALRQWQRTKEERDAFDAEVTERLARIPEARVLLTLTGVGPITAAVIWAVLGDARRFRSPKQVARYAGLDPSVHQSGETCFHGHISKNGNALLRTYLVEAANTLARFDRGPLGAFYQRKRRQIGHKRAVVALARKLLIVAWRMLLTGERYRHARPKTLRTKRWQLNVLRQHRRDWDTLLRALLVPEGEMPPCEQDRTQIPA

SEQ ID NO: 397990 - protein, 331 aa, unidentified
MQSGVLTNAESLPDGGFMSKTVVGVDVSKGWLDIACADSSEVVRIANTQAAIAAWVLAARDAGVWLVAFEPTGGYERELQSALREHGLVFIRVHPNQVIAFRKSRRIRAKTDRIDAQLIARFAAEELLRRGLPVTIAGDETLRELAARRRQLVDTLQAEKCRLAMARGAAVRASLTGSIAGLQASLEAIETALLAHIAEQPELAKQHALLQTLKGIGPVSAMTLIAELPELGRLSGKQIAALIGLAPQTHESGKSSRRASTGKGRGDIRRVLFNAARSAILHNPIMRAFYQRLVEHNKRAGKIALVAVMRKMLVTLNAIARDQQPWKHHAA

SEQ ID NO: 397991 - protein, 350 aa, unidentified
MEEYIAFDSHKRYTWVEHLQVSTGKVREYRLEHVPGAIRQALAGCPPGTAVALEATANWYWITDEIEQAQCVPRLVHPRKAKLMMGQINKTDKLDTHGLNTLQRNGTLPTVWIPPGPLRELRELTRTRVVLVAQRTRWKNRITATLAKWGLPTSEYSDPYGKKAREELEQRLERLPEQTRWATQQMLRQLDGLSEQIREFEKRLEELVEVTPEMQLLLSLPGVGVILAATIALEIGEITRFLSAERLASYSGTVPRVHSSGDRTRYGRTRPDVNRYLKWAFAEAGNSTAVNHRRIPERHVSQLYARLRARKGHSTAVGAVARHLAEAAFHVLSRKQVYRDPAAVGRTTEV

SEQ ID NO: 397992 - protein, 358 aa, unidentified
MENTKGCFEGKELYIGIDVHKVRWVVSVRTYDLELKTFSMSSHAEELERILLDTYPGALFHIVYECCFSGFWIYDYFHERGYYIVVTPTNRIYRDGSIVKTDKIDSRKLAFQHSRDLLRAVKVPTMKIREYRSIFRIYDKEKMREGQILRQIKCILEVKNHPMKWEKWNKAFVEKLKSVKFQEDIFNKKFEQLIREYEYVKEQIKDSEKRIKEIGEDEELSERIKRIEKINGIGIISAVRMVVFLFDMKGRFESGEKLVHYVGLTPGEHSSGEEVIRSRTGLIGSRQLRSIIMQLAWVAVRKDGNLLDKFERVYKKSGKKQKAIVAVARKLMMKVYAITEKEEEYVINMPSNQKGIAA

SEQ ID NO: 397993 - protein, 371 aa, unidentified
MLQNNSSIYVGLDVHKESLSVAIASPERGGEVRFYGNIPNQQQSINHLFLKIKMQYSSVMACYEAGPCGYKIYHQLTAMNIDCIVVAPSRIPKSPTDRIKNDHRDAVGLARLLRAGELTPVWIPDLTHEAMRDLVRARAASKQDSRIARQRIQSILLRNDRRYDKKPWSYKHRIWLANQTFPLPSQQIAFQHYCQSLEQIENRIAQLDQEIDRLLPEWSLYNLVCQLQALKGVGKTIAISLVSELGDFSRFPNPKQIMAYIGLIPGEYSSGKKIRSLGITKTGNSELRRLLYEAAWAYRSSAKVGSWLITYRPANATQESKDIAWKAQQRLCGRYKTLLQKGKRSQIAVTAVARELTGFMWDIALTARQSR

SEQ ID NO: 397994 - protein, 349 aa, unidentified
MADQRLTYRDRIVYVGVDVHKDTYAVTCVCDKKIVKTATVQADPVGLAASLQRWFPDAMLSTVYEAGFSAFVLHRALIKAGIPNMVVNPASVAVAANDKVKTDRRDSKKLAIDLADGRLRGIYVPTEAEELARLLPRTRAQIVEHRATIARQIKAKLHQFGLIAPSSRRLISNRYLREIAAWPLPSELGVSLSLLAEQWRFATRQLIEMRRLLRAQAQAQAPIEKVYRSVPGIGEVVARTLATELGDMTRFANERALFSSTGLTPSEPSSGASVRRGHISRQGSSRIRQWLVETAWRALPRDPVLKESFDRIAATRGKKRAIVAIARRLTGRIRACFRQGTTYAVGTYA

SEQ ID NO: 397995 - protein, 426 aa, unidentified
MEVVHQRCAGIDVSKKDAKVCIRIQGSGRRKTSATVRTWGAMTADIVALRDHLIEQKVTAVVIESTSVYWKPFYYLLEEHLDVMLVNATAARNVPGRKTDVSDAAWLADLGAHGLLRASFVPPEPIRILRDLTRARTLISAARVKEIQRLEKLLEDAGIKLSSVATDIMGVSGRAMLEALIAGQHEPAVIADLARRRLRTKIPALTEALRGRFNDHHAFMVRLYLDRIDTHNADIARLDERIEEAMTPFRPARDLLISIPGFSTVVAEVFIAETGADMRVFPTAGALASWAGVTPGANQSAGRIKSTHIRPGNRHLKAALGTAALSACRNPDTYYGARYRRIAGRRRPATTTTGRRQSGAGMIGIVALEHKMLTDAWHMLTNGTVYRDPGADYYTRHHPTKTKNNAIKQLQALGYDVTLEPHTTVA

SEQ ID NO: 397996 - protein, 342 aa, unidentified
MGIDPHKQTHTAVAVDAVTAEVKGERTVRARSGGYEQLVAWARSLDDERIFAVEDCRHVSGGLERHLIARGERAVRVAPKLMAAHRRTDRTFGKSDPIDAAAAALAALRHPDLPEARLSGPERTIGLLATHREGLVTERTRACNRLRWLLHDLDPDLVPPKGVLDRDVAIERLRGELQDRPSRIELELCFELLGRIAQINARERELARQIEELVRAVSPSLLEIPGCAALTAAKLVAEVANVDRFATEARFAMHAGVAPLQASSGASHRHRLNRRGNRQLNAALHRIAITQLRVHDPAKTFVARKRSEGMSNREALRCLKRQLARVVYHTMRTAQRSTAEAA

SEQ ID NO: 397997 - protein, 429 aa, unidentified
MNYTQNEKIEQVTDSTIVVGVDIGSQIHYARAFDNRGRELTKRVFSFHNDLEGFNSFNLWAETLKSENKKTAVLIGCEPTGHYWFAFAKYVKDHQKRLVMVNPFSVKKIKELDDNSPKKTDSKDPKTIAKLVVDGRYSIPYVPEGIYAEIRDLVYSRDRIMKQHNISANRIQRWLAIHFPEYLGLYTRFDAASGLAVLEKAPTPKDVIALGVNGIRKIWHDKKMRGRGVTEDRAKTLVEAAHNSVGLDGGIGTKSELYMLLEEHRLWTSQLEAVNKVLEEMILKVPHVEKLLAIKGVGSITIAGFIAEVGDIRRFDSPKQIQKYAGMELVENSSGKHKGRTRISKRGRRKLRKILYQVMVPLLARNREFREIYDYYVTRVKNPLKRRQAMVAVSCKLIRVFYAVLTKGMEYDRFKMMSDIHRKSDTIAA

SEQ ID NO: 397998 - protein, 375 aa, unidentified
MHQDTGSARIAGVDLGDKLSVICTIAGDTGEILERTSVRTTLTAFEEYFARSEPMRVALEAGTHSPWASRTIAACGHEVLTANARQVRLVYASRRKSDHVDAEKLARLARLDARLLAPIEHRTEATQRALATLRARRALIRARTLLVNHARGSLKSFGYRLPKCATEAFPRIARARLPEGLAPALSPILDGITNLNEQIKLHELQLQRMATDAYPETALLTQVHGVGLTTALTFILTLETPARFPSSRAVGAYLGLTPGRRQSGDRDTQQHITKEGDQTLRSLLVQCAHQILRRGAPDSDLRRHGLHIARSGTKEAKRIAVIAVARKLAIILYALWSTGEVYEPLRNATKPAPDATLDVPASPPPTDHQEPARPS

SEQ ID NO: 397999 - protein, 343 aa, unidentified
MEEFVGLDVSLKLTHVCVLDGGGKRVWQGTCLSTPESIAETIRARAPNATRIGLETGPLSTWHWHALSEIGLPILCLDARHVKAGLKLQANKTDKNDAHGIAQIVRSGWYREVTVKSLDNHKVRALLGARKKLVETKTDLINEARGVMKTFGIVLPKSGLSFEEKFETLSRGTEILHITLQALLGTLRTVTEHLGRLDKEVLAYAKQNDACRQLTSIPGVGPITAVAFVSAIDDPARFRKSRTVGAYLGLTPKRYQSGETDNQGRITKWGDALVRAYLYEAANALLLRTKTWCALKVWGLKLARRGGMTKARVAVARKLAVIMHRMLITGETFRWSNAAEAAV

SEQ ID NO: 398000 - protein, 428 aa, unidentified
MKYTQNEKILQVTEKTLVVGVDIAKERHVGRAFDFRGVELGKRIEFENRKEGMEKFLDWANKIMKANGKENVIVGIEPTGHYWLCFEQYLRENGIKVVLVNPFHVKRSKELDDNTQTKSDIKDPKTIAMLVKDGRYTEPNIPEGIYAEMRVAMNIYERLQKQMNVLKNQIINWLDIYFPEFLEVFSDWEGKTAIATLREMPLPCDVVEKEVEGIIEYWHDKVDVRAISRRRAMDLAEAAKRSIGKKEERKLARQEIKYLLEEYELLKKQIEEIEGEMAELLREVPNGEQLLEIKGIGVKTAVGFISEVGDIRKYEDARQIQKLAGLNIIENSSGKYKGQTCISKRGRGRLRSSLFKAMITIVAKNEEFKQLHRYYTTRQNNPLKKKQSLIALCCKLIRIFFAILKKGIRYDGNKMLSNIKREALAITA

SEQ ID NO: 398001 - protein, 388 aa, unidentified
MSKQTAAASKIDCNEQRATLMMAMELGESGWLLGFASAFGERPLRRKVATRDGEGVLAQITWAKQRLGLSADAPVVSCYEAGRDGFWLHRFLVARGIENLVIDSASIEVNRRKRRAKSDRIDLVALLDLLARHRAGSAKPVWSVVHVPSEEDEDRRHLGRELRLLKKDRTRVSHRLKGLLANHGCTLDLHADLRTQIEVLRTWEGNVLPSGLLARLHRYVDDYEYLTERICGLDAERRRIWREEEGPALDQARQLYSLKAVGMNTAWTYATEFFGWRNFQNGKQVGAAAGLTPTPYASGKSEREQGIGKSGSRWVRGAAIEFAWGWLRFQPQSALAQWYQERFGSGSKRVRKIGIVALARKLLVALWRFLETGVIPEGAALKTDLRLH

SEQ ID NO: 398002 - protein, 347 aa, unidentified
MRFYNRQHRHYCGIDLHVKTMYVCILDSAGQVLVHRNVKSTAEAFLEIVAPYREDLVVAAECMFTWYWLADVCAAEGIAFVLGHALAMKAIHGGKAKNDKIDSHKIASLLRGGLLPQAYVYPAAMRSTRDLLRRRLHLVRKRGELLAHIQNPRAQYDLPAFERRLAYPANRDGVSAHFTDPSVRKSVDVDLALIDQYDTLIVDLELTIVREAKRHDADAFHRLRSVPGIGKVLALTILYEIHDVTRFDRVQEFASYARLVKCVKTSGGKKLGTGSAKMGNVHLKWAFSEAAVLFLRHTKDGKKILAGIEKKHGKGKALSILAHKIGRAVFYMLSRGTVFSMEKFLAA

SEQ ID NO: 398003 - protein, 350 aa, unidentified
MTIVAQLFEHVVGIDTHARTHTYCLIAAATGAVIDTATFPTNKAGNARAVTWIVRRTSGSVLAAVEGTSSYGAGITAALSEAGFDVAEVRPAARSTHAHRGKSDALDAEAAARAVLGREFDRLAKPRQGGQRTALRVLLASRSILDQQRTANRNALLALLRSMDLGIDARKPLTDAQVRTISAWRTSRATPEHDPLAITRREARRLACSVVEQGELLKENHRQLHQLAEALAPGLQVQPGVGPVTAAIIICAYSHHGRVRSEAAFAALGGIAPVPASSGNTDRHRLSRSGDRQLNRAFDVIVRTRMSYDETTRDYVARRRAEGRSNREIRRCLKRYVCRSIFRELQTAMA

SEQ ID NO: 398004 - protein, 425 aa, unidentified
MNYKQNEKINQVKESTLVVGIDIGSTKQYARAFDWRGIELGKIFTFSNSREGFEAFKAWMRHLQDKYRKSDVIVGIEPTGHYWFDLGAYLEDEGILLVMVNPYAVKQTKELDDNSQSKNDRKDPKVIAKLVTEGRYSAPYTPDGVYADLRIMVANRKRLIREMTQIKNRFARWFAIYFPEYTDVFGDYEAQSSMLLLKKVCTPEAIVELGAEKINKIWRDAKLRAVGMKRATTLCETAKRSIGLKKGSSAARYEMKLLLEDYEYKKAQLDAVMEEIEKLCRKIPESEQMLAIKGIGVITVAGFLAEVGDVRRFESPRQIQKLAGLSLRENSSGKHKGQTTISKRGRSNLRAVLFNAAIPLIATNPEFKSLHEYYTTRANNPLKKKQSVIAISCKLIRVFYAILANGVTYDAQKMLSDIHRQPQAA

SEQ ID NO: 398005 - protein, 319 aa, unidentified
MAQNDLIVAGIDVAKDKVDVCIRSLSLRRTFASTAEGRRELASWLRRQKVGKAVMEASGGYEREWAKALRDAKIKVRTVDPKRVRSFARSAGRLAKNDTIDAEMIAWFAETFDEARGQAYDATREQLHQMVNARQAMMDMQARLENQGEHAVPAAVQRMHAQVLKKIGAELVKIEAAISTLIQATPHFNELAEIIESVPGLGRTTSAALIAAMPELGQANNRIVAALLGVAPYDDDSGRRRGERHIKGGRRRTRNVFYMACLGAATQHNPVLKAFYDRLVAKGKEKKVALIACMRKLISILNIMIERRQKWDASRHALS

SEQ ID NO: 398006 - protein, 464 aa, unidentified
MKDNKRRRQMKQRRISSHLEQVNLFAAGIDIGSLSHYVAVPEELDSEPVREFACFTGDLNRMADWLVEIGIQTVAMESTGVYWIPAFEILEERGLVVLLVNARHVKNVPGRKSDVQDCQWLQQLHTYGLLEGAFRPPEETVALRAYTRQREMLVQRASDHIRHMQKALRQMNLLLDNVVSDINGMTGMKIIRAILAGERDPTVLAKLRDKRCKHDDKTIAASLEGHYREEHLFALKQSVELYDVYQQQIANCDETIQAQLDRMESRGDKDDLPPTKKRKTKSSPDFDLRGELYRMTGVDLTRIDGLNETSVLKVLSETGVDITPWPTEKHFSSWLGLSPGNKITGGKILTSKTKPSANRAAAAFRLAAYGLFNSKSALGAYYRRQRARLGSPKAITATAHKLARTFYSMLKNGTEYVDQGQDYYETQYRDRVTKNLKKRAASLGFALVPNKEDENMPDTVLSTT

SEQ ID NO: 398007 - protein, 345 aa, unidentified
MNITAVGIDLAKNVFQVHAVDARGKVVLRKQLRRAQVAGFFSNMPPCLIGMEACASAHHWGRTFERFGHTVRLMASQFVKPYVKTNKNDVADAEAICEAVGRHSMRFVPIKSVAQQAILSVHRVRQGFVKARTAQANQIRGLLGEFGLVIPQGIYNVAKRVPELLEDASNELPVPFRHLIERLTQHLKELDRQVKEFEKEIIEWHRSSELSRKLEAIPGIGPLAASALVASIADAHSFDNGRQVSAWLGLVPRQSSSGGKPTLLGMSKRGDAYLRTLLIHGARSAILAAKNKVDNTQGWLTNLLKRRHPNIAAVALANKNVRTVWALLAHGREFQADYMPTRMAA

SEQ ID NO: 398008 - protein, 345 aa, unidentified
MTEAYDGRQVVGMDLHRRRSVLVRMSMDGRKLETVRIENSPAALRAVLARCGQRPLVVLEATYGWYWAAGVLAEAGAEVHLAHPLGVRAFSYRRVKNDERDASDLADLLRMGRLPEAWIAPAEVRALREVIRYRHKLVQQRTSCKDQVHAVLAKLGVPVTHSDVFGRGGGLWLDQLVLPEPYAAKVASLRALIGVLDGEIARLGQRAAGMLAAGPGYAAVRELDGIGPVLAAVIIAEIGDVTRFRKPGQLCSWAGLTPRHYESDTKVIRGHVSKQGSRMLRWALVEAIQHQPAGTRPQQAKEAILARRGKEARNIAKTAAARVLLTQVFYALRDGHVRRASHPAA

SEQ ID NO: 398009 - protein, 372 aa, unidentified
MKITEKTLEVNANHILNIGVDVSSRKLDVHFECPLQLNKREVYREQILNRSVEIEKALKNYLSLAQSKGFLNLRIVCEPTGPYSLNLLSMATHLNCLTAYVSGEAVKNSKIIEFNGTNKNDLVDAELINSLAERNKVLIHRTYSANYTRLRMLNSHYEDVDKAYVSARNQVHNTLKQLWPDYSSKLSLLYASTGQALYRCYGFNPWKIVSYNYSYFERRMRTHCKGVWSSTLKQIYRDAEESVRNHCSDAASTLESILSDHYENCLRGLERKASLKTEMKTILSEIREQDDRIPQARVNFISEFHIARLLAETGPLSDFKNLKQLTKYLGLNLRERQSGEYQGRVRLSKRGRSLARCTPTARYSTLLNNSLN

SEQ ID NO: 398010 - protein, 367 aa, unidentified
MKKVSTVAAKPSKKISQQKLTVGLDLGDRNSWYCVLDEFGQIQLEQRVRTNAKALREVFGEMPHSRIGLEIGTHSTWISRLLSELGHEVIVANARKVRLIGESRKKDDRLDAQTLARLARIDPELLYPVKHRSAQAQADLMMIRARAGLVRARTGLVNTARGLAKSYGERLRGCNVRNMNPEKAEGLSPELQSALEPLLAGIEVLSEQIREYSERIERLAQQSYPQVALLKQVKGVGTLIGLTFLLTLEDPHRFRKSRDVGCYLGLQPGRRKSGQSEPQMHISKEGDPYLRTLLVQGAQHILGPFGVDCDLRRWGLKLAERGGRNGKKRAIVATARKLAVLLHHLWVSGDVYEPLHNNRGTTVAAAA

SEQ ID NO: 398011 - protein, 360 aa, unidentified
MSFGSRNRVGALIAVSIPETARTVVWSLETVYLLVRAPVLYLEDKMTTTTAQKFIGIDISKTSLDVAVWDSEIFWQFGNNARGIKKLVRRLKKLSPTLIVVEASGGLEQSVVRELYQTNLPIAIVNPTRVRRFAYSTGQLAKTDKLDAKIIAQFAQAVKPEVRPLRTEQQEHLNALVTRRRQIVNIITAEKNRRSTTHPALQDQLLKQIDWLEQEKEALEADIDQLIQQCAEWKEKAAVLESVPGVGSVTASTLLAELPELGTRNRQQIAALVGVAPVNKDSGKMRGKRRIFGGRADVRATLYMATLSATRSNPVIRSFYNRLLAAGKLKKVALTACMRKLLVILNSMISHNRSWSPYLV

SEQ ID NO: 398012 - protein, 389 aa, unidentified
MFYIGIDVGKFNHCACVISSEGEVLIEPFFFTNNLDGFDSFIKAVKKFKSPRHIVGLEATGHYGDNLINFLITHDYEVALINPLTTDAKRKSKIRKTKNDKKDTFLICSVLFDRDYTRVTQRKLDMKQARELTRYHASIAEDINQKKNQLQKCIDIVIPEFNTWFKTKYSKAYMAVLKEFGSSYNLASANLAHLKKVLKPKSSGSRVNIDASSLRSSAKKSIGENNEAVTLEIKMLIENIELLASQLKTVDKKIEELAVKLDSPIFSIPGIGIYTGMSILSEIGDIHNFSSAVKVMGFAGVDPGTYQSGEYSAPRTALSKRGSRYLRKSLYQCILTVCKYNLTFNKYYKLKRLQGKSHRCAQGHSVRKLIRVIYKLLSENIQFDEKLLI

SEQ ID NO: 398013 - protein, 354 aa, unidentified
MFNKSNATIATMGIDIGKNSFHVVGLDQRGAIVLRQKWSRGQVEARLANMPPCLIGMEACVGAHHLSRKLQSLGHDARLMPARYVRAYLKGQKNDFRDGEAIAEAVQRPTMKFVATKTAEQLDLQALHRVRARLVSQRTGIVNQIRAFLLDRGVAVRKGPRFLRTELPRILSTRCDVLSPRMVHVIEELAGDWHRLDERIKSMSSEIEALADQDPSCERLMTVPGIGPIISSATVAAIGNGAAFSKGRDFGAWLGLVPRQISTGDRTILGKISKQGNRYLRVLFVQAARVVLVRPNSWERYGLKSWIEAAKKRLHHNVLAIALANKLARIAWAVLNKERKFECVRTSAMASRSA

SEQ ID NO: 398014 - protein, 427 aa, unidentified
MNYTQNSKIRSITESTLIIGVDIAKHVQYARAFDYRGIELGKIKSFENTAEGFLMFHQWAKAIAIENNKNSLIVGMEPTGHYWFNLAYFLKDMDIRVVLVNPSHVKKSKELDDNSQTKNDRKDAKTIAKLVIDGRYSVPYVPEGIYSEIRTAMNMRDDISNALVKIKNKIAQWNDKYFPEFNGVLCNWEGKAALITLKNFPTPEKIIAKGSVQIAMDWKKEIKCGVGLSRATKLVEAAKVSVGIKEGLRLAEKELKLILDQYDLYINQYKELELEITELTLQVPGAKEILTINGVGIMTAAGFIAEVGDITRFSHPSQIQKLAGLNLIETSSGKHKGKTSISKRGRSKLRALLFRVTIPLVSKNNEFKMLHKYYTNRKENPLKKKQSLILLCCKLIRIFYAMLTKKVKYDPEKLIKDANIVDLPNAA

SEQ ID NO: 398015 - protein, 348 aa, unidentified
MTTVTDEYDYVVGVDTHAKTHTYAVLAADTGRVIDSAMFPTSPTGISRALAWMHRRAEGRLLIAIEGAGSYGAVIARVFQDAGLSVCDVRPPKRASRAGRGKSDEIDAVAAARTALATDVERLAEPRSDGIRAALRVLLMARQALDGRRTADRNALTALTRSFQLGMDVRKPLTDGQVREIAGWRHRPAEDAPMTTIRQEARRLAASIIELTEQLELNRDALADYVEQLAPGLQNIRGVGPVTGAQVLAAYSHKGRIRSEAAFANLAGAAPLQASSGNTTRHRLNRQGDRQLNRALDTIVRVRLTCDRGTQDYMQRRTAEGKSRREVRRSLKRYLVRQLFRQLNTVMA

SEQ ID NO: 398016 - protein, 391 aa, unidentified
MTSVGIDIAKDIHWASAIDAAGKVLLDRKVLNTPQELMRLADELRTLPAPLKVGVDVLGGIATLTQAVLLEAGFELVHVSGLAVNRAREGTVGGESKSDPRDARVIADQVRTRRDLRAVTASSELDIELRLLVSRRRDLSEEQTRRLNRMHDLLAAIFPELERSIDVGTKIALALLGAFVTPKELREASETELNACLGARASRTYARALLDTARRCAERQTISLPGETLTARIIKDLAREALRTQEQFRALDAEIQARLARHPDAALIRSLPGMGALLTAEFIAQVGSIERFKSAHALAAAAGLAPVLRQSGKVRFLRRPSGGNKGLKRVFYQSAFASLRCPQSKTFYARKRQEGKHHHQAVIALARRRVNVLWAMLEQRRPFSPHPSTRS

SEQ ID NO: 398017 - protein, 342 aa, unidentified
MTRAITGGVDTHADVHVAAALDPIGGLLGVEEFPVTPAGYALLLGWLGGFGTVGLAGIEGTGSYGAGLARHVTAAGVRVVEVDRSDRQDRRRQGKSDPLDAVSAARAAQSGRARGAPKGRDGAVEAIRALMVAKRSAAGERTRTINQARALIVTGPDDLRTRFTQHTAASLVAGLASLRPRPGDVVGYATRIALRELGRRAEFLDGQLERLDDLIVPLVTARAPGLLAPYGIGPNTAALLLIAAGDHPGRLRSEAAWAHLCGVAPIPASSGKTVRHRLNPGGDRQANHALWRIVFTRLGSDTATRAYAERRTAEGKSKAEIIRCLKRYVAREVYPHLRTAAG

SEQ ID NO: 398018 - protein, 388 aa, unidentified
MNRIIKIGMDVHSKNYTLCAMEPTIGAEDRIFGEVQVAPDYKEVICFIESLKMKLGPDNKYSIECGYEAGCLGYTLYHQLTGAGVKCVILAPTTMLTQQGKRIKTDKRDARLIAQCLCYGGYHPVYIPTGEDDAVKEYLRMRDDHKLALKKLKQQINAFVLRHGHQYSGTKWTIRHVTWLKKLELAPMYRETLDEYLASCEEQEAKIERYDKRIEEIASEARYQENAKKLGCFLGIRTHTALSLIVETGDFKRFAKGNTYAAFLGLAPGERSSSENVNRLGISKAGNTHLRCLLIEAAKGICKGAIGHKSKELRSRQSGQPAEVIAYADKANTRLRSRYYKMIRHGKKKNVAVAAVARELACFIWGMMTGNISIRPTAGTSGPAASQG

SEQ ID NO: 398019 - protein, 404 aa, unidentified
MYNAVGIDVSKGKSTVTVLQPGGTVIRKPFDVSHTSQNLNELAKFLDSLNGDTRIVMECTGRYHEPIRKALSEAGLFVSVVNPHLIKNFGNNSLRKVKSDPADARKIARYTLDNWAELRQYSGMDNTRTQLKTLNSQFSFFMKQKVAAKANLIALLDNAYPGVNRLFDSPARDDGSEKWVDYAYSFWHVDCVRGIGLKAFTERYQAFCKRHHYNFQADKPEKLFNASKELVAVFPKEKTYKLLIQQSIQQLNLASEHVERLRREMNELASILPEYSTVMGIYGVGKTYGPQLIAEIGDMSRFTHREALTAFAGVDPGVDESGQHKSKSNRASKVGSARLRKTLFQIMTTLLQNAPEDDPVYRFLNKKRSQGKPYYVYMTAGANKFLRIYYGKVKECLRNLEQES

SEQ ID NO: 398020 - protein, 364 aa, unidentified
MITYERSTLNDQRKDSQGKVVMESILETKAATLLEFFAGLRGSLFVTFEEGTWAAWLYDLLKPHVTEVLVRNPRKIPLLKQGNKSDKIDARKLAERLRLHDLKPVYHGETGIRMLRELARSYLTVVKDLSRVMNRLKALYRSWAIPCAGRDVYYRRHRSAWLDKIPEAGTRRRAEHLYQQLDLLQHLRQQARRELLAESRKHAITAKLRKIPSLGPIRSALAVALIQTPHRFRSNRQLWTYSGLGLETRDSGEYHFIKGQPRRRKKQATIRGLNKDYNHDLKGLFKGAATRASVKPGPFQEFYQRSLAKGIKPTMVRLTLARKIAAITLTLWKKGARATPSGWLYDSETVRAKCAMSVKRPGAN

SEQ ID NO: 398021 - protein, 339 aa, unidentified
MKKVFIGIDFSKLKFDAAIYSVDTKTIVSTEVFKNEQPGYIAFLQWVKENNLCRKSEMLFCGEHTGYYSGNLSLFLYESGYDMWLVSGLEMKLTQGIKRNKTDRVDACKIAEHACRYQDKAILFQPVSKALEEIRELLSYRERLVETRKVLITSAKEMKRVKDNASCDYIYQDSLEYIHSINASVHDCEKRIEALLKLDISLKTNYKLVSSVVGIGLVNAALILIATANFTQFTNARKFGCYCGVVPFEHSSGSSVRGKTRVSKMANRHLKTKLTLAAQNAVRFDPELKVYYQRKRSDGKNNWLVLNNVKNKLIHRIFAVVRDGQMYEKQYVHPLKQVA

SEQ ID NO: 398022 - protein, 415 aa, unidentified
MALKIVYKICCGIDVHKTFVVACIASTNDKGVTSYESHRFSTYTSGLKTLLQWLLDRNCKDICMESTGKYWIPIYNILEKDCSIVLAHPKYVKAIRGKKTYKKDAKWIADLFKHDLVAGSFMPPADIRQLRDLMRYRFKLTCFKSSEKNRLQNCLTVSNIQLGNVVSDTFGKSAQAILDKILENPADTSFDLEPLVFKSLKKKLPELRDAIDGYITPQQAGKLKIIKSHYENLESRKAELEELILALAAPYQQELAILQTAPGISSDFTAIGIISEIGTNMEAFPSAKHLCSWAGLTPTNNESAGKKKSVRVSKAGCYIKPLLVQCANAVVTSKKHPEIRNRYLRIKKRRGHKKAIIAIARMLLTALYHMLKNEENYNAELYRKSDLPPVDREITVEQALMLARNQGYKIKSATA

SEQ ID NO: 398023 - protein, 408 aa, unidentified
MNPLFVGIDVSSKNNVAYLMKPDGSKHSSFSVQNNLGGAKLLSERIVSALSSMRLSDVVIGLEATSIYGDNLVYALREDGGLGRFRRKIHVLNPKQVKKFKEAYPDLPKNDWVDAFVIADHLRFGRIAKEVYMDDYRYQALRTLTRARFDVIQNLTREKQRFANYLFLKCSGMAQDKGIQNTSATTIALMERFETVDNLANADLDDLTAFVAETGRGRFADPESTAKAVQAAARGSYRLPKTVNDTVNQAMAVSIASMRALKEQVKVLDKAIEQQFEIIPNTLTSIPGVGKVYSAGIIAEIGDIHRFTSQASVAKFAGLVWTQHQSGEFEAEHSRMIKSGNRYLRYYLLEAANSVRRCDSEFRRYYDLKFKEVNKYQHKRALALTARKLVRLVFRLLKDNRLYIPPEG

SEQ ID NO: 398024 - protein, 421 aa, unidentified
MKNTAARKRKQVPEGYLIIGIDPHKKKHAAVAITQDFTLRDRFKFDNTREGLEFLLRRVRTEMVKSDCRGVMFAIETGGHYWRNVAYYLDERGIPFRFINQYTLKRRREGKDLNRRKNDYRDSEVAAQLLCTGEFVESVIPQGVYAELRTAHNAYRRLVKERTRITNLVKGLLDGLFPEFTRVFKDPCGLTALSVLSTGSIPGVIAGMTEEEFVATIEAKHQGRLMRKKLMALHYAARSSIGIAAGAKSVSSEISFLVEKHELIRDHICVIERTLVKLVDETEEGKYLLSIRGLNYIAVAGLLAELGCFKSYRSAKQMIKMAGSNPTESESAGKKKSRTPMSKQGRPVLRYCAWTAVIPMLRFNPDFRAWAKQRRERPAHANPLSGREIVGAALNRLLRLSFALVKNQTYYRSPQLVQVIG

SEQ ID NO: 398025 - protein, 383 aa, unidentified
MKKTQETLRIEDSIKEAILYIAFELSNSKWKLAFSDGSRIRHKAITAGNLAQLQVEIDLAKRKFKMIEDVRVVSCYEAGRDGFWIHRYLESQGIENLVVDSASLEVNRRKRRAKTDRIDAGKLLRMLLRYWGGEKQVWSVVRVPSEQDEDARHLHRSLDSLKSERTRHRNRIKGLLIQQGIKVSNPSQKKFLEVLEKVRTWNGQAVPPGLNAQVVREYERLQIVEGQIKALEKEKQERLKNPDTVSLQKVAKLATLYGIGSVSSWTFVMEFFGWRQFQNRKEVGALAGLTPTPYDSGKSLREQGISKAGNQRIRALAVEIAWAWLRFQPQSNLSQWYMKRYANGGKRMRRIGIVAVARKLLIDLWRYLEYDKIPEGARLKSAT

SEQ ID NO: 398026 - protein, 389 aa, unidentified
MKIYVGIDIAKLNHFAAAISSDGEIIIEPFKFTNDADGFQLLVSKLESFDKNSIIIGLESTAHYGDNLVRYLVTELYQVCVLNPIKTCQMRKNNVRKTKTDKVDTYVIAKTLMIQDNLRFVSFFDLDMMDLKALGRFRQKTIKQRTRLKIQLTTYVDQVFPEIQYFFKSGLHQHAVYALLKEAPSPKEIASMHMTHLANLLKVNSHGHFTKEQAKELRVLAQKSVGANDSAISIQITQTIQQIELLDSQLEKIEAEMTDIMKFNDSVIMTIPGIGYINGGMILGEIGDIHRFSNPNKLLAFAGLDPSVYQSGNFQAKTTRMSKRGSRVLRYALVNAAWNVVRNNATFKAYYDAKRAEGRSHYNALGHCAGKLVRVIWKMLTDEVEFNLE

SEQ ID NO: 398027 - protein, 407 aa, unidentified
MDVIHDRCAGLDVHKDEVVACARVASGRKVVRTSARCPTTTRGLTSLSEWLSTHQCEIVSLEATGVYWKPVWHVLEATFPLVLANPGHVRASPGRKSDMNDAAWLADLVAHGLIRGSFVPPAPIQELRDLTRTRKQLVRQMAQHSLRLQKTLEDANLKIASFVSDLLGVSGRAILQGLIDGETNADRLLARTTGLLRADPEQLRAALEGRVREHHRFLLRLHLTQIEGIEDGLRTVDARLDILLRPFTPVVERLSTIPGVGTLVAQTVIAEIGVDVHRFPTPGHLRSWVGLCPRLDESAGKRRSTRLRHGAPWLKTVLIQAAWAAVRRRDAYPHAQFQRLKAKRGPKKAIVAVAASLLTAVYFMLRDDVPYRDLGVHYFDRHDTTRAAARLTKRLEALGFKVALSAA

SEQ ID NO: 398028 - protein, 373 aa, unidentified
MKKVRFLGLDVHAETIAVAVAEPDGEVRSLGIIPNREESVRKLVKKLGPVEQLQACYEAGPMGYVLYWQLTALGVKCEVVAPSLVPVKAGDRVKTDRRDATKLARSYRAGDLTAVWVPNDEHEALRDLVRAREAAKQDQLRARHRLSKFLLRHGRRVPSGIKVWTQRYQDWVKEQVHFEQPAQEFTLLDYVHEVEHMTDRIRRLEQAIGEAVKLAPPGMQEVIQALQALRGIAQISAVTIVAELGEISRFEQARQLMGYSGAVSSEHSSGKRTQHGPITKTGNAHLRRIAMEAAWAYRHRPTIGAALRKRQEGLSEDVKEIAWKAQYRLHKRYRNLVAAGKEKQKVVTAVGRELLGFIWAIGVQVERNSKRVA

SEQ ID NO: 398029 - protein, 352 aa, unidentified
MREYIAFDSHKRYSLVEREDVATGKIVQQVRLTHAPGAVRRYLAQCAPGTAVALEATGNWYWIVEEIEQAGLQPRLVHPRKAKLMMGLINKTDKLDVHGLNRLQRNGTLPTVWIPPGPLRDLRELTRTRLVLVEQRTRLKNRLTATLAKYGVPPSEYSDAYGKSARAELEARIEPLPEQTRWVCKQLLAQIDFLVRQIRQLEQRLEDLAEVTPEMERLMTLPGIAEILAATIALEIGDIGRFPDAPHLASYAGTTPRVHASGGRVRYGRLRTDVNRYLKWAFVEAANSVAVNHRRCPERHVSQLYDRLRQRKGHHKAIGAVARHLAEAAFHVLRRQEAYRDPVLERGCTSEV

SEQ ID NO: 398030 - protein, 397 aa, unidentified
MEIQDEAGRKLAARRLPEGAAGIARLHELIAAHLGKDDDPGQVTVGIETDRGLWVQALAAAGYQVYGLNPKQVARFKERYNLSGAKSDAADAHALADMVRAERHQLRAVAAGTAGAQAVKVAARAHQTLIWERTRHTLRLRSALREFFPAALVAYADPGLTAADTLELLARAPAPAVAAKLTVAQISAALKRARRHDVPARARAIKDALRSPQLAQPAAITAAYAAAVQATASVLTTLNEQIMHLEVQVEAHFLQHPDAQTYLSQPGIGTINGARVLAEFGDAPGRYASAKARKNYAGSSPITRASGRSKIVLARYIRNNRLTDALHTQALSALTASPGARAYYDKQRTRGLGHNAALRQLSNRLAGILHGCLKTSTRYDEAVAWPNAVAHTKPLAA

SEQ ID NO: 398031 - protein, 407 aa, unidentified
MDVIYPRCAGLDVHKQTVVACARVAGNGPLLQEVRTFATTTTGLLALADWLESLGVEHVAMEATGVYWKPVWHVLEGHFELVLANAAHVKNVPGRKTDVNDAMWLADLLAHGLIRASFVPPVAVQELRTLTRTRKQFVRERSAHVQRIEKVLEDANIKLGVVLTDILGKSGRAVLQALIDGENDPARLISHVSVRVKASKAELLEALRGHVSAHHRFMLKLHLGHIDALDKAVAELEKEVGLGLEPFRQAARLLSTMPGLSDVSAHVIVAEIGIDMSRFATPGHLLSWACLCPRNDESAGKRRSTRVRRGGKWLKTTLVQAAWAAIKVKDSYLQAQFHRLRARRGAKKAIIGVAASMLTAAWHMLRNRTEWRDLGAAHFDRADATKTANRLIRRLQQIGYAVQVMPA

SEQ ID NO: 398032 - protein, 328 aa, unidentified
MRNYSSSKTIKTIKTIGIDLAKSVFHLHGVDGEGKVVLRKRLSRSKLAEFMVQLTPCLVAMEACGGSHYWARKFQTMGHDVRLISPQFVKPYVKSNKNDAADAEAICEAVQRPNMRFVPLKSIEQQDILSIHRAREQVVRRRTAQGNQIRGLLMEYGLVIPKGMRVLHAQLPGILADADNELTLMFRELLQGLWKELINLEKHVDIYDQQIKVLSEQSESCKRLMTIPGVGPMVATALVASVSDGKAFKNGREMAAWLGLVARQHSTGGKPRLLGISKRGDVYLRKLLIHGARSALRWADKKHDKRSMWASSLKERRGENYRASALTA

SEQ ID NO: 398033 - protein, 359 aa, unidentified
MYFAGLDAHLKYVSIAVLDRRGQVALETSVSTREPEQLLAALAPYRPLEVVVETCPFWPWLYDLLVPAGIGFHLAHAKQLRAIAAAPQKSDAVDARLLARMLLAGLIPEAYPRPADQRELLRLLRHRTTLVRYRTRLAGRIHSQLHQQRLSLPREKLLRQATRAWLEETAWPRLTVEQQAIVTTHLELIDGLTPLVQALERRIATAAAGHATAPLLATIPGIGPYRSLLLAAELSPITRFARAEHLVSYAGLAPVTRSSGGHTHHGSIPQGANRWVRGALVSAIPTHVRWAPTSPVTMAYAQLKARLGWRVARVAAARKLARVVYVMLTRRTPWRGAPAAGDVRDEVQNSHVARTTSFC

SEQ ID NO: 398034 - protein, 453 aa, unidentified
MQVHGGRAIGGLPVIRVNVAGIDLGGERHWACAPGLDGNREVAAFGATTPELIRLGQWLKQRNVESVAMESTGVYWIAPHEVLEAEGLEVLLVDTRQLARVPGRNKKTDPTDCEWIQRLHSCGLVNGSFRPKEQICMLRTLVRDKGNLVAEAADWLRRMQKSLDQMNVRVHRAVSDLTGVTGMAILRAIAGGERDPRKLARLRDPGCRLSEEAIAEELTGHWREDHLFSLRQSLQMFDAIQERIAAYNQEIQRKLAEMTPEQRRGGSAPPVQNRGKKKGIQRRGQEPMRQALYRMSGVDATQIDAIGVETVEVVLSEYGPDLSRFPSEKQFISHATLAPRVAKSGIRPVKKKKRNSASTRVAAALRMAALSLRNSPSALGAYYRSIARRIGGDVAVFATARKLASLIYRLLRWGKPYVDEGAEAFEKRYEQRRIQSLTARAKALGYELAAVRS

SEQ ID NO: 398035 - protein, 325 aa, unidentified
MRQPQSAVKPKTQVALDVSSQMLDVHVWVDKKAFSVPNTDEGFEQISDVLFAYDVTMILMESTGGYEDNAACYLQLQGYDVVVINPRHARRFAQSMGKLAKTDRIDAAVLAHMAFMIDSGPDRDRYIKPVTNEQRKQLSRMSSRRRQIVDLITTEKQRLTHSDAYTRASINAIVSLLRAELKRIEADIIRYVKKNFSELATRLLAIPGVGMQAVTVLIADLAELGYVNRRRISALLGVAPFNHDSGKFKGQRRIRDGRQSVRNVLYMGIISATRFNPVIKTFYDRLIGRGKPKKVALIACMHKLVNIINAMMRTGKPFDMTLHGV

SEQ ID NO: 398036 - protein, 328 aa, unidentified
MIKSCCDPHLFTNMVTGIDCSKDYFDIAVLKDQKVVFEKRFTNDSIGFGQALEHVLGSHIAMEATGPYYFQLARFFHEQGQKVSVVNPLVVRRFSQMQLSRAKTDKKDAVLIAKFTALTHPKEWVMPSREIVHIRNLESYLEGLKARRGMLYNQLHAFEAAATIDAGLNREIKTELEHYDKKILNKEKEIENLIAESYAGLSQNLRSIPGIGPRSASLLIILTDGFKMFENHKRLIPYFGLAPRIYESGTSVKGKNHICKMGMGQVRKVLYMAATSAIRYNKACKELYERLRIKGKPHKVALIAAVNKLIKQSFAIAKTGRQYQLQPS

SEQ ID NO: 398037 - protein, 430 aa, unidentified
MSKHRYHSIECKQVDWSMLAQRVGGERVVLAIDVAKHDFVATLQVRAGEILARIKWPHPQETRLLLAGVAQLQAAARVEAVMESSGTYGDALRGQLQALGVAVYRVSAKRVHDAAEVFDGVPSLHDAKAAEIIGELHLQGRTQPWVQADARRRGLTAQLRQLRQLRQLRQLRQCKARYQGDLNRLEALLSRHWPESLVILDLDSVTLHHLLASYGGPARIQAHAAAARTLMEQVGRPGLREETLAALLDSTATTLGQPTVVEEDALLRWQAKGLIETHRELRTIERTIEQAVQADAALTPMAEVVGRVTSAVLVASQGSPLDYPDARSYCKALGLNLKEHSSGTHRGRLAITKRGPSLARFYLYFAALRLIAHDPVVARWFQAKTARPGAIKGKQVVELMRKLAKGLWHQAHGRRFSTDKLFNLSAVAGA

SEQ ID NO: 398038 - protein, 377 aa, unidentified
MERLKFVGLDVHAETIAVAVAEQGGEVRALGIIPNREESIRKLVRKLGPVEQLRFCYEAGPTGYALYWQLTRMGAKCEVVAPTLVPVKAGDRVKTDRRDALKLARNYRAGELTPVWVPDAAHEALRDLVRAREAAKKDELRARHRLNKFLLRHGRRPPMGVKAWTMKYLEWIKREVHFEQMAQEATLLDYLHEVEHAGARIMRLDGAIEEAVKCVPPKMRAVIEALQALRGIARVASVTIVAELGELSRFARAKQLMGYGGIVASEHSSGECTRRRGITKTGNAHLRRVVVEAAGTYRHRPAVGTSLRKRQEKVSEEVKEIAWKAQQRLHQRYRKLLAKGKNKGIVVTAVGRELLGFIWAIGIKIEATQKESLQQAA

SEQ ID NO: 398039 - protein, 344 aa, unidentified
MNTSMNHIVGIDIAKDTFTARLLALGESPTPIGEVESFPNSSEGYAQLKRWAVGTGAEPESSQVVMEATGVYWEACALYCHGEGFAVSIVNPAQIKFFARTTLMRGKTDTLDADLIARFGAAIKPRVWNPPGEAFEELQLFSRQRDAYVAMLTQERNRLHALSHRVHCPRQVIRMTKAHIRFLEKRIEELEQAFKDHLDQSPEWRRSVDLLTSMTGIGVVTAGVFLTETLAFSTMVDARQLTAYAGLAPAPHTSGTSVRRRSRISKVGNPRLRRAAYMASISGIRANPVLKAFYKRLREKGKPAKVALVAVARKLLTIAFALVQSQRPFDPLYISTKPGAKVCA

SEQ ID NO: 398040 - protein, 404 aa, unidentified
MEADVIWVGIDVGRYTHALCGIDASGAIVWKRQRVLNTTGAMRRALEKLSRVAKGRPLRFATEEPAGNASALLRMLAAAGETVYLAQPLRVYRFHLALGQPHKTDPYDAQVIAEFARQNASNLPLVRLGTPATQALRVLSRRAEALSKDLRRCVNRLRGVLAECAPEWLACKVFRDWSSGAALGTLERYGRISKLRRARVSSLAKALSQWTQGRYGEAQARALISAFADVSLPPQLEAAYAQVICSLVSQIRGLIAERGQVRALLAAESESLPAVAVLQSEFGYGPETAAVIVSEVGDMADFPTEAAFATYCGVTPLTRRSGVSRGSARLSRFTNKRLLRAVTQAALTAATHHPESRLYYQKKLAGRSDPRTKTLALIALARHRARRLYKLLRRASLPSAEVAA

SEQ ID NO: 398041 - protein, 376 aa, unidentified
MERGSLMLNTTTFVGLDVHARSIKAVALDAMTGEVRSATFAYDAAAVAEWVGSLDPAAKCVYESGVTGFDLQKKLTALGVDCVVGAVSKMIKPSADRKRKNDRNDAEFLARMLSVGNVVEVWVPDDECEAARDLVRALDDAREDLKRCKQRLSKFLMRHGYAFSETTPNGRRKGNWTAAHWAWIRSISFSDKADGDVLAYYVDAVRQAMEDKRRLEKLVEAEASKPRWKKRVDSLRCLKGVDAMTAADIVFEAGEFSRFKNARSFAAWLGLTPSEHSSGESARQGGITKAGNKHLRRVLVEAAWHYISASPHPKDLAKGQAPDPAARRHAAKGIRRLVKRREEMLGRGVHKNKANVATARELACWCWAVGRMIENG

SEQ ID NO: 398042 - protein, 418 aa, unidentified
MTSIPCTTPERTLIGVDIAKKYNDVLVDQPGHRRRRFRVANQSEDYQRFASFLDGLTESPIIGFEATGNYHRALAFFLAGRGFELRLISSVAAARTREALFNSWDKNDPKDAQVILHLLKTGVTQIYHDPLIHGINELQEMSKTHFQISLHKVRLQHSILTHYLPLYFPEAEKYMTSSRAQWFTHLLERYPCRTAVLKFSQAEFVKDAWSYVGRKVNKTAFLADFYETADKTIGLPVSEDSEAIRMFRIVLHEHQRLCQVRADIEAQAELVLGNDADFVRLKTLPGVGPILSLTILAEAGDLRRFRHHRQFLKYCGFDLSTLQSGQYRGKAKLSKRGNSRLRYAFWMAATIAIRMRDNSFRDKFTRYVASDPSDADLKRKAYTAVAAKMARVAHGMIKNGADYRPFHERAVPGGAIPS

SEQ ID NO: 398043 - protein, 311 aa, unidentified
MENYIGIDVAKQNFDLCCLNQKEIRQFENDTKGIRKALGAIKKLRPKLVVMEATGGYEALLAAELHAARLPVAVVNPRRIRDFARANGQLAKTDKLDAMVIALFAARMKPPTQEQIDHNSRRMKALVTRRNQLIRMHTAENNRREHVLDGVIGRSLNRIIRTIEREIGNVEKLIQEQLDSMPELRAKAKILDSAPGIGQTTAAMLVTEVPELGRLNRRQVAMLVGVAPINRDSGTFRGKRMTGAGRRDVRSRLFMPTLVAIRFNPVISRFYKHLLANGKVKMTAIIACMRKLLTILNFMVAKNEAWNSEFV

SEQ ID NO: 398044 - protein, 409 aa, unidentified
MPRSIGLDLHKASVVGCEWQPDAEAGHQETPFRCPTTPEGWSQLLTHLGGDAIVAIEVTGNAFEVYDTLLPHAREVVVANPLEMRRLGSGKHTDKGDAARLAQMLAMGVLPTVWVPPPSVRAVRRLLAGRERLLSMRTAAINQLKAIGRRHGLAWEWRDHDPRLATLTQELEADEWVLFEAARRQVAALDVSLRDVEGEILGRLKDDPPCRPLRTIPGVGPITAATIWAAIGDPRRFRTAKQVARYAGLDPTVMQSGERDQRGRISKNGSRPRRTVLVEAAHVVSRHDEGSLGTWYARVAPAKGRNKSTVALARKLLILAWKLMLKGQDYRDMKPERVRRKLAQLDKQVEQRPQGDQPATPPAPRPAPHPHPAQRVTSAKARGAVSARRGADYPARRGFPADRRGCLRW

SEQ ID NO: 398045 - protein, 311 aa, unidentified
MNQQDFFIGIDTSKDILEVAVRPTGERMSFANPEDGISLLIEFVKRFSARLVVFEATGGLERMAVSALAAQGLPVVVVNPRQVRAFAKAKGILAKTDKIDAPVIAQFGESIRPEIRPLKTEEAQQLEALLSRRRQILQMLTAEKNRLHTAPAWIRKDIQIHIHWLEKSLDKFTRDLDRLVKQSPIWRAKDKILQSTTGVGPILSVTLISQLPELGNLNRKKIAALVGVAPLNRDSGKFRGRRTIWGGRSVIRPVLLMATRVAIRFNPVIRAFYERLEKAGKMRKVAETACMRKFLTILNAMIKNQTCWRAV

SEQ ID NO: 398046 - protein, 368 aa, unidentified
MNSEYYTTIGMDVSDRTTKVCVMAKERGARRILEETTIPTTKDGLRAYLSGKSAAWPVVFETGAHCRWMKRVVESLGMKAIVANPSKLRMVSESNTKNDRNDARELARFAIADIELLHPVRLRGERCQQALRLMKARDMLVKVRTMHVNALRGFAKSMGFRLPSCPANRVHALDKSGWPADFESVAWPLMDVLETVDLKIRAYEAQIRSLAESRELKDKVDRVREVYGIGLLSGVALVASIDADPGRFRKARDAGAYFGLVPKQRQSRKMDVQCHITHAGSDFVRRLMIEAAQIAMRDSARDTDVKLKGCRICARGGKIAKKRALVAVARCLVVTAVALLKKPDAEYVPLSESARREFEAMRSWTTVA

SEQ ID NO: 398047 - protein, 343 aa, unidentified
MQVVTTVGLDIAKSVFQVHGVDAAGQVVIRRQLKRRYVLAFFQKLPPCLVGIEACASSHHWSRELKALGHTVKLMPPAYVKPYVKRQKNDATDAEAICEAVTRANMRFVATKTPEQQSGLTLHRTRHLFIRQQTAVINVIRAHLTEFGIVAPVGRKGVEELLNVVTDSSDKRVPVVARMCLAALGAQLRRLKEQILEFDRMIMAWHRSHEASRRLDAIPGVGPVLATALVASIADPKAFRSGRNFSAWIGLVPKQHSSGGRDRLGNISKQGDRYLRSLFMAGALAVIRYARIHGTKHRPWLTALLARRPTKIAAIALANKIARTVWAMMARGERYKEPVALAA

SEQ ID NO: 398048 - protein, 313 aa, unidentified
MKKTICGVDVSKARLDVCIEPGHRLASFNYDTAGIAELAKLCREHAVDLVVMEASGGYERRVFIELWEQDISCALTNPRSVRRYAEAMGILEKTDRIDASVIARFADAKGLAPTPLPSQAQQRLKALVARLRQVTDDLTVQKQRRSSMFDNAEMQASVDEVIALLKRQSRSLEGEIASMIDDDPLWAKLANTWRELKGVAGRTVAWLHADLPEIGTLSNKAIAKLTGLAPIANDSGKRKGKRPTRGGRAGVRSILFLVAAIAARHDRSLGEFRDRLLKAGKEKMVVRIALARKLLVRLNAKAREARAQYANAT

SEQ ID NO: 398049 - protein, 347 aa, unidentified
MRFYTRQHPFYCGSDLHARTMYLCIFNQAGEIVLHRNMKCEPKLFLAAIAPFRPDVVVGVECIFTWYWMADLCAAEGISFVLGHALYMKAIHGGKAKNDRIDAHKIAVLLRGGSFPQAYVYPPLMRSTRDLLRRRLHFVRHRGALLAHIQNTNSQCNLPDFGGRIIYKVNRPGVAERFGDESVRKSIEANLALIAHYDELIRGLELHITRTAKQHDADTFHLLHSVPGIGKILALTILYEIHDIARFPRVQEFSSYSRLVKCSRESAGKHYGTGGSKIGNAHLKWAFSEAAVNFLRKNPPGQKLLARLRRKHGKGKSLSILAHKLGRAVSYMLSHHRTFDMQQFLIV

SEQ ID NO: 398050 - protein, 412 aa, unidentified
MEVIHSRCAGMDIAKRDAKVCIRLAGSGRRRTVETVTTWGATTRQILALREHLVAERVTCIVMEATSDYWKPFYYLLEDLVGVEVMLVNARHVKNLPGRKTDVADATWLAQLGAHGLVRGSFVPPAPVRQLRDLTRTRTAVTRERGREIQRLEKVLEDAGIKLSSVASDITGVSARAMLEALIAGNSDPTAMADLARRRLREKIPALTEALTGRFTGHHAFLTRTHLNLIDQHTAAIDELTARIEVVIEPFRRFRDLICTIPGIGGNTADVIVAETGADMSRFPSAEHLASWAGTTPGNNESAGKVKSSRTRPGNPYLQGALGIAAISVSHTKHTYLAAKYRRIASRRGPLKANVAVQRAMLIAIWNMATTDTAYLDPGADYFTRLNPEKARTKAIRQLEAMGYHVTLEQAS

SEQ ID NO: 398051 - protein, 436 aa, unidentified
MRGCRCSMIMGFTKPIEHFNLQRKKVITMNTLYVGIDVSSKSNVVYLMLPNGDKHSNFSVANSHEGSTQLVKRILSALTSHSLDTVLIGLEATSVYGDNLVYFLREDATLAPFNRKIHVLNPKQVKKFHDAYNDLPKNDYVDSFVIADCLRFGRINKEIYMGDYRYKALQNLTRARFFAVQNLVKEKQRFMNVLFKKYSTMTQEKVFSDTFSTTALAVYDEFESAEALANMDLHELTDFIIEKGKNRFPDPDAVAKAIQKAARNSYRLPKTVNDSVNQVLSISITSMKALESQIKEFDKAIKAQMELLPNVLISIPGIGPVYSAGIMAEIGDINRFNSQAALAKYAGLAWKQHQSGGFESEVTRLIPSGNRFLKYYLCEAAFSLVRCDKEYSDFYHLKYKEVNRCQHKRSLALTARKFVRLVFRLLKDNRLYCPAK

SEQ ID NO: 398052 - protein, 393 aa, unidentified
MYLVGIDIGKLKHSFCLLEKETGEILVEPVFFENNRDGFNVLLSSFKHLPQKDILIGMEDTGHYNLALLKFLLDRNYQVALINPVATNLTRKMQGGISKNDKLDTLTICDVLSSSQRVKSYRISKYSSFDLYEQKLLTREHHNLKEEENQLTNRLQKCIDVVFPEFNSLFKSKYGIVYMNILKEFGSADAIAHADIRTIRKCFDTGRGKHISLTAEELKEAARNSIGFPSSSEATQIKHLVARIELIKEQIAEIDKKIEEFSIQNTSPILSIPGISHFSGTSILAELGDIHNYSKPSQIIKFAGVAPLTYESSQFTAQHTAITKKGCKYLRKTLYQIITPVIQYNPVFRKFYLLKIAQGKGHRCAQGHCVRKLMRVIYHLLSTGTQFDPALLR

SEQ ID NO: 398053 - protein, 424 aa, unidentified
MDGCCRLCTPIDSVRRFGTFTRDLIALADWLQQCNIRSVAMESTGVYWIPLYQILETHGFEVFLVNAHHVKNVPGRKSDVSDCQWIQYLHSVGLLKASFRPPDEICVLRSFWRHREGLVQMAAEHIQHMQKALSQMNLRLHHVLSDIVGVSGTAILDAILAGERDPATLANLCNRRIRSPRQTVAKSLEGDYRPEHLFVLRQSLTAYRFYKHLMAEVDLELEQRMRELPRAEHAPDKRPSGTKKRIYQRAGNEPSFDLKAELFRIAGVDLTDVPGISTLTAHTVLMEVGTDVSRFRNASAFASWLGLCPEKQVSGGKVLYTRTRKDKNRAAIALRLGAHCLYHAQNYLGDFYCKMKWRLGAPAAVKATAHKLARIVYHLLSTRQPYSDEVFARCDQQTSARAEMRLRKQAAELGFQLAPITETA

SEQ ID NO: 398054 - protein, 419 aa, unidentified
MAQRHDKPIISVVHPICCGLDVHKASIAACCLATAADGGEDMEIAEFDTFTDDLLRLRDWLIERDCPVVAMESTGVYWRPVHNVLEGYVKVVLVNARHTKHVPGRKTDLADSQWLAGLLRHGLLRGSFIPPQQVRQWREMTRLRKAYQESLADFKRLIHKLFECANIKLGVVVSDLFGATGRYIMNLLATGEAELSADDIAAGAHGQLKQKINELCRALQGFFTDHHRYQLRLLLATVTELEQHINLIGEHVKELMADHHAVLSRLQEIPGVSEVASATILSEVGATLEEFPRCAALASWSGLCPGNNQSAGKRKSGRSPVRGHRLKTIMVEVAWSAVRKPGSYYKDKFQRLRARRGAKRAIVAIAHRLLKAVYYIIKEGRHFRDLGAEYLTHKHQTGKLGSLKNQAKLLGYELTPLAA

SEQ ID NO: 398055 - protein, 350 aa, unidentified
MQKQSNTLNFEGQNIYVGIDVHLKSWTVSILTEHLHHKTFVQPPSPEALSSYLHAHFPNGNYLSAYEAGFSGFWAHYKLVEMGIQNIVVNPADVSTSQKERLQKTDAVDSRKIARSLRSNELTAIHVPCRETLEVRTLLRSRDALVRDLARMKQRIKAFLYYYGIGYPEEFRHSGTHWSRAFMNWLRNGIRMDTEEGSAGLSLLLDSVESQRRLLLEATRKLRALSRSDGYATGYEVLRSVPGIGMITALSLLAELEDIRRFANSDRLAGYIGLVPTSHSTGEKDNKGEMTFRGQMQLRSKLIECAWFAARLDPALNMAFSKADPADGAQQGHCADSPKAAEPDLLCLEI

SEQ ID NO: 398056 - protein, 345 aa, unidentified
MDDTVATIQLYVGIDIAAETFTAAWLVPTGKPTAPFTREQTPAGYTALQQRLQTTSVPPAATAVVLEATGSYWVALAVTLHEAGYHVSVINPLQAHHFAKAQLRRAKTDALDAQDLAQLAATLRPPRWTPPPPVYHEVRQRLVTRDGLLTMRQQARNQRHALLQWPVVVAAVRQQLDEVIADLDARIATLEAEIAAALKQSVWAATLARLTSAPGIGVVTAAWLLVATLNFTLCTGPAALAAYAGLAPMPRESGRSVRGRPRIGHAGNGRLRAAFYMATLSAAQHNPAIKAFYDRLRAAGKPMKVARCAAARKLLHLAWALGTKQRAFDPGQQQQQAVVLADQAA

SEQ ID NO: 398057 - protein, 407 aa, unidentified
MSEPPSSPQRFIGLDVHKHYLIAIAVNPAGEQIGGPWRAQLAHLAEWAHRHLTAQDAVVLETTTNAWTVHDDLRPLVHSVTLVHPPHVALIVRAQVKTDNKAALALAQLHAKGLLPAVWVPPQNVREQRATVAQRTKFTRLATQAKNRLHSVLHRHHLPLPPDGSPFAPANRDGWLKLPVSASERARLQSDLATLAFAEQQIAALTTALTADAAQDERLPLLVQLPGFGAINALTVLAAIGDVHRFETAKHLVGYAGLGARVHDSGQLHRTGRITKAGRRDLRAALVEAAQTAANTHPHWQAELARLEPRLGRNKAIVAIARKLLVAVWHVLTLETADRFAEPDRVARKLLNFTYTVGRANRRPQQSTAAYVREQLDRLGLGAEVNRIAHGQRAIPLPPSKLKTAST

SEQ ID NO: 398058 - protein, 417 aa, unidentified
MNDSEHWKQHRAYGALDWASEKHSVIIVDQAGKVIEDFEIEQSALGWKKFREKLQPYGSIPFAIETSQGAAVEQLLEAGMIVYPLNPKSAQAYRDRKAPSGVKDDRLDAWSFADALRVDGQDWKALRPEEPLIKELRLLCRDEVSLIEQRTAFISQLRHALAEYYPAALEAFEDWTSVSAWMFLQRFPSPELLALAGKRQWQKFLHSRRLWGSDQGPRRMEVFAHATELSGSPPTVKAKSLLALSLVKMLFVIEKQLAVYRQRIEELFARHPDHDLFGSLPGAGPKIAPRLLSEIGDDRERFDGDARILQCYGGTAPVTKRSGKYRHCHQRWACDKHLRHAIYLFAEKSLSRCVWAQTYYQHHRQKDRSHANALRRLGHRWLKIIHKMWIDRTLYDPELHHRNQLQHGSWIFQLKEC

SEQ ID NO: 398059 - protein, 331 aa, unidentified
MRASSPYRKLEKLIPMNKTNHTEVNIGIDTSQSQLDIYVRPTGEYFSVENNPKGAKEAAYRLRPYQPTRVLIEATGRLEMHFVCAAHKARLPVVVCNAGQVRQFARASGRLAKTDKLDAQDIAHFGEALQPALTELKPEKLRQISDLITVRRQCLDMSTMQKNRLLRMPKSVQKPIQRILNAVRKEIERIDRQLDKLVEAVPQWRNQRDLLMSAKGVGKVVAYTLMSELPELGQLNRKEIAALAGVAPMNRDSGSYRGKRHVYGGRRKVRTALYMSMLSATQYNPKIKSMYERLVAAGKPKKVAIVACMRKQLVILNTMMKNGTHWDEKLA

SEQ ID NO: 398060 - protein, 516 aa, unidentified
MRAKLQAIKQELRRRMHQPIPEQGKWLKQVVTGYFNYHAVPTNGPTLTAFRFHVTNLWRRTLRRRSQKDWTTKERTARLANDWLPKPRILHPWPDARFAVRHPRWEKLWGGRAEVVAPSSSIRTDGGCPMAQVNDLSRSLTAFDPISTLVVVVEMSKASWLVSGAVPGVERQPLKKLEPDAPALLRLIERWRNEAVRAGRPISRIALAYEAGRDGFWLARWLIARGIDAHVIHSASVAVSRERKRAKTDRLDAAMLMRVFLGWLRGERGHCGMVAIPTMEEEDARRPSRERESLVNERSRITNRMKSALARLGVRGFKPHLRKAPERLAGLRTAEGTGLPTNIIEEFRRDMARLALVREQIGSIEKTRAERLERAPDTGPHAMVRLLARVIGIGIETADMLVREILSRKLRDRRAVARYAGLTGSPDESGLNRREKGLAKAGNARVRRGVIQLAWRFLMFQKDSALARWYRTRTEGPSGARKTTMIVALARKLLIALWRLVTTGEVPDGVELRPAA

SEQ ID NO: 398061 - protein, 316 aa, unidentified
MDAVLECCAGLDVHQETVVACVLFGPLEHKPKKEIRTFGTTTPELLALADWLEEQKCTHVAMESTGIYWKPIWNILETGSFQLILANAQRIKNVPGRKTDVRDAEWIAQLLRSGLIEGSFVPPVEIRDLRDLTRYRKKLLQDATQEKNRIHKILQDANIKITTYISDIFGVSGRNIMESLLDGEVITAEKITKMVRGKLKSKVPGLVDALNNRLRSHHREMIRFSWKHLEYLERTILDIEAQIELCLTPYRQEVELLDSIPGVNQTAAAVMIAEFGTDMSVFPTDNHISSWAGVSPGNNESAGKKKELGPHQGTKH

SEQ ID NO: 398062 - protein, 461 aa, unidentified
MRSKKSAGRRKESAQPKVDWKALEIVPPDAAGIDVGSSEHGVAVSPERDPEPVRCFGCYTADVREMARWLLEKGVRSVVLPSRGVYWRPGWEVLEQPGLEVFLVNARHTQNVPGRQSDVEECQWLLKLHRLGLWNHSFQPTDEIRVARSLWRQRGNLGAEASSAIPRIQKTWIERNVPLSRVLSDLSGVSGRKIIPAILEGERDPGAWAAWVEPGGKATREDIAQSWEGNWRQELLFVLRQEVELYRTYPEKIYDCDLELREHRESIGSKVDLPAQPLGPQPKGKKSGRNTPPFDWRTELYRIPGMDWAQGNGIEVVPAQTVRAECGADRSAFPSQKQFTSGLGLVPTHEQSGGKILNRRTRQVVNRAATAFRTAAPTLVRSPSYLGAQYRRLRTRLGAPKAITAMARKLACLFYRLIQHGQQYVDKGMEYYEARYREQQIRSLMKRALKLGFQLVAPETA

SEQ ID NO: 398063 - protein, 340 aa, unidentified
MKGTTIGIDIAKNVFEVYVEDEAGQVVERRRLSRKKMVPWFANYPCAVVGMEACGGAHYWGRELAKLGHTVRLIAPQYVKPWVQTNKSDQADARAICRAVQEPGMRFVAIAGEAQQAVQAVHRVRSRLKENRTALVNQIRGIMLEYGVALPKGVAAVRKALPLLLAEERWAPLIRQFLLEQHAELLEWDTRIVAVTQAITQENARQPVCQRLEQVRGIGPLSASALWLKAGGQPYQNGRHLAAALGLVPKHTGTGGKIRLGGMSKRGDRYLRSLLIHGARSVITHSREKQDPVSRWVHRLVERRGMNKAVVALANKNARVAFALIHEDQPYDVTKMCRAA

SEQ ID NO: 398064 - protein, 406 aa, unidentified
MTVMIGIDPHKGSHTAVAVTAAEEPLGKVRVRACPAQAGQLVAWAAAWPERIWAVEGAPGLGRLLAQQLIAAGERVLDVQPKLAARVRLLQTENTGKSDPNDALSVAVAALRSKAQRPVLADDHATVLKVWAKRHRDLSRAHNQVACRLHAVLCDLVPGGIANEITVSRAARILGQITPAGPAAKARRELAAELLADIRHLDAQRREVKKKLAAAVKASGTSVTAVFGAGPVIAATVIGDVVTVARFPSRDHFAAYNGTAPVEVSSGNKKIYRLSLRGNRRLNHAIHMAAITQIRHKHSDGRAYYDRKIAEGKTHKEALRCLKRRISDALYARLRADARNAAAACVKDPGGQPGNHSVSRAAGSHPAHRLFGQATPGPQTSLRPAAALTPAMPPSGPPANKTRRPT

SEQ ID NO: 398065 - protein, 335 aa, unidentified
MKKIYVGIDISKEKCNLCYRSGLDIVREEECPNDVNALKKTFKAALKVLGASLEDVLVCAEYTGRYIYPLTVACQELGIFLWMDDPTRIKNSMGLTRGKNDAIDAARIAEYAYRYSDKAIRYHIPDAALVSMKNLLADREFLLIDKKRYQSQLSDQKRYMAPGDFKHKNSRWKKVIKSIDEQIAAIDAEIESLIAADPVLTHQKELLVSIDGIGDRIAINMIAITGGFTRFQNARQFCSFAGLTPYKYDSGTSVRSKAKISRRANQTMKALLHMSAVNVATRMKSGEYKDYYERKLKEGKHVMCILNVLRAKLVHRMFSVIRRDTQYTKEYKPAC

SEQ ID NO: 398066 - protein, 355 aa, unidentified
MSQEKYIGMDVHQATISVAVMDARGKLIMECVLETKAATILEFIQGLRGTLAVTFEEGTSAAWLHDLLNPHVNRLVVCDPRKNALLKDGNKNDRVDAQKLAELLRTNQVKPVYHGKHGTRALKELGRSYLTITKDGTRVMNRIKSVYRSWAIPCAGTRVYTRRHRAEWLAKLVEPGVRIRAEHLYQQLDSLQPLRLEVRRQLLLESHKHAAVKLLRQVPAIGPIRAALLVALLQTPHRFRTKRQLWAYSGFAVEVHDSGEYRWVRGKLQRNRERITVRGLNDNHNKEVKSLFKAAAISASTRPGPLHDFYVARVESGMRPTMARLTLARKIAAITLTMWKKGVSFDPKQLHRQAA

SEQ ID NO: 398067 - protein, 346 aa, unidentified
MTIVGCDFHPSGQQVAIFDATTGEICERKLMHHEGEAEQFYRQLPVPSLIGMEATGNSQWFVQLLQTMGHEVWIGDAAEIRASYVRKQKTDKRDAAHLLKLLLEGRFPRLWVPDAEVRDLRQLLIHRHKLVEIRSRVKNGLQHLALNQGMQKKHRLWSVAGQKALRELPLVGWTACRREDLLQLRSMLEQQIAQLDAAVAQAAEKNPQVRLLMTQPGVGAITALVFVLTIGEPDRFQRGKQIASYVGLIPREHSSGGRQRRGAISKQGNRLLRMLLVEAAQSVVRHDPEFRKQYLHRCHSKPKGVAKVAAARKLAVRLFWMLRTNTAYPEIVRIESSPRIALVGAS

SEQ ID NO: 398068 - protein, 352 aa, unidentified
MTVIGLDLHKRYITACAMTEDGAILAEQRRVVPEVEALEAFFAGLPAPLTVAMEATLYWAWLHDQLVARGITVLVAHAYQVKLIWQARAKTDPIDARKLAELARTHLLPTVWVAGPELRGQRKLLRGRAYLVRMRTSVKNRIHGHLMAENCRTAVTDVYGKAGRAWLETLALPKATRLQVDLLLEVIDAFNVRIKRMDRDVAKLARHDAVAQQLQTVPGIGVFGAMLLLAEIGPINRFRSSHELAAYAGLVPSTHSSGGKTTHGTVGRAGNSWLKWILIEAVQALKLAPGPIGAQYQRLLRAKGKQKATVAAARKLCCYLFWMLQHGWTYEQWLSQHHKLEVRPAQRMGTAA

SEQ ID NO: 398069 - protein, 445 aa, unidentified
MKLFVGLDVSSEKLDACFMTDDSTCSVLKEASYGNSQLGASQIKEYILEFSQKFEIESLVIGMEATSLYSFHPAMFFKEDLELNQLNLMVSVEQPNKIKKYRDIFEENKNDQIDAFYIADYFRIQRQVNSIIKEEEYLALQHLTRTRYQLIKQLVRTKQHFIENIYYKCNTLSKELKAEGGSVLSATLVTLMTEDYTMDQLAELSLEEFANLIQKLGKYRFKNPEGIAKAISKAIRSSYRLGKVHQDSVDIVLGVLAKEIRSLEKLIKDLDKAIDDLVVVLPEYQCLTSIPGIGPVYAAGILAEIGPINRFSDESKLAKYAGLYWRQNQSGNSEYENTPMAKRGNRYLRYYLVEATNSVRRYEPEYHAYYKKKYAETPKHKHKRAIVLTARKFTRLVDTLLRNHQLYMPPRSVGMATDFFDKFYKVQNFFPYAIPIVLDNEPPRM

SEQ ID NO: 398070 - protein, 315 aa, unidentified
MEQPPSTPSFVGMDVSKDRLDVHVRPSGEAFTVARDPIGLEKLVADLRGRDVVLVVLEATGGFETTVAAALAGAGLPLAVVNPRQIRDFARALGRLAKTDALDAEAIALFAERIRPEPRAIAGPDAQALAELVARRRQLVEMIGMEKNRRRQAHAARVQKSLAATLRTLEAQLAALDRDIDGAVRASPVWRAAEDLLTSVPGVGDVTARTLIADLPELGRLDRRRIAALVGVAPLNRDSGQWRGHRAIAGGRTAVRNTLFMATLTAIRWNPAIRAHYTRLVAAGRPKKLAIVACIRHLLTILNAILRTQTPWQNA

SEQ ID NO: 398071 - protein, 385 aa, unidentified
MKKNNITKQNVTKPRNRKASKARQAARGKSVGKVKQVVGLDLGDKSSRYCVLDSEGTVQLERGVATTRQGLSQAFAKMARSRIALEVGTHSPWVSRLLENLGHEVIVANARRVRLISESSGKDDRIDARTLARLARADPALLYPIRHRGEQAQQHLAMIRARAGLVDQRTALVNTARGLTKPFGERIGKCDADQMGVEKIHKLAAGIQAVLQPLLMVVETMTEQIRSYDQELAEIARRDYPETALLEQITGVGPLIALTFILTLDDKERFRNSRDVGCFLGLRPKRRESGQSQPQLGITKEGDVYLRRLLVQGAHYILSKRGPDTDLKRWGLKLAGNGDKRAKKRAVVAVARKLAILLHHLWVSGEEYEPLRHSQAQAVGSAPAA

SEQ ID NO: 398072 - protein, 346 aa, unidentified
MERYVGLDVSLKQTAICIVDQTGAILKEGMVPTDPEAITAFINAHAENVVRIGMESGAMSTWLWTELNKMGQPIICIDARHAKAVLKMQINKSDRNDAVGIARIMQTGWFREVRVKHLDSHAIKGLLASRALLVKVKRDIENQIRGLLKNFGLVIGRAKMNTFTRRAEELIDGNPALTASTGPLLTAREAIAQQIADLDCKVLRLARSDAQVRRFMTAPGIGAITGLCYLATIDDPIRFKKSRSVGAYLGMTTRRFASGEIDWTGRISKCGDAMMRSYLYEAANVLLTRVQGWSTLKAWGVRLAKRIGIRKAKVAIARKLAVILHRMWIDGTDFQWTSKEVAEQPA

SEQ ID NO: 398073 - protein, 342 aa, unidentified
MSVYVGIDVHRKRSQVAVIDAKGKVVANRNVSNAVEPILKVIGGLPLGTPAAFEAAYGTSWLVELLEDYGFAPHLVHPSRCKAIASARLKNDKVDAAILAQLLRADLLPEAWIAPPPVRQLRALLRHRVALVRLRTLLRNRIHAIVADYGHDRPAGGYWTGPGRAWLAALDLPAISRELIEDDLGLIDALQDRIDRLDWEIRQRGRADPRVKVLTQLPGVGPFTALVILAEIGDVNRFASARKLASWAGLTPTVRGSDRAAHYGHISKQGSVWLRWVMCEAAQTAKRSPQFAATFQAIAKRRGKKIATTAVARKLLTRAWHLLADAGHTTAPRPTAPPAAAR

SEQ ID NO: 398074 - protein, 427 aa, unidentified
MNYNQNHKISQVTPSTLVVGIDIAKDKHVARAQDDRGYEFGKRLIFENQIEGFETLLEWIFKLQKENDKKHVIIGAEPTGHYWMSLGYYLISKEYDFVLVNPMHVKKSKELDDNSPTKNDTKDARVIAQLVKDGRYSIPNLLDGIYAELREAIKLRDQLIKQQTVTEGRIQNNLQRYFPEFHDVFKQWDGKAAFYTLRAFPFPSDIRDKPPENILAEWKTVVKRGVGIKRATKLVDKAKKSVGIKIGLHFAKKELQSLLDQYELYEEQLKELDLEIEELLEEIPGAKEMLAIKGLGVTTVAAFFAEVGDVSNYHHPQQLVNMAGLSLREHSSGKFKGETKITKRGRKKLRKAIYLAIRPLVANNPTFQALHRYYTTRRENPLKKQQSLIALCGKLLRVLFVMGQKQCEFDGNKLLKGLPQIETLQAA

SEQ ID NO: 398075 - protein, 386 aa, unidentified
MQVKACWRRYGVGVDVHSQFAAVCVLVPDHQHNEINKHERECSLHPAQLRECLAWVRATVRSAGIEPEPLVYAVESTATFHYPLVRCWGGQPIIVNPSLACQYKARKTDRFDASVLAYQALTGLWQTTVLPSEQTEQLRLLMRTRRKLLRQRTSLYNAVGTRLAQWYCPLMGATPRSKLIRAIVEDAERGEFKSGHPCFSMAHCVPNLVWQRLVEMYSLTDNLTSLASSYEKQAQQLVDQDLFRLHQSVPGVGQLTALVWHAEVEPAERFARRPAVVAYCGFDPTPMVSAGKTVATRCRKGNSHIRCAIVQAAHSALNGKSHLAAVVRRRANKHRNVLISMAGRRIVEQLYRISLTRRPYEDPSRGEEGSPATPASEERVGVAHDD

SEQ ID NO: 398076 - protein, 462 aa, unidentified
MSKLSKSNTALEEARPFQAMSKVNDNTAGVDIGVREIMVCIPGPENTQLVRSFGNYTVDLYAIAKWLGEHAIHTIAMESTGVYWIPLFEELEQHGFQCLLISSRSLRRVPGRKTDVIDCQWIQTLHTYRLLTGSFRPEADLVALRTLLRHRARLLEHRAPHILHMQKALLQMNLQLSQVLTDITGETGMHIIRAIVGGERDPYKLAAMRNHRCKKDEEEIAKALTGTWRAEHLFVLEQSLALYDFYTQKITECDTEIEKNYSVIRPGLQSNESPERITDRRFLSKHRSKNAPKSEQELRAHLKRICGVDLAAVDGISVSLAQTIASEIGTDMSKFPNEKHFCSWLSLAPKNEISGGKVLISRTLKSKNRAGQAFRLAVVSVMRADCMFGVFYRRLKSRLGPAQATVATAHLIARVVYRMLKYQVEYEPLSVAEYEKRYRNQQIKYLERRANKLGFQLIPVAA

SEQ ID NO: 398077 - protein, 342 aa, unidentified
MDEYDGRQFVGIDLHRQRSVIVRQSESGEQLSAVRIVNEPVALELQLEQAGADPEVVLEATYGWYWAVDVLQACGARVHLAHPLGVKGFRYRRVKNDVRDAADLADLLRMGRLPEAWIAPPQTRELRELVRYRAKLVAIRSGLEAQIHGVLAKAGVLIAVSDLFGVTGRQRLAKVPLGPAYAQRIRSLLELIDILDSHEARFAVMIAERLATHRGYQAIQQVPGIGPTLAAVFVAEIGDVHRFTDAAHLCSWAGLTPRHRESDTVVHRGHITKQGSKAVRWAAIEAVQRHPTTAKIAADKHRIEARRGKNIAKLAAARKLLTLIYYGLRDGQIRALDRARPA

SEQ ID NO: 398078 - protein, 419 aa, unidentified
MNKDSNLVERVIGFDSHPDSFTAAVLRGQTPAQAVTENVFNKVPMAQLRSWAKKHTTAQDLFVLEASGNSFQVVRSLAAIDRRALVLESCQMGKLKEAHANNDKISAVRIAKAHLAGTAKTVWVPDPKTQERRDWFHIHRKAVKRSTQMRNRLLSYLSDNGVRLKKGTQLTQTKAAEEQLRQTKDWSLRQWQVIEGMLMELRHAHEQRKHWRSLIAQEVIADPLLLSLVRLCGVRDQVAFALGAIIGDIKRFAEPRKLVKYVGLNPAFDDSGQTEWKGGIAGHGRKDVRCLLIEAAQSILRSKDPLAKWGKKLLARKSSVKLAVAAIARKLIVAVWYLMMGRWTSLEEMDERLAPKVGKIITQVGGQVLKKLGKTSADLRAQMEQSLKTGRIYVLDLNKKFTPRPKAQKQTLATEYGIA

SEQ ID NO: 398079 - protein, 452 aa, unidentified
MARLELTAFDAIVGFDQGYEAHHLYVINLHGERLFDAKVNSDAKGLQDWLEKLRHTLGHQNLGRVALATESPSAPWLPQMMTLGIAVFTINPAQIAAARKLEAPSAAKDDRRDSRLLAEFLLFKPGCYERLQPPPDVIDELRLLLRRDHQLHKAHHQQAEQLRDQLHNSLPQLLPFSSGADDPWLWQLLAKHAPTLLTVLPPAEACQQVLDAFRVRRLKGEELHQALALGLLPHLTGRRAQTLLDLLVGQVRTLQAVWQEWRAIQTRVAKIMAELLATEPHTAAGPTTTETSSVSMAATGTPSGAGVAVAPEALRPLSVAEVAQLLNSLPGSGPRTLPVLVVEGWLQWSTLDLAHLRSYSGVAPVVEASGKQHRVRMRQACNQRLRDALRFSVDAFRHHDPRAKAIYDGLKEAGRSHWRALRGVGDRYLTLAVSVLRHRTPYDPARRQLAEA

SEQ ID NO: 398080 - protein, 335 aa, unidentified
MLYVGVDAHKAHSQMTVMDETGKVLERRRVGSSREGMLEALGPHRGEPMKAVLEAGYGWGALYDWIGEAAEEVVLTHPLKVRAIADAKIKTDRLDSEMLAHLLRADLIPEAYAPSKEVRAKKRVLRQRMFLVRVRTMLKNRVRALLYQHGVEPPPVSDLFGKKGLAWLKEQPELPEPDGWLLSEEVELAETLKEKIRATEGLIKELAKEDKAVGWLRTLPGIGEFFSVLIRHEVGQMERFPTAKKFASYTGLVPSTYASGKRITHGRLTKEGNKWLRWAFAEAVSPAVRSSPYLRAYYQRIKARRGTKDARTATARKLAELAWTVWTERRGYEER

SEQ ID NO: 398081 - protein, 509 aa, unidentified
MTVFKKRHPSVANILSQAKHNRKVLFIAMDYAKSTHKVLFINGDGEELRQPFDVHNNSEGFAYLLEAIAKTCKKRAINRKHVVLGGEGVPSFARNFILSLSDKGHLVLNIHAKEAKEMRQTEQASTDKLDLIGIAKSMLHGSGKPFGPHRYDSRLQDTNNPNKICITAKPYAELFADQETLQILTRNRGRLVQERTGCTNRIHTLIDQLFPGFLSSACPVSPFTKASIEIMRLPQFSAGHIARQKESTLAAKLKEWGTHDPDKSAAKLILMAKEALSSSQRLECCLQTVLQSHLAHYEGLVSGIATIENNLHQRLTNSPASLLLSIPGIGVVLAAGIYAELGASLLLHPLKELCSYAGIVPRVKQTGGPNKPAWTGKVRKGCNRILKNYLVQAAAKMRDWGPEGMKDVYEDLKDNGQHADFIIAKRLLRTFKYMMVHQTIYLPPSLRGEWNEDTRESMTTYLATTKDKIAAKWNRVGQARDAMEPTRPLGLWWQTIEAAFRNICGDEAA

SEQ ID NO: 398082 - protein, 355 aa, unidentified
MLIIGCDYHPSAQQIAYVDSESGEFDERPLRHREEAEQFYRKLREQGRQVRVGMEASGHARWFERLLRELQFELWIGDAAVVRTKRVRKRKTDREDARLLLGLLRENRFPRIWVPDAENRDLRQLLWHRHRMVQMRTRVMNQLQAVALNEGMRRKKALWRPAGRKELESIALAPWATRRRQDLFELLDQLTPKIEELTRALEQEVEKRPVTRRLMTHPGVGPLTALAYELVIGTPERFHCGKQIASYLGLVPEEESSGERRRLGHISKQGNVLLRFLLVEAAQVTVRSQQAWRNKFFHLAMRRGRKIAKVAMARKLAVHLYWRWRQGCDYCPWQKLGSQGRKLCSHTVVTKGSTR

SEQ ID NO: 398083 - protein, 325 aa, unidentified
MEAKKLCCGIDVSHTKLDVCYQNNLGELFHLQVGNNNQGFAKILEHTGTGYHFVMEATGVYYIRLAFYLQHRGCKLSVVNSIAIKRYIQMHLERNKSDKKDAGWICRYGIEQQPAYWVMPDSAYFESKQLYNSIREYTEQIKRFNNQLHSLRLLPVPSKDSIKSLERMIVCMEKEIKQLEHKLQLLLEQWQPEQLKRVSSVKGIGKRAAAMLIVFTQGFKHTENHRQLISFAGLAPTEYSSGSSIQGKPRIYKRGGKNLRDVLYMCSMNAMKTNPACKALYERLRANGKTGKQALIAVCNKLLKQVFAVVKNNTLYQPNYCSAKP

SEQ ID NO: 398084 - protein, 404 aa, unidentified
MIWVGIDWSDQVWDYHALGPARKALVVGQVKPGFSGMAELFEKLEAHGHPSEIAVAIETKHGPAVQALLDRGYRVYPVNPRASQKFREAMHLAGDKTDPIDAETLARLLATFHEKLHPLKPDAPEIVALRIACEDRLRLVKEHTAKLHELNDLLKAYYPAVPGLFAEMDSQAALAFLEDFPTQDMMRTLTPTRLRGWLKRQGYPCPQRIPEMLEHLGRPVLPVAAHLQQAKRPRIRYLARSLAALGEELREREDQIKGDLDQLPEADWIRSLPGAGPALAPALLACVGRDKDRFAHVGQARALFGTAPVTEQSGTWRYVHFRFGCWKFARRTFHLFAASSLATCGWARELYQRQRDRGHSHNQALRALAHKWVKIILALQRTGQLYNEAVFRNSQRRDLLKATP

SEQ ID NO: 398085 - protein, 458 aa, unidentified
MNRKRSKPKSDHTMPMVHPNAAAIDIGATMHMAAVRADRTPEPVRSFGTFTTDLHRLVDWFTECGVETVVMESTSVYWIPIFELLDARGFVVFVVNARDAKHVPGRKTDVSDAQWLQRLHSYGLLRASFRPKGQIAELRAYVRQRERLLEYAASHIQHMQKALTEMNLQLHHVVADVTGATGLRIIRAILAGERDPKVLAHLRDYRCHAGAETIEKALTGNYRAEHLFALEQALSLYNAYKEKASACDARIEAVLKELCISRGLNAGPLPSPRRRLHGKANGPDFDVRAALFKLLGKDLTQIDGLGSYLSLKLIAECGDDLSAWPSAKHFTSWLCLAPSNKISGGKVLSSRTRRCGSRASALLRLAAITVGRTDTALGAFYRRLSARIGKAKAVTATARKIAVLFYNAVRHGMEYVDPGASFYETRYRTRIIDNLHRRAKAFGFVLLPTELVPGAAVS

SEQ ID NO: 398086 - protein, 354 aa, unidentified
MIIIGADYHPGFQQIAFVDTDTGELQERRLEHREEAEAFYRELEAQGLKVRVGMEASGHARWFERLLGELRFELWIGDAAEIRTKRVRKQKTDRQDAQLILRLLLENRFPQVWVPSWENRDLRQLLWHRHRMVQARTRIMNQLQAVALNEGVRCKKRLWRDAGREQLQSFKLAPWASRRRRDLLELLDRLTPTIAELTQAIEQEADKWPEARRLQTHPGVGALTALAFVLIIGRADRFECGKQIASYLGLVPLEDSSGQRRRLGHITKQGNSLLRFLLVEAAQVTVRGDQEWRNRYFHLVLRRGRKIAKVAMARRLAVRLYWMWRKRWDYEQLKNFGSHAGQPGHPDGVQSSTE

SEQ ID NO: 398087 - protein, 341 aa, unidentified
MKKFIRTAIDLGKTYFQVHGLESEGGQSISRKMKRSKMREFYQQIEPCRVGMEACGSGHYWARELVAMGHEVVLIPPAYIKPYIKRGKNDAVDAAAICEAMSRPGMRFVPIKSADQQAVLMLHKTREMFVKQRTMSVNALRGHLAEFGIIVAKGIGRVDELLALAQSDAELPQIAKSAVAGLAQHLEGLDQSIEAVGDEIARAHKQNPTSRLLDEIPGIGVLIASVIASSVPDPSVFKTGRDFAAWLGLTPRQNSSGGKEKLGSITKQGNRYIRKMLVVGATSVMRVAGKRKGALADWINALQAKKPKRVAAVALANKLARICWAIMATGEGFRVDTYVKA

SEQ ID NO: 398088 - protein, 466 aa, unidentified
MRNDIEKVGTTSTKNELKLPKHLEHINKMAAGIDIGSRSHFVAVPEGCAEKCIREFESFTTDLDSLANWLTSCGIETVAMESTGVYWIPLYELLESRGFDVKLVDARHVKNVSGRKTDVLDCQWLQQLHTYGLLSGAFRPAEQICILRAYLRQRSMLIDIGASHIQHMQKSLNQMNLQLHHVISDITGDTGMKIIRAIIKGERDAKLLASYRDRRCKSSVEIIEKSLTGNYRDEHIFTLTQALELYDAYQNKIAACDDEIERHLSQFESRRDVSAENSGNSIADKKVKKNKNEPSFNLRDHLVSVTGVDLTAIPGIGAFSALKIVSEVGLDMSRWKSSKQFASWLGLCPGNKVSGGKRLASKTKRTANYAASTLRMAASTLYRSDSALGAFLRRLKFRLGAPKAITATAHKLAVIIYNMIKNRIEYIESGQDYYEQQYRERCIKSVLERAKSLGFGLFELSSGSIG

SEQ ID NO: 398089 - protein, 343 aa, unidentified
MQTITTIGLDIAKSVFQVHGVDAGGQVIVRRQLKRRYVLTFFQKLSPCLVGIEACASAHHRSRELQALGHTVRLIPPAYVKPYVKRQKNDATDAEAICEAVTRANMRFVPIKTCEQQSGLVLHRARHLFIRQQTSVINAIRAHLAEFGIVAPVGRHGVEELLNVVADPNDKRVPEIARACLSAFGAQLRMIKEQILEFDRLIRTWHRSNEMSMRLDEAPGVGPVLATALVAAVADPKSFRSGRNFSAWIGLVPKQHSSGGKNRLGNISKQGDRYLRGLFVAGALAVIRYAKIHGTKHRPWLTALLARRPTKVAAIALANKIARMVWAMMARGERYKEPFALAR

SEQ ID NO: 398090 - protein, 457 aa, unidentified
MMETKRRREQRSMLPVHPDAAAIDIGATVHVAAVGPARDPEPVRSFGTFTGDLHRLADWFAQCGIKTVVMESTGVYWIPVYEILDQRGFEVWVVNARDAKHVPGRKTDISDAAWLQRLHEFGLLRGSFRPQGAIAALRAYLRQRERLLDYAAAHIQHMQKALTQMNLQIHHVISDITGTTGMRIIRAIVAGERDPDTLVSYRDIRCHSSVETVRQALIGNYREEHLFALAQAVELYEVYQAKVATCDEKIEGVLERLKQPGRAPAKPLRAARHKTRQPNAPAFDARGALYAVLGVDLTQIHGLGPYLALKLISECGTDLSAWPSAKHFTSWLSLAPGNKISGGKILSSRTRPSGNRAAALLRLAATTVGRTETALGAFYRRLSARIGKAKAVTATARKIAVLFYNAVRHGMDYADPGASYYEERYRQRVLTNLQRRAKALGYVLQPTEIKGVSLAVS

SEQ ID NO: 398091 - protein, 367 aa, unidentified
MFVHHSLYQITKNIIMYTLGIDLHKKSSVWVLIDEQRTELWKENVLCRPEYISIAIEKIPVSPKEIQVAIEPVAGWRWVSKQLEDVGMKVHIAHPRKIHLIAESTKKNDEEDSRTLANLLQAGYFPEAHRSSEEIYQLRLLLRERTFIVRQQTSVKNQLHGIATTQGLHFIKSGNPLHKKGKEGIMASDNFVLKQLHMLIEDFKRRISPFDERLKVELKKYPIAHILMSIPGVGMITALTIISEVDDFARFKTGEKLSSFAGLVPRQRSSGETIRYGAITHAGSAPLRTTLVETAMRIRESNAPELFAFVKRLTPICGAKKARVALARKLLAIMWKLVTSHTLYDPSKVLSSSCTTKVSDLDTGSGA

SEQ ID NO: 398092 - protein, 359 aa, unidentified
MDGSKDQPNMTAGLDIGDKYSYLCLIDTQSGEVMEEGRLRTTPEALRRRFASEQPPMRIAIEAGTHSPWVSRLLEECGHQVLVANARKLRLIYANKRKTDEIDAENLARLARVDPRLLYPLKHRGEDSQAHMALIRSRQALVGCRTQLVNHVRGAVKSFGGRLPKCPARSFHNKAPEHIPDALRPALGPILEQIGSLTQRIRDYERKLEEISNAHYPETQLLLRQVEGIGALTALTFVLTLEDPYRFAKSRSVGAYLGLVPARDQSGDRDPQKRISKEGDEMLRKLLVGSAHYILGPFGGDSDLRRHGEKIASRGAKNAKKRAVVAVARKLAVLLHSLWMSGEVYEPLRNAHRAGGQAA

SEQ ID NO: 398093 - protein, 530 aa, unidentified
MVTRSRKRKSKGSKNRFIGKPAGQIQERVRAVGPEHFGIVSVDCAKRRSKWMLCNFYGKVIIEPTTVEHTSGGLRVMTQLVAEACRAEGLTDTVVAVEMTGIYHKPTFRAFRKAGFDTRIVHPFASNHYRRPLHSDQKTDDHDLEAIFHAAVKGYGLAGLPVSEVYQSLQAVSRHRHNLVKQRSRLMMQIRRLLHQTMPGFADLFEEDTLFHKSIALPIALKFASADAIRDAGVAGIASQLTKTNVRFQTRTIERIVAWASTAADPSELEEIHTRQWQQLNEVRRVFDEQVAAAEREMASFLVKTPYVLLLSVTGINVVSAARLAGEAGPIEHYASARAINGRAGLYPSRYQSDEVDHADGSLVRQCNRKLRGAAMLVAENLIKCHPYYRGLSALWTQRKVDPRDRRCRIANRAMRMVFQLVGGRQVWRGRSVDREHLLAKLQEFHRLHQTPIEQSIRDLNEAFMWLPKSTYTAEAKPLAEWARQKHRGPQRIGDLMIPLLIRLGVTREELGVPSEETLESNTSEARSSD

SEQ ID NO: 398094 - protein, 403 aa, unidentified
MNAVGIDVSKGRSMVAIIRPFGEIVSKPFDIKHTPKELAELASFILSLEGESRVVLENTGKYSDPVVKVLSEAGVFVCPVNAKLIHDYGGDTIRRAKTDKIDSLKIAGFCLDKWSKLERYSPVDELRKTLKTFNRQLDEYMKVKVMLKNNLVSLTDQTFPEVNRLFTSPARESDGHEKWIDFLARFWHCACITSITEEVFTGRYKKWCKKHGYNFSSVKANLIYEAANNQQPSLSKNGFTKMLILQAVEQMNSICLSIAKLKAEMTKIAKMLPEYETVLSMHGVGKTLAPQLIAEIGDIRRYPKRASLARFAGIEPPENQSGAYNQHSRRISKQGSPQLRKALFQVMRCVLQNSNLDEDVFRFISRKRSEGKPFKVYMIAGANKFLRIYYARVKECFDAPALA

SEQ ID NO: 398095 - protein, 321 aa, unidentified
MQTQVTKKIDFKGKELFIGLDVHTKRWSVTILVDGIEHRTFTQPLDSKSLYNYLQRMFPGGSYNSAFEAGFCGYGIHRELNSLGIKNIVINAADIPTSQKDKLQKRNPIDSLKIARALEKGSLRGIHIFDREIEELRSLNRTRFYLMRDLRRSKNRIKSFLQYYGESIPVEFDNNQWTLKFVSLLKEVKMQTITGQDAFSNLIHSYEFHREQLLILSRLIRQRIREYDNELYSLLKSISGIGPLTSSALITELGDINRFPHIDHLSSFVGLIPRVRESGETIHTGGITFRCNSFLRTLLIEASWQAIRMDPALIILSATCY

SEQ ID NO: 398096 - protein, 295 aa, unidentified
MTFLKTIPSCVIGIDVSKDTLALCEHGKQTVQVIANASRSIRQLLAQLRPDTLVVLEPTGGYEALLVSELCAAQIACHRADTLKVKAFARSFVRLGKTDGIDAKALAAYGADRWRGLPLYELSDKHQSDLAALVARRQDLMDIQVAEKNRVQAPGCASVKHSCKIVLACIRRQLERLDQLIESLIQNNTDLSERMVVYQSLPGVGPRTAIALLATMPELGSLTRRQAASLAGLAPHPMTAVHCEDIGRCVVDGQKYARTCSWPPYVPLALAGYFVISINVLLQMARSPLSPYQPS

SEQ ID NO: 398097 - protein, 432 aa, unidentified
MGKESRQRRAAWRLPRYRRPCSAGWTGPKTTTTSRSSTRGGKQLAKQRISDDAEGFAQLTALLIEHGDCADAPIPVAIETSRGLLVSCLRATGRPVYAINPLAVARYRDRHSVARKKSDAVDAAALANILRTDMAAHWPLPADSELVQAIAVLARAQQDAVWDRGQALNKLRSQLREFYPAILEAFADHKHGLYAREARAILVVAPTPTAAAKLTRRRLQSLLKQAGRVRGIQAEADRLHEVFQRDYLHQAPQVEETLGQQTSALLRRLNTACLNADQLEEATTQAFEKHPDAAIIRSFPGLGSLTGSRVLAEIGDDRSRFSSASSLKAYAGSAPVTRASGKSCKVMSRKVKNQRLAAVGYVWAFVSLTKSPGARAHYDRRRRAGDRHVAAQRNLCNRFMGMLFHCLQHGQAYDETQAFPNQLPEAHSTAAA

SEQ ID NO: 398098 - protein, 429 aa, unidentified
MTLRPIAGIDVGKFFSEMAILSPSNEVIARMKIRHDSSSDVERAVELLKKTEKDFASRPFIVMESTGHYHKILFHSFSKAGFEVSVINPIQSNSIKNIGIRKVKNDKIDARMIALLYRFQELKTTAIPHEDIECLKDLCRQYYKLSDELTAYKNRLIGIVDQLMLNFKDVFSNIFSKTAIAVLEEYPTPAHILKANRRKLISLIQKTSHRSLKWSTAKYELLISKAKEFAPLSVDNPSNVIMLGVYISMIKTLEESREKVLKAIRSLIAKDMAKDMPTLALTLELLQSIPGIGLLSAATILAEIGDFSAFKKPSKLVAYFGIDPSVMQSGEFTGTQNKMSKRGSRLLRRVLFTVAVANISIKRDKTAFNPVLLEFYKNKCRSKPKKVALGAVMRKLVWIIFAVLRDKKPYELRTPQEHAQMLAARHTAA

SEQ ID NO: 398099 - protein, 341 aa, unidentified
MEEYIGLDVSLKETAVSIRREGKRIWRGTCPSDPKLLADMIRQRAPNAKRIVFETGPLSTWFYHALTAEGRAAICIDARHAKAALDMAPNKTDANDADGLAHLAEVGFYREVRVKQYDSMLTRTLVGARGQLIKIVTDLSNQIRGLMKTFGLVIPKGAGRVFEANVRNLVAGNDGLERIILPLLEAWRSVRGRTAELDRQLVTLARESAPCQLLMSIPGVGSVVAVSFTAAVEAPDNFRTSRSVGAWLGLTTRRYQSGEVDFDGHISRRGDNHLRSLLYQSAVVILTRSRAESTLRSWGMKLREKVGFKRAAVAVARKLAVVMHTMLKTGEIFDRSAGAIA

SEQ ID NO: 398100 - protein, 342 aa, unidentified
MRITTIGIDLAKNIFHFHGVDKNGRIVLKKRLGRNKVLEFMANTPHCLVGIEACGGSHYWARELVKLGHEVKMISPQFVKPYVKTNKNDHADAEAICEAVSRPSMRFVPVKQVEQQDILSIHRVRQRLIKQRTALSNQVRGLLHEYGVVIALGNASLRKKLPELVSPENEDLTPMSKALFRSLLDEFYELETKIEQQEQRLKEYYKLDSRCALLTTIPGVGLITVTAMVASIGNGKEFENGRQLSAWLGLVPKQHSTGGKERLLGISKRGDKYLRSLLVHGARAVFYATKRKSHKETGLTRWIKQLDKRRGPNKTVVAIANKIARAIWAILNTGELYRAETM

SEQ ID NO: 398101 - protein, 346 aa, unidentified
MNQIARIGLDIAKRWFQVHAVDNDDREVLNRKLPRDKVLGFLAALSPCDVVLEACSSSHYWGREIGRLGHRVRLISPNYVKPYLKRGKSDAHDARAICEAASRPDMRFVRVKSEEQQAALMQHTSRQLLIDQRTAVANSLRGQLAEFGVIERKGIENVGELVRMLDEDDEDLAQIPANALMVMKILADQLRAVDAHVSAIDEQIEAWQRESAAAQPLKTIPGIGALISAALAAHVPDPSIFRSGRDFAAWLGLVPRQNSSGGKERLGRITKQGNPYLRRLLVLGATASLRWLNKRTDPLADWTKRLLQRRPARLVTVALANKLARVAWAIMTTGELFRSEAAISAA

SEQ ID NO: 398102 - protein, 416 aa, unidentified
MNAAGIDVSSRKSMVAILRPFGEVVKLPFEVCHSAEDLSALAQQLKSIEGETRVVMEHTGRYYESIAKVLHEAGLYVSVVNPLLIKEYGANSLRRVKTDKADAMKIARYALDNWADLRDYTPMDTIRYNLKTLNRQFQLASKQRTASSNNLIALLDQSFPGIRKCFDSPVRSDGTQKWVDFAHAFWHVDCVRKQSLNAFSERYRKWCKRHGYFFKQANAEEVYTLAKNAVVLVPKSDVTKVLIQEAANQLTSISRSVETYRTEMERLASMLPEYPVVMQMYGVGKSFGPQLMAEIGDVRRFERKQALVAFAGIDPMPNQSGEKNIRSNKSSKRGSPYLRKTLFNIMSIYLKCAPQEEPIFQFLDRKRTEGKPYYVYMTAAGNKFLRRYYAQVRDYLATLENLPPVDMESTGLQHTT

SEQ ID NO: 398103 - protein, 316 aa, unidentified
MPEHPTTFGIDVSKDHLDVATLPTGETYRVSNDANGHADLIEHLRQIDDLDRIVLEATGGYERAPALALADAGLPVTIVNPRQTRDFARASGRTAKTDRIDALALADFARALRPPVRDLGNERQHALEALIHRRRQLVVMIGSEKQRQQANRDPRVAKSLRALLAALEGERVSIERELLRAIESDPGWRERLTLLQSVPGVGLVTALTLLAELPELGRLSEKHVAALVGVAPMNRDSGRKRGVRRTIGGRSSVRKVLYMAALTATKHNPAIKAFYERLRAAGKPAKVALTACMRKLLTILNAITKTGRAWETRPIH

SEQ ID NO: 398104 - protein, 387 aa, unidentified
MYFIGIDISKFKHDCAIIDEAGDTVTASWSFANNCEGFSLLKQLLDALDGQKKIGFESTGHYGMNLKMFLESNNFSFMEFNPLLVSKFVRSKSLRNTKTDSLDAVSIAQYLMTVEYKPYPPSFYHMDQLKSLTRFRDSLVRQHSRQLVELTNILDKVFPEFKPFFDGRFSATALYILTHYQSPEKIANMNAKSYEALRKKSRGKFSMVKFAQLKTLAKNTVGRSDAFLLKQMEITIDIENQLDAKIDEIESQILECIRALNPPILTIPGIGELTAAIILSEYGNINKFENPAQLLSFAGLEPGYYQSGLAEHQGHMVKHGSSHLRYALMNACLPLVTYEPVFAEYYAKKRAEGKPHRVALTHVAKKLLRVIFTLQTKNISYNPTLIR

SEQ ID NO: 398105 - protein, 356 aa, unidentified
MNLAPSIEGETTMGHYAGIDVSLECSSVCVVDGHGKILREAKVASEPEALIAWFRSLGFGLERIGLEAGPLSQWLFAAMKRAGLAVELLETRHVSDAFKAMPVKSDRNDARNIAQLMRLGWFRPVHCKSMGAQEVRAMLTARKQIQAKLQDIENSLRGILRGFGLKVGKTTKRCFAARIGELVTGHPALETIAAAMLAVHMVLLREFNSLEKQVRAMSRLDAKARLLMSTPAVGPIVSLTFASAIDDPSRFTSSKRAGPLFGLTPKKYQSGETDYSGRISKTGDASVREALYEAAHIMLTKPIKGCAQLKSWAMRIARRAGMNKAKVALARKLAVIMLRMLKDNLPFNPAAKAATA

SEQ ID NO: 398106 - protein, 410 aa, unidentified
MDVVYPCCCGIDIHKQSAVACVIVSETKGPPRKEIRTFGTMTDDLLALADWLASKAVTHVAMESTGVYWKAPFNLLEGQFDVLLANAQHIKAVPGRKTDVKDAEWIADLLRHGLLKPSFVPDRPQRELRELTRYRTVLVRERAAEINRLQKTLEGANIKLGDVASDILGRSARQMLEGLVAGTAEPSTLAQFARGRMRQKIPQLERALAGRFAAHQRLLVAQQLAHIDYLDEAIERLSAEVAERLAPFQAMLERLDVIPGVGRRTAEILLSEIGTDMARFPTAGHLASWAGMCPGHHESAGKQKNGKTRKGCQWLRAALIEAAAAAAKTKDTYLAAQYHRLVRRRGSDKATVAVGHSILVIVWHLLQHDCPYVDLGSTYFDDRDRTATERRLVKHLEQLGYSVHLDRPAA

SEQ ID NO: 398107 - protein, 343 aa, unidentified
MYFIGIDVSTKESALCILDSNGKIVRETKLPSDPEIIARFIADTGLAIERIGLETGCTAAWLFAGLQRYGWPVICIDARHAAAALQAGFRNKNDRNDARGIADLMRVNKYRPVWVKSPEAQRQGRLLTARATLQSQLVALENTIRGLLRQEGIGLTDRRTAFEAAVREVIGEDRLLHAAVHPLLETRNAVLCQRAALDRQILLIVRADPVCRLLMTAPGVGALVSLAFKVAVDDPRRFSRSRNVGAYFGLTPREHSSGEVSYHGRISKMGDREVRRLLYVAASRMLRRDAALWCPLKAWAVRLAQRVGIRRARVALARKLAVVLHAMWSDGQVFQWRRSEASA

SEQ ID NO: 398108 - protein, 289 aa, unidentified
MDNHTQYSGFAGVDLAKKVMQIHFVTGDGEITDKQVKRAEFLDFFRNRTKCLIGMEACGASQDWARKLEAMGHEVHLMSPKAVKPFVSGQKNDYNDAIGIYKAMFNGVRRVPVKSTEIRDLQTLRRIRSQVTKDKVKEINHVRGLLAEYGIVLGKSITAFNKGISSALESLKERGDVSPLVAEELQTTVESIKTKIERQKRLDREIEQLARGCKNYENFLKTPGVGPFTAAMLCVLLCDPAIFANGRQFAAYIGLVIQSINTLSIKQMRTRCLQASISSGRSPVPHSLA

SEQ ID NO: 398109 - protein, 472 aa, unidentified
MTVFLYVQAVFSGTNKCDSEHEILSLFKQLRLWLRQPVNAVSPYNLCRTPMVLKGVPMALKIVYKICCGIDVHKTFVVACIASTNDKGVTTYESHRFSTYTKGLKDLLQWLLTRNCKDVCMESTGKYWIPVYNILENDCTIILTHPKYVKAIRGKKTDKKDAKWIADLFKHDLVAGSFMPPADIRQLRDLMRYRFKLTCFRSSEKNRLQNCLTVSNIQLGNVVSDTFGKSAQAILDKLLENPADTSFDLEPLVYKNLKKKLPELRDAIDGYITPEQAGKLKIIKAHYEDLESRKAELEELILALAAPYQQELAILQTTPGISSDFTAIGIISEIGTNMEAFPSAKHLCSWAGLTPTNNESAGKKKSVRVSKAGCYIKPLLVQCANAVVKSKKHPEIRNRYLRIRKRRGHKKAIIAIARMLLTALYHMLKNGENYNAELYRKSDLPPADREITVEQAIIIARNQGYKVKSATA

SEQ ID NO: 398110 - protein, 341 aa, unidentified
MSIVGAFDVHRRQLTFEYLDTSSGELKRGRVVPADRQHLREWLARFAGQDDVHFALEGCTGWRYVVEELLAAGITPHLAEPADTAALRGKKRHAKTDKTDTRHLRVHLMAGDLPECWIPPGHVLEARAVVRLYKDLLDERGAWHQRIAATLFHQGVPVIGSMATAEGRAAVEQVDLSPAGRQAVQAGLRQIDRLTGELDVLRRQLGMLSRHQPGCAALRATQFGAGPVTAVAIWAELGDVRRFGNSDDVVRHTGLDITVYSSDTKRAAGHLSRQGPPLLRWALYESAKCAARAAAPDHGYYAAVRDQRTAGLATLSVARKLARRCYHTLRELGEEALAPAA

SEQ ID NO: 398111 - protein, 346 aa, unidentified
MRIIGCDLHARQQTISMLDTETGEVTEKALSHEGEAVREFYAALPKPVLVGLEATGSMFWFLRLLEELGIECRVGHPAAIRKAETRKQKHDRRDAELIRRLLQEKRFPQIWVPTAEQRDLRTLLRHRHQLVRMRVMTQNGLQGLALSQGLRRGAKLWSQAGQQELKGLELAGFAATRREQLQQLHQELNQRLQQLDQAVSEQAEQRAGARLLLSHPGVGPITALATEVFLGDARRFPNGKAVASYVGMIPSEHSSGGKQRNGRLSKQGNPLLRLLWVEAARAAARKDARLKQFYRKKLVQKGLGKAVVATARKLGIRLWILLRDQIDYTEFCRRAERRCPHAGMPE

SEQ ID NO: 398112 - protein, 347 aa, unidentified
MTTLARSVTGGVDTHLDVHVVAALDEKGTLLGVEAFETTRLGYKKLLAWLEDFGPVTLVGVEGTSSYGAGLTRHLHAEGIAIVEVDRPNRQRRRRKGKSDPEDAIAAARAAFSGDANGAAKTQDGNVEAMRVIRMARLSARRSRTLALNQMRALISTAPEPLRDELRHLSVARLLARAASYRPGTKRDLVSLNKLTLRTLARRAIDLENEVKSYDALLEPLVAETAPELVAALGIGTDSAAALLVAAGDNPHRLRSEAAFAHLCGTSPIDASSGKHERHRLNRNGDRQANSALWHIVITRMVYDPRTTAYIERRMKEGLTKKEAFRCLKRYIAREVYGLLPMDRLTA

SEQ ID NO: 398113 - protein, 342 aa, unidentified
MTVLIGVDPHKGSHTAVAIDRDEVVVDELRVTATVGQVDELVGWAKGFETRTWAVESAGGLGYLLSQQLVAAGETVLDVPATLAARVRVLGTGRSDKNDPNDARSVAIAALRAPALAAVRAEDHTIVLRLLAKRHRDLGRARNRTACRLHAVMAELVAGGIDKELVTSQVRALLEGLDATSAAQRTRLELADELVEDLARLDTQMKMSKRRITVAVDASGSTLTDIFGIGPVLAATLLGYTGDPTRFANADAYANYNGTAPIDRSSGDHRIHRLSRRGNRQLNHALHMAAVTQIRFAHSPGRGYYDSKIEAGKTGKTALRALKRRLSDVVYRQLIADTRRHS

SEQ ID NO: 398114 - protein, 353 aa, unidentified
MVPPVNNRSGAFGTAAAVTHDRTVARLSIVRTRQVTVTKIICGVDVSSTSLDAFVGPSGPAHSFRNTAEGIAELAAFCRQQSVDLVAMEASGGYEKQAFALLWAGGVPVALLNPRAVRDFAKGMGLLEKTDCIDARVIAWFAAVKGSMSNAPASAEQQRLKALVTRLRQLTELQAAQRNQRLLVSEATVLELIAELLKVVASQMRMLEAEIAALLASDPLWQKLDQALRSIKGVADRTVARVMAEMPEIGTLSNKAVSKLAGLAPLAHDSGKREGKRLVRGGRRNVRAILFVVAGVVRRHDPDFAAFHQRLSAAGKPRKVIRIALAHKLLVRLNARARDARKAFAGASVCQSA

SEQ ID NO: 398115 - protein, 407 aa, unidentified
MQLLYARCAGLDVHARQVVACARIVVDHTVRYQRLTVPTTTRGLLELADWLASHEVTHVALEATGVYWKPVWHLLEGQIELTLANAQHVKNVPGRKSDVHDAQWLADLLAVGLIRGSFVPPRPIQDLRDLTRTRKQLVREIGRHTQRLQKILEDANIKLTETISDIRGQSGRAVLHALIAGETDPERLVALTRGLKASHGQLVDAVTGRVTAHHRFMLQLHVDQIEAIEAGLATLEQRLTEALRPFRAAVDLLKTIPGISDTVAAVLLAEVGDNIGPFPTAGHLVSWAGFAPRLDESAGKRRSTRTRPSAPWLKTTLVQAAWGAARTQDSYFHAQFARLKSRRGPKKAIMAVAASMVTAIYYMLRNGVEFEDLGAQHFVHHDKDQITKRLLRRLHDLGVEVEIKNAA

SEQ ID NO: 398116 - protein, 343 aa, unidentified
MQVTTVGLDLAKRIFQAHGVDAAGKVVIRRRLQRSEIAAFFADLPACLVGIEACATAHHWARLIGASGHQVRLIPPSYVKPYVRRSKTDAADAEAICEAVGRPSMRFVPVKSAHQQAALLHHRARDLLVRQRTMLINAIRGHLGEFGIIAPAGRRRVADLVNLLQGADDAEVPALAREALQSLFAELSALEIRIKVVEAVIMREHRSNAVSRRLTTIPGIGPITASALAGTIADPFAFKSGRELAAWIGLVPRQHSSGGKQKMGRVSKQGDRYLRRLLTVGATAVMRRLPGKTDGLSLWVRALLDRRPFRLVSLALANKMARIAWAIMVRPETYKASAMTAAA

SEQ ID NO: 398117 - protein, 332 aa, unidentified
MSIIGCDLHSRYQVIAMLETETGEIITRRLEHEGGEAKGFYTGLRKPALIGIEATGYTQWFERLMAELGHELRVGDPAEIRARAVRRQKTDTRDAEHLLDLLLSDRFPRVWVPTPEERDLRQLLKHRDKLVKMQTSVRNQLHFLAMSQGVCRKQRLWSERGREELEGLGLGKWASRRRQELLQLLDGLGPRIEEMDAAVKAEAARRAETLLLMRQKGVGPVTALAFVLTVGPVERFPTSRKLVSYLGLNPSEDSSGGHQRLGHISKQGNEMLRWLLVEAGHTAAQYDEELRRRYLRLKFRRGGKVAKVAIARRLAVRLYWMLRRYAAGSHVR

SEQ ID NO: 398118 - protein, 344 aa, unidentified
MEYYVGLDVWMKLTAVCIVDRDGKVVRETALCTEPSSLASFLGGTGLEFRRVGLEAGPMSSWLHDGLAAAGLVVVCVEARHMQAALSAMRNKTDRNDARGIAQMMRTGWFRRVHVKSPEARRLRLLLVNRRMLVDKRRDIDNAIRGTLKVFGLKVGEVGRLGFEERVVSLLAARRGLLELVEPMLVVRRALLEQYDVLHRKLVDAARKDAVCRHLMTVPGVGPVVAAVYRTGVDDPGRFARSHTVGAHFGLTPRKYASGEVERTGRISKCGDAMVRTGLYEAANVLLTRVKGWCALKAWGLRLAKRAGMQKAKVAVARKLAVILHRMWVDGSEFRWGKESKAMA

SEQ ID NO: 398119 - protein, 395 aa, unidentified
MRFVGIDVGAERHVVASVDAVGAVLLKPTGFSEDAAGYQHLRTVLGSATDTLVAMEATGHYWKNVFAMLVTQGFAVALLNPLRTRRFAAEELQRTKTDAIDALGIARFAAQKRPVASRLPDPATEELRERLRYRDRLSQDFGNRERQLHRLLDLGFPEFPGHVHDVGSELATAILRDYPTAAAFQGVSVRRLGGLRYDGRHPVGAELAAALLAAAAASVGQHHGPAYQVQVRDACEDLDIVRRRLRTLDRDIERLLERHEVGTLLTTIEGIGPQTAARLVATFGDFSGVRSGAALACYVGAIPGLRQSGKRTSVRAHLTPIGAARLRAKLYMPVLSAVRYNPWLRAYYAALIARGKLPKVALIAAMRKLLHAVYSVATHRRAFVPHVGVPLEART

SEQ ID NO: 398120 - protein, 406 aa, unidentified
MTLSIAVPLAGDSHALCRPPPSEGFRRDLIGAWHRPHLGVSAGGPFLSAGVSKGGPEVIVVGLDPHKKTHTAMAVDQAGRPVGELTFPARTKGFERLLSWARELDERRLFAVEDCRHVSSSFERFLVGHGEQGVRVPPKLMAGARESARTAGKSDPIDALAVARAALREPDLPRIGLEGAELDLRLLVDHREDLVAQRTAVEQRLRWHLHDLDPALEVPARRLGVAAQLQRVDRKLARMPKTTRARIARRLVSQCKLLSAEIDALENEIAAIVRGLAPELLAIPGCGSLTAAKLVGEIGDVRRFSSDAKLALHAGVAPLPASSGNSSRYRLNRKGNRQLNVALHRIAITQARIHDPARTYLARKQAEGKTHREALRCLKRFIAREIYNTLTKRHLNANTGLTAAVA

SEQ ID NO: 398121 - protein, 342 aa, unidentified
MQAITVGLDIAKSVFQVHGVDCNGQVVIRRQLKRRYVLTFFEKLAPCLIGIEACASSHHWSRQLLALGHDVRLMPPSYVKPYVKRQKNDATDAEAICEAVSRANMRFVPTKTPEQQSGLVLHRTRHLFIRQQTSLINAIRAHCAEFGIVAPVGRQGVEELLNVIADAEDEQIPEIARACLSALGDQLHRIKAQILEFDRMIGAWHRSCEASRRLDEIPGVGPALATALVASIADPRTFRSGRDFSAWIGLVPKQSSSGGKPRLGSISKQGDRYLRGLFTAGALAVIRYAKIHGIGHRPWLTALLARRPTKVAAIALANKIARMAWAMMARGERYREPVALAA

SEQ ID NO: 398122 - protein, 357 aa, unidentified
MSPQINQLDFKGQLFFIGIDVHKQNWSVTILDDERELQRFSMNPTPEELARYLQRNYPGGRYKSAYEAGFSGFWIHRRLVELGIDNIVVHAADIPTRQREKNQKSDKIDSRKIARELRNGSLQGIWVPDPALQDLRSLCRLRFKLARDRSRTKNRIKHFLHIKGITIPDPSEIWHWTSAFDDWLESIAFENQTARDCLSGYVKEYKYLQKLIDDTLNKLRQYSQQAELRETIYDHLMSIPGIGFIIAITFYTELGDPRRFKRLDQMACFVGLVPSVSASGEKERVRGISDRHNRYLRYLLLEAAWVAVSKDPAMGLAYKQLCKRMSKQEAIIRIAKKLLNRLRYVWINRKPYVVAVC

SEQ ID NO: 398123 - protein, 346 aa, unidentified
MEMYIGLDVSLASTAICVVSAHGKVIREATAASEPEELVRALRRLPGTVVGVALEAGPLSQWLHKHLTEADFDTVLMETRQVKGALKAMPIKTDRRDAEGIARLLQMGWFRPVHCKSVSAQEMRALLSSRKSIQQAVIGIELSIRGVLRNFGLKMGKIARGRFEERVRELVKGNPMLEAAANPILAGRRVLRKELAGLEKRLRDHAKTDTVCRQFMTMPGVGALVALTVKSAIDDPSRFRSAKNVGPWVGLTPRREQSGERDIAGQITRAGDAGLRTALYQAATVMLLRGRPSWLTAWALGVAKRRGKKRATVALARRIGVVLHRMWRDGTEFLFTRDEAMAASAA

SEQ ID NO: 398124 - protein, 426 aa, unidentified
MNLTQNDRLNQVTADTLVVGVDIGSQDHFARAFDYRGFEFTKRAFRFSNTGLGFLSFVRWLYELQNKTDTKKVIVGCEPTGCYWLTFQKFLNDHKIQLVTVNPYSVKKCKELDDNSPEKSDLKDPKTIAGLVKDGRFSTSYLPSGVYAEIREASVCRDMIMKQHVRLANQIQGWLQKYFPEYLECYKEWDSTSGLMLLKYAPLPQDIIKLGAGGINQIWRDAKVRAAGMKRAKTLVEAAQDSVGLEGGEAARLEIWILVNDYTSKVEQLTRLDEYLKEKVMEVPNVEKLLAIKGVGLSTVIGFVAEVGDIGRFTDPRQVQKLAGLEITKISSGKRKGQPGISKRGRRKLRRTMYESARSLINWNPAFLDVFLYYRNRERRPLGSMQAKIAVACKAIRVFFVIMRTGCDFDEERFRKDILRPEIEAA

SEQ ID NO: 398125 - protein, 349 aa, unidentified
MIVIGIDSHKRTHTAVAVDGNGRRLGQHLVAATGDGHLDLVRWAARYRDRRFALEDTRHLSRRLSADLLRAGEAVTWVPTRLMAGARRHGREQGKSDPIDALAVARAALADPDLPTATLEGEERELRLLVDHREDLVAERTRSVNRLRWHLHELDPGNEPGPRSLGRAVVLDALEARLAGVPGTVARIARDLVARVRELTGVIRGLERELERLAALVAPTLLALPGCGPLSAAKLVGQVAGATRFRSAAAFARHNGSAPLPVWSANSVRHRLSRKGDRQVNVVLHRIAITQMRLGDRGRAYYDHRRAAGDSKTEAIRALRRRISDEVYRRMRHDEQVRAALRAPLAAAA

SEQ ID NO: 398126 - protein, 408 aa, unidentified
MNTLYVGIDVSSKSNVVYLMLPNGDKHSNFSVANSHEGSTLLVKKIYSALTSHSLDTVLIGLEATSVYGDNLVYFLREDATLAPFNRKIHVLNPKQVKKFHDTYNDLPKNDYVDSFVIADCLRFGRINKEVYMGDYRYKALQNLTRARFFAVQNLVKEKQRFMNVLFKKYSTMTQEKVFSDAFSTTALAVYDEFESAEALANMDLHELTDFIIEKGKNRFPDPDAVAKAIQKAARSSYRLPKTVNDSVNQVLSISITSMKALESQIKEFDKAIKALMELLPNVLISIPGIGPVYSAGIMAEIGDINRFDNQASLAKYAGLAWKQHQSGGFEAEVTRLIPLGNRFLKYYLCEAAFSLVRCDKKYSDFYHLKYKEVNRCQHKRALALTARKFVRLVFRLLKDNRLYCPAK

SEQ ID NO: 398127 - protein, 397 aa, unidentified
MKLPNTHELHVSVDVGCYKHHISVGLASGEYLGDFEINHDKAGFADFFEHVEQYKQQSNGQVSVAMEGYNGHARPLDKMVLSKHYRLLNINNLKLARFKEIFPGAAKTDPIDSRKGLELFQLQQTLPLAKNVLQEVYTTPQENQELKQLSRRRKRLVNERVRYLNTLQSDLRALSPGLVEITHDVKSVWYLNFLSSSADLRILARKNRATLLNIKGVGKKYVEVILGWQKTAIFSDDVEYMSDLIQQDVARIIELRNMIKSLDKRIAELLEHSEIGQRLLSIQGFGLTCCGVLSGEIGCIERFKKESSLALYLGMASLDNSSGKRQGSKKPKQVNKHAKAAMMTAVDHQRRGNEESQRYYEKKRNEGKTHNQSIRSLGRHLCRVIFKMLKNNRDYYI

SEQ ID NO: 398128 - protein, 392 aa, unidentified
MAGIDAGKAHHHCVAIDESGRRLLSRRVANDEPELLELLADILALGDEVTWGIDLADGGAALAIALLVNRDQPVHYISGRAIHRASESYRGEGKTDAKDAAIIADQVRVRRDLHPLRAGDDTVIDLKILTGRRMDLVADRTRTVNRLRAQFTGIFPGLERALDLTNTGPLTLLTGYQTPAAIRRIGVKRLETWLRNRHVVRPDRLAEIAVQAAERQHTSLPGEKLAATLVHTLAKEVMSLNQQVAELDKAIETRFRDHHTFEVITSMPGLGIILGAEFLAATGGDMTAFGTADRLAGFGGFAPVPRDSGKLSGNLRRPQRYNRRLQRVFYTSALFSIRHCEESRRFYDRKRAEGKRHTQAVLALARRRVNVLWALLRDGRRYEPAPPARAAA

SEQ ID NO: 398129 - protein, 347 aa, unidentified
MRFYTRQHAFYCGIDLHARWMYVCILSQEGEIVYHENLAAGPETFLQAVAPFRGDLVVGVECVFTWYWLADLCRREGIEFVLGHALYMKAIHGAKVKNDRVDSQKIAGLLRSGMFPTAYVYPPEMRPTRDLLRRRTYFVRRRADLLAHIQNTNSQYNMPEFGKKIARRMHREGIAKLFPHPAVQQSIAIDVQLIDAYDHIIDGMKDTILRTARNHDAQALSLLRSVPGIGKTLSLVLLYEIHNIDRFDRVQDFCSYARLVKCEHESAGKRSGKSWRKIGNVHLKWAFSEAAVLFLRANPEGMKYKKRLERKHGKGKALSILGHRMGRSVYFMLKRGRAFDMATFLAN

SEQ ID NO: 398130 - protein, 330 aa, unidentified
MKKKEIIGVDVSKGTLDLHFNYAASHLQISNDKSGYKKFDKYLVQLGIDPSEILLVMEHTGMYSYWFEKHLKEQGVSFSKVSALEIVRSAGIIRGKSDKSDACMIAQYGAKNTDKISLTMSSEHHYQLKALLGLREKLVTQKAGFTTSLNEQKQFVNVLKSSALFRSQQLMIRTLEREILKVETEIKQLLESDESTKQNLELLTSVVGIGFVIAASMIMWTDNFSKFTDARKFACYSGIAPFEYTSGTSIKKRTKVSQLANKRAKALLDLAARSAIIHDPEINQFYTRRIKEGKHPKCIRNIVRNKLVYRMFAVVKRQEPYVKNHVYNAA

SEQ ID NO: 398131 - protein, 349 aa, unidentified
MKYFAGLDVSLEETTICVVDESGRIVKEARAQSEPEALSEALREVDLPLERIGLEACSLTAWLHDGLRAKGLATICIETRQANAAMKTMPNKTDRNDARALAQIMRTGWYRQVHVKSRQCRLWRSLLVARRTVLNEMRTIENVVRAILREAGIKLGTPSRTVFVGRVREVASSDASVMPLVTPLLAILAMMLREFARLTKQVLDIVREEKVCRRLMSVPGVGPITALAFRATIDRPERFGSSRAVGAHLGLTPARYQSGKTDIQCKISRCGDELARTALYEAAHSLLVRSRKWSSLRAWGMKIAKGRGMARARVAVARKLVVVLHRMWSDKTEFRFGKQTGTTTGLVGA

SEQ ID NO: 398132 - protein, 335 aa, unidentified
MQIYGIDLAKEKFDVSFFDLTSKKVSNQPSHKVVKNNFKSIGRFLETLPSDAVLVAEHTGVYGDTLLKCCMDCNVKIAFVGGYVIHRYRATPDRAKTDVLDCALLRDFGERYPDKLKYKTFPEEALYELRQLARHREMLVEQRKQLITADKSEDCRPVRSLVVKRSMDRIKEMLDTEIAETEKEMLKVINGHDSIHHNYELVKSVDGVGLITAVELLVKTENFTKITTARQYSAYAGTAPYEKSSGKMDKGAHISKIGNRRSKTLLYICAESARLHNKEIKLYYERRTLIDKKPRHYVLNAIANKLLRIIFTLVEKGEVYDVNYIRQDPRLVKHN

SEQ ID NO: 398133 - protein, 408 aa, unidentified
MNAVGIDVSKGKSMVAALRPMGEVALLPQEFLHTEVGLEQMAYAIIALGEDTRVVMEATGRYHEPVAAALHEYGIYVCVLNPLFIKQSGGGSIRKVKTDKADAMKIAKYGLDNWVDLREYTPMDTIRQQLKLCSRQYNLYMKTVVSLQNNLISLADKTFPGANELFSSPERADGHQKWVDFVMTFWHCDCICRVSEKAFTERYQKWCKRKGYHFSAEKALDLYASSCGHFTTLPKNDNTRLLITTAAQQLLAGKMTLAALRAEMTRLAQQLPEYDTVRTMYGVGETTAAQLMAEIGDVRRFPRRSSIVGFAGVDPAVDQSGKHDAKSTPTTKRGSPHLRKTLYQIVCTYLRKAPEDEPAYQFLDKKRAEGKPYFVYMTAAQNKFLRIYYARVKECLEAFDAQQNSTQS

SEQ ID NO: 398134 - protein, 351 aa, unidentified
MIIIGVDYHPSDQYIAFVDTETGEYEERQLNHSAGEAEKFYRELATREVRVRVGMEATGYSRWFERLLAELGMELWIGDAAEIKAKRVRKQKTDWEDARLLLRLLRENNFPRIWIPSAENRDLRQLLWHRHRMVQMRTRIMNQLQALAMNEGQRRKKKLWSAPGRALLEKLALGSWASRRRKDLLELLDRMNPTIEELTRAVEQEAKKWPEALRLMTHPGVGPLTALAFVLIIGTPQRFRRGQQIGSYVGLIPEENSSAGHQRLGHITKQGSSLLRFLLVEAAQAAARCDVNWRRRYVRLAVRRQRNIAKVAMARRLSVRLYWMWRNGWEYAQWVKFSSHAGQLGTGQGAK

SEQ ID NO: 398135 - protein, 320 aa, unidentified
MIFVGIDVSKETLDCHRQDRKNSKLHVSNSPAGFKRITKWIQPHADDVHFCMEATGKLWEPLAEFLHQLGYRVSVVNPALIHAFGKSQFRRSKTDAIDAEIIADFCSKMEPPTWTPMDPDTRSLRDICREIAALKKNKTQITNRMKSGRLDERASSSQKRQLEFITDEIQVLEKLAKELVSENPTLKSNANLLQTIKGVGWRTAFTFLSELSMVDSFKSLRQVEAFCGLNPTIRESGSSVRGRPKISKMGNSAIRNALYMAALTATRFNLPVAEFASRLAAKGKKGKVILCAASRKLLRIMVAVYWSKQPFNPSFKSSGA

SEQ ID NO: 398136 - protein, 375 aa, unidentified
MKEKVRFLGLDVHAQTIAVAIAEPDGEVRSLGTIANRAESIRKLVKKLGPTEQLKACYEAGPTGYVLYWQLAELGVACEVIAPTLAPVNAGDRVKTDRRDAERLARSYRSGDLTAVWVPDEGSEALRDLVRARESAKQDQLRARHRLSKFLLRTGQRPAAGVKAWTLAYMAWVRQLRFPQVAQESTRLDYLHEVEHMGERVVRLEKAIMEAVKLAAPAVQEVVKGLQALRGIAQISAVTIASELGNVSRFAGARQLMGYSGAVPSEDSSGKRTKRGSITKTGNAHLRRIAVEAAWSYRLRPGVGPALRKRQEGVPEEIKEIAWKAQQRLHKRYCRLAAAGKDQRKIITAVGRELLGFVWAIGIKAEAAAKQQMAA

SEQ ID NO: 398137 - protein, 338 aa, unidentified
MKLYGGIDLHSNNSVIHLIDESGSNVLKKRLSNNLPMILALLEPYSDAIEGLVVESTYNWYWLVDGLMEAGYKVHLANTAAIQQYSGLKYGDDDSDANWLANMLRLNILPEGYIYPKEARMVRDLLRKRLQLVQQRTLNLISIQGLYTRHLNKRLNSSKIKQLTPQIIAQDFCDPNVQLAVNGNLAVQQCLTQQIKNIEKSLKQQLKLKDEFIQLTSIDGVGLILALTIMLETGSITRFEKVGNYASYCRCVSGGRYSNGKKKGTTNAKNGNKYLAWAFVEAANFAIRHNETIKKFYQRKLAKTHMMVAKKAVAHKLARACFYVLRDHVEFDTKKAFG

SEQ ID NO: 398138 - protein, 423 aa, unidentified
MMKLKYSICCGLDVHKNVIVATIVTTNKDGISEYLQKSFSTINSDIQRFHNWLIENNCYHVCMESTGKYWIPIFNYLENDIDVCLTHPKYVKAIKGKKTDKKDSKWIADLYKFDLVRCPFIPPKDFRQLRELSRYRFKLVCMKSSEKNRIQNCMTISNVGIASVLSDPFGKTATEIISYLLEHTADSMDEKAVRKLIKKGAKSKSDEIIEAIKGYTIETDQAKKLELARGHLEYLDDMITQTEVELYVRIKPYYEFVEFVSTMPGMTELSSTIVLAETGVDMDIFDDAKHLCSWCGLSPANNESAGKKKSVRIAKAGDYLKPMMVQCALAAIKSKKQPYFAIKYGRIKKRRGHKKAIIAIARMMMVCIYHMVSEKKPFTPTDYEELMDPQNHVESVVLNENNVFAYLESLGYDSSKLVKRNDN

SEQ ID NO: 398139 - protein, 342 aa, unidentified
MQIAVLGIDLGKNSCSVVGLDTTGRVVLKRRLHRDGVLKLAASMPSCVMALEACCGAHHLGRILRDHGHEVRLMSPEYVRPYVKAQKNDDRDAEAIAEAATRPTMRFVTLKSETQLDMQSLHRARDRLVGERTALINQLRAILLERGIILPQGRRKLELHLTPLLAGDAMAISPRTRLLVNDLHLEWTELDRRIEAFDAEFAAQARTDETARLLTTIPGIGPLNATALAASIGNAQTFQRGRDLAAWLGLVPKQMTTGGKPKLLGISKRGNRYLRKMLIHGARAALPSLSKGETPMGGWLRDLLARAHVNTVVVALAAKLARIICAVLRTGRKFELTSAAVS

SEQ ID NO: 398140 - protein, 343 aa, unidentified
MQTVTTIGLDIAKSVFQVHGVDAAGQVVIRRQLKRRAVLAFFQKLPPCLVGIEACASSHHWARELQALGHTVRLMPPAYVKPYVKRQKNDATDAEAICEAVTRANMRFVPTKTPEQQSGLVLHRTRHLFIRQQTSVINAIRAHLAEFGIVAPVGRRGVEELLTVVADPNDKRVPEIARACLSAFGAQLRRIKEQILEFDRLITAWHRSNEMSMRLDEAPGVGPVLATAVVATVADPKVFRSGRNFSAWIGLVPKQHSSGGKDRLGSISKQGDRYLRGLFVAGALAVIRYAKIHGTKHRPWLTALLARRPTKIAAVALANKIARMVWAMMAKGERYRQPVALAA

SEQ ID NO: 398141 - protein, 338 aa, unidentified
MEWTVAIGVDTHKEVHVAVALDAFGAELDSREIATTPAGYRDLLTWAQELGVPAFAVEGTGSYGAGLVRFLERAGVAVYECERPRRQERRRGKSDLIDAALAARRLLSGERLSIPRGGGRREDLRLLLLERRSAMQARTAALNQLSALLVTAPEHVRERLGALSGERLAQAAARLRPGPDVLNGVLRRLGKRVERLSKELAEAERALAALLAEVAPDLLEECGVGPVCGAQLLVSSGDPNRMTSEASFAALAGTSPVDASSGKQRRHRLNRGGDRQLNWALHVIALQRIRHHPETSAYYERLLAAGKSTREARRCVKRALARHFYLRLREIPRLPLTT

SEQ ID NO: 398142 - protein, 414 aa, unidentified
MTPFTELTAFAGLDWASDHHDIVVVDAAGTRLESLRFDHTAAAWKSALERLRALGTLAVAIETTHGVAVQQLLDAGFTVYPVVPKAAARYRGRKAPAGVKDDQLDAWSLADALRVDGHGWQPLPPHDALVSELRLLCADEVQFIGQRTALVNQLQAALREYYPAALEAFDDWCAVSAWRFILAFPTPQKLRAAGKRKWEKFLHTNKLWRPQTKDERLEIFARADEFCGSAAATAAKSLQAVCLVKMLLTVEAQLAVYRARIEKLFGDHPQSGLFGSLPGAGAKLAPRLLSLVLHRVEEGVDAAGLQSLAGTAPVTIKSGQITKRKIRHHCDKDLRCTVHLWANESRKKCVWAETYYQSHRAKGQSHACALRCLGQRWLKILAKICRTGERYNEAKHTQNQAKHGSWILTLNPAG

SEQ ID NO: 398143 - protein, 350 aa, unidentified
MMIIGCDLHTRYQQIAMLDTETGEEVERRLEHENGEARAFYSTLAGPVRVGIEATGYTHWFEGLLAELGHELWMGDAAKIRASVVRKQKTDARDAEHLLDLLRQDRFPQIWRPSPAERDLRQLVWHRQKLVWMRGAVKNQLHALAMGEGVCRKKKLFTAKGRKELEGLALGPWASYRRQELLRMFDELAAATAKLDLAVEQAAKDQPLAMRLMTHPGVGPVTSLAFVLIIGPVERFERSKQVVSYLGLNPQEHSSGGKQRLGAISKQGNPMMRSLLVEAGHTAARFDPALKRMYQRLKFRRGASVAKVAVARKLAVRMYWMLRSTADYAQLVRMQGSPWATLVENSSSLG

SEQ ID NO: 398144 - protein, 330 aa, unidentified
MEREYIGIDLHKQFFQACAVTPTGIRVWEQRFPRTDGGLVLFRERCTSMTAIAVEATGPTWAFVDALRPSGATVCVVDPRKTCLKAGYAAKTDRLDARRLADALRRESVVSIYVPPPAVRELREVCRGRHQVVRLRARIAQMIRALLLRSGVSDVPVTRVFSARGLAWLSQVQLPSEAAASLERWRRVLIAVQAEAAVAEAMVKARATADAIARALDDLVGIGPVLALTLRAEIGDITRFPRGAALASYAGLVPRVDASADRYWSGRITREGSPWLRWALVHTAIHAIRRQDGLGRWARQLAMRKGVYKARVALARRLCDEVVTVWPRCA

SEQ ID NO: 398145 - protein, 313 aa, unidentified
MNQDSVYVGIDISKSTLDTFISTTGQVEQFLNGQADIQRLTQHLKTLNPALVVLEATGGFERLVAAELFAASLPVVIVNPRQVRNFAKATGRLAKTDAIDARVLAEFAQAVKPAIREIPDARTHELADLLARRRQIIDMIVAEENRLKQATFKALQRDIKAHLVWLRKRLKNTDDDLHDAIKASPIWKANYDLLCEVKGVGDVLALSLLALLPELGRVNRKQVAALVGVAPFNCDSGKFKGQRRIWGGRGELRKVLYMAALSSKTHNPVIEKFYNHLLAAGKTKKVALVACMRKLLTILNAMIRDQKHFGEKA

SEQ ID NO: 398146 - protein, 346 aa, unidentified
MAQVTTVGIDTSKHVFHIHGVDARGHDVLTKRLSRQKVLPFMTQLPSCLIGMEASGGTHYWAREFCKLGHTVKLMPPQFVKPYIQRQKNDPNDAAGICEAASRPRIRGVAVKSVAQQDLQALHRIRERQMTARTALVNQLRGLLAEYGIVIPKGVAKVRHRLPVLLAESESGLTATAREWLATLQTELHALDERIGGTDQHLERLLAANDACQRLLQLPGIGPLTATALVAAVGDAKDFKNGRQFAAWLGLVPRQHSTGGKSTLLGITKRGNRSLRALLIHGARSVLRVVDCKTDARSRWLRGVKARRGANCASVAQANKTARVAWALLARGERYRPSAQVRSAGA

SEQ ID NO: 398147 - protein, 354 aa, unidentified
MFRVGLDYHQRRSSICILDVNGKCVKRLSILGTWIELLAALKKLREQLMDPMEICFEASCGYGHLYEQLRTVATRVVVAHPGQLRVIFRSKKKNDRIDAEKLAKLLFLDAVPQVHVPSVNVRSWRMTIEYRRRLIGKRTKVKNALRSLLRTHGILSPKYLWTGKGLRWLKEQVLPTELDDLRREMLLGELAEMEKRIKRVETVLGRIAHKHPGVALLMTAPGVGIRTAEAVVAYIDQPDRFSSVRKIGAYFGIVPCQDSSAAVNRLGHITGDGPGTVRMLLCEAAWQGIRRDAHLRQHFERICKGDPDRRKIAMVATAHHLLRCLLAMLRTGEAWRHEREPAKGPPGSPLRKTP

SEQ ID NO: 398148 - protein, 339 aa, unidentified
MVIVGCDFHPGWQQVAVFDSGTGEIRELQLRNSEGEAERFYGSLPSPALVGFEACGNTHWFEDMLDRLGHEVWIGDAAEIRASYVRKQKTDKRDAAHILKLLMEGRFPRLWRPSKADRDLRQLLIHRDRLVGVRTRVKNGLHHLMLNKGVQLKRKLWSKAGQKILHELPLEGWAAQRRTDLLQLLRTLDPQIEELDVAVERAAYANERARLLMTQPGVGPITSLAFVITMGDVTRFPSGKQVSSYLGLIPSEHSSSKRRRLGAISKQGSPFLRMLLVESVQTVCRLDEGFRKQYNHRCHRMKKGIAKLAAARKLAVRLYWMLRTNTAYPEIADIEGSPR

SEQ ID NO: 398149 - protein, 408 aa, unidentified
MKLFVGIDVSSEKLDVCFLDSHDTVLKEICLSNDVNGASAIQENVLHFQQLYHYEKIVIGMESTSIYSFHPAMFLAEDKELKNLNVEVVVQNPKAIHRYKRLFEEDKTDRIDAFRIADFLRIGRYNKSLIKEEKYVALQRLTRSRYQLVHQLTECKQHFLENLYYKCNTLSKELNTSVFGATMMEILSDSLSLDEIVEMELESLATLLQKKGKGRFSDPEQLAKTIKKAIRDSYRLGKVVQDSVDVVLATYVRLIQTLKKQIKELEKSIAALFEAIPEAKCLTSVPGIGIVYAAGIIAEIGQIERFENEAQLAKYTGLYWKKSQSGNFESERTPLTRTGNQYLRYYMVEAANSVQLREATYRSYYLKKYDEVPKYKHKRALVLTARKLVRLVDVLLRNHQLYMPERSV

SEQ ID NO: 398150 - protein, 363 aa, unidentified
MRESMTVTVGLDVHARSIRLAAVCADELLEERTLPYDEEQVERLLRRWPLVRCCYEAGPTGFGLYRHLVERGIDCSVVAPGLVPQRPGDRVKTDPRDARKLARLHASGLLEPIYVPSPEFEAARDLVRAREDARLDRMRDRQRLSKFCLRHGRLLPTSAWTVTRRKWLGEQQFEHPAEQLAFDTYLHAVDLVDARIEQLERAIRETAAYWPWRELVGRLRCMRGIDTHTALALVVEIGDFSRFRTAEQFMAFVGLVPSEHSSGEQRRQGSITKVGNSHVRRLLVESAWHARRRPTVGYELSRRQRGQDAAVIERAWRCQQRLHQRWQRMAGRGKPHQKIVVACARELAGFVWAIATDQPLRTL

SEQ ID NO: 398151 - protein, 325 aa, unidentified
MVAVVGIDVAKHTFDIATLQPNGKYRTRSRLANDPSGFAQLCEWLEKHAGPDAWIVMEATGIYHEALATCLFERGYRVSVVNPAQTAAYAKTQLSRGKTDKTDAKLIAGFGQDQLAKSRLRRWQPEPPAQKRLRALVRRLADLREMEQMERNRLESADANIQDSIHTVLRHIEEEIRRTLKAIEDHIDSDPDLRQRKELLTSIKGFGDQTAALLLGELGDPLAFRSAKAVAAFAGLTPRPDQSGEHQGPTPISRIGSGFLRSRLYMPAIVAMQHNPAIKALAERLRSRGKSGKQIVCAAMRKLLHIAYGVLKSGQPFDPKLALAR

SEQ ID NO: 398152 - protein, 340 aa, unidentified
MQVSIVGVDLGKNSCSLVGLDAAGKVALRRRLRRDGVVALLAKLSKCVVAMEACCGAHHLGRALAEAGHEVRLMSPEYVCPYVKAQKNDDRDAEAIAEAATRPTMRFVALKSEAQLDMQSLHRVRDRLVGERTALMNQIRGLLLERGLVVPQGKSRLAVALSDLLDGEANALAPRMRVLMRDLREQWRALDERISAFDAEFAETAKADEDARRLLSIPGIGALNATALVAAVGDATAFARGRDLAAWLGLVPRQISTGGKPKLVGITKRGSKYLRKMLIQGARAALPTLRASDTRIGAWLRGLLARAHGNTAVVALAGKMARIAWALLRRGQIYSTAPVA

SEQ ID NO: 398153 - protein, 320 aa, unidentified
MTDAVLGIDVSKNTLDTSFLAGTKPRSRSFANSPDGWRQLIAWLAKEGVRQVHACLEATGRHSLGIALALHEAGHVVSLVNPAQIRDFARTKLGRNKTDPVDAAHIREYAELFKPRPWTPPSPALRRLCELQTIRAGMVASLTEWKNRSTSGMDRALALAKATIQHFTLEAVDQAIAETIDNDPELCAKRNLLVSISGVGETLAGIVLAELPGPDVLDSSAAVAAYAGLNPQQHQSGTSINRPARISKIGNAVLRTALYMPALSAMRYNPAIAALVDRLKAQGRLKGKQIVVAAMRKLLVICFGVLKSGKEFDPTIAMAQ

SEQ ID NO: 398154 - protein, 410 aa, unidentified
MELLHRRCCGLDVHKETVVACLRLVSDGKVTTEVRTFQTTTAELLRLSEWLATNECTHVAMEASGVYWKPVWHILDDGEFALVLANAAHVKNVPGRKTDVNDAMWLAELLAHGLIRASFVPDTQTQEMRNLLRARKQLVREQSSHVLRVQKTLEDANIKLDSVLSDLMGKSGRAMIAAMIAGETNPAKLASLAHPRAKASHEEFREALRGRVTKHHRFLLRLHLNQIDALNAAMATLDAQVEANLGPFRTAVELIMSVPGIKNLGANVIVSEIGIDMSRFPSDAHLISWAGICPRNDESAGKRRSNRLRKGAPWLKTTLVQCAWAAVKKKNSYLQAQFYRIKARRGPKKAIMAVAASILTAIYHMLKDGTMYKDLGCNHFDRRSTDQQKNRLIKRLAELGYVVEVKPLAA

SEQ ID NO: 398155 - protein, 363 aa, unidentified
MITIGIDPHKSSLTAVALSPTGVPLGQLRLAVTKTVGTELVEWAKAWPERQWAVEGASGLGRGVAQLLAATEPTVLDVPAKLAARARLLGSGSARKTDVTDAASVAAVAQRNERLHQVRAEDDTVILRLLSDRRDDLVAERTRTLNRLHVLLRDLHPGGAKRNLSTVQAAALLRTIRPLTPVDAQRKALARDLLADVRRLDTAIKAGTKAIGTVLEEHHSTLTEVHGLGLVLAAKILAHSGDVHRFPSRHHYASYCGTAPIEASSGDLRRHRLSRAGNRQLNSAMHVIAVCQARDPGPGRDHYRRKLAEAKTPAEARRSLKRQLSNVVYKHLVADQRAAIASSTGPTAVAAGASNDHSPEIWC

SEQ ID NO: 398156 - protein, 340 aa, unidentified
MASDPVDTQLFVGIDIAAATFTAAWSCSDAPISPAHTYHQTPHGFAALQTRLATSNVLPAETLVVMEATGSYWVALAVTLHTAGYRVSVINPLQAHHFAKAQLRRAKTDVLDAQDLCRLAAALRPPVWTPPPAVYHEVRQRLLVRDGLVTMRQQARNQRHALSQWPVVVAGAAEQLTAVIADMDARIAMLEGEIAVVLEASDWAESLGYLTSAPGIGLLTAAWLLVATVNFTPGETPEAVVAYAGLAPVPRQSGTSVRGKAQIGHSGNGRLRTAAYLATLSAVRYNPMLRVFYQRLRAAGKPVKVARCAAARKLLHLAWALVTKQQHFDPLRHLPTHAAA

SEQ ID NO: 398157 - protein, 356 aa, unidentified
MIEIGMDQHKRFSAVAALNAQTGEVVERRLEHDDAESIVSFLRSFEGPVRVTLETTGNWYWLADLAEDAGAVVRLCHTVEAKRRRRGKAKNDRLDALGLAQLSAEDRVPEAYLPAREDRDRRERHRFRIRLVRLQTVLKNSIHALLSKLNIEGPFEDAFGKGGRAHLDALALREPYAGHLRSALRVLDALHAEIAREQVAIRAELESNPAARLLMSAPGIGELTAYLLLYEIGPIERFPGDKQFASYCCLAPGTEQSADWHGRPGVGRAGNLYLKEAFTNAVLGAIRKDPAIRAFYNRQLRRNGAKKAKVAAAHKLAVAVYHMLRRRQAYRPAPAMKNQTSGKPVLRLGRPFETVA

SEQ ID NO: 398158 - protein, 367 aa, unidentified
MKKVSTVGAKPSKKISQQKLTVGLDLGDRNSWYCVLDESGQIQLEQRVRSNAKALREVFGQLPHSRIALEVGTHSPWISRLLSELGHEVIVANARKVRLIGESRKKDDRLDAQTLARLARIDPGFLSPVKHRSAQAQADLMMIRARAGLVRARTALVNTVRGLAKSYGERLRGCNVRNMNPEKADGLSPELQSALEPLLAGIEELSEQIREYNQRIEKLAQESYPQVALLRQIKGVGTLIALTFLLTLEDPHRFRKSRDVGCYLGLQPGRRNSGQSEPQLHISKEGDPYLRTLLVQGAQHILGPFGVDCDLRRWGLKLAERGGRSGKKRAIVATARKLAVLLHHLWVSGEVYEPLHNSRRTAVAAAA

SEQ ID NO: 398159 - protein, 365 aa, unidentified
MSSVASPAGLVHLGMDTSKKTIVIATLWPGEEIPVTERIANEEAAVRRFFGRLGDPSVLRSCYEAGPGGYDLYRLLTSMGVACDVVAPSLIPKGGSDKVKTDKRDACRQARLHRAGELTPVRVPARAEEAVRDLVRVRAALVDDRKRAQQRLTAVLMRHGSVWTGSYWTAAHRAWIDAQRFGEPALAAAIAHYRGTLATREAELAAIEAELAPWARRDPLAGPVARLGCYRGIAELGGLTLTAEIVDWRRFPAARAFMSYTGLVPSEYSSGERTRRGSITKAGSEPVRTTLIEAAWAYQHAPAIGATLRRRQAGADPGTLARSWKAQRRLNGRYRHLTSHGKARGEAITAVARELAGFVWAEMTA

SEQ ID NO: 398160 - protein, 348 aa, unidentified
MTIVERARSITGGVDTHADVHVAAALDELGVLLGTESFPTTPAGYAELVGWLEAFGPVVKVGIEGTGSYGAGLTRTVMARGIEVVEVDCPNRRHRHRAGKSDTLDSVSAARAALSGEAHGQPKGGTGPVEAMRVLLIAKRSARGERTRTLNQMRHLVYAAPDPIRARFQGLTPAQLTGQAAALRPRPGPPVGYVTLMTLRELARRAVSLEADIGRLDDLLEPIITAHAPGLLSLTGCGAYVAAVLSVTAGDRPERIRTEAAWAHMCGTAPIPAGSGKTDGRVRLNRGGNRQANSALHTIVLTRMSCHELTRTYVARRRDEGKGNLEIMRYLKRYVARETFKHLPRTAN

SEQ ID NO: 398161 - protein, 399 aa, unidentified
MVSEAPGAPAYAGVDTHKDTHTLALVDALGREVATRTFPADPGGYEALADAIGDTGVVVGVEGTRSYGRGLCDCLQARGYEVREVLRPKREARRRGKSDPIDALAAAREVAAGRGSEVKGLDGAAGELRWLLNARELLVRQAARIASFVDSMLTSAPEGLRRSFPGSGAARIGAIARCEGAGSELEALRAVALTYLELWERADALEALISPLVRAACPLLAGQRCVGDVTAAELVVAAGSNPGRLGSEAAFSMLCGTSPIPASSGRTDRHRLNRGGDRRANKAIHQIVRVRSAHDPGTRDYLQRKSSEGKSGPEARRCCCRFVARGVYRALTSPQPRVPDARGLAARRRALGLTQARLGALCGMAAGKVSRLERGELFELDALLAYEAALDGAEARSAS

SEQ ID NO: 398162 - protein, 364 aa, unidentified
MKKHSRAEERLTIGIDLGDKRSHYIVLDASGEKIEEGRVVTTQQAFQRRFGAMEAALIAIEVGTHSPWVKRLLEGCGHQVLVANARKLRMIYENDNKSDAVDAELLARVARLDPRLLSPIEHRGGDFQADLAILRSRNALVRARTQLVNHVRGAVKSWGSRLRKCSTSSFHKQSPIQMPEELKPALMPVIQTIGSLTSRIRAYEREIVAIAQQRYPEVDLLQQVGGVGPITALCFILTIEDPERMKRSRSVGAYLGLRPGRDQSGGKDPELRITKAGDHELRRLLIGSAHYILGPFGPDTDLRRWGLSLASRGGQAAKKRAVVAVARKLSVLLLSLWRTAEVYEPLRNTQARARKRTVEEKIPA

SEQ ID NO: 398163 - protein, 447 aa, unidentified
MRDHVFNERNGAYWATPTFVAYCLAVLSAAAFYRASGLDAMGCAARQWHHRRGNKAMELPVAKQNDLSRCLVTLEQDATVIAVIEMGQSSWLVAGIVPGLERNPLKKLSPDPDALLQLLYRWQKEAVQAGRAIKRIVVAYEAGRDGFWLARWLRAREIEAYVIHPSSVPVSREHRRAKTDRLDTELLKRAFLGWLRGEPKHCSMAAIPTVADEDTKRPGRERQSLVGERTRIINRVKANLARLGIRGFRANLAQASSRLEALRTPEGIAVPANTRAELQRDMDRLRFVKQQIKEIETTRAKRLAGAPNEQRHAMVRLLAQVVGVGIETADMLVQEVFSRNIRDRRALARYAGLTGAPDESGKKRRERGLAKAGNARVRRGMIELAWGHLLHQKASALTEWYRKRTSDTRGGTRKTMIVALARKLLIALWRLVTTGETPAGLLLRPAV

SEQ ID NO: 398164 - protein, 347 aa, unidentified
MTIVGPARAVTGGVDTHRDVHVAAALDAVGGLLGTAPFATTTAGYQALLSWLESYGDVAKVGVEGTGSYGAGLSRHLQAAGVIVLEVNRPNRAERRRSGKSDPLDAIEAARAALSGKAKSIAKTKDGAVEAIRALVVAKRSARVARTAALVQMRHLVFGAPDELRSRLRGLNVRSLTAEAARLRPARRGDPVLMATKASLSSLGRRVQGLDDELADLDARIKTLLTGHCPDLLGLFGVGPDTAAALVICAGDNPERLHSEAAWAHLCGVAPIPTGSGQSSGRVRVDYGGDRQANAALWRIAMVRVAHDPETTAYFERKRTEGRSKAEIIRLLKRYIAREVYRYLPRG

SEQ ID NO: 398165 - protein, 344 aa, unidentified
MTYYTGIDVSLRSVSICVVDDKGEVCLEAKVAAEIDAIVDRLRRFSSEVKSVGFEAGTLTQYLTYGLQAAGFEVICLEARQVSVTLSAMRNKTDRNDARGLAQILRTGWYSRVHVKSLHSHQVRALLASRKAILKKCVDLENELRGLLKVFGIRLPSRVGHGSFDAELRETVSTDEMLACALVPLLDARTVLYKTYLKLDNAVKGLVRVDPICRRLMSIPGVGPVTALTFKAAVDDPNRFKSSRTVAAHFGLTPRRFQSGEVDNSGHISRAGDADVRSALYVAAHSLLTRNAQWSTLKAWGVRLAKTRGHRRAVIAVARKLAVILHRMWIDGSEFRWGAVATPA

SEQ ID NO: 398166 - protein, 346 aa, unidentified
MEYIALDVHKKYTWARVENAEGERLYESRLAHAHGTVKGFVSRWTAGSPVAVETVGNWYWVVEEIEAGGGKAQLVNARLAKLMMGSVNKSDKLDAKGMNRLQRTGTLPTVWIPSASVRDARELPRTRMVLSRQRTQLKNRVHATLAKYGYVVEGASDAFGKKGRKIVEELLLKLPPHTGQALRLILDELDHVTDNLKQIEKQMTETFSPCPQTQWLKSLPGVGDTLAVVIWTELGTMERFSRAEQLASYCGLVPRENSSGGKIRFGAVRRDVNVYLKWAFVEAANSALLNAERCGYGHISRLYQRLKPRRGHGKAKVAVARHLSEASFWMLKKGEPYREPMSSTQR

SEQ ID NO: 398167 - protein, 338 aa, unidentified
MELKRIAIDTSKHVFTVHGVDEHERPVLRRDLRRQQVEGFFAALPPSEVVLEACGGSHHWGRQLSALGHRVKLIAPQYVKPFVKRGKNDRIDAEAISEAAARPTMRFVPVKSAERQAQASVLSLRELLVKQRTQLINALRGQAAEFGIIAAKGAGNAAALAARIAGDGALPIAVKEVLALLGQQIARLDATIAALDGKLAAQHRASAMSRLLCDIPGVGRITALTALLTVDPGQFKSGRHLAAWIGLTPKERSTGGKRRLGAISKQGNERLRQLLVLGAMAVIKVAKPGHRYATRWLLKLLERRPRRVAAVALANKMARILWAMMTSGEAYRPSPVAA

SEQ ID NO: 398168 - protein, 376 aa, unidentified
MREKLRFLGLDVHAETIAVAVAEPDGEVRNLGTIANREDSIRKFIKKLGSPEQLRACYEAGPTGFVLYWQLTQLGVDCVVVAPTLVPKKPGDRVKTDRRDALKLARSHRSGDLTAVWVPDEDSEALRDLVRQREAAKQDQLRARHRLTKFLLRTGQRPPLGLKAWTERYMRWLEQVRFTQPAQEVTLRDCLNEVEHMSARVKRLEEAILEVVKLAPQSMQEVIRGLQALRGVAHISAVTIAAELGNISSRFQSARKLMGYSGVFPSEDSSGNRIRRGGITKTGNAHLRRIVVESAWCYRHWPRVGARLRKRQQGIPAEITEIAWKAQNRLHKRYMKLSMAGKDPRKVMTAVARELLGFIWAIAVKAEQAFQQPIAA

SEQ ID NO: 398169 - protein, 416 aa, unidentified
MFAVGVDVANGRSMVAVLDGMRNMVAKPFEVVHTAQGFAALVEKLRQLDGEVRIVMEHTGRYYESFAMSMHRAGFFVSAVNPLLIKNYQGGINVRKVKTDKADAQKIAQFALDKWTILPHYTPMDTIRYNLKTLHRQFQLASKTKTALSNNLIALLEQSYPGANRYFDSPVRTDGSQKWVDFVDTFWHVDCVAMSSEHAFVERYRKWCKRHGYVFSEQKAIELHADARQKIPLVPKSDTCKLLVREAVSQLNAVSRTVETYRAEMDRLASQLPEYETVMGMTGVGKSMGPQLMAEIGDLRCFAHQKSLVGFAGTDPIKEESGDKVSQSAPSSKRGSPYLRKTLFVIMTILLQLQPQEDPVYQFLDKKRSEGKPYYVYMTAGGTKFLRVYYGKVRDCLKAKGLWEVPASASQEVNPG

SEQ ID NO: 398170 - protein, 338 aa, unidentified
MSIVMGLDQHRAQITADWLDTDTGEVKRGRVAPADRAGVRRFLERFVGRELEVALEATTGWRFLVEELRRVGAVVRLAEPAETADLRGSKKRAKGDRADARHLRELLMIGRLPESWIPPDHILDLRARVRPRHELGEQRSEWQQRIQATLYHHGCPQRRQLMVGDGRDWLAQQPLPDTAREQVTIALAMIDALELQIRPIEKELRAYARRQIGCRALMAHYGIGELTAVTILAELGDCTRFSSSRQAVRYAGMDITVYQSDRHRAPGHISRQGPPALRWALYEAAQVARRPGSPDRDYYVQAAERIGGNRACLSVARKLLKRSYHTLRELGEEALAPA

SEQ ID NO: 398171 - protein, 384 aa, unidentified
MNKHNILFIGLDTHKEFVEVAYIEDQRDAQAVHLGRVSSAKASITKLARQFEYKYPDATLHFVYEAGPCGYWIYRLLTSLGHCCYVIAPSLIPKKPGEKVKTDKRDALKLAKLLKSEDLTAIYVPEPEDEAIRDLSRARETAMKDLKDAKYQLKALLLRNNINYKGTANWSLQHLRWLTEIILPHPSQQIVLQEYIQSITERISRLKRLDNELEHHVKNWRYYPVVKAIQALRGVRLLVATGVIAELGDLTRFDHPRKLMSYLGLVPSEHSSGGKRHVGSITKCGNGRARRLLVEGAHSYRYPANISTDIQKRQEDLPKQITDIAWQAQLRLCRRYQKLMQKGKHYNVIVTAIDREMIAYIWAISREIVLVQINPKLRLSRVPA

SEQ ID NO: 398172 - protein, 351 aa, unidentified
MIMVGCDFHTRFQQVAMLDPTTGEVIERRLEHETGEARRFYASLCEPARVGIEATVNAQWFEKVLREYHHELWVGDAAEIRAMRVRKQKTDSRDALHILDLLLTDRFPRIWIPSPAERDVRQLVRHRHKLVRLRTSVMNQLHALAIGQGLCRKQKLWSKVGRLELEALVLDRWASRRRHELLQLLDQLNPWIADLDRAVMQEVQSRPEALHLMREPGVGPVTALAFVLTIGPVGRFQRSKQVVSYLGLNPSEESSGGRQRLGSISKQGNSMLRHLLVEAAQAASKFDPELRRDYQRLKFRRGNSGVAKVAIARKLAVRLYWKLREAAQPNTAARMQGSPANPVADESLSPK

SEQ ID NO: 398173 - protein, 416 aa, unidentified
MKKHNNSGKKSELTSKRAKSRGPVQRDTKEVLAELVGKLKEKLDRKKVAARSAGEEHPGGELRPNLDRLTVGVDLGDQGSHYCILGLEGETLAEGQLRTTQEDLATFFQGLNAARVVVEVGTHSAWVQEVISGCGHEVLVANPRLMDGSKRRKRKNDRIDAHKLARLGRVDPESLHPIQHRSREVRRDLVMLRARDALVAARTELINTSRGLVKSMGTRLPKCSSRSFAQKGEETVPVEIREALLPLVRLAAALSADIKEYDKKIETLGREKYGHTALLRQVKGVGPITALAYVLTLENPQRFVKSRDVGPYLGLVPKQEDSGESQPQLGISKAGDTMVRKLLVGSAQYILGPFGPDTDLRRYGLRLCERGGKNAKKRAAVAVARKLAVLLHRLWVSGEVYEPLHYAMSAPIAAAA

SEQ ID NO: 398174 - protein, 345 aa, unidentified
MDEAYDGRQVVGMDLHRRRSVLVRMSMDGRKLETVRIGNSPGALRAVLARCGERPLVVLEATYGWYWAADVLAGAGAEVRLAHPLGVRAFSYRRVKNDERDAADLADLLRAGLLPEAWIAPPEIRALREVVRYRHKLVGQRTSCKDQVHAVLAKLGVPVTHSDVFGTGGGLWLDQLVLPEPYAAKVASLRALIGVLDGEIARLGQRAAGVLGADPGYAALRELPGIGPVLAAVIIAEIGDVTRFRRAGQLCSWAGLTPRHYESDTKVIRGHVSKQGSKMLRWALVEAIQHQPAGTRPRQARDAIIARRGKEARNIAKTAAARVLLTQVFYALRDGHVRSAGRPAA

SEQ ID NO: 398175 - protein, 338 aa, unidentified
MLHVGLDLYKRFSTIATMDDDGNVRQEDKLYHDDRARLTEFFSKLKGQAVVSVEATRNWYWLYELLEELGVTVKLANARKVRLIAEAWLKSDKVDPKALAQLERTGFLPEAYIPPRATRDNREFLRYRLTLVRLRTGLKNKVHALIDKLGVSHQFADLFGPAGRRFLAALELRPAFQQELVNYLALIDDIGQRIMAATKEIKKQLKPDPRAKLLITIPGIGDLTAYLLLNEIGDVKRFSTPGKLCAYGGIVPIVRQSADHRWQGHITREGNRYIRWALTESACLAPSKDYTLGSFYRRLAARRGPMKARIAVARKLLVAVWYVLTYGEPYKVTKIPTI

SEQ ID NO: 398176 - protein, 320 aa, unidentified
MAVLGIDVSKADFHAVLLAGTDRSRRSFPNGPAGFRAVRKWLINRKVTEVHACMEATGAYWLELARSLHAGGIRVSVVNPTRTALFARSQLRRTKTDAVDAQMIAEFCATQRPEAWTPPATEILVLRGFLSYRQQLVEQRVALEQLVSQVEVDASLERLHRDHIAVLRDAISTLEEQIARHVQAHHELREAVERVQRIPGFGALTAAAVVAKLPVDRLRNAKAAAAYVGLSPSERQSGSSIRGIPRICKTGNGDLRRDLYMPALVAMRFNPALRSFAERLKSRGKPAKVVIVAIMRKLIVLAYTLLKDGSTFTAQETAHA

SEQ ID NO: 398177 - protein, 402 aa, unidentified
MFYIIYKDMKKVCGLDVHKDSIFLCILAGNGQTFLKEYSTLTPDIEAIRDLIKEQQVDEVAMESTGIYWIPIWRILQGHVEMKLVNPYFIKQLPGRKTDVKDSQWIATVLQKGLIRGSYIPEKHIQELRQYERRYVRICEHITRIEQEIDRQLHRCNIRITNFTCKIGSVSVMGVVRGLFQGESTPEELIKHIHGRITNKHKEKIAASLQGVVADSDRFILRHNYEELELLTRQQKECVKEMENICDTLYKEELQLLCTVPGIQKLSAMTIIAELGVDLKTFVTAASLVGWVGLRPRNDESAKKIKCRKITNGNKYLRRILVQCAWAITRSKSCWLSGKFNELAKRRSQKKALIAIARKLLVIIWHILSNHEAYKEYKPKLSKEQKQKRIARLEKQILELQS

SEQ ID NO: 398178 - protein, 435 aa, unidentified
MEEVTDEPLYRDRVCGIDIGKAQIAATIRVPSEKNPARRASETREFATTKRGVLALADWLRCWQVPAAVMEATGDYWKPVFYRLEAEGFECVLADAKQVKNLPGRPKRDPSDSRWLAQCFERGAIRSCFVPDPEFRVIRLHTRYRRDLTDERTREKNRTEKLLESAAIKLSSVVTDLHGVTGRDIMDHLIAGERNPKVLAQLARARARRKITELEHALDGAEFFTAEHAALLRTMLERIDRLTADTAGLTEVIEQLLAPYEEQLAQAESMPGWGRRSAQDAVAETGVDMTKFPTGGHLSSWAGKTPLDHQSGKRAGRARHKKGNKYLAAVTGETAVAAGKTATREGARYRKLARSRGKGKAQVAVGNTQLRVYHKLLSNPGMRYQDLGPDYYERQAATRRKIAYHVREIEAFGLEVTLARIPEPDPDGPASTQAA

SEQ ID NO: 398179 - protein, 358 aa, unidentified
MNPMLSGQVDHVIGVDTHRDTNTAAIVEAATGAVLAQLQCSTDAIGYKRVFAFVVEHAPCRRVWAIEGTGSYGAGLTTFLLERGEWVVEIDRPSRPARRNGAKNDDLDAVRAAREALSREHLAAPRARGDREAMRVLLAARAGAVIARTKAIGQLKALIVGAPESLREQLRRGSTDEQLDRCSRLRTLPSHSVEHCATIRAIRATARRALFLEAEAAEHETELEHLVMNACPELLELPGVGAITAAQFLISWSHPRRIRNEAAFAALAGVAPIEASSGKTVRHRLNRTGDRQLNRALHTVVLSRLQHHAPTKSYAARRTTEGKTPREIKRCLKRAVAREIYRLLESQARAAKKINQVA

SEQ ID NO: 398180 - protein, 346 aa, unidentified
MNNNDPRYKLYLGVDTHLELHVATLINELGQVVKSKEFSAKLSGYRELLAWCKSYGYIQKAGIEGTGSYGAALTKYLIKNGVSVYEVMRPNRMKRRLKGKTDGMDSENAARSVLSGEAKVIPKSHSGPVESLRSLLISRNSAVKARTQAMNQIRALLVSGPDELKQSLYLPKPSACASACLDQCSDSCEPLMISLVLLAQRWSFLNDQVKTLDQALKRLTLNTAQSLVSRFGVGVNVAATLLVTAGDNANRLKKESSFTALCGVNPIPASSGKTTRHRLNRGGCRSANNALWTVAMVRMRSDPRTKDYIARRTAEGLSTKEIARNLKRYIARELFPLILKDLARLA

SEQ ID NO: 398181 - protein, 408 aa, unidentified
METLHRRCAGLDVHQKEIVACRRIVAGRKVRSELARFATTTQGLMALSAWLAEAKITHVAMEATGVYWKPVWHVLCHDFSLVLANASHIRNVPGRKSDANDATWIADLLAHGLIRASFVPPQPIQDLRDLIRTRRELTREIVRHTQRIQATLEEANIKLASVISDILGWSGRRILKAIVSGQNDPRRLAELGHPRLACTREELAAALEGRLRDHHRFLIGQHLKTIEQIEATIAEFDARLEAALAPFCGAAERLNDLPGVSDNVAQTVIAEIGVDMKAFPTADHLLSWAGMCPRLDESAGRKRSRRLRKGAPWLKPVLVQAALAASKVKNSSLRTRYLNLKPRLGHKKAIIAVAAAILRIIYHMLNDGTFYQDLGPDYRRPRNPERTARNLANRIRSLGFDVEIKKAA

SEQ ID NO: 398182 - protein, 343 aa, unidentified
MQAPRHIGIDLHRNQFTCCVRLENGRNYLTEWKLEDLPRFVKKLRPDDEIAVEMTGNTRLFRDALAPHVARVVVVDPNQFRVISHSVKKTDPNDARNLALYLEKDLLPEVRMKDKTQAQLASLTQTRDTMVKLRTALKNKINNILSAHGINLEKEALSSEKKLNEVLALQFDPMVRIELKVIVEQIRSLNQSIAELEKTIADEGSKLEGHKNLTSIKGIGPLTGSILLSVIGDIHDFADEGKLAAYLGIVPRVSKSNQTEHTGRITKRGSKLGRTALVQCALIAQRYSPYLQRYYQRMKAQTHSTGKAIIALARKLLGIIYRTLKNNWVFEDFPNFVLAEATP

SEQ ID NO: 398183 - protein, 345 aa, unidentified
MKIVGCDLHTRYQQIALVDQETGEFIERRLEHESGEARAFYAALSSPVRVGIEATGHSRWFERMLAELGHELWIGDAAQIRASVVRKQKTDARDAAHLLELLLSERFPRIWRPTMAERDLRQLVWHRQKLVWMRNAVGNQLHALAMGEGVCRKKKLFTKKGRAELEGLGLGVWASYRRQELLTMLDRLDASLKEMDDAVAEQAEQNASAVRLMTHPGVGPVTSLAFVLTLGPVERFERSKQVVSYLGLNPREHSSGGRQRLGAISKQGNPMMRSLLVEAGHTAARLDAELGQDYQRLKLRRGSGVAKVAIARKLAVRMYWMLRGQTSYAQLVRMQGSPWATLVKE

SEQ ID NO: 398184 - protein, 350 aa, unidentified
MLIIGCDYHPGFQQIAFVDTETGECGERRLTHREEAEQFYQDLKQRNAAARVGMEASGHSRWFERLLRDLQFELWIGDAAEIRTKRVRKQKTDRQDAQLLLRLMMEDRFPRIWVPDAANRDLRQLLWHRHRLVQMRTRVMNQLHVVALNEGLRRKKALWRSAGRNELESLKLAPWASRRRQDLLDLLDRLTPKIQDLTRQLEQEVERRPVTRRLMTHPGVGPLTALAYELVIGMPERFHCGKQIASYVGLVPTEDSSGDRRRLGHISKQGNVLLRFLLVEAAQVTVRSQPQWRSKFFHLALRRGRKIAKVAMARKLAVHLYWMWRQGLDYGQLHKLGSHAGAPGNRHGAQ

SEQ ID NO: 398185 - protein, 343 aa, unidentified
MGEVSTIGLDIAKSVFQIHGVDAGGAVVIRKRISRAKLLEFFATLPTCLVGIEACPSAHYWSRRLQGLGHTVRLMPPSYVKAYVKRGKNDANDAAAICEAVTRPSMRFVATKSEQQQSGLMLHRSRQLLVCQRTMLSNAMRGHMAELGIISAKGRNGTAELLEIIADEQDDRIPAAARFSLNVLARQYAAIRAETVAIERRIHAWHRSSEESRRLEEIPGVGPIVATALMAEVGDWKTFSSGRSLAAWIGLVPRQHSTGGKERLGRISKQGNRHLRWLLVAGAMAVIRYARQHGTKRPWLARLMDRRPLKVAAVALANKIARMAWAMMVRGERFKEPKLLPAA

SEQ ID NO: 398186 - protein, 341 aa, unidentified
MKKPTQHLIAEVPRRSSRVGMTIGIDLGDVWSHYCTLNEDGEVVDRGRFRTSPSGVEKWFTDLPRVRIAMEAGTHSIWISEQLQELGHEVIVANVRELRAISHSDRKSDPVDAEKLARYARLDPKILRPIAHRTVAQQEALTLIRARNLIVRLRTAAVNAVRGLAKPCGYRLPASSTLCFAKRCVAVLPPGLAQALGPVLEQIAEMTKKIKHYDRLIKRLTETEYPETQALIQVYGVGQLTALTYVLTLGNKERFQRSRDVGCYLGLRPKRSQSGDRDPQLGITKAGNIYLRTPYDSGVCIWPRAEASSPAIGPSSPSPASWQYCFIASGSPRSHTSRSME

SEQ ID NO: 398187 - protein, 414 aa, unidentified
MESVYRSVAGIDVHKKMLAVVIRRQPDEQAEYEKRKFGATRAEIQHLEAWLRAQGVSEVVMESTAQYWRPVWYGLEPHFRLHLTHPLKTRAPRGRKSDFRDAQRLADRWSSGDLEESFIPGAEQRSWRWLTRTRVQLKKKLGVIHSHVEGLLEQGGIKLSAVVSDLFGVSGWAMLELIGQGVTDVEVLAGKARGVLRKKDRELQEALAGRLEPVYRLLLRQHMEQVRLLRRQVEEINQTLAEAMQEHLAALHRLSKIPGVDLYAAQELVSEIGPQAAAFASAEQLASWAGVCPGSQESAGVNYSHRSAKGNRYLRRLLCQIAWAAIHTKDTFFAGLFARLKPRVEGKGAAWAVAHRIAKIVWLVLHQEVEYQEKGSAPPNERTLVRKFKRLLKEFGSVGLDVRALLDQQLPAPA

SEQ ID NO: 398188 - protein, 343 aa, unidentified
MQTITTIGLDIAKSVFQVHGVDASGQVVIRRQLKRRSVLAFFQKLPPCLVGIEACASSHHWSRELQVLGHTVRLMPPAYVKPYVKRQKNDMADAEAICEAVTRANMRFVPTKTPEQQSCLMLHRTRHLFIRQQTAVINAIRAHLGEFGIVAPVGRKGVEELLNVVADPNDKRVPDIARACLSAFGVQLRRIKEQILEFDRLIRAWHRSNEMSMRLDEAPGVGPVLATALVAAVADPKSFRSGRNFSAWIGLVPKQHSSGGKNRLGNISKQGDRYLRGLFVAGALAVIRYAKIHGTKHRPWLTALLARRPTKVAAIALANKIARMVWAMMARGERYKEPVALAR

SEQ ID NO: 398189 - protein, 337 aa, unidentified
MNNIEGCGVEVSARELVVARKGKAGVQLTRFANTAAGHRQLLRALTRGGQRVRVVLEATGLYALDLALLLSAQEQVQLMVANPRAVRHFAQAMMQRSKNDQLDAVVLLEFAERMPFTPWVRPAENTLALWAIARRLQALTKLCTAEKNRAHAMGLSEAIPVMVRRDIARSLQFHQRAMKKLRQQALQCIAADAQLQQRYQLLRSVPGLGEISAVQTLAELLLLPADRDVRQWVAYAGLDPREYSSGTSVRKYTRISKVGNAHLRRALYMPALVASRVEPHLRGFYEHLLARGKSKRQALVAVARKLLHAIYGMFRSQRPYDGTRVYLAAAAQAEKFS

SEQ ID NO: 398190 - protein, 346 aa, unidentified
MDQIIRIGMDTSKNVFHLHGVNAAEQPTLRRRLTRKQMMGFFEKLGPTIVGIEACGGAHYLARQLCAFGHEVKLLPPQLVKPYVKRNKNDARDAEALCEAMSRPTMRFVRVKTAEEQAALMLAGQRDRQVRSRVQLANSIRGYAAEFGLIAAKGPAKIEELLLRTQAEEGLPALARELFAAMAKEYAQLERRLAEIDAKLMAWHRSNELSRRLVEIPSVGPVIASLTAMKVQEPRAFRSGRDYAAWLGLTPKDHSTAGKQRLGTITRAGDEDLRRLLVVGATAVIWQARRGKGKASPWLAALIKRKPPKLAAVALANKTARICWKLMVSGERYNPRIMALAASEAA

SEQ ID NO: 398191 - protein, 289 aa, unidentified
MITIGIDPHKRSLTAAALDPNSRLLGQLRLPATSQAGEQLLAWAEQWPQRRWAVEGATGLGRGIAQQLVAAGEPVVDVPAKLAARARLLGTSSGRKTDLADACSVGAVALHHRRLRPVAVEDHTVVLRLLSDRRDDLAAERTRILSRLHVLLADLRPGGARRELTATRAAALLRQVRPITVADVERKRIARELLADVRRLDRQVKAASQTLRTAVCEHGTTLTEVFGVGPVLAAKLLGHAGDITRFPSRDHFASYTGTAPVEASSGDVRRHRLMGAARLWEAGFRAASG

SEQ ID NO: 398192 - protein, 467 aa, unidentified
MEKKSISMKIINPNCAGIDVGSRSHFVAIGQGNKDVKEFGVYAEDLQELAKWLHSQNITSVAMESTGAYWQNLFVELMNSGLEVILTNGKFTKNINRKKTDVLDCQWIQKMHTLGLLPSSFLPDETTEKLRTLCRHRAKMIAQKADTSHKMQKFLKWLNFRLDVVVRDITGLTGIKIIGAICNGDLDPRSLASHRHYNCKKSEEEIAKALVSNERKDYLFGLKQEFKRFRFYQSMIAECDVEIADFLQNFIDQKIDVVDDLPEKKPYKRQNKNGLKGIDLNIISYQYFNGVDLLKIPGVSHSTVLTFMSEIGPEGLKKFSSAKKFASWLRLAPNNKISGGRILSNRIPKGSNRLKIALRNAANAVGNLKDSDLGKFFKKIAFRKGRQAAITATARKIAVILWNMVTKKEPYKPLNPYQFLDQKRRAIAQLRKKISKFGINPNDLGIFTKPEYQIAYEKRKLDNQGFS

SEQ ID NO: 398193 - protein, 415 aa, unidentified
MALKIVYKICCGIDVHKNFVVACIAKTDKQGVTTYERHHFSTYTKGLKQLLKWLLDRNCKDVCMESTGKYWIPVYNVLEHDCSIVLAHPKYVKAIRGKKTDKKDAKWIADLFKHDLVAGSFMPPADICQLRDLMRYRFKLTCFKSSEKNRYQNCLTVSNIQLGNVVSDTFGKSSQKIIAKILENPDDTSFDIGSLIHGSMKDKLPELELAIDGYITPEQAAKLKIIKEHFDNLEARKAELEELILALANPYQQEISIILTAPRFKNTFTAIGIISEIGTNMEAFPSAKHLCSWAGLTPTNNESAGKKKSVRVSKAGCYIKPLLVQCANAAIKSKKHPEIRDRYLRIKKRRGHKKAIIAIARMLLTALYHMLKNGENYNSDLYQKSDILPTTREITVEQAILMAQFQGFRIKSATE

SEQ ID NO: 398194 - protein, 407 aa, unidentified
MEVLYPRCAGLDVHAGSATACARIATGAQVMYDHRTVPTTTRGLLELAEWLTGHGCTHVAMEATGVYWKPVWHVLEEHFTLVLANAMHIRNVPGRKSDMNDATWIADLLAHGLIRSSFVPPAPIQELRDLTRTRRQLVHEVARHVLRIQKTLEDANLKLTQVMSDIVGVSGRAILNALIAGETDPQRLADLTRGRLKATRAELVDALHGRITDHHRFMITLHLNQIDALERAVAAIEARIGDALGPFRTAVSLLTTMPGLSETTARVLIAEIGADMSRFPSVGHLISWAGFCPRLDESAGKRRSSRTRQSAPWLKPTLVNAAWAATRKKDSYLRAQFLRIKSRRGAKKAILAVASSMLTAAYFMLRDGVEYHDLGFHHFDQRDKDQLAKRLLRRLRDLGVAVEVKAA

SEQ ID NO: 398195 - protein, 354 aa, unidentified
MQHDAPSRKIFVGIDTHKDTHAAVALNGLGVRLGATIVPVNRVGYRCIDAWARSFGTVTAIGIEGTGSYGAGLARALRETGHHVLEVNRPDRSTRRRNGKTDMLDAEAAARAVLSGQALAEPKAGTSTVEMIRHLKIARDAAVKAKTQAMQTLKSIIVVAAAELREQLESIRGPITLVRHLASMRPGPLTSPLASAKTALRAIARRWLALHQEIQGHDRDLDALVAATAPHLTAALGIANTTTAELLLLVGDNSARIRSEGAFAKLCGACPIPASSGRTNRHRLNRGGNRQANAALHRIVVTRMRLHQPTIDYVRRRTSEGRTKPEIMRCLKRYVAREVFRSLCKPRPPSPSAH

SEQ ID NO: 398196 - protein, 367 aa, unidentified
MKNLTTWVGMDVHKSKVFVSMLVAGAESPLEHSLPNEPRAIRKLIRRLKRGPGDVVACYEAGPCGYVLQREFEEAGLTCFVIAPTLIPEKKGDRIKTDRRDARKLADYLRSGILTAIEPPSPEQESARDLVRCRADHRISLKAARNRLNHFLLRRGVRYTTGKKAWTKAYVRWLHQLSFDDAVAQVVFDQYMLAIEQTAERLAIVDTQIEELAQTDRYREVVGALRCFRGIDTLTAMTLVTELYEFARFGSARDLMGFLGLVPSERTSIRRQLGGITKMGNREVRRVLVEASLHSRHRPAVGAGLRKRRAGQPAHAIARADHAQQRLHARYKRLTARGKHSNIVTVAIAREFAGFVWAAMREASMSK

SEQ ID NO: 398197 - protein, 411 aa, unidentified
MDKENFIYVGIDLHKETHTAVMIDCYNQKLGEITFPNRSVDFPKLVTKVKKCNTDGKEVVYGLENAYGYGRALAVWLIDKGYLVKDVNTAISHRQAKHRGAMYRKSDSDDAKAIALATLNMLDKLPDACPNDAYWSLGQLVHRRDNIMKQRTRLVNQLHEQLCIAYPSYKQFFNDISRPTALYFWEHYPSRKYLKGKSVEDLRAELVPVSHNKCSTKTCEKILDAVASDKVKNNAYQDARDMVTLSIVSDLQHYDSQLAEVDKMLEQMYKMLGCTLTTISGVNVITAVKILAEIGDIKRFSNANKLAQFAGIAPLHLSSSGKGKDVATKQGNRRLQATIYFLAIQMVQVSSKGTPRNPVVRAYYEKRKAEGKTSQQALICISRRLISIIYGMLKSGTEYRMPVVENAGEKL

SEQ ID NO: 398198 - protein, 365 aa, unidentified
MNTITIGVDLAKSVFSVCEVDGSGHVLRRLDLKRDAFAVWLAQVPAGTVVAMEACSGAHHWGRLCLEYGLQPRLMAAQFVTSFRKNRTAKNDRNDAEAIATAARQGNMRFVPVKTIDQQARLSWHRVREGYKVESLAIGNRLRGLLAEFGVVVAKSDHALRVALADLDQHTALPPEMRELLRDLSAHWAQVRTAIDACSARIDAHARADERCARMRAIIGIGAITADAVIATLGDAKEFRNGRQVSAWLGLVPTQHSSGGHARLGAISCRGDGYLRTLLIQGARSSLQRAKAVSVEKSTPEQVWIRQLACRMPFGKVLVAIANKHARQLWAMLADDETYDADAWLKHPMVQRPAGKHAITMSAVA

SEQ ID NO: 398199 - protein, 323 aa, unidentified
MSQPNPLCVGIDVSKTTLDIATANNEFAQFTAGNDTDGFELIIAELRKHSVALVLMEATGGLEAAVACSLQAEGFDIAVINPRQARNFSRAMGYLAKTDRIDAKVLSQMAEVINRHPERERFIKAIPDAERQILAAMVVRRRQLITMLVAERNRLHPAHPQNRKSINTIIKALEDELSRIDEAMNNHIKTHFKELAARLSSIKGVGAMTVATLLSEVPELGSLSRREISALIGVAPVNRDSGTMRGRRTIFGGRAGVRTALYMAALVATRFNPVIKDFYTRLITTGKVRKVALVACMRKLLTILNAMIRKNEEWSDSYHKFSL

SEQ ID NO: 398200 - protein, 391 aa, unidentified
MVCVGIDVAKDKHDCCILDSDGTIRADCITIPNNMDGFKQLLQTIRDCTKKSDKIKVGLEATGHYSYNILGFLLDNDLAVYVMNPLHTNLYRKSLSLRKTKTDRVDARTIATMLLSDVDLKSYTDTAYHNEELKSLTRYRFDKVQERAKLKQSVSRLATILFPELEGLVSSIHGTSIYALLSEYPGAKQISEIHLTKLTNLLATASKGRYGKDKAIQIRDAASTSIGSVMPAKFLELKHTIKLIRELTSEIDEIEVSIQKIMDELNPPILSIPGVGIQSAAMILAEIGDFSNFESPDKILAYAGCSPSTYQSGKLTNCYAHMEKRGSRYLRYALYNATKYVCHWNPVFAEYLAKKRAEGKHYNVALSHATKKLVRLIYALQKSGKAYLVAA

SEQ ID NO: 398201 - protein, 349 aa, unidentified
MKTIMAIDLGKFKSVACYYLSGNHPVEYETIKTTPQAVHDLLVKYQPDCVVVEVCGIIGWVCDLVESLEIECKVANTNDERWQRRLVKRKTDQKDALKLARLEAYGELPLVYIPKPEVREKRALINYRKSLSGRITRIKNNIRAILDRYAVHLPSGKKGWSQKSIATIRAMARPFEKVHADELWRAELWMELALLEQGIDALMSVEDKLDEMNAKDKNVQLLQTVPGVGSRLAEAVSAYIDDPSRFKNVKQVGCYIGMTPRLYQSGVLMYQGRISKDGNSLLRSLLVEVCWLAMRWNPWVKETYKKIKRGSKTRAKIAIVATARRLFIRLWAMLRDGTVWQMPALEQAA

SEQ ID NO: 398202 - protein, 387 aa, unidentified
MKVISRARNRASNNYMNNQSIAIDGRSDHGPQNPNNTAPTVSTIKMGLDVHQASVVVVAQWDHATPKPPQRLSAGALVAWARRLKAKGHRIVSVYEAGSFGYTLHRQLEAIGVESYVTAAQILDSRLSGVKTDGRDAHELCLRLDRYVQGNRQSLTMVHVPTPEQEQQRSVSRQREQLVRQRVALEITGRSLLATQGVFTPGSWWRPRRWDQLQPQLPGWLQSRLETLRPVLGLLQHQIDQLGAQLEAAVDRSALPKAVGSLSAAILNREVGDWNRFRNRGQVASFTGLCPREYSSGGQRRLGSITKHGNPRLRSVLVEMAWRLVRFQPGYHAVKKWQPKMMDAALTQRSRRKKIIVAIARQLAIDLWRLNTGQTTPEKLGMSLAPL

SEQ ID NO: 398203 - protein, 375 aa, unidentified
MDVLYHRCAGLDIHAETIVVCALLGEEEHVQKEVETFPTFTKDLFRLLKWLEDRGVTHIAMESTGVYWKPVFNILEDYFDITLANAQRIKNVPGRKTDVSDAEWIAKLLRYGLIEKSFVPPENIRELRDLTRLRKKWIGQLTAEKNRIQKVLECSNIKLSSVISDVFGVSGRKLLERLMKQGYIEETEVDACIHRSMKRKKQQIQDSLFGTLTNHQLFMIRQSWKHIESLESLLRDIEERIDQLLQVYKQEMELLVTIPGIKKETAAVIIAEIGVDMGQFPTSQHLASWAGVAPGNHESAGKRKSTRTTKGNPHIKSALCEAAWALSRCRNQRLAAKYWSLAARRGKKKALVAIAHRMLTIIYCIISRKEPFREQ

SEQ ID NO: 398204 - protein, 346 aa, unidentified
MEIIRVGVDLAKNVFQLHGVDRHEKPVWKRSLRRGQWLQELHRRVAPGAEIGMEACAGAHHWGRQLRARGYRVKLMAPQFVKPYVKSNKSDRNDAEAICEAMSRPSMRFVELKSVEQQDIQAVHRVRAELIKQRTAKVNQIRGLVGEYGLVAPQGVSHVRKAVPQWLEDASNGLSDRFRRLLAGLAEDLRRLEQRIEELDEETGSIVRETPPARRLLALRGVGPTTATALVAALGSGGSFARGREFAVAMGLTPKHHGTGGKERILGISKRGDAYLRQLLVHGARSAVRAASGKDDPLSRWIQGLLAHKHSNVVTVALANKTARMAWALIRHDVDYDAELAAHPIH

SEQ ID NO: 398205 - protein, 317 aa, unidentified
MTFVGIDVSKLTLDVAALSVTGEVQRERFGNTSQGHTELLGWLERFPDCRVAVEATASYHQRLTSSLQEHEVYVSVLNPAQVSYFVKSQHRRNKTDKADALWLAVYAKERQPAPSLAANLSRQSLAREIGALSKDITRLKNRLEAAESGQVHGEVVISLKRRIEALAEEKRALEGALEQETKRSSERELSLLLSIPGVGVRTACLLLAELGEVRRFESARKLVAFVGLTPTRFESGTSVVKRSHISRLGSSHVRQILYMPCLSAIRFNPIIKAFFERLVQGGKHKKAAVVACMAKFLKIVYGVLTHQKPFDPTRVGA

SEQ ID NO: 398206 - protein, 332 aa, unidentified
MNSEKYIGLDVHQATISVAVMDSRGKVVMESILETKASTILEFFAGLRGTLSVTFEEGTWAAWLYDLLKPHVAKVVVCNPRKNALLKDGNKSDRIDARKLAELLRLDNLKPVYHGETGVRMLRELARSYLTIVKDLTRVMNRLKALYRSWAIPCAGRDVYYTRHRTEWLGKIQQARRELLAESRKHPITAKLRKIPSLGPIRSALAVALIQTPHRFRTKRQLWAYSGLALETRTSGEHRYVRGQLRRSKKQVSIRGLNKDHNHDLKGLFKAAATRASVQPGPFQDFYQRSLAKGIKPTMVRLTLARKIAAITLTLWKKGENFDAEKLKSQAA

SEQ ID NO: 398207 - protein, 311 aa, unidentified
MANIICGVDVSSETLDGRIGLTDVVIQVKRTREGIATLAKFCADHGVELVVMEATGGYEKLPYALLWAAGIGCAIVNPRSVRRFAEAMGFLEKTDRIDAGVIAEYARAKRLVAQPPASESQERLRALVTRLGQLTQLKVAQANQRRLIDEPLVLDSIDDMLKEIRRQIRLFEAEIVTLLDSDPLWTRLDQTFREIKGVADKTVARLMADMPEIGTISNKAIAKLAGLAPMAKDSGKRKGRRSIRGGRSQVRSTLFVVASVVGRHEADFKDFKARLSLAGKSKMVIRVAMARKLLVRLNAKARDVRKELAAA

SEQ ID NO: 398208 - protein, 323 aa, unidentified
MSAFVGVDMAKNTFDVATPLDNGKHRTKGKLSNDAKGFAEFESWLQKHATPDALIVIEATGNYHEALADFLFQKGYRLHIANPATTAAHAKSELSRNKTDKTDAKLISDFAMQKHRKLRLWVPEPQSRRRLRALVRRLEDLNEIRQMEKNRLEVASPNVVTSIESVIAHVSEEITETEKAIKQHIDDDPDLRGKSELMTSIDGIGEKTAALILAELGDPLDYEGPKKLSAFAGLSPRQDRSGGYVGATRISRTGSSRLRGGLYMPAIVGIQHNEVLSEFAKRLKANGKAPKQVICAVMRKMLHLIYGVLKSNKPFDPGIALAA

SEQ ID NO: 398209 - protein, 340 aa, unidentified
MPLYAAFDLHAKTNHLGIIDHNGKRIMVKKLANEPSLILETLKPMRRRIVGIVVESTYNWYWLVDLLMEAGYKVHLANPSAIQKYSGLKHADDVHDAFWLAEQLRLGVLPEGYIYPKEERPLRDLLRKRAHLVKLRTSLIISLQNVISRNLGFKVDVNDVKRLREDRISPLLEINEDLALVGSASKESIDFLTRQIKRIEKVVESRVELKEPYRYLLTMPGVGKILGLTIMLETGVISRFPGVGHYASYCRKVTSKWSSNGKAKGKGNKKNGNKYLAWAFSEAAELARRYEGAARDYYNRKARKSNFMVAHSALAHKLARAAYYVMRDQVPFMPEKLFTP

SEQ ID NO: 398210 - protein, 299 aa, unidentified
MTSSIKYVGMDVHTESISLAVRNPAGKIVMECVIETKANTILQFFDGLRGDVRVTFEEGTWAAWLHDLLKPHVTKLVVCDPRRNALLLDGNQNDRVDARKLSDLLYMNKLSAVYHGDHGLRTLKELVRSYLTVTQDLGRVMTRVKAIYRSWAIPCSGTQVYTARHRAEWLGKIHEPGVRQRAEFYYQQLDALRLLRQTVRRELLAESKKQKAWKRLCQIPSIGPIRAAVLLGILQTPHRFRTKRQLWTYSGLGIEVHSSADHEARQVQLSSSAPLTLWMRDFVTTSNNPSHTRASRSSP

SEQ ID NO: 398211 - protein, 351 aa, unidentified
MDYRVYCGVDFHARQQTISCLTTEDGVVSTHELKHQNKAELKAFYAQFRGPVLVALEASGYSPWFEQMLEELGHEVWLGDASEIRRRARRRQKNDRRDAELILDLLLHDEFPRIHRPAVKSREILRMLRYRHKLVQMRTIIKNSLQALSIQSGLSLRARLFTGVGLDQLRSLTMSPVMQYQRDQWLVALESLNQHVVAATNWLGEQAAGDARVQRLRTHPGIGLLTGLAVVHTLEPVTRFRNQRKVAAYVGFDPQERSSGEKKRYLGISKAGSRVLRFLLVEATHTAIKSDPDLKRFYLRLLHRHGKAKAKVAAARKLLIRSYILLRDHIDYAEFGRRAVAARLARLASKA

SEQ ID NO: 398212 - protein, 360 aa, unidentified
MSGVSVQEQVLDGAGVVVGVDTHQLVHVAGVIDARFGRLADREFPATRAGYGALVAWAATYGPVLAVGVESTGSYGAGLTRHLLTHGADEFEVFEVSRPEKATRVRHGKSDPVDAYSAAEQVLAGRATGRPKVRTGIVEAIRTIKVPRDAAVKNRTAAYSQLRDLITAASGRLHDDLIELSGKKRVAKVLAMRPDPTRIADPDHAVRHALRALARRIAYLDGEIREADQHLASLVEQACPTLLAMPQVGVQTAARLVITAGENIDRMRSEASFAKLTGVAPLPASSGKTHRHRLNPGGDRQANSALYMITVGRMSRHEETRAYVERRRAEGLSTPEIIRCLKRHLARSVYKALRTDLMTT

SEQ ID NO: 398213 - protein, 400 aa, unidentified
MGQPVARGWAGIDVGKGHHWVCLIDEDGSTVWSGKVVNDEAAILDAISEVLARAQQVSWGVDITGTSSALLLALLTAHGQQATYVPGRTVNQMSTAYAGEAKTDARDAYVIAETVRHRGDLTPVDVPATLVTELRLLVTHRTDLVADRVRLINRLRDVLSGYFPALERAFDYSASRGALVLLTGYQTPAAIRGRGRSRLTSWLAARKVRSGEQVATAAVEAANAQHTTVPGQDVAASIVAELAAALLDLDQRIHVLEARISATFHAHPQAEILESMPGIGTILGAELIAAAGDLSRYADAGHLASAAGLVPVPRDSGRRTGNLHRPMRYSRKLRRVFYLSAQSAMMREGPNRDFYLKKRGQGHGHVHALIALARRRVDVLWALLRDNRVFTATKPEAKVA

SEQ ID NO: 398214 - protein, 374 aa, unidentified
MKEFSKYVGLDVHKDTIVVSIADAGRSKARHYGTIKHTTAAVSALLKKINAEGEVLELCYEAGPCGYGLYHQLTGSGHDCQVVAPTLIPKRASDKVKTDRRDSLRLAELLRAGELTPVWVPDSDQEAIRDLVRTRDDFKVSQRQVRQQLLAFLLRHSLRWTGGKQNWTQGFWRWIEALEMPSAHQQFALKEYIDAVRRHGMQIQAIEKQMLVAKQGWSLEPIVDGLMAMRGINLVSSMGLMAELGDLSRFSRPTQLMAYLGLVPSEHTSGDSRQQGGITKSGNGHVRRLLIESAWCYRFTARKSRDIEARAQRTSPEVQAIAWKAQKRLNARYKALSERGLSSCKVVTAVARELCGFIWAVVQQVRDEQQRAVA

SEQ ID NO: 398215 - protein, 296 aa, unidentified
MLIIGCDFHPRFQEIAMMDAETGELVERRLEHENGEARVFYASLPKPVLVGMEAPGYAQWFERMLAEFGHELWIGHASEIRAGVVRKQKTDARDAQHLLRLLLEKRFPRIWIPSPAERDARQLLRHPYKLVCFRVSVKNQLHGLAMSQGVCRKKKLFTAQGREELEKLSLGPWGSCRRQELLGMLDQLNPVIDELDRAVRQEAESRADAARLMIHPGVGPVTALAFVLTLGPVARFRRSKQVVSYLGLNPKERSSGDKQHTYAISKQGRRNAVDLARGRAVNFSESRREPHKFGQR

SEQ ID NO: 398216 - protein, 369 aa, unidentified
MARNGTLAKSQELQPSFHATTEQITIGIDLGDRFSHCCVLGPDGKILTEGRLRSTPETMARHFQDLPPARIAIEVGTHSRWVSQLLGQWGHEVIVANPRNLRMIADSIRKSDQVDAHMLARLARVDPKLLSPIVHRKQGIYPDLIQLKARDLLVKNRTRLMNAVRGVLKSAGLRVPPSGTSCFPSKAATCIPDELKPSLTPLLETISHLNKQIYSLDKAIESTAQDRYPETNRLRQISGVGSITALQYVLTIGDPGRFAHSRDVPAYLGLTPRRHQSGSVEQQLRISKAGNKQLRSLLVQCAQYLLGRFGPDSDLKRWGTRMFERGGKNSKKRAIVAVARKLAVLLHRLWLTGDTYHPLYNVSISSATP

SEQ ID NO: 398217 - protein, 400 aa, unidentified
MRVVFGIDVSKVSSEVAILVNGEKVHNYTISNDAIGFARLLGDLKTVHKPEIIFEATGVYSRRLQAFLDEHDYAYTRLNPLEAKKQLDSLRVRKTDKIDAEKLAQSQCVLNRKPPYVQEEVYQNLRDLSRFYQNLTEDIVRAKNRLHKALQVTFPELENILSTPTGEQYWNLIITFPCKDFVLDLSKYELSESIRQSTSKRISDKRVAYLAEKLIALAKQSYCAVKKNSPMLEEVRYYTKELLRLSEQRQAVLDEMVELAQPLPEYDILLSIPGIAETTATSIIGKLGDIRRFQSANQINAFIGIDLRHYESGHFLAKEHITKRGNPYARKILFKCIHNIASASHTNPCHIADFYEKRKRQSQTASTKPHTIASIHRLIRTMYYLIMHNKLYDYASTQNR

SEQ ID NO: 398218 - protein, 386 aa, unidentified
MMNLVGPLMSTERANKTVCFMAIELSKMGWVIAMLTPLSNKISLRSIPCGAVEQLMEIVDQTINRVMQTTGESVQVVSCYEAGYDGFWLHRFLEARGIINHVLEAASLLVNRKARRAKTDRLDAEKLVRVLMAYCRGEPKVCSLARPPSVEDEDAKRLHRERQFLMKERVQHIGRIKGLLAAQGIYDFRPGRKDWRNRLAELKTGDGRPLPSRLKSEIDRQCQRLALVDAMLKEIDQGRDAVVEAKNAPSETVARIQRLAHLKGIGPQIATVLGTEIFYREFANRRSLGSYLGLTPSPFRSGGMDRDQGISKAGNPRGRTVMIELAWLWLRYQPQSGLARWFKARTNGLKGRLRRIAIVAVARRLAISLWRYLETGLIPAGAELKA

SEQ ID NO: 398219 - protein, 343 aa, unidentified
MVEGTEGSHHKEGSTKMTKRTTICAGIDTGKRKLDIALDGSSEQLQVDNTPEGYKALLDWLRRHHVRRIGIEASGGYEQAVVAELRRQRFVVVVFQPAQVRAYAKFHLQRAKNDKIDASLIAACTAAVKTIHAPPDARLLPFAEHLTMINQIGEDIARLKNRLETCRNPRFRQTWKEDIARLEKREKVELKALVAAIREHRDLAERLDLISSVDGIGAPTAVAILVRLPEIGRITREQAAALAGVAPYDDDSGEQAGSRHIEGGRERLRRALYAAALPASFRWNPQLVALYRRLIAAGKEHKRALIACARKLLIFANTVVARGTPWDRERPPIASVTAVAQRG

SEQ ID NO: 398220 - protein, 360 aa, unidentified
MDKIHDTSLSFKDQDFFIGIDVHKRQWTLSIVSMNMLLKKYLSIDPSPSVLLKYMQKHYPDGNYYAAYESGFSGFWAVRELNNSGIKCMVVHPSDIPSSQKERLNKNDRVDSRKLSRSLSNGDLIPIYIPGKLAEEYRYLNRHRFKTIKDQTRLKNRIKSALHLFGVTIPLQYQERRWSGVFINWLLTIKFDTEYAQFAYDDLINQFIQIRTRITQQLRKMRVMAKEQEPFNIIIPLLLSVPGIGFITAMTLVTEVIDMNRFKTLEKLASYVGLVPSMQSSDETEINYGISPRRNKYLRTLLIEAAWKAVKKDPALTMKFNQLSRRMNRNKAIVRIAKILLSRIRYVWNNQKPYVLSVVS

SEQ ID NO: 398221 - protein, 422 aa, unidentified
MLEETQDTEELIERVAALDIGKAELVCCIRVPGEGKRGRRLQEVRTYTTMTRSLLVLADRLGELGVTRVVMEATSDYWKAPFYLLEAQGFEVWLVNAKDVKHLPGRPKTDRLDAVWLAKVAERQMLRPSFVPPPAIRRLRDVARYRADLVGVRTAEKQRVEKLLEDAHIKLSVVASDIFGVSGRQMLAALIAGERDPKVLAELARGRMRAKRSVLEEAFTGVFTDHHGFLLARMLGRVDGLDADIAELDHKLEELIIPFTAAADRLDEITGVGRTAACAIIAEVGVDMGRFPTPGHLASWARFAPGVKQSAGKTKGKSSTGHGNPYLARVLGEAAAAAGRTDTFLGERYRRIARRRGAKRAIVAVGRSILVIIWHLLADPDARFHDLGAGFYHTRINPERAKRNHIRQLEALGYKVTLQPAA

SEQ ID NO: 398222 - protein, 430 aa, unidentified
MNYYNDIRLEQFHQLKKEIRGSTEYLIVGLDIAKEKHNAFFGTATGITLYRGMFFDNTLEGFHKLLTQVEALKVEYGLLKVVFGLEPTANYHKPLAEYLIKCCFTVVLVSPSSTVKNRELLDGRWDKHDTKDAANVADLVSQGKCLYYDYPEAAIRGIRSLLSFKKRLKKEEQALQVRIRNQLLAQYFPEMDRHFRSAVSLAVIRTCLDPSLIAGMEYDEFCRAVAPGRVNLRQQRLLRQIWQLAPQSIGCSVGETVPFEAQTMVSSLHHVRETIKTLNDKIEDLCLMYPEYSYLLTIPGFGPEVSSIVLAAIGNPDRFVSGKQVLKIAGYDLCADRSGKKTSNAVPVISKRGKVDLRYALYQAALIASNSNTYVMTYYTNKLKDRSKEKGIGTKMRVKLAAKLLIIAWTLMKKKEVFDPACLNIGDTQV

SEQ ID NO: 398223 - protein, 353 aa, unidentified
MNDTTSIAWLGLDAHSKNCVLGQLDDHGAEIKWWRFPTQPQQLLQHLQAIPAADKRLMLEESNLARWIGQLLKPHVQQLVVCDARRNHLISHDHHKHDRRDAFALARLLRLNEFKAVWQPTDPRRVLFKRLAQSYENAVQRQTRLKLQLKSLFQHWGLFPTGSTVFSKPGRALWLKQLPYDALRAQALILYELLDQALAAQSQFRRLLSQSGRQFPEVQRLRTVPGIGLVGAHLFVAYVQDPARFRKFSQLTRYCRLGIRDRSSDDKPLGYQQLDRQGVGTLKAITYRAFLQAAKRRTGPVWEFYQCSRRHTGSLTHARLNTQRKILLTLWSLWLTGGEFEPVKFFRSAPIDV

SEQ ID NO: 398224 - protein, 340 aa, unidentified
MGIITTIGLDLAKNIFQVHGVDETGTAVIVKRLRRSQVIAFFAGLPPCLIGMEACATAHHWARELTGLGHEVRLMPPQYVKAYVKRNKNDAADAAAICEAVKRPSMRFVPTKTIEQQSALLTHRARDLLVRQRTMLVNALRGHMAEFGLIEAQGLHKVASLIAIVMNDRDERIPEMARQALKLITGQINELQTRIAALEMQVLAWHKSNPVSQRLATIPGIGPIIATAIAATVTDPSVFRSGREFAAWLGLVPRQSSTGGKVRLGGISKRGDSYLRRLLVNGAISVLLWSKMAKTDPWLVSLRGRKPRLVAAVALANKTARIAWAVMSRQDTYRHAAGAA

SEQ ID NO: 398225 - protein, 583 aa, unidentified
MANKLLAISRLKPGEVKTFHIPFASRQFAAGCDIDKPVGTYCVLYATAEGFQAEVRQFPNSPSGCQQALAWVLSHAQKHLSPNEKPPFIIESTGCYHELPVKTFNDATEVVVVNPHRIKAILRADGKDDVKDAVTLTKLVLSFDLKKSALAVGAQKRLRKVLRLKRKLIDNRSQVSNRIGSLLTENSVPLPNVVKVMTISGRAMCHAIAEGQINRDLLMLLWKGKNLPSPGLELVVQGQPFLQVLGTFAPTMKKKDVERLKEIYDALYYVADLDNAMRKLLGQQLRLLEMYDQEIDVIEQDVVAAIEAYTLELPGGGQRTAQKMIDLICTAPVFSEESARMLVAEAGLNFPEIYGHPDALALALGLTPGNSKSAGKILGKEVVRGNQHYKPVIVQAATAFLRRQLTPGKTGWFLWLWARRYQQRSDAQHARIAVARKITRSVYFMCRQWQPYDDSQHRLVSKDHALQTANRLANTAKELSASDFVGLEATTKLKQAAQAINQALGLQVSRYKLRPFDRDFSVDTLGLSTRVVNVLLKNDIVSLSQLVLRLVSGTLMSVNGLGHKAAQEIEVTLVSKKFVEVQD

SEQ ID NO: 398226 - protein, 339 aa, unidentified
MYYSGIDQHKRDCMITTYDADGHRVKQQRVPNDGHRVRAYFAQFAGPHRAVVESTGFWYWLADLLDEVGVELLLAHAPRLKAIAAAKVKTDRLDSDLLAQLLRAELIPAAHRITRAARGPRDLLRLRVRLVEKRVSCRNSLDRIREKFSVHRRDHLDPWYQRQVDVYDAHVALLTQQIHDLEVALHPLLIPNADVQRLLWIPGTGKVNAFTIWTEIDGIARFPTEKQFLSYCRLVPGAANSGGHTRHRSGNKQGNRYLKLAFSHASVRAIQYFPVIKRFYQKQRRRKPEVVARAIVAAELGRIVFQVLSKQEDFNGTFRGVPLQRTKTRQWPRLANPAA

SEQ ID NO: 398227 - protein, 339 aa, unidentified
MQITTIGLDLAKNVFHLVGLNQAGKQGLRKKLKRVQMLAYFANLPVCVVAMEACASAHYWARELKKSGHTIKLLPPRYVKAYVQGNKNDYNDALAIAEAASRPSMRLVSPKTVAQQDIQALHRLREGVMSHRTRVINQIRGLLGEYGIVIPKGVSQLRAAIPNILEDAENNLTDLFRSLLHRAYAQLQELDEHIKHYDKVLQLVTREDKAAQRLQSIPGFGPVISSVFSSAVGDGQAFKRGRDVSAFIGLVPRQHSSGDKPVLLGISKRGNRYLRGLLIHGARSVIKHADKKDDRLSQWATELVARRGKNKATVALANKMARIGWAVLTTGQAYEVKGV

SEQ ID NO: 398228 - protein, 351 aa, unidentified
MQYIAFDSHKRYTLASVEAAERPGIVQECRIAHTPGAIGQFLAQCEPGSPVALETMGSWYWIVDEIEKAGMIPRLTHARKAKLLMGSVNKTDKLDARGLNRLQRSGVLPQVWIPPAALRDARDLPRTRMVLVGQRTQLKNRLQATLARYALSPEGVSDVFGKKGLVLLRQQLTRLPEQTRFSAERLLEHLEQVDRQIRDFEARIRQVLEPTSEVKLLKSLPGIGSILGTVIALEIGDVQRFAGPQSLASYAGTTPRVHASGGKVRYGPLRSDVNQYLKWAFIEAANVCSLLCQRYPQRHVSRLYRRLKEKRGHSVAVGALARHLAEATYWVLKKGVVYRDPAPQTVSLTQS

SEQ ID NO: 398229 - protein, 331 aa, unidentified
MDNSLYFVGADIALKKFDAAIRLDGNRYKHKVFANTPEGFTAFHAWLQGFGSHFHILMEATNVYHEDLADYLLVQGLTVSVINPRCIPNFAKSTNMRSKTDKVDARLLADYAYCNAARLRKYAPLATNYRTLKRLMRQLTHLKKIIAKEQVRIQMMMDALCVEISQEIIAGTKALAKELEKKIKELVKEDKVLSRNAQLLQSIPAVGWMSAMYLLSHLGDGSRFRNSKAAATYMGLTPIVKQSGDSLHIVSGISKMGPRDIRDVLYAPAMSYAFGPWKERVYAPFVQRLTANGKAPKEVIVALMRKLVSIAQAVLQHQRPFDSAILVAKAA

SEQ ID NO: 398230 - protein, 411 aa, unidentified
MDVGYARWAGLDVHKATVVAWVRSPGLRAETRPAETQTFATTRRGLAALAAWLTAHAVTHVAMESTGVYWRPVFAVLEGTVQVQLVNARHVKMLPGRKTDVRDCEGRAQLLECGLLRGSFIPPAAVRDLRDLTRLRQTLIRERGHHVNRIAKTLELANIKLGSVVTDIMGKTGRAILQALSIGRADPEYLAAWAQGRLRKKQAALREAVEGRLTPHYAFLLPQHLALIDTLDAHMATLDTRIEAAMVPFAETAALMQTMPGVATRAAEAILAETGVDLSPFPTAAHFASGARLCPGNHESAGKRRSTRTGKGATWLRATLQEAAWAAVHTKKSYYRALSDRLKARGGPKKAIVAVQHAMLVALWHMLKRRVSHQDLGADYFAQRNTERTLRHHVRRLEQLGYHVLLAKEAA

SEQ ID NO: 398231 - protein, 368 aa, unidentified
MYFSGIDLHKDNAFIATVDAAGQVIAQRRVPCEASAVLGNFAEFPGPHRAVVECTSGWYWLDDLLTANGIELVLAHAKYLKAISYAKVKTDKVDATTLARLMWMDAVPRAHKISHELRDLRDIMRARLRLVHRRTTCLISVHNVGQKLNCFRELSIERRTIPPSLSSAHALWVRMQYQAIDHLDAQISELEHFLRPVLIPNDDMQRMLWIPGLGKVTAFSVYLEIDGIERFGTDKHFFSYCRLVPGAKNSNRSLRHRSGSKDGNKYLKIAFTDAAVHAIRFYPEYQRLYAKIRRRSNEAIARTVVAKELARIVYHVLRDKTDYRGLKGQPISHLKSRTWPRLDRGPSAASGKPERLTDAPRASCACRL

SEQ ID NO: 398232 - protein, 342 aa, unidentified
MYYIGLDVHKKTISYCVKDAVGKIHSEGKIGSTRRELDAWIRTLPQPRMIAMEATIFTGWIYDHLVPHAEKVKVAHPLMLRAIAAAKRKNDKIDASKIADCLRCDFLPECYMTSTEIRDRRRTLRYRGLLVKQMVQMKNRISGLLMEAGVSYNKQRLHKVGYFSELMSGNEQIDCVRPLLKLSRETINRSQKLDYVLVSSLERDPLLAEQLKRLRTVPGVGPITALTWVLEIGDVARFQSIKQAISYCGLCGAEKRSADKVVRTPISKQRNKHIQQVLVEAAKLAPRYSHELSLIYEKEMQRGNRNRATLAVARKMVAWMIAVERRKQDFVPAEKFGGTAAA

SEQ ID NO: 398233 - protein, 333 aa, unidentified
MQDLSTKQHFVGCDVSKDTLDLALYQPKTDYRKFEHVQISNDTEGFKQLLQWLKARKIKKNEVAIAFEHTGAYSIALAEWLHKKKITFSMLHPLDVKNACSRGRNKTDEVDAKFIADYAYTMREKLAPSGPEPKNIKHLRELRNERDLCVRCRASYLCQIKVQTEAQTIARMHKMVDFMTVQIHQIEEEIKKIIAADETIATNYHLLISIPGIGMVNAVNTIVATGNFTRFQTSRQYAKFCSVSPMAVQSGTSVHSGNHVCKKGHNELKATLSEAARSAIIHDPQLRHYYQRKRSQGKSHGCVMNAVKFKLICRMFAVIKRQQPYVNTECYRG

SEQ ID NO: 398234 - protein, 429 aa, unidentified
MNYNTQNAKITSITEKSLIVGIDVGSETHYARAFSWRNYEYSKKPFAFSNDEDGFASFKAWMDDIAEKHEMEKVIPGMEPTGHYWLNLGAYLQGQGMRPVHVNPHHVKKSKELDDNNPNKNDRKDPKTIAGLVNEGRFSYPYIPTGIYAEIRNLSNLRIQTQEEITRIKNRMARWFSIYFPEIKDVYRNPDAVSGLMVIKQAPLPCDIRELGVEGVNKIWRDARLKGVGIKRATTLVTAAEHSIGNTEAPRSARKEIRNLLNDYEIYKSRMDELMEEIEELLSEIPYIDKLMGISGIGIKTVSCFIAEVGDIERFDNPKQVQKLAGYGIVADSSGKHKGESRISHRGRKRLRYALYEAAVSVIGKNKEFKEIHHYYRTREKNPLKKMQSVIAVACKLIRIFYAILTKGIDYDGQKMLRDIVRPGMQSAA

SEQ ID NO: 398235 - protein, 342 aa, unidentified
MTKMLRQVVGIDVDMKNLVVSLGRLHENLEAEVFAHKVFPNNTKGFSALTSWAKERFDDSIKPLFLMEATGVYHESLAYYLVESGHEASVVLPNKISNYARTLDVKTVTDKTSSEAIARFGLERKLELWQRPNPVLKRVKQLCRERDQIVSERTLVKNQLHAEKSEAQPNKSSIARMNKRVEILNKQEKEIGKELDGLVKQDQKLSEDIKLIRTIPGVGTLTAATILAETNGFNLIRSSRQLTSYAGLDVKEKLSGASVKGKPRISKRGNKFLRKCLHMPALAAIRKDAHFKALFARLVSKHGIKMKAVVVVQRKLLELTYTLIKNKSEYDEHYQRQVVLEA

SEQ ID NO: 398236 - protein, 443 aa, unidentified
MQQPMEVDVDEGQQVVERVAAIDVAKATGTVCTRVPHDTVAARRVTKVWEVKATTKGLSELAAHLVGQGIERTILESTSDYWRPFFYILEEAGLEVWLVNAKQARNVPGRPKTDKIDAVWLAKLAERSMVSASFVPAEAMRRVRDLARARFDLVEDRARVKQRVEKLLEDALVKVSSVLTDVHGVSGRAMIEALIAGERDPKVLAGLARGRARARLGALAEAVDGRFSDHHARLARMLLDQIDDLGERIEVVTRLLDDAIAAVPATPVADTSTGEVAAVTHASAIERISALPGAGPDSARAVIGEIGLDMSVFGTAGRLCSWAKVSPRTVQSGRKVGKARTGKGSPYLKAALGQMAMGAAKTDTFLGERYRRLAKRMPKAKALAAIERSILVGIFHLLADPTASCEDLGADYYAKRMDTARRTRNLVGQLEALGHHVTLTPAA

SEQ ID NO: 398237 - protein, 350 aa, unidentified
MNAVGIDVSKGKSMVTILRPFGEIVSSPFEIKHTSSDILSLIKLIHSIEGESRIVMEHTGHYYEVLAQQFSAAGLFVSAVNPKLVKNFNNDSLRKVKSDKADSIKIARYALDKWQNLKPYSIVDELRTQLKAMNRQFHFYVKQKTAMKNNLINLIDQTYPNANTYFNSPPRSDGSQKWVDFVYTYWHVDCVRKMSLNSFVKHYQNWCKQKKYIFNKSKAEEIYTKATELVPVFPKNEITKRIIRQAIAQLNSTSATVETIRILMNETASKLPEYPIVMQFKGIGPSLGPQLMAEIGDITRFTHKGALTAFAGVDPGVNESGSYAQKSVPTSKRGSSNLRKDSFSSNGCSY

SEQ ID NO: 398238 - protein, 421 aa, unidentified
MEVVHERVCGLDVHKRTVVACVLASGEAGTVEPREETFSTMLGELERLAGWLAGHGVTRVAMEATGVYWKAVYNVLEGADRFTVLVVNPEHVKAITGRKTDRADARRLAFLLRHDLLSGSFIPDRAQRELRELTRARTGLVRERARVVQRLEKALEGANIKLGAVVTELLGASGQAMLDAALAGVTDPEELAGLAHGKLRPKHDLLVQALAGKLTRPLRFLARQHLEHWRELDARVAAFDAEIAELLRPFDRLVERLDAIPGVGRRTAEVILAEVGTDVAAFPSERHLAAWAGLSPGNRQSGGRRRAARTRHGNPWLKAALTEAGWAASRCKDSYFRARYRRLAARRGRKRAVVAVAHSLATSIYVMLRHDIPFADLGGDYFDRRDRDRREQRALATLRNLGYDVALTPRPEPPTPDTEAA

SEQ ID NO: 398239 - protein, 362 aa, unidentified
MMRHIFVGIDLGDKNSVARIAVDRDKSERFGFVNDVRGRARLFEKVKVKSEEAEGAKIIMAYEASSCGFILRDEAEARGNQCCVLAPTKMEKSVEQRKHKNDDRDAVDVLEKIRAHVLAGNRLPTVWVPDPQMRDDRELVRARVELVEKRTRLKSQVQMLVKRQGLEKPSGCGSGWSLQHRRWLEALTKSDALGSGARTALTSLLRQLQFIEEEIERIEKPLLQLASQARHQPIIEELTLEPGVGVITAMVYRTEIGYAGRFRRSRQVGKFVGLTPTSHESGQQNDRKGHISRQGPARLRKMLCQASWVHVNHDADAKRIYQQLVSRNPKKKKIAIVAVMRRLAVRLWHRMLRVELQMTQAG

SEQ ID NO: 398240 - protein, 340 aa, unidentified
MKTATKASVGIDVSKDSLDACIGLSFSNQQHKFPTRATFPNTMTGFRKLLVWAAKQLPSKETPLWFVMEATGVYYENLAYFLTDNKRQAAVVLPTKMKHYAKTLETKSKTDQLDARAISQFGLERPLSVWIPPSAQLRCLKELSREHEALLLHATQVKNQLHARRHSHEAGESTIARLVAQRDLYKQQLRTIVQEMHSIVEHDADLNARITNITTANGLGFMTAVKVVAETGGFALFRNQKQLVSYAGYDIVLKQSGKRSGKPAISKKGNSHLRAAVYMPALVAIRHNKRLKEVFLRLVRTKGNKMVAVIAVARKLLCLIFTLWRSKVPYDPNYLSAHTA

SEQ ID NO: 398241 - protein, 457 aa, unidentified
MSKRKSKAKRKSFKVPKLPQHLQHMNLNAAGIDIGSEQHMVAVPEGRDTVSVREFGTFTTDLEAIAAWLKKCGVTTVAMESTGVYWIPLFELLERRGFEVKLVDARHVKNVSGRKSDVLDCQWLQQLHTYGLLAGAFRPPDEVCVLRSYLRQREMLVQTSSMHIQHMQKALQQMNLLLHNVVSDITGVTGLKIIKAILAGERDPQLLARNRDQGCHNSAATIAKSLVGNYREEHLFALQQAVDLYEIYQAKIADCDHAIIKQVEKQPDVSDDEPPAAEKKTPANKRIRDGVDVRDLLFKKCGVDLFAIPGLAADTLLTLASEVGFDMTSWKTEKHFASWLGLCPGTKKSGGKVLQSKTKRNPNRATQAFRMAAASLYRSQTALGAFYRRIKARSGGQQAVTATAHKIARIYYALLSHGTNYVELGQKAYEQRFKERRIDHLKLQAKSLGFQLVPCAP

SEQ ID NO: 398242 - protein, 393 aa, unidentified
MYLVGIDIGKLKHSFCLLEKETGEILVEPVFFKNNRDGFNALLSSFKHLPQKDILIGMEDTGHYNLALLKFLLDRNYQVALINPVATNLTRKMQGGISKNDKLDTLTICDVLSSNQRVKSYRISKYSSFDLYEQKQLTREHHNLKEEENQLSNRLQKCIDVVFPEFNSLFKSKYGIVYMNILKEFGSADAIAHADIRTLRKCFDTGRGKHISLTAEELKEAARNSIGFPSSSEATQIKHLVARIELIKEQIAEIDKKIEEFSLQNNSPILSIPGISHFSGTSILAELGDIHNYSKPSQIIKFAGVAPLTYESSQFTAQHTAITKKGCKYLRKTLYQIITPVIQYNPVFKKFYLLKIAQGKGHRCAQGHCVRKLMRVIYHLLSTGTQFDPALLR

SEQ ID NO: 398243 - protein, 311 aa, unidentified
MQLTIGIDISKETVVAYRLPDNQSIQVANDRAGQKTLVRWIGKQNGSPVVFEATGAYHRCLEAALAANGTPFAKINPRQARRFAEATGRLAKTDRVDAIMLAKMGAILGLKADQPKSEVLYILRELLTARRALMKDKVAAKARLQTTRQTLLKNQIKARLKQIEIQIRQVDAAIAEKVQLDEALSNKLAILISIPGIAETTAFSMLIEMPELGTLEGKQAASLAGLAPMSRQSGKWQGKERIQGGRAFLLRAIYMPALVATRRNPGLKAKYDQLIRAGKSGKVAVTAIMRKLIVMANALLRDGRKWSEIRP

SEQ ID NO: 398244 - protein, 364 aa, unidentified
MRKVYYIGLDVHKDNTQMAVLEMRGKEPIAVKVIDSDPAKVAKAIQPYRKDGTVHVGYEAGCMGYTLYRVLTGIKIDCQIIAPNKVFRGGNNEKIKTDKRDATAIAWMLRREEGAGIAVPEREDEAARDLLRCRSDMQDDLKRAKQRMLKFLLRQGHIYENTQYWTGKHRKWMKTLVFDMPIDKAVFDQYLHTIESIEERVDRIDLQIKEIAESPRYEARVRKFRAFKGVDYIIALSLVCEIGDFKRFPTAAAFMSYLGLVPSEYSSGKKRKQGGITKTGNGHMRKLLTEAAWHYARPVQVSKRLAERRVGTSENIISYADKALNRLHKKYVKLVFRGKSKQASVTAVARELSGFLWGVMVDIA

SEQ ID NO: 398245 - protein, 342 aa, unidentified
MEHTTIAVDLAKSVFQVAVSHRPGRVDEERRLSRDRFLESFAQRAPATILLEACGSAHYWARQLQPFGHVVRLLPPHDVRPYVRRNKTDRTDAKGLLEANRNEDIHPVPVKTIEHQAIASLHRLRSTWLATRTARLNTIRGLLREFGIFIPVGAHHVVARVRTRLLESTTVPVLLHTTLAAACDEIDVLEADMRAVERQLGALAAEMADVTLLQTVPGVGLITATALIALVADIRRVPSGRHFASFLGLTPKEESSALRRRLGAISKQGDVYLRMLLTHGARSFLWHAKAARQPTVLQHWALSVEQRRGHNVATVAVANNLARIVWAVWTQQRPFVTDHRQP

SEQ ID NO: 398246 - protein, 356 aa, unidentified
MPKCTSKRTRVVIGGVDTHGRTHHAAVIDQQGRLLGDREFPADSGGYRQLLGWLGRHGQLEAVGVEGSGSYGAGLTRLLLDRGVKVVEVDRPDRRTRRQRGKSDPIDAEAAARAVLAGVATAPAKRRDGIVEAIRALRAARRGAIKARTAAINQLKGLLVTAPASVREGLDALPRAALVVTCARLRPDEAALDDPVQGVKAALRAVACRIHQLDEELSQADQRLAALVGRAAPRLLKLHAIGVDHAGQLLTTAGQRPERLRGEAAFAHLCGAAPIPASSGKTHRHRLHRGGDRDANRALHLAVVVRMRWCPRTRAYAERRTKQGRSKPEILRCVKRYLAREVYHALVADFEALNAT

SEQ ID NO: 398247 - protein, 318 aa, unidentified
MPQKTRFVGLDVAKSKVDACIRSEGLRLSAPSTPEGRAGLVAWVRANRVGRAVMEASGGYERGWAEALRAAGVEVRIVDPKRVRHFAKAAGRLAKNDPIDADTIAWFAEAFPDREAQPHDPARDEIDRLVAARTALKDAEDRIKQQGEHRPPAVVAKALAAIAKTIRAELRKVEGAIAAKIKANPGFARRAEIIASVPGLAGQTAAGVIAWLPELGHVTNQAAAALIGAAPYDDDSGGRKGQRHIKGGRRKLRNLLYMPVMGAATRHNPMLKAHYQRLRARGKQAKVALIACMRKLIVILNTMLARDQTWNPPVRAAR

SEQ ID NO: 398248 - protein, 413 aa, unidentified
MEVINPRCAGLDVHKKSISACCISRSATGARIFERRTFGTMTTDILMLGEWLHSLDIPIVALESTGVYWKPIWNLLESDFDLMLVNPQHIKQVPGRKTDVKDAEWIATLLEHGLLRASFVPPAPHRAFRELTRTRSTLIRQRSELVNRVQKVLEDANIKLASVATDVMGVSGRAMIEAMVVGETDPKVLASLAVRGLRNKQEELEQALLGRVADHHRIIIKQFLSLIDALDSSIAELEKHIGEASSSFRDVVDRLDAIPGVGPVTAQMILSEIGTDMDAFPSDRHLCAWSGLAPGNNESAGKQLPGRPRKGNRSLRTGLIQAAHAAARSKGTYLSALYRRIAARRGNKKATVAVAHAILKAVYHMIVRQTAYHELGEDYYDKLSPRRTAPRLIRRLREMGYTVTKQPDAANPA

SEQ ID NO: 398249 - protein, 404 aa, unidentified
MYSVGIDASKGKSTVCILKETGECILTPRDFNHTKDDLEVLDQTIQKLTGKNDVRIVMEATGIYHWPLLLFLKRKGYFVSVINPLRMKLFAKSYNFRGVKTDKYDSTIIAAYGCEKWFSLKDWDFNDDTRDELKRLARSYVSYQKPKISVKQSLDLELEKCMPGIKNLFSDDQKLYDFILLFHHYDNLTALSKKKFLDKFNRWAKKKGYQFHSSNPTKIYELASSGIPTVPFDDSCVLIIENLVNTLITIDKGLNDILTRMHQLASSLPEYDVVLNMSGVGYTLAPLIIAEIGDVRLYRSKKSLVCAAGIDVPPYESGQFKASHRVITKKGNSNIRRHLYLVMNSLYVTKPKKDSAVYEFMIRKKAEGKLHKQVIVAGMRKFLHIYYARVKERYQDIGLWQTLS

SEQ ID NO: 398250 - protein, 316 aa, unidentified
MKKYIGIDVSKSSIDVYDGKQSYKFENNEIGFEAVVFLVEAIKETIFIFEPTGVYSYALTEFCSKKEIAVVMVGPKESRDFARSLKVRSKTDKIDAKILYKYQSHVEPEMAKVPKINHHAIKIQEMLNIYEGIQASKQRFKNQIESVSKENTDLLRTLNRIIKDLELEAQKLFNKIELLLLKNDEIKKKYDAIATIPSIGQKSALYLSAFFLKYPTANAKEMTALLGLDPVMKDSGTFKGKQRISKQGGQQLRNLLYLPTLCAIQHNDRIKTFYNRLTSKAKTKKLAVIASMRKLILMAFSIFKSEEAYQPLLAKL

SEQ ID NO: 398251 - protein, 344 aa, unidentified
MDISVLGVDLGKNVCGVVGLDASGAVVMRRRMRRETLITLAEKLPACIVGMEACCGAHHLGRLFVAHGHDVRLMSPEYVRPYVKAQKNDDRDAEGIAEAATRPTMRFVELKSQDQLDMQTLHRSRDRLVGERTALINQLRAILLERGWVAPQGKRKLEQFLSVLMDEQGGAGLSPRMVLLVEDTRAQWAELDRRIAAFDAELVRWAKENEDARRLTTIPGFGAIVASALVAAVGRAESFERGRDLSAWLGIVPQQFTTGGKPKLLGISKRGNKYLRMLFIHGARAAMPSLSASQSPLGEWLRGLLARTHRNIAIVALANKLARIAWATLRRKTSFDLRHLAVAG

SEQ ID NO: 398252 - protein, 340 aa, unidentified
MAVSLCRLTARLIKEFEEPFEVSNDLPGFKKLVKWLLKNASSPEDIVVVMESTGIYHEALVYHLYGEGFPVSVMQSGGVKRYAQSLDQRSKTDALDSRMLAMLGCERELILWTPPDPLFRQLKGLSRERSFLLKEKQMERNRLHALEHSVYKSKREVKRYGQRLKLIEKQLIEIEKEMEILVKNDPQMHQRIKHLESIPGISFKSAATVVGETLGFTGFTNAKQLTSYAGFDMVLKESGAYKGKTRISKKGNKHIRSALYMPAMSAIQWNPTLREFYERVQPTKVKPMIALVAVEQKLLVLMYSLWKNEIDYDAEHEQKKTARSEVLAAQDRSNLTLTSS

SEQ ID NO: 398253 - protein, 380 aa, unidentified
MSMVCGLDLHRGQITFDTVEVESGVEWRGRLWQPDRARFRRWLHDEVGARAGGGSVEIAVEGCTGWRFVVEEIQAAGFVAHVAEPADTQAARGRKKRAKTDRSDARLLRDLLARDELPESWIPPAVVLEWRERVRLYKTLTEQRSSWAQRIHAELYQHGVAVPEGRIRSPETRDWLLGPNVELSPAGRQRIEVGYRMMEATDTEARQLRQQIHRFGQRQPACRALADAHYGIGPLIAVVVWSELGDCRRFSRSMQVVRHTGLDPTVDASDRRRSSGFLSRQGPRRCGGPCSKRAWPPPRPPAPTGTTTSRSKPPTTGNWRRSPWPASSHDAATTRCAISTRSRSTPSPPAARTPAQPAAVIGIVQLEHHHVVRFAAGAPP

SEQ ID NO: 398254 - protein, 416 aa, unidentified
MEILYAVCCGLDVHAKTVVACLIVSGKKTTRTFSTMTEDLLRLADWLMEAGCTHVAMESTGVYWKPVHTILEGVCEVLLVNAQHVKQVPGRKTDVKDCEWLADLLRHGLVKASFIPPAPIRELRDLTRYRSTLVRDRVQLANRVQKLAESGNIKLSQVVSNALGVSGRRMLRALAQGEQDLDKIVALADEKLYAKHSELRRAVDGRLTQAQRFVLADLLDRYDEVERAIARVSERVAEEVGSQQQDPFVEEAIAKLDEMTGIGQRIAEVIIAETGIDMGRFPSEKHLSKWAGLAPGNNASGGRRRSGRTTKGNQALRTALVQAAWVAVRKKESYFGVLYQRWKGRLGNKRAIIAVAHRMLDIIYHMLSRREGYHEVDLKAIGARSVEYERERLVRKLKALGVNVTIEERADIPDAA

SEQ ID NO: 398255 - protein, 343 aa, unidentified
MPHYVGLDVSQKTTAICVVDEQGRRLWRGVCATDPGAISARVSQHAGVDAKVGIETGSMTPWLVHCLRSAGLDVQCLDARKVKAALQMQLNKTDENDAEGLAQIMRTGWYRAVHVKSLDAHRARALLGARAQLVGMTTRLSNMIRGVLKTFGLLPGAGRGLRFDRKVEALLEGAPEIALVVRPLLATWRQLRQQIAVFDKAVLQQVRADPICRLLMTVPGIGALSSLMYVSTVENPSRFSRSRAVGAHLGLTPRRYQSGETDRSGHISRCGDGLARTLMYEAATVILHRVKRPLHLKDWAEAIERRSGSGKARVALARKLSVILHSVWRSGEPFRWVEPAMAA

SEQ ID NO: 398256 - protein, 356 aa, unidentified
MSRDSKYIGMDVHKEAIVIAVLNASGKLVMETILETKSSSILQFIHGLRGELHVTWEEGTWAAWLYDLLQPQVQQVLVCNPRRNAFLKEGNKSDKVDARKLAELLRTGMLRPVYHGENGLRTLRELGRSYETISKDLTRVMNRLKALYRGWGIPCTGTQVYAPRYREEWLNKIPQAGVRRRAELLYQQLDGLQALRRKLRPEFLAESRKHKAAKLLRQIPCIGPIRAARLIALMQTPRRFRSKRQLWTYCGLGIETHDSAQFRFVGGQLQRSKKPQQLRGLNQNHNHEMKEIFKSTATRASCGTGPFNDFYAALLTKGMKPEMARLTLAREIAAITLTLWKRGGRFDAEQLKAQAA

SEQ ID NO: 398257 - protein, 418 aa, unidentified
MPDPLLVGLDVHQKTQSVCVMNVLGTIIDDKLTVHNTPAGAEALAGYLHALASREGYDAIHIAAEATGWYWWHFFRALFSDPRLQQSPLALYPLNPRLVAKLKETYSDDDKTDPGDAFVVADRLRLGRDLPHPFSDDLRYLRLRLLTRHRRHLVRDLVREKSFCLAHLYLKASEYTHLEPFGNTFGATSRTIIREYSSMEEIATIPVDDLAETIDRLGKRRFADPLQAAQTLQEVARQSYPLPQVLQGPVNLILRQTLQQITSLERLIRQTDAAIAETMQDFPNTLDTIPGFGPVFAGGILAEIGDLSRFQYDQAKIAKYAGLKWRRTQSADFEAEETPMTQAGNRYLRYYLCEAANSVRMRDAEYQAYYERKYDEVRKHQHKRAIVLTARKLVRLVVRLLTTHQPYRPRRTQLRPSA

SEQ ID NO: 398258 - protein, 363 aa, unidentified
MEVLYARCCGLDVHQRVVVACLSLVEAGLRRKEIRTFGTTTRELISMRNWLIEAGCTHVAMESTGVYWRPIYQRLFGFFELVVANAQHLKAVPGRKTDVKDAEWIADLLQHGLLSPSLVPPQDQQELRQLTRLRLSLTQERSQLVNRIHKLLQEGGIKLTSVLSDVMGVSGRAILEALATGESDPERLASRAHKSVQHKHEALVEALVGDLREHHRFLLRELLTLTQAVDRSIQHVEEEIEQRLRPFEALLERLCQITGVSRHILHVLLAEVGIDMKRFPDAAHLSSWAGVCPGNKRSVQANAGRDGPGLAITTSKWRWCKPLTPPLTRRRTWASSIDASSTDGELNGLLSLSRIVSSSFSTT

SEQ ID NO: 398259 - protein, 454 aa, unidentified
MHNNANPLAAEMPRQPGRTLVGIDAAITARHHIAVLDDSGGRPTRFSVEPTLTGLGILTDRLRGYDDVHATVEPTSMTWLPLTIAVEKAGGTMHMVGARHSARLRGAIVGKSKSDVIDAEVLTRAGQVFDLEPLVLPTPQQLALRRAVIRRAAAVVDANRSWRRLMSLARWAFPDVWTAFSGSLPTATAVLQRWPDIRALASARRATLTAVVAAHTRGVGDTPARAKAIKTAAAGWARFWEGHLDLDALAVDVIEHLTDLADDQARVARFTDHSTRWWERLYGDDELLLSVPGMGPVTAATVRAFLGDGSRFSSAKKAASYVGITPSTWSSGTMTQPRRAITKEGPAPLRLALFQAAGAARRTDPQLAAFYHRLMTTQGHCHTQATIAVARKLAERIWVTITTGRHYQLRDTNGDPVTARAATELIKAHYQVGASTRARTRAHADAARKSKSTR

SEQ ID NO: 398260 - protein, 400 aa, unidentified
MRTVFGIDVSKASSEVAILVNGERVYGYTMPNDIIGFSRLLEDLKTVSNPEIIFEATGVYSRRLQAFLEENSYDYTRLNPLEAKKQLDGLRVRKTDKIDAEKLASSQFVLNRKPTYVQEEVYQNLHDLSRFYQNLTEDIVRTKNRLHKVLQIAFPEIENLLSTPTGEQYWNLVSIFPTKHWVLELSEAELKEAIRNSTSKRISENRVGNLTEKLVGLAKQSYSGISKTSPMVEEVKYDAQELIRLTNRREQVLQQLIALAEPLPEYEILLSIPGIAETTATSIIGELGDIRRFKSANQINAFIGIDLKHYESGDFLGQEHITKRGNPYARKILYKCIHNIASASHTNPCHIADFYEKRKRQSQITSTKPHTIASIHRLIRTMYYLIMHNKLYDYTLAQSH

SEQ ID NO: 398261 - protein, 400 aa, unidentified
MAQPVWAGVDAGKADHHCMAIDSDGQRLLSRRVANDETALLEVIAAVTTLADGGEVTWAIDLNAGGAALLITLLIAAEQRLLYIPGRTVHHASGGYRGEGKTDAKDAAVIADQARMRRDLQPLRASDDITVELRILTARRTDLVADRTRAINRLRAQLLEYFPALERAFDYSKSKAALILLTGYQTPDALRRAGTARLAAWLRKRKARNADTVAATAIDAANAQHSIVPGQQLAATVVARLAEEVMALDTEIGDTDAMIEDRFRGHRHAEIILSLPGFGVILGAEFLAATGGDMSAFASADRLAGVAGLAPVPRDSGRISGNLKRPRRYDRRLLRACYLSALVSIRSDPASRTYYDRKRAEGKRHTQAVLALARRRLNVLWAMLRDHSTYQPTAPNAAAA

SEQ ID NO: 398262 - protein, 412 aa, unidentified
MEVMYPRCAGLDVHKETVVACVRVVEGGKVSHSVQTFATKTASLIALGEWLEANGCTHVAMEATGVYWKPVWQVLASESFELVLANAAHVKNVPGRKTDVNDATWLSELLAHGLVRASFVPKPEIQELRGLLRTRKQLVREKASHIQRLQKTLEEANIKLESVISDVMGHSGRAIMQALIAGETDPAKLAALAHRKVRASQATLREALHGRVKRQHRFLLRLHLQQIDALDASIAEIDQEVDASLACFRDAVKQLITIPGVSELSAHVIISEIGTDMSRFATDAHLRSWAGLCPRNDESAGKRRSRRLRHGSHWLKTMLVQCAWASTRSKGSYLQALFLRLRGRCGPKKAICAVAASILTAAYHMLKDGTFYQDLGADHFNRRRPDAQARRLLKRLAGLGFSVELKPLATAS

SEQ ID NO: 398263 - protein, 342 aa, unidentified
MTLYIGVDIHARQQTLSYLDTSDGTTGVVELSHERDDIKGYYSQFQEEVIIGIEACGYTNWFEELVERLGHKLLVGDAGEIRRLARRRQKNDRRDANLILELLVHGEFPTLFRYSKESREVLRQLRYRHKLVKLRTMVVNSLHALAINAGLSLRAKLLTRDGRRQLRGLSLSPISQQQREELVSLADELTRRVGTVEQWLKEQAKQDVRVQRLQTHPGVGLLTSLCLVHTLGDVSRFSSLRKVTAYAGFDPMEDSSAERKAYGGISKAGSKLLRYLLVEAAQTAAKDDEQLKQFYRRLLPRRGKARAKVAVARKLLIRCFIMDRAAIDYAEFLRRGQEKETE

SEQ ID NO: 398264 - protein, 368 aa, unidentified
MKKETITSDGISGESLVNYVNQVLNLGLDVHYRQVTVAMQEDGGRIKAAGKMGHADFLNWVPKKLEEGWEIYSCYEAGASGYWLHRELEKLGVKNLVVVPKAMGQGGKKQKTDQRDAGELCDSLDRYLRGQNKALSVVAVPTEEQEEKRALIRYHRQIMADRGRCEARGKGLLCAQGIQVRGRWWRGDSWLELTSDPRLKDWMKEQLVGWRNKILSTDEEQSALRERIAALAPAILPKGVGAYSAAVLHYELRGFEHFKNRRQVGSITGLCPGVHLSDGRGKEGSINRCGIGIVRWTLVEMVWRLMIWQPQYPPVRRLAAGLVKSKRARKRLVVQAARRLAIDLWRLSTGQTTPEKLGLVMQSNAQGN

SEQ ID NO: 398265 - protein, 536 aa, unidentified
MSAVKELAPHVGQSAACRALSVPRASWYRGLQPVAPPATRPTPARALPPAERQTVLDHLHSERFRDKSPAEAFATLLDEGVYLCSVSSMYRLLAESGEVRERRDQLRHPEYKKPELLATAPNQVWSWDITKLLGPAKWTYFYLYVILDIFRWDETAGLAETVKLFRSALQGAKGDQPMKKDSRKAKCMDKPAITVGLDVGDRFSRYCVLNEDGEVVEEGKIQTTEVALQRHFDKEPRQRIALECGTHSPWISRLLERLGHQVIVANARKIRAITASESKNDRNDAEKLAHFAYCDPFLLSPIRHRSPERQQDLNLIQVRSTLVRARTMVINSVRGLVKSAGGRLPKCSTADFAKQALPLISAELALVVAPLVEQVGTLTDQIRRLDKQIENLSQRYVEIKLLRTAPGVGPVIAAAYVLTLDSPDTVANSRQAGAFLGLRPRQSQSGDSNPQHSISKTGNIYLRSLLVQSAHYILGRFGQDCELRRWGLKLAASGGKRGKKRAIVAVARKLAVILHAMWRSGHPFEPFLLPATTAVA

SEQ ID NO: 398266 - protein, 391 aa, unidentified
MVYVGIDVAKDKHDCFIMGSGGEVLLDVFTVPNNMVGFCNLLSEIQTASDDLGNIKVGLEATGHYSYNLLGFLLDKGLATFVLNPLHTNLYRKSLSLRKTKTDKVDARTIAVMLASDVNLKSYTDTAYHNEELKSLTRYRFDKVKERAKLKQAISRLVTILFPELEKLVPTLHLTSVYALLSEFPSVQQIANAHLTRLKTLLHDASKGHYGRDKAVEIRDAANGSIGSNMPAKSLELKHTIRLIGEMNAEIEEIEAEIRAVMDEMDSPILTIPGISYRMGAMILAEIGDFSRFDSPDKILAYAGLSPSTYQSGQLSSSYARMEKRGSRYLRYAIFNATKYVCRWDASFATYLSKKRSEGKHYNVAVSHAAKKLVRLIYALEKSRLPYSSAA

SEQ ID NO: 398267 - protein, 432 aa, unidentified
MSNYYFKPVVGIDISQGFHVVSILNPMSKLHTKTFKIYNTLDGFSYLLSEIEKVEREYNMKTAIFMESTGVYHLSLFHFLKKQNLEVNLINPLVTNSNKNKDIRKVKNDKKDSFSIAKLAQLDDIKYSSYFDLDVFNIKSLCREYYKHVDTRSSYKRKLSADIHVLFPNYNHVFKNITCDTSISILKKYPTPSRLLAADSEAVVELIKATSKKGLKWATNIYNKLKNVALDAIEIGIPSISLELRISLNLNIIETLDKNLKSILNEIKSMVNSNDFPQYLKNCIEFVDSIPGFDFFSAVTILAEIGDYRRFKKPKQLIAFLGLDPGVNESGKFKGDKNSMSKRGSKTARRALYSAALVSIRKKRNGEYFNPVLFTYFHENLVNKKTKIALGAIMHKLVNYIFSVLRDQKNYELRSPKLHNQMFLNNKSKQCA

SEQ ID NO: 398268 - protein, 410 aa, unidentified
MEAIVERCAGLDVHQATVVACVLRGSAKARPHKELRTFGTTTPELLALRDWLQACGVTQVGMESTGVYWKPVYAVLEEACELIVGNARHIKAVPGRKTDVKDSEWLAQLVRHGLIRRSVVPPGPIRALRDLVRFRRKLVESRTTERNRVLKLLETANLKLASVISDVFGVSGMRMLRAVAAGPAEPTTLADQACGALRTKRAALIAALTGRVESHHRLLLQLHLERLDQVEAQLERLALLITAQLAPYRDAHTRLQEIPGVGPGIAAVLLAELGLDMAVFHDAHHLAAWAGICPSNNESAGKHRSTAIRKGNVGLKTALVEAAQAAARTKGTYLRDKFHRLRARRGYKRAIVAIAHKILIAAYHLLGGAPAYRELGPTYLDTLDTSRTVRNLTRRLERLGFVVTLEPSAA

SEQ ID NO: 398269 - protein, 309 aa, unidentified
MNPQCYGVDVSKETLEIAGDGQVVQIANTRGAIRSYVRRLPAGSLVGMEATNTYHLAMADHCHEAGMRVYVVNPRVTRHYREILAMHGHNDQMDARALASFVQRHHPELRPYTPKPVATRRLATLLRRRSKLVGVKVQLQQSLHQIPEIRAQVHTALARIEAIIATIERLIEQQLEGNADRARLARITGIGPIVSAALVCDLQSGPFRSVDAFVAFYGLDPQPNDSGKLKGRRRISKRGQRLGRTLLYNAAMSTVRTAVWKPLYQKLLSRGLSKIQAIVAIARRLARTAWSVYTHQTEFNPARLYQPLT

SEQ ID NO: 398270 - protein, 395 aa, unidentified
MLYLAIDQHRKQLTVNLRNEAGDVIVKRQVSTEWKRVREFMEETQKRSLPEGGFVAILEVCGFNDWFLKMLKEYGCRQIVLVQPEKRDKHKTDRRDANALGELLWTNRERLLRGKRVQNVRQVVPPSERDAEDRQLTILRQRLGRLRTRTINKVQHLLLKHNLQQECPAKKIKTKKARKWLETLSLGTIDRLEMDQLLTQWELMDKQQEELDRRIVERQAENETAAIIATIPGAGAYGSLAIASRIGSIDRFPHPRSLANYWGLTPRSNNSGDATRRLGSITKEGSAIVRFLLAQIVVHVLRRDADVKEWYRRIKKRRGAKIARVAVMRRLATIIWCMVKHRQPYRSGRTPAAGNGSACAVVPDRNAFLQEIQGRSRSSKAKGRQGHEDVAAARP

SEQ ID NO: 398271 - protein, 423 aa, unidentified
MEIMHERVAGLDVHKATIVACVRLGTGRKVTRECRTFDTTTDGLLALLAWLVECRCSHVAMEATGVYWMPVWKILGEGDFALIVANAAHIKNVPGRKTDLNDAMWIADLLACGLIKASFVPEEDVQELRSLLRTRKQLGREQTRHVQRIQKTLAEANIQLDSVLSDIMGASGRRIIEAMIAGVRDPRRLAGLANTRIKATPKQLYDALHGRLTDHHRFLLTLHLRQWDSLDATIREIDQEVEARIARMDKEVKADEAPFRDLIGLLCTIPGVSTLSGTTILSEIGRDMSRFPTAGHLVAWAGLCPGQNESAGKRKPARLRKGAPWLKTMLVQCAWAAKRKKDSYYKAQFFRLQARRGPQKAICAVAASILTAIYHILKNGTEHHDLGADHFNRRSIEGQTKRLVAQLTKLGFEVQLQRTTEAA

SEQ ID NO: 398272 - protein, 399 aa, unidentified
MFSHTPHDIRVSIDVGCKSHQVAVGLSTGEVIAEFSISHQPEGFRTFFAKLEQLEQQYQCPVRVAMEGFNGYARPLDSMVLARGWQLYNINNLKLARFKEIFPGAAKTDAIDARRGLELFQLNDHLPTAKNVLQLVAEPPRENQMLKRLSRRRRRLVNERVRVSNNFQADLQAICPSLLALTGDATNHWFLQLLTSTNDLRKLSRMHLKTLRKIHSIGVRYASLIQRWQKQAQFSVEVEWVGEMIQQDAARILELNNQIKALETKMAAAAGQSFIASTLATLPGFGPVCTAELAGEIGHEVRFTKEASLALYLGMATLDNSSGEYRGTKIPRQVNRRAKAAMMVAVDRHRKQIPASQRYYEKKRAEGKGHNQAVRALGRHLCRIIFKMLKERRAYIPPN

SEQ ID NO: 398273 - protein, 353 aa, unidentified
MDGEVLISVDPHKASSTLAVFDPVTRTAIDGARFANTKEGYRELARFAGRWAHRRWAVEGCHGAGRSLAQRLVADGERVVDVPAKLAARVRVFSQGHGKKTDRHDAVSIGLAALDANGLHDVALDDATVTLRLLSDRRQELVSLRTQAICRLHRLLAELTPGGVRRELNATKAAAVLGRLRPRDEPGRIRRQLAMDHLGDVRSLDRRIKAVGAQITDVVATTGTTLVGIFGVGPVLAARILAEVGDTARFPDKDHFASYNGTAPIDASSGEQQRHRLSRVGNRRINHALHMAAVTQLRNPTSAGRAYYERKLAGGKTRKEALRCLKRRLSDVVFRQLVIDLQPAATAPNTITP

SEQ ID NO: 398274 - protein, 405 aa, unidentified
MDIIVDKGCGVDVHKGTVVACIMGTGIKKEVKTYTTMTNDLLRLREWLQKNGITHVAMESTGVYWKPVFNILEDHFEVILVNARHVKNVPGRKTDVQDSEWLCRLLRSGLVSGSFIPPRDIRELRDLTRHKRKLIQAITAEKQRVEKVLEDANIKLSSIASDTFGASGKRIIEELIKGKLRAEEMAELSKGRLRQKREDLKEALVGEVREHHKFMIKASLKHIRAMEKILSDIERKIQEKIGRYYKEEYELLQTIPGVKGEASTLIAEMGVDMDRFPNEMHLSSWAGMSPGNNESAGKKKPGSTTYGNKCLKTMLTEFAWVASKTKDTYLRSKYHSLVGRRGKKKALVALGHKILIMCYHILKYRRPYKELGGDYLDKRRKEKITRSYIKRLNHLGYEVILKEAA

SEQ ID NO: 398275 - protein, 359 aa, unidentified
MQTQRKELNFEGQSVFVGLDVHLKSWTVSIFTEKLHHKTFSQPPRAEILFEYLKFNFPNASYFSTYEAGFCGFWAHFKLEELGIQNIVVNPVDVPTTQKDQMRKSDPIDSNKLGRSLRSNELKGIYIPQPETLEDRTIIRVRFTIVKDLVRQKQRIKSLLYLYGIEYPDEFQNKNTHWSKRFINWLKTVQLQYATGTDALNLMIKEAEQLRLILLEATRKVRTLSKTERYSKNIELITSVPGVGLITGMMLMAEIEDIKRFDNSDKLAGLIGIVPDCHSSGLTEKKGEMTSRGQYFMRKGIIECSWVAASKDPALSLAYYNYCKRMEPNKAITRIARKLINRIYSVLKNEKKYEIGIVK

SEQ ID NO: 398276 - protein, 347 aa, unidentified
MVTLGGDCHKRTHTLVAVDDNGRELGTKTVAAVAIGHLEALRWASQWVERRWALENCRHLSRRLEADLLLAGEIVVQVSPKLMAGVRRSSREWGKSDPIDALAVARAALRESELPIARLEGTSREVKLLLDHRDDLVGERTRVQNRLRWHIHELEPGFDVPARSLDRKVVLNRVAKALAVHHGVAADIAVELLGRVRELTARINELERQIHVMVTQLAPNLLELDGCAALGAAKLIGETASICRFRTPAQFAMHNGSAPIPVWSGSHERHRLNRGGNRQLNAALHRIAITQMRVGGRGHDYVQHRQTSGDTKREAIRALRRRISDEVFRRMWQDHLAAATVQQSAAA

SEQ ID NO: 398277 - protein, 346 aa, unidentified
MEYIALDVHKKYTWARVENTQGDRLYESRLAHTHGTVKNFVQRWSEGSPVAVETVGNWYWVVDEIEAGGGKPQLVNARLAKLMMGSVNKSDKLDAKGMNRLQRTGTLPTVWIPPSSVRDARELPRTRMVLSRQRTQLKNRVHATLGKYGFVVEGTTDAFGKKGRQIVAELMAKLPPHTEQGLSRILDQLDHVCENLKWIEAKMIEVFSPCSETTWLKTLPGVGDILAVVIWTEIGTIERFGRAEQLASYCGLVARENSSGGKIRFGAVRRDVNVYLKWAFVEAANSAVLNAERCGYDHISRLYQRIKTRRGHGKAKVAVARHLSEASFWMLKKGEPYREPMPSTQR

SEQ ID NO: 398278 - protein, 337 aa, unidentified
MTIIRIGLDTSKHVFQIHGVDEIEKPVLRRQLRRSEMAKFFTKLPPTRIGLEACGAAHHWARLLRGVGHEVLLMPPQYIKPYVKRSKNDAIDAEAICEAMSRPTMRFVAVKSADSQAALTMLKVRDLLVKQRTMLINAIRGHAAEFGVTAAKGPKQLIELLQRLANDAGVPALAREMIDVVAAQLDAVAAKLKAIEARLVAWHRQNQTSQCLATIPGIGPIGAVSFALKVPDPTVFRSARHFAAWIGITPRENSTGGKQRLGKISREGDEGLRRLVVLGATAVIQQAIKKDCAAPWLRGLLARKPKKVAAIALANKMARIAWAMMVTGETYRRPQPA

SEQ ID NO: 398279 - protein, 351 aa, unidentified
MYTLGIDLHKKSSVWVLIDEHRTELWKETVPCHPEYISIAVKKIPVSPKEVQVALEPVAGWRWVSKQLEEAGMNVHIAHPRKIYLIAQSTKKNDEEDSRTLANLLHSGFFPEAHRSSEEIYQLRLLLRERNFIVRQRTSVKNQLHGIATTQGLHLIKSANPLHKRGKEGIMAGNNFVLKELHHLEEDLGERIVPFDKKLQEEVLKYPIASILRTIPGVGIVTALTVISEVDDFTRFKSGKHLTSFAGLVPRQRSSGDVVRYGAITHAGSAPLRTTLVETAMRIRESNAPELFAFVKRLTPICGAKKARVALARKLLAIMWKMVTSSTTYNPKLLFSSCTTKVSDLDTASGA

SEQ ID NO: 398280 - protein, 409 aa, unidentified
MLYLGIDLHRKQMTVSLRNQAGDVLVRRQVSTRPKKVDEFLEQVHQLGTDDGGAYVAIVEVCGFHDWLVKRLQADAPCQDVVVVQPMKRSKKKTDRRDANALSELLWVNRERLLRGDRVQGVRRIHLPGEEEQQDRQVTQLRDGLVRKRTQTINQIHKILRRENLEWERPTKTFQTQKVRHWLKTVELSETERFTMDQLLAQWDLWEQQIKAVEKRIFIRFEENEDAQLLATMFGVSRFIALAIACRIGPIDRFPRGRSLANFFGLTPGSCSSGQTQRLGSITKEGSRLVRCLLAQVVVNVLRRDGTLRAWYKQIKHRRGSKIARVAVMRRLAVIMWHMLSKREAWRPGMLAQPSRPAADDPRTACEPVDRDAVLAQRRELADSAEAAGESTGSSSLFRVSGEVESCQV

SEQ ID NO: 398281 - protein, 420 aa, unidentified
MPNIEIGVDSMVKENFIYVGIDLHKETHTAVMIDCYNQKLGEITFPNRPADFPKLVTKVKKCNTDAKELVYGLENAYGYGRPLAVWLIDKGYFVKDVNTAISHRQAKHRGAMYRKSDSDDAEAIALATLNMLDKLPDACPNDAYWSLGQLVHRRDNIMEQRTRLVNQLHEQLCIAYPSYKQFFNDISRPTALYLWEHYPSRKYLKGKSVEDLRAELVPVSHNKCSTRTCKKILDAIAGDKVKNNAYQDARDMVTLSIVSDLQHYDKQLAEVDKMLEQMYKMLGCTLTTIPGVNAITAVKILAEIGDIKRFSNANKLAQFAGIAPLHLSSSGKGKDLATKQGNRRLQATIYFLAIQMVQLSSKGTPRNPVVRAYYEKRKAEGKTSQQALICISRRLISIIYGMLKNGTEYRMPVVENAGEK

SEQ ID NO: 398282 - protein, 362 aa, unidentified
MNATTAAIDLAKNVFQVALADSNGRVLEQHRLTRAQFERFFDNRSVSRMIMEACGSAHHWARVFGARGIEVSLLPAMYVRAYVRRSKTDAADALALLEAARCADIVAVKVKSVEQQSLQALHRTRSLWMGTRTSRINALRGFCRELGLHVPVGARAGLDAMARAVADDQSPISALLRPIMQQLLEEIRVLEVRIAQLERQLAQLARESSPCRLLMSIPGVGLLTATAILAATSGSVAHFKSARHFASWFGLTPKESSSGGTRRLGRISKMGDKYLRMLLTHGARSVMRAAAVARLRGQELLGLRHWALQLQARSNHNKAACALANKMARICYAVLRDQTAFGQPAVTRLSKKMRRQSFELAH

SEQ ID NO: 398283 - protein, 423 aa, unidentified
MPYRIAGIDVHKKKLAVVVADVEVEDEYQFERRWYGSNPEQLQLLAEWLIQQQVEEVVMESTAQYWKPVWGALEQYWKPSCEKREGAGRMSGTLHLAQALSNRGRRGRKKDFRDAERLLKRLVSQVLTLSFVPHAEQRLWRTVTRTKYQLRRNKVRLHNQLEALLEEAHIKLSSLVSDLLGASARRMLQALAEGETDPAALAALADQRLRATSTQLRDALGACTELNPVYRRLVKMVLEELQWIEQQIGQLDQEMASLLRQHQDAVQRLAEVPGLGVDSAQQIIAEVGAKAATFASAKNLSSWVGACPGEEETAEVNYSARSPKGNRHMRRLLNQAANAAVKVKGSIFEIVYRRLGPRLGHNKTIGAIAHRICQLIWIILNKGVRYEERGPVVSENSRRARTSRMIRTLRKLGYRVELQADPA

SEQ ID NO: 398284 - protein, 333 aa, unidentified
MDTHADVHVAAALDSVGGLLGVEEFPVSPAGYARLLGWLGGFGTVALVGIEGTGSYGAGLARHVTAAGIRVVEVDRSDRQDRRRQGKSDPLDAVSAARAAQSGRARGAPKGRDGAVEAIRALMVAKRSARSERVQTINQARALVLTGPDDLRTRFAKHTAAGLVSGLASLRPRPGDVVGYATRIALRELGRRAEFLDAQLERLDELISSLVAARAPGLLALHGVGPDTAALLLVAAGDHPERLRSEAAWAHLCAAAPIQASSGKVTRHRLNPGGDRQANHALWRIVLTRMSAHPPTLIYVERRTKEGLSKKEIIRCLKRYVAREVYRHLRAVG

SEQ ID NO: 398285 - protein, 419 aa, unidentified
MTQKEHSKLIEVVHPICCGLDVHKKNIAACVIFPGKDGVDQYDIKEFGTFTDELQRLRSWLLEHGCPVVAMESTGIYWRPIHNVLEDTVHVILVNARDIKNVPGRKTDIGDSKWLAGLLRHGLLRGSFIPSKAVREWRDLTRLRKKYVQTVGDYKKRTHKLFESANIKIDSVVSDLFGVTGRNLINLLVSGRQPLTLLDIEGCVRGKLKGKEEELYRSIQGFFSDHHRFILKRLLKTVVVLEKEIAGFDKQIRRLMKDQKELLERMKKAAGISDVSACDILAELGPDLSGFRTDAALASWSGLCPGNNESAGKRKSGRSPVRKHHLKTIMVEVAWAAVKKKGSYFKDKYYRLKARRGAKKAIVAIAHRIMLGIYHVIKDGVEFRDLGEDYLTERNKSRKISYLRRQAQVMGYNLVPQTT

SEQ ID NO: 398286 - protein, 338 aa, unidentified
MKLYGGIDLHSNNSVVALLDEQDQVVYQKRLGNDAQGIIEALAPYQEAIEGLVVESTYNWYWLVDALMEAGYQVHLANTTAIKQYSGLKYSDDDSDARWLAKLLRLGLVAEGFIYPKEERAVRDLLRRRSRLVQQHTANLVAVQNLMARNRGRSLSANAVRRLTPQAVEQLLPDPNLALAVQSTLLAMRGQEAAIDLLERQACAQVQLRPAYRHLLTVSGIGKVLGLIILLETGPVGRFARVGNYGSYCRCVDSQRLSNGKRKGRGNTKNGNKYLAWAYIEAANFAVRFNPTLKRYYQRKRAKSNGVVAIKTVAHKLARACYYILRDGTDFEVTRAFT

SEQ ID NO: 398287 - protein, 366 aa, unidentified
MPSVTPAAGTIHLGMDTSKNTIVVGILMPGDEVPVIDRIWNEEGSVRHLVGRLGDPAALRACYEAGPCGFDLHRLLASMGVACDVVAPSLIPRRAGDRVKTDKRDASRLARLHRAGELTPIRVPSDAEEAVRDLVRARAALLADRKRAQQRITAMLLRHGRVWRSGSYWTQAHEQWIAGQRFEEPALASALAHYRAALDTRRAELDAIEAELEPWATRPPLAEAVARLGSYRGIAAITGLVLAAEVAGWRRFGSARAFMGFTGLVPAEYSSGERTRRGAITKAGSEPVRTALIEAAWAYRHKPAIGVTLRRRQHDASPQTLARSWQAQRRLYARYKTMTARSKPAAVAVTAMARELAGFVWAEMTS

SEQ ID NO: 398288 - protein, 377 aa, unidentified
MEKNSKRNKKNQANEGRIHPELVPSVNQDGNSIGIDLGDRRSHYGVLDRQGEIIAEGSVATRREEFSANFSGLAKARIALEVGTHSAWVSELLTECGHEVVVANPRRMESISKNRRKNERVDARTLARLVRADPELLYPIRHRGPQARRDLMGLRARQALVEARTGLINSVRGLVKSMGARMPECSAESFAQPVDALPENLRATLKPLLQQVAALTARIRQYDGQIEIMAQKRYPPSGLLRQVKGVGALTAVAYLLTLDDPARFEKSREVGPYLGLVPRQDDSGDSSPPLGITKTGDTMLRRLLVGSAPYLLGAFGEDCDLRRLGLKLAARGGKNAKKRAGVAVARKLAVLLHSLWVTGAVYEPLRNNAAQTSRAVA

SEQ ID NO: 398289 - protein, 373 aa, unidentified
MSVYVGIDVHRKRSQVAVVTEDGKVQLNRNVVNGSEPMLRLIGGLPAGTPVAFEAAYGWGWLVELLEGYGFDPHLVHPLRCKAIASARLKNDKVDAAILAQLLRADLLPEAWIAPQPVRQLRALLRHRASLVRLGTQLRNRIHAVAADHGYDRTGSYWTGPGRGWLGELSLPAVSREIVTDCLAFIDTLAPEIERLDSELRQHAKADRRVKALTTLPGVGQFTALVMLAEIGDITRFPNARKLASWAGLTPTVRGSDLTVRHGHISKQGSAWLRWVLNQAAQTAKRSPEFNAAYIAIAKRRGTKIATIAISRKLLTRAYHLLADAEGTQALSTTTPAAGATCTAHPQTGRVTRPRARSPMRHEPATGRARSSD

SEQ ID NO: 398290 - protein, 359 aa, unidentified
MNTIAKPYRSSDLVYCVDLAKNKFQIHTFAARGECLARRTHNRTQFDTLFCKAHTPRGLIVMEACGSANHWARRYRERGYRVKLVPAQFVAKRRIGNKNDGNDADAIYAVHTDPRVHAVPVKTLNQQDLCAWHCARERLVGQRTQCINQVRGLLAERGLVQGKGKTGLQALLRQANETTNTEVTAALQHLVAIIAEQIDELSVHIANIERQLKAALATSPVAQNLKTIFGIGVVTATAFAAETGANVQRFADARQFAAGIGITPREASSGQTRRLGKITKRGNPYLRRLLVQCAQVIVNLRDKRDDVLCVLARRLFAMHKLRNTVIVAIANHLARIVYAVIKHGKPYHPGGSHTPAIVA

SEQ ID NO: 398291 - protein, 322 aa, unidentified
MPSPVLGIDIAKEKIEVVLLVSGKVKNKSFKNYADGFEALALWLRKSGIKRVHACLEATGNYGEDLAIFLYEAGHTVSVVNPARIKGFAQSELVRTKTDKVDAGVIARFCQAMKPAPWVLPSPEIRALRALARRADSLIDMLTQEKNRLGTAHGSVIPLIQGHIDYLEKEKEKVRGQITDLIDRNPDLKRKKDLLDSIPGIGKVTIATLLAELDDLEKFKHVRELVAFIGLAPKETLSGSSIKGKPRLCKTGHARLRKALYMPALVSIRYNPLMITFYQRLKEKGKNGKVIVCAIMRKLVHVIFGVLKSGKIFDPNYKPGLA

SEQ ID NO: 398292 - protein, 323 aa, unidentified
MAKRITICAGIDTGKHKLDVAIEGHSEQLRVENTAKGHQALVDWLRQHRVKRVGIEASGGYEQPVVSELRRRRFVVVVFQPDQVRAYAKFHLQRAKNDKIDADLIAACTAAVKTIHAAPDPRLAPFAEQLTLIDQIGEDIARLKNRIESCRDSRIKAPWKEEVRRLSKCKRAELKALVAAISKHPDLAMRLDLINSVDGIGLPTAVAILVRMPEIGQITREQAAALAGLAPYDDDSGEQFGVRHIEGGRKRLRRALYDAALPASFRWNQQIICLYQRLTAKGKEHKRALVACARKLLVFANTVVARGTPWRDHPPATAALAIG

SEQ ID NO: 398293 - protein, 360 aa, unidentified
MNAVGIDVSKGKSMVAALRPFGEIVAKPFEVPHTSSGFHQLVDQLNSLDGSTRIIMEHTGRYYEPMARWLSDSGFFVSTVNPKLIKDYGNNTLRKVKTDKADSVKIARYALDNWQDLRQYTSMDIIRNQLKTMNHQFSFYMKQKTSYKNNLISLLDQTYPGINDFFDSPARSDGSQKWVDFVSSFWHVDCVRSLGLATFTERYQKWCKRHGYNFQPEKLSQIYSFSKELISVLTKDPVTKFLVKQAVEQLNTVSFTVEQLRLEMNRLAAQLPEYQVVMAMKGVGPSLGPQLMAEIGDLSRFSHREALTAFAGVDPGVNQSGTYEARSVRTSKRGSPQLRKTLFIAFWTRNVQKGSRTMST

SEQ ID NO: 398294 - protein, 411 aa, unidentified
MEAAVITAVGIDVSKSKSTVAVRRPGGEIVLRPFEVHHTNSDLKKLASTLKKLGGDIRIVMEHTSTYWRPITLTLKEAGFFVSVVNAMLIHDFSDNTIRKLKTDRADALKIANYALTFWDTLPPFNNEEETRLLLKMQSRANERITATATALRNGLIALADQTFPGVNIAFAPNTKNANGHEKWVDFFLRYWHKDCVCQYSMEAFTESYRGWCKRKNYKFRTDTAHQIYLLAQEGVATLPKCESTKMLITQACKSLNAVCEAKQSTQLEMQRLAAMLPEYEVVMQMEGAGPITGPALMAEIGDVRRFKNKKALVAFAGIDAPPFQSGAFESKSRHVSKRGSPHLRRTIFIVSNIILTRSNPENAVYCFMDKKRSEGKHYYVYTVAGSAKFLRVYYARVTEFLRSLPSSDAC

SEQ ID NO: 398295 - protein, 387 aa, unidentified
MYFVGIDISKFKHDCAIIDELCDTVMPSWSFSNDREGFSHFKALLDSLEGEKKIGLESTGHYGQNLKQFLESNGFTFMEFNPLLVSRFVRSKSLRNTKTDSIDALSIAQYVMTVEYKPYPSSFYHLDKLKSLTRFRNSLVRQRSRQLVELTNVLDKLFPEFKPFFKDKFSVTALYILAHYQTPERIANMNARSYEALRKLSRGRFTLSNFTQLKALAKNTVGTQSDYLLDQMNILLELYSQLDSKVDELDAQIKECVRGIDPPCLSIPGVGELSAAMILSEFGDFSKFQNPSKLLAFAGLEPGYFQSGQSEYTGHMVKHGSSRLRYALMNCCLPLISNEPVFAAYYAKKRSEGKPHRVALTHVAKKLLRVIYTLQTKNIRYDPTMIH

SEQ ID NO: 398296 - protein, 423 aa, unidentified
MLKEQSIETQDKQEQKPDKEQKEKYLPVGIDPGKDICGVVMLHPDSGNDTVLSSLFMDNCSFEDADALIERAEKVANSFGLKPIFVIEATNILWRPLFSYLKSKGCLVHTVCATQTKSSRGTKMRKTKTDLIDAKHIARIYKQGESHPTKFPEGIRMDLRELVRLHSFLTDMKGRILNRVYGYLFQVFPEFVSFFDSDSFLGTMWTLLKEGLVHPDCLKKVRIDKLTSILRKASMGRFKREKAIMLKEKARNSFGIPEGREGFSSCLKLLAHMYEFVEKSIACLEEDKIKPIVDQIPNKLNTIKGLGIAQAYFLAESRKPEEYENVDDVLAWFGLDPRLDESAGKKKKNRHISKCGTKYGREAMFLSTDMVMIHNPPVMVKYRRLRKNGRTNKEAKTIIAADLVKVCYAMQRDNVPFNPSLIH

SEQ ID NO: 398297 - protein, 302 aa, unidentified
MKKLYFIGIDVSKEKLSCFDGKEEFSVKNDLDLEEFKRLLRRKYKDLKRIALIFEATGIYSYFLKAFCNTKHIKAYILNPKKTPNLAKVLGQRSKTDKIDARTIYCFKDLISKEQIKVPQIDETLEKIYAYFSSYKFLIKQRVALSNHLDALERNPFAPRDLMKRMQERYLELRAEEKRLMEKMEQIIAEAEDTQEDLSNLCSIKGIGINNAICLLILFKRYQVENRQQVTALLGFDVKTRQSGTSVYSRGQISKQGNGMMRSMLYMAALNAVRTNLRMKFFYKRLIDRGKPRKVALMSLVI

SEQ ID NO: 398298 - protein, 415 aa, unidentified
MALKIVYKICCGIDVHKTFVVACIASTSDKGITSYESHRFSTYTSGLKTLLQWLIDRNCKDVCMESTGKYWIPVYNILESDCSIVLAHPKYVKAIRGKKTDKKDAKWIADLFKHDLVAGSFMPPSDIRQLRDLMRYRFKLTCFKSSEKNRLQNCLTVSNIQLGNVVSDTFGKSAQAILDKLLENPADTSFDLEPLVYKSLKKKLPELRDAIDGFITPEQAGKLKIIKDHYDNLESRKAELEELILALAAPYQQELAILQTAPGISSDFTAIGIISEIGTNMEAFPSAKHLCSWAGLTPTNNESAGKKKSVRVSKAGCYIKPLLVQCANAVIKSTKHPEMRNRYLRLKKRRGHKKAIIAIARMLLTALYHMLKNGENYNAELYQKSDLLPVDREITVEQALMIARNQGYKIKSATA

SEQ ID NO: 398299 - protein, 640 aa, unidentified
MQYALPQVLPDVPAGGVCAGIDWATADHAVCVVDMAGRVIDRFSAAHDKTGIAAIITRLRKNKVTEVAIERGDGPLVDALLAAGITVVVITSRQVKNLRSRFGAAGAKDDRFDAFVLADTLRTDRARLRPLIPDTPATISLRMAVRARRHLVAHRVAAGNQLRAHLAVAFPAGLRLFHDLDSPISLAFLARFGSQDAAAELDEQTIGAWLATIAVRGRPAPASELHARLHAAPPGATGADGAAQAGVTAALTATLTALSAQIKALETQIAGQLAAHPDGHIFTSLPRPGTVRAARLLAEIGDCRSRFPDPESLAGLAGVAPVTRRSGTRIAHGFRWAVNRQLRDAICDFAADSRHASPWAAAIYDDARARGKDHPHAVRITARAWSYVIWRCWRDVSPTTPPSTTLCRPSWPGKAPRPPAPARKRTGDRRDHRRAARARRRPAPRGGRHRAAHRPRRHPAPRRLRPLRAHRHQHQRRHHPDGLDRLGRRAQRPAPRADPPQRRGTAHPPARRQHRRRRSRLAARRRPRPGQPEPETPDHGHPPRSRTTPPALTSHHRSRPGRPPGRACRHSRKSATQPHTQRRSPQGNCRARGAAGGHGAGRNRLRRARGGCQDGRGRPLTSSILGGLDPVHQSERRELL

SEQ ID NO: 398300 - protein, 448 aa, unidentified
MDKPGFNEVRRNVAGVDLAGHANHYVCGPRRDDGTHEVVAFGTTTSDLLSLVRWLKDRNVVSVAMESTSVYWIPLYDLLESSGIEAVLVDTRQVRMVPGKKSDVKDCQWLQRLHSCGLLHGAFRPDERYNAIRVVLRERQNVLAMQTQAIQSIQKSMDQMNIRLHHAVSNVAGKTGMDILRAIVDGERDPAKLAKLRHYTCKKTEEEIAKELTGTWREEHLFNLGIAFRHLEFLQEQLARYEEKVNSMYAALARDSDRPVPPPDDSSEKKEKDRRNREIKRDLTRLTGFDLTRIDGIDAGLACQLVSEIGPNVDRFPTEKKFVSYIGLAPPLGKSAGKNVRTRGKTKNTCRIGQLLRQAASTLSRSKSALGARFRATRSRTSSKIAITDTARTMAKLIYRGMKFGAAYVDEGEASYEQRRRDKTLRFIQRAIRTLDISLSELGLPAAT

SEQ ID NO: 398301 - protein, 344 aa, unidentified
MNHYAGIDVSLECSSVCVVDATGKIVREGKVASEPATLIGWFGALGLELELERIGLEAGPLSQWLYGAMQQAGLAVELLETRHVHDAFKAMPVKSDRNDARGIAQLMRLGWFRPVHCKSIGAQETRALLTARKLVQSKLRDVENSLRGILRGFGLKVGRTTNRRFAGRIRELVRHHPALQAVAEALLAVHAVLLCEFKGFEQRVRATARLDAKTRLLMSTPAIGPVVGLTFASAIDDPGRFRSSKQVGAHFGLTPKKYQSGETDVSGRISKIGDASVRAALYEAAHIMLIKPIKGCTQLKSWAMRIARRAGMRKAKVALARKLAVILHRMLVSGTPFNAAAAAA

SEQ ID NO: 398302 - protein, 360 aa, unidentified
MFIVGFDLGKRKSQLCVQDLDGNVLAELRVDTGRDEIVEALMPFRGAQVLVEASTSAEWVARLLESNSFSVVVADPRFSLMYAQRDKKVKTDRRDARALAEALRLRAYRPAHRKSDVARRLQGRLVVRRQLVAMRTKLVTLVRSMCEREGVMLPRCHVEMFTRVLEGQQLDPVVFDIIGPAVQQVIELTAALDAIDDEFKALADAHPAAKLLQSVRGVGPVTSLAFVSVVDDPSRFKSARELTAYLGLVPGEHSSGDTKSRPGAITKSGDALLRGYLYEAAVTMAKRTAPDSHLKQWFTKLTLRSNGAGTKRKARVALARRLARIMFAMWRDNASYNPSRTAPIVGPPAASPAGSTAQAA

SEQ ID NO: 398303 - protein, 344 aa, unidentified
MDHFAGLDVSVKDTSVCIVDDTGKIVREAKMASEPEALLAVLSNPAYHFKRIGLEAGPLSQWLFSALAEAALPVICVETRHMRAVLQAQINKTDRNDARGIAQMMRVGLYRPVHVKTLRSQKLRMLLTHRKLLQSKAIAIENDLRGTLRNFGLKVGMVGKVKFEARIKELVENLPDLAALVESLLIVRRVLREQIVILHRRLLAIVRDDEVCRRLMTVPGVGPVVSLTYRATVDVPARFRKSKSVGAVFGLTCSKYQSGEIDRSGSISRCGDEMMRVMLYEAAQSMLRLKKWSWLKAWAMQIARRRGMKKAIVALARRLAVIMHRIWVDGTEFRWTREQAAAAV

SEQ ID NO: 398304 - protein, 344 aa, unidentified
MADTGAACQLYVGIDIAADTFTAAWLTPGGAPSAPATGAQTPAGYATLQQQLGATAVAPTATLVVLESTGNYWVALAVTLHEAGYRVAVINPPQAHHFVKAQLRRAKTDALDARALAQLAVALRPAPWTSPPAVYHEVRQWLVARDALLAMRTQARNQRHALRQWPVVAEAVRRHLDELIADLDRRVASLDAEIAAVLRESRWAESLACLTSAPGIGLVTAAWLLVGTLNFTLCAGPEALAAYVGLAPMPRESRRSIRGRPSIGHDGNGRLRTALSMATLSAARHNPAIKAFYDRLRAAGKPMKVARCAARKLLHQAWALGATQQRFDPNHGRHRQAGAPELAA

SEQ ID NO: 398305 - protein, 400 aa, unidentified
MRVVFGIDVSKASSEVAILVNGEKVHNYTMSNDAIGFSRLLGDLKTVHKPEIIFEATGVYSRRLQAFLDEHGYAYTRLNPLEAKKQLDSLRVRKTNQIDAEKLAQSQFVLNRKPTYVQEEVYQNLRDLSRFYQNLTEDIVRAKNRLHKVLQVTFPELENILSTPSGEQYWNLVIAFPCKDCVLELSNDELSKSIRLSTSKRISDKRVAYLAEKLIALANQSYCAVKKTSPILEEVRYYTKELLRLSEQRQAVLDEMVELAQPLPEYDILLSIPGIAETTATSIIGELGDIRRFQSANQINAFIGIDLRHYESGNFLAKEHITKRGNPYARKILFKCIHNIASANHTNPCHIADFYKKRKRQSQTTSTKLHTIASIHRLIRTMYYLIMHNKFYDYASTQNR

SEQ ID NO: 398306 - protein, 410 aa, unidentified
MQVLYPHCTGLEVHKDTVVACVRHMIDGTVKREVRTFDTTTKGLLALADWLASEGCSHVAMEATGVYWKPVWHILGDGDFELVLANAKHVKNVPGRKTDINDATWLADLLAHGLIRGSFVPGEETQVLRSLLRTRKQLVRERSSHIQRLQKTLEDANIKLDSEISDIIGLTGRRMLEALVAGETDPTKLAALAHPRVKAPPEQLREALRGRVMAHHRFLLRLHLQQIDALDAALGQIDREVEGRIAPFRIAVELLTTIPGISELSARIIAAEIGTDMSRFPTAAHLISWAGLCPRNDESAGKRRSTRMRKGAPWLKTTLIQCSCAAVRKKASYFQTQFHRIRSRRGGKKAIGAVAASILTAVYHMLKDGTCYHDLGPDHFDRRAKTTQTKRLITRLQNLGYAVQITPLPA

SEQ ID NO: 398307 - protein, 367 aa, unidentified
MKNHSSIDQSVSSSDLSACTTLAVDLAKQVFQVAGEDVLGQVLYEQRIKSREAFYDFLRQLPPHVVVLMETGPGAQAWARQLQDQGNPVRILPAGLVATHRSGPKNDRNDALAILRANRDEKICAVPVKSVAALAMQALHRARQGYVRRRTALSNQMRGLLLEHGVALAQGDVAISQKIPRVLEDATQPVPDLLRELIDELLAEWRHLGERISVLTGRLEVAANTDMTAKRLMTVRGIGPVTATALVAKETQPERFPNARKFAAYFGMVPDQHSSGETVRLGDMSKRGDAYLRSLMIQGAHAVLQQLRPDSRQPDDRRLLHWMSRLGRKEAAIRLANRNLRIVWVLLQNDQTYRRHAGDGQPATMGH

SEQ ID NO: 398308 - protein, 355 aa, unidentified
MNSEKYIGLDVHQATISVAVLDSTGKLVMESILETKAATILEFLAGLRGTLSVTFEEGTWAAWLYDLLKPHVAKLVVCNPRKNALLKDGNKSDRIDAHKLAELLYLNKLSSVYHGETGVRMLRELARSYLTIVKDLTRVMCRLKAVYRSWAIPCAGRDVYYTRHRAQWLGKIKEAGVRCRAERLYQQLDMLQYLRQQARRELLAESRKHAITVKLRQIPSLGPIRSALAVALIQTPHRFRTKRQLWAYSGLALETRTSAEYCYVKGGLRRSKKQISIRGLNKDHNHDLKGLFKGAATRASVLPGPFQDFYQRSLAKGIKPTLARLTLARKIAAITLTLWKKGENFDADKLKSQAA

SEQ ID NO: 398309 - protein, 317 aa, unidentified
MSNPESFVGIDVAKSWLDVGWLAGPTLRIDYSDEAVAGLVERLRMDPPTLVVMEATGGLETEVASALAAAGLPVAVVNPRQVRDYAKACGRLAKTDRIDAMVLAGFACAIRPQVRELPDEDTRALGDLLARRRQLIEMRVQEKLRLQRASSVQRVSLREHITWLDERIARLDIELTHTLRCSPAWRDKDDLLKAIPGVGSLTRATMLALLPELGTLNRRQIAALVGVAPFNRDSGKHQGQRMIWGGRAQVRRTLYMAVVAAMRCNPIIRSFYLHLRAQGKPAKVALTACMRKLLIIMNAMLKHHSEWSPGLDSQHSC

SEQ ID NO: 398310 - protein, 337 aa, unidentified
MYSIGIDLHKETAWYCVFDAQGHRVSHGSLPADPESFKKYFEGVPRPFKMAVEATYNWYYVIDIAEEYAAEVYLADSYQVKAFAKKHKKTDKIDARLIAWLLHRGDLPTVAIPDKETRKNREMLRYRMRLVSDRTRNIVRLKAMLDRIGFKGTGNLATAKRRKEIGSTEIPEPYGRIARGYLARIAQLSEELKICGSDLKVLAGRDQDVMHLMSVPGFQSFSALLVKTEIFDISRFRSFGALCAYSGLAPRVHASGGHCYHGPLNTNRRKELQWILLENAWHAMRKIPRLERKYAAIKKRKGCNTAKVAVARDILKIIYHILKEKRPFYPESERLSA

SEQ ID NO: 398311 - protein, 434 aa, unidentified
MKSKPKEKSKKATDHPVQHHWHEMNRKQRRDMMRKVQSQELSLEVVHPDAAGIDIGNESHYVAVPPSRDNQPVRRFGCTTGELKAMAAWLKQCAIQTVAMQSTGVYWVAVYDILEQAGLEVYLVNARDTKNLPGRKSDVQESQWLMKLHTYGLLRNSFRPSQEIRVMRTYWRQRNDLVQSAGRHILRTQKVLTQMNLQLANVLTDISGATGQAIIKAILAGEHDPHNLAEFRDPRVKASKEEIAQSLEGNWQEDLLFVLKQEHEGYEFCQKQMAECDRQLQQYLQRREDRSHSAPLPEEKREGRLRKKKQGNTPQFDLREGLFRMTGTDLTRVDGIDVLTATTVISETGYDMSKWQTENHFVSWLRLRPDNRISGEKIIGKGRLPTNNRATVALKMAATTLRKSNTYLGAQFRRLRTKLGAPCAIKATACSATA

SEQ ID NO: 398312 - protein, 322 aa, unidentified
MSAPVLGIDIAKQRMEVALLVDGKVKNKSFRNTMEGFETLSLWLKKLGISKVQACLEATGNYGEDLAIYLHEAGHSVNIVNPARIKGFAQSELIRTKTDKIDAGIIARFCLAMKPEAWIPPSPETRLLRALVRRADSLIGMLTQEKNRLATAHESVIPSIKEHMGYLNKEIKKVRHQMADLIEQNPNLKQKKELLASIPGIGKATIPVILAELDNLEKFNHVRELVAFIGLAPKETLSGSSIKGKPRLCKVGHARFRKALYMPALVSIQCNPVMIAFYNRLKEKGKNGKVIVCAIMRKLVHIIFGILKSGKKFDPNYKPVFA

SEQ ID NO: 398313 - protein, 340 aa, unidentified
MLDTTTFIGLDVHARSIKAVSLDVMTGEVRAATFGYDAGAVAEWVRSVDPRARCVYESGVTGFDLQKRLSGLGVGCVVGAVSKMIKPSADRRRKNDRNDAEFLARMLSVGNVVEVWVPDDECEAARDLTRALEDARDDLSRSKQRLSKFLLRHGLVFDERTPTGRRKGNWTRAHWSRIESIGFAERADNDVLAYYVDAVRRAAEEKARLEGLVEAEARKPRWRKRVDSLRCLKGVDTASAADLVFEAGEFSRFGNARSFAAWVGLTPSEHSSGESDRRGAITKAGNKHLRKTLVEAAWHYLTCSGRPKDLARGQAPDRGARRHAAKGVRRLVERRVLASI

SEQ ID NO: 398314 - protein, 263 aa, unidentified
MQTVSSGVICDFGVDISMDQLVIAEAGRDSIECVDNKAPMIKQWLKALPVGSRIAMESTGSYHLQLAREAHEAGMVVYILNGRDVYHYARALGLRGKTDRVDARLIARYCAQEHERLHAYTPPSQRQQAIDALVRRRAGVVEQRIALRAAFAANDEVDLAAVQPAVEKTIDQLDLLIAAIDEELGNLVAADEELKRRCARLQTVSGVGPLAATYLVNLFDRLPFANADALVAYSGLDPRPADSGLVSNAVSTSRFAGALMAST

SEQ ID NO: 398315 - protein, 311 aa, unidentified
MTKIICGVDVSKHRLDAHVVPSGSFESFENDAVGIARLGEFCRRHEVQLVVMEASGGFERQAFLLLWQAGIACGLTNPRSVRRYAEAMGILEKTDRLDAAVIARFAVAKDLKPTSPPTPLQQRLNALVARLRQVTDDLKVQKQRRSIAMDQEMVTSIDEVIALLKRQTKTLAGEIGSLINDDPLWSQLDAALRTKGIADRTVARLLAELPEIGIYSNRAVVKLAGLAPLANDSGARAGQRHIRAGRPGIRSILFLVADIARRFDQSLGDCHRRLTNAGKPKMVVRTAIARKLLVRLNARAREARAQYALAT

SEQ ID NO: 398316 - protein, 330 aa, unidentified
MSEDALELPTIGIDVSKETLDVSVVAGGKPLGKQFANNEKGFGLLIGWLAHRKLGQLHACLEATGRYSLDVALALHAAGHVVSIVNPAQIRDFARTKLGRNKTDKVDAGHIREYGAVFRPPAWRPPSPALRRLCELQTMRAGFLASRIEWQNRAGSLGSDAAGRALAEATIAHFQAQIAAVDQVIAETIDQDDDLRGKRDLLLSIDGVGQTFAALVLAELPPPEVIASSAAAVAYAGLNPRDFRSGTSVNRPPRISKIGNAVLRAGLYMPAMVAMRHNPAVAALAARLRAQGRLKPKQILIAAMRKLLVICFGVLKTGRPFDATLAMPPP

SEQ ID NO: 398317 - protein, 337 aa, unidentified
MSILHVGIDVSRKNLDVATGHGEAQPVYLGKFTNDQAGFEQLAQALQSAMQNLGTTPIHLTIEPTGGYEQLLARFAIAQGWRVSLPNPLLVRDWARAEGRRSKTDRQDALLLARYGARAHPPEWCPLPASVEQLEALLLRREDLQAMLRQEQNRQLALQARDAYQGPVAQSLDASIATITAALSQIEQAINNQLDQHLDLKQQTKWLRQVPGIGKKNVLFILVLLHRWGTLTQLTGSSKGLTAYVGLDPVAFTSGTSVYKRSGISRKGNKTVRHFLYLGALGGVRGHNALCVFYQRLLARGKAKKLALVAAARKILVWAWAVFRNQTPFDHALSYAR

SEQ ID NO: 398318 - protein, 340 aa, unidentified
MVGVDSHKDTHQAAVLDARGALLGNRSFAASLRGYRELEEWLATMGVVDRVGIECTGSYAAGLTRYLRERDVDVLEVNSTHRATTARRGKDDAIDAEMAARKVLSGEAKALAKDTTGDIECIRLLKVSRESAMKAHTAAKLQIRDLLITAPAPLREYVEAVHGSGRRINRAGALRPDLERLDDPHQATKFALRQLSRRVKSLEEEMQEVDVHLAQLVAKCAPTLLTCRGIGTQHAAQLLITAGQNIERLQNDGAFARLCGVAPVPISSGKTNRMRLHRGGDRKANKTLHLIAVARIRIDPRTQVYMERRRAEGLSKRDLLRCLKRFIAREVFNALRQDLL

SEQ ID NO: 398319 - protein, 370 aa, unidentified
MKYVGVDLHKHVIVICVVVLVRGRPKVAARRRFECRDTRGIRAYFEGLRRFQVVVEATAAYEWFFYLVEDRADRLVLAHPKKLRVIAESTRKSDKIDAEVLGVFLARDMVPEAWRPTPRVRQHRVLVRHRCWLQRRISSLKSKVRSTLGHYNADVPDLFTQGGQAYLAGLKLSAADRFAVEAMLQQWELFERQRFAADRQLIEFAAAAPLAECEARAILDSIPQIGPVTIDVVLSELGDWRRFRSQSAVARFAGLDPGFRQSDRKRLELHISKEGSRLLRWALIQAAWRLVGHSRLWRYRFERLESNTGSKKKAIVGVARRLLCVMFAMLQSGQPYRLLEPASQPAVQKRRKPRRTSARARKAKGVLAGV

SEQ ID NO: 398320 - protein, 371 aa, unidentified
MADYREAFVGIDVAKLRNAIAVAETGRDGEVRYFGEAEAADANMRRIIQRITTKFDRVHFCYEAGPTGYGLHRLIRALGHECMVVAPSLIPRKPGDRVKTNRRDALALARLLRADELTAVWVPDEGHEAMRDLVRARAAAVETLRVHRQQVSAFMLKHSRIYPRKKGWTMRYLRWLQEQHFDHPAHQIALQEMVDAVRVSKERVERLEKVIEEFIPNWSLGPVVRALQTLRGVDLIVAVTFATEVGDVTRFESPRQLMGYLGLVPGERSTGETVRRGSITKAGNGRVRHMLVESAWTYRHPPKVGAKKLYRLEEAPPKVREIAWKAQNRLTARYRMLAARGKRTTVVCTAIARELAGFMWAVAREAQTIKS

SEQ ID NO: 398321 - protein, 374 aa, unidentified
MTYIGVDLHKANMAVVCCDAKGELICKERIPCKCIGKIEEFFAQPHLHPCNVVIESVGFYHWLFDLLEGKVENLVLANPVETKKYSWNEPKTDFRDARKLALLLAGGEFERNRSLSCFVPDKTLRTFRELTRYRHNLVCRHTSLVNSAHRILLKNNLAGPKILNGQSLELFLSRFGDKFSLYHKDFLMQISENLFYNERQLKEAEEKIQPFLHMDRFKQLYEILTSIPGIGDTVSATLISEIGDFSRFDHPDKLASYAGLCPRVFASDATVRYGRITKKGSGFLRRALINAAWVSIREDMKPRRIFNRVCKRAGRKKAVVAIARKLLVWIWYLVAEGEKWEAVSTRPDSLTNNKSGVTLIGLLKRTPYRVNSVA

SEQ ID NO: 398322 - protein, 359 aa, unidentified
MFIERTSVGLDVHARSVAAAAIDGVTGELVQARLTPGYDHIRSWIGQLPGPVAVTYEAGPTGFGLYRALTSAGVRCEVAAPSKLQRPAGDRVKTDAKDAVHLARLLRLDEITPVVIPSVEQEAARDLVRAREDCRGDLMRARHRLSKLLLRQGIVYSGGAAWTCTHEAWLRRQHFDPPTTQLAFESDHDTVLAITARRDRLDAAITALAADSEFTPVVQRLGCLRGIGTLTGFALAVEIGDWHRFTGNSIGAFVGLVPSEQSSGASRALGPITKTGNTHVRRLLIEAAWHHRTTYRPGKTMRDRWELAPPAARARGDAGNRRLHARWVAFNLRRKRPVIANVAVARELAGWCWSLAAMD

SEQ ID NO: 398323 - protein, 324 aa, unidentified
MIDGILGIDVSKNTLDASMSSCNKVRAKSFANSPDGWRHLLDWLIGQKIRRVHACLESTGLYSLGIACKLNEAGHVVSIVNPAQIRDFARTKLGRNKTDAVDASHIREYCELFKPAPWSPPSHAHRQLGELQTIRAGIVAGLTEWKNRKNSGMIDVVAQSLADATISHFTRQLGAVEKAIAQAIDNDTDLRRKRDLLLSISGVGETLASVVLAELPGPDVLRSSAEAVAYTGLNPRRHQSGTSIDRLTRISKIGNAVLRAALYMPAMSAMRYNPAIVALVTRLKARGRLNPKQIVVAAMRKLLVLCFGVLKTGKPFDPALAMGC

SEQ ID NO: 398324 - protein, 312 aa, unidentified
MERIFVGIDIAKDQVDVHVHPTDERFQLSRDDAGLAGLVARLQPLGPRLVVLEATGGYEIPVAAVLASAGVPVAVVNPRQIRDYARATGQLAKTDALDARLMALFAEAVQPEVRPLPTPEAQALGDLVTRRRQLVDMLGAERNRHHQARDLRLQRRIATHIRWLTKALAEIEADLATRIRSSPIWRERDNLLHSVPGVGDITAYTLIADLPELGHLDRRKIAALVGVAPFNRESGHWRGRRMIAGGRPAVRSVLYMATLTAVRFNPAIAHFYQRLTAAGRPKKVALTAAMRKLLTILNAMLRDQRPWQPQSA

SEQ ID NO: 398325 - protein, 347 aa, unidentified
MRFYTNQHKFYCGIDLHTRSMYVCILDSAGEVLVHRNLPATPAHFLSVLRPYRDDVVVAVECIFTWYWLADVCAAERIPFVLGHALYMKAIHGGKAKNDKIDAHKIAVLLRGGMIPMAYVYPAAMRATRDLLRRRTHLVRKRGELLAHIQNTNSQYNLPAFEKKIAYKGNREGLAERFVDPSVRLSVATDLTLIGHYDQLLRELELHILRHAKAHDVQAYMRLRTVPGIGEILALIILYEAHDIGRFPTVGDFVSYCRLVKCARESAGKRYGFSGKKIGNAHLKWAFSEAAVLFLRQHAEGQHFFRRLERKYGKPKALTVLAHKIARAVYFMLARQEAFDMHRFAQT

SEQ ID NO: 398326 - protein, 465 aa, unidentified
MKTDKRLWRNRNTRKELARRLQSENPGLEVVHPRAPGIDVGNSAHYVAVRPDCDPEPVRRFECFTADLHRLAKWLQSCGVKTVAMQSTGVYWIPLYDILEEHGFEVYLVNARHTKNLPGRKSDVQESQWLLKLHTYGLLNNSFQPASKIRVLRTYWRQRAQHVSGAATCIQRMQKALTQMNIQLANVISDLSGVTGQMIVRAIVGGERDPQKLAELSHPRIQASRGQIAESLEGNWRQELIFVVQQEIEMYDTYQRRISECDQQLQKHLAAFADTVPPPAKQELPPKKKGKQNKNNPHFHLADELQRIAGVDLTRIDGVDVMVAQTLVSEVGLDMSRWKTEAHFASWLGLCPDNRISGDKVLARGTRHVVNRAATALRMGASTLLRSQTYLGAQYRRLRSKLGAPKAITAMAHRLARLVYRMLKYGQQYVDKGAEYYEQRNRQQQIEFVRKKAAQLGLQVTLAHA

SEQ ID NO: 398327 - protein, 340 aa, unidentified
MSLYGGIDLHANNSVIVLLNEQDEVLYRKRLPNELSTILDQLAPYYTTLQGLAVESTYNWYWLVDGLMEAGYRVHLANPAAMQQYDGLKYTDDHSDARWLAHLLRLGVLPEGYIYPKAERAVRDLLRKRTHLVRQHTANVLSVQNILVRNTGARLSVKRLRELTKREIERLLPEADQILAVTSSLAVLDCLSQQIKTLEHTVQKRLQHTPAYEQLLTVQGIGAILAQTITLETGAISRFPTVGNYASYCRCVESTKISNGKRKGQGNVKNGHPYLSWASMEAAQYAMRFQPAAQRFYQRQLAKSNKNMILARKAVAHKLARACYDIMRDLVPFDATKAFG

SEQ ID NO: 398328 - protein, 344 aa, unidentified
MEYFAGIDVSLEQSSVCVVDAAGKIVREARVASEPEALVRFFRELGVRVTRIGLEAGPLSQWLHAGLAAAGFEVVLLETRHVKAALSAMVVKTDRKDARGIAQLLRMGWFRPVHAKSPAAQEIRALLVARKLLQAKLLDVELSIRGILRGFGLKMGEVSKARFVARVRELVAGQAMLDRIIEAMLRAREGLRTEYCRLHREMLSIVKRDAVCRQLMTVPGVGALVAITFKSAVDDPGRFAKSRAVGAHFGLTPRKYQSGETDVTGGISRVGDATVRAVLYEAAHIMLSRATRFSGLKRWALDLAKRRGPKRAKVALARKLATVLHRMWLDGADFRWGKEVSAAA

SEQ ID NO: 398329 - protein, 312 aa, unidentified
MDREQAYGGPQIVGMDLHARRSVLLRMTPEGRHLGRARIDNSAAALKAQIASAGPHPKVVLEAGYGWYWAVDTLREAGAEVHLAHPLGVKMFTYRRVKTDDRDAADLADPLRMGRLPEAWIAPPRTREVRELVRYRHKLLTMRTSAKVQIHAVLAKAGLRVPVSDLFGRAGGDWLAQISLHGSYRTRVASLLRLIAFLEKKEITDIEKLTAQALADDAGYRAVQTIPGIGPVFAAVMVAEIGDVTRFGGPAPLCSWAGLTPRHRASDTKVRRGSITQQGSPLLRWACVEAVQRCTSDSSAAASSTTTAASPP

SEQ ID NO: 398330 - protein, 407 aa, unidentified
MGITCGIDWSESHHDVALVDEHGTVVARTRIDTGATGFHILLALIAEHGGSVDDTPIALETDKNLLVVALAKAGFTVYPINPRAVARYRERYGQAGGKSDPGDAAVLAHILRTDRHLHRPLPAVSEEGRAVKALARQHQEAIWALHQTVSRLRSVLLEFYPQALQAFPNLKHKAALTVLAAAPTPAAGQRLTRGRVVALLRRSGRGNHPALVEQILTDLHTPALGQPPRVEEAYGHTVRGLVAIVIAMGQAVDDLETELAREFDQHPQAAILRSVPGLGPVLAARVLGEIGDDPARFDNPQGLRAYAGTAPVTIASGRLRYVKARKVRNKRFGDACHWWAYTMLTKSAGARAHYDRRRAAGDHHNAALRNLANKLLGRLWWCLVNNQPWDEHGAWPDHGHTENPTAA

SEQ ID NO: 398331 - protein, 401 aa, unidentified
MSTMRDNVQRVKRFRELKATLRSNRSRLLVGIDVAQAEHVVHLRHAHTRVVVPTCTIPNTTRGFAQLWGRIEQAQRATGCREVVCGLEPTGTYHEAVAQFLEAHGADVVLISSSVAYWNRRTQDGTWDKNDRKDAANCADLLEQGKVLFYSQPDGPLAELRRLVKVLRRARGELAACKARWRTTLRPTLGPMAEPLPNRLRAELPAVLQAWEPAAPGRPAVATGRLPLGLATACADLGAQVVAVQARITAIEQACTPVAERLPAYALLRTIPGVGPTVGALLLAEIGDVAWFTQFSQLRKLAGLDIIRVQTGNFAGQWRISKSGRSLLRWALYHAAMGLARTPTGRARLAALKAKRQGDRYAGFKAIVELAAKVLRIVWGVWRSGTPYDPTRTGGLQRQAR

SEQ ID NO: 398332 - protein, 369 aa, unidentified
MGEIITFVGLDVHKETITVALAENGRRGDVREYGRVANTPEAVKGLLSKVKRPGREVRFCYEAGPCGYGIQRQLTAAGEECVVIAPSLMPRKPGERIKTDRRDAISLAKLHRAGELTPVWVPDPAHEAMRDLTRARLAAVRALRQARQQLSGFLLRHGRHYGRPAWTVMHRRWLSGLRFEQPVHHIVLEDLIATVEAATERRDRLTRQIEAVLPEWSLAPLAQALQALRGVALVNAATLVAELGDITRFASPPQLMAYLGLVPSEQSSGRRRRQGGITKAGNGAARRMLIEAAWSYRFPARVSRELLLRQEGLPKPVRAIAWKAQLRLCRRYRRLAMSGKPPNVVTTAIARELVGFAWAIARQTDIRAS

SEQ ID NO: 398333 - protein, 341 aa, unidentified
MQKFIRIGVDLAKNYFQVHALISEGGPAVTRKLTRSKMREFFSEIEPCRIGMEACGSAHYWARELRAMGHDAVLMPPAYTKPYVKRGKNDAVDAEAICEALSRPGMRFVPVKSAEQQSMLMLHTTRDLLVKQRTMTVNALRSQLAEFGIVAAKGIGRVDELLELADKDMTLPNATRATVKILAKTLEEFDGSLDDLEKEIANVHSRSEMSQLLVEIPGVGKLTATVVVASMPDPGVFKSGRDFAAWLGLTPRQNSSGGKPKLGAITKQGNRYIRKLLVLAGTSLLNVVSKRKGALRDWIVGLLAKKPARLVTVALANKLARLIWAMLMPDDTAPTEKFSKA

SEQ ID NO: 398334 - protein, 322 aa, unidentified
MTSSKLATRVIGIDVSKDKLDISDSEGKIKKEVKNSTASIVKYIVKKITEPGEAFVVCEATGGYERTLVKAMQTSGVAVCITNPFQVQQFARGIGVLEKADPIDAGKLRQFGELVDLQPTAPKSAEHERHEALVRRREQLLTLISMEQNRRAQSYDPTVTAMIDKILKVMKTQQKSLETEIEAMLKKEAETNPAVAVVQSVPGIGPVTTSTLICDLPELGKLNRSEIAKLAGVAPIVNQSGKRDKQRSIFGGRSHVRRVLYMAALVATRHNPVIKAFYTGLIARGKEKKVALVACMRKLLTILNCMVCNNETWRKEKVVTGT

SEQ ID NO: 398335 - protein, 340 aa, unidentified
MKKQVRFYLGMDVSKLWVDITLMSVVNHQKQPTISERFDNNEAGMKAFGGWLKKHKVSFDKNSLLVIENTGVYHRLVWEYCSKIGLPLHIGNATHIKYSFGITRGKNDKIDSQRLCDYAFKNADELKAAPVLDPVFIKLKDLMTSRSRLLSQYNSIRVYLKELKLSNNKETQRIIEEAHKAALEGIKQSLKTVEQQIKQIIKGDEAIKKNYKLLISVPGIGHLTAVYIICCTNNFICKITGKQLASYAGVAPFGNTSGTSIKGKDKVHKMSNKDLKKLLHMGAVSAITHYPEFKDYYERKLKEGKHELSVINAIKSKIALRAVAVINNQEEYVNKYKKTA

SEQ ID NO: 398336 - protein, 429 aa, unidentified
MGRVIGLDLSKHTAEVAVLQPGTEAPQRWRFPAEPAAIRAFARQLGPEDRVALESCTNAFAFHRLLSQYSGSVVVSNPLKTRIIAEAKVKTDKIDAEVLARLLAADFLPAVWVPDSRTDHLRHLVFHRHGLVAQRTQVKNRIHAILHRNLIAPPMTDLLGKTGRAFLGQVDLPAPERELLDADLRSLDFLEGEITTAEKSFAKAVLDDSEVRRLMTVPGLALASAVGLKAAIGEVRRFKRPANLVSYFGLNPSVYQSGLKAYTGHISRRGRSHARSICVEASHQLVRAPGPFHAFFLRLQRRKGYNVALTAVARKLVVLIWHMLTRGEDYRYAPPFRTREKLSRLRYLATGQRSARGTKPDPGLDKQAATKGEAEYLQFMKERFGVKGPAGVDHPNRKPDPRPVARSRSSGKSERRSAKEKPRSLPQRS

SEQ ID NO: 398337 - protein, 376 aa, unidentified
MLYIHNIQPGDKTKRDFHFIFYFTVKNKFVKKVIKQVLGIDVAQKELVVCLARMHDDWVPDLYATRSFKNTADGFKAMIEFVQKLVEPTIAVRYVMEATGVYHESLAYYLRDQDLEVSIVVPNKISNYARTLEVKTVTDKTASQAIAQFGLERNLDKWEKPIPIYKKMKQLTRERDQIMTERTMTKNQLHAENAEAEPHKSSIERIKKRIDLLNKQEQEINVELAALIGKDAVVKDFMKLLCSITGIGVLTAATVLAETNGFELIRNKSQLTSYAGLDIKEKQSGTSVKGKPRISKKGNRFLRKAMHMPALTAIRHDQRFKAIFVRLVSKHGIKMKAVVAVQRKLLEMMYTIYKTKKAYDKEYLKKEETAKIKEAA

SEQ ID NO: 398338 - protein, 370 aa, unidentified
MDEGIKFFVGLDVHKDTIAVAVAEAGRASAQLVGSIAHDVPRLLKRLARYGEPGRVHVVYEAGPTGYGLQRALAQRGYACQVIAPSLIPKRAGDRVKTDRRDSVRLAELARAGELRAVWIPDPADEAIRDLARAREDAVNARTQMRQQLKAFLLRHDVRYPHKTSWSKTFYRWLATLSFGTAGAQTAFTEYWQAVTAADERVARLTVALVGSIAGWRFESVVLALQSLRGIDQISAIGLVAEIGDISRFAHPRQLMAYLGLVPSEHSSGERVARGSITKTGNTHARRLLTEAAWNYRFQPRIGYRAQRRAEGLPQAIRDVAWKAQLRLTGRFTRLRGRGVQINKVCVAVARELAGFVWAIASAQARLPQS

SEQ ID NO: 398339 - protein, 370 aa, unidentified
MAEKVLYVGLDVHKASISATVAEDGRGGEIRFIGAIANTPADVVKLARRLAKDGYRLGFCYEAGGCGYHLYRQLIGLGHGCIVVAPTLIPRKPGDRIKTDRRDSQKLAVQHRSGDLTAVWVPDEVHEAMRDLVRARIDAMMQLMRARQQLLAFLLRHRRTYETGKNWTLRHRRWLAGQAFEQEAHRIVFQDYVEAVWAAQNRRDQLEERITAMLPNWSMAALVEALRALRGLDMISAVIFVAAIGDLGRFATPQQLMAYLGLVPSEQSSGERVRRGGITKTGNREARRMLIEAAWSYRYPARVSMGKTDVVVRQPKQIRDIAWKAQVRLCGRYRKLAAGGKKPTVVVAAIARELSGFVWAIGQEIKPATP

SEQ ID NO: 398340 - protein, 408 aa, unidentified
MEVLYPRCAGLDVHKDMVMARVRCVSEPRVDETRSFATMTGALIELQEWLSSHAVTHVAMEATGVYWKPVWHLLEEHFELVLANAQHIKNVPGRKTDVNDAAWIADLLAHGLIRASFVPPKPIQELRDLTRTRKQLVREVSQHCLRIQKTLEDANIKLGSVLSDVLGHSGRAILNALIAGESDPERLADLARGNARKKRAELVQALHGRISAHHRRLLKLHLGLIDALQQALATVDADVGKTLAPIQECARLLATMPGVSELTAHVLVAEIGVDMARFPTAGHLLSWATMCPRNDESAGKRRSTRTRKGAPWLKTALVTAAWAAVRVKASYLQAQFLRLKARRGAKKAILAVAASMLNAAWHMLKDRVAYKDLGADHFARRNRSKVIRRLLRRLDDLGCKVQLTTEAA

SEQ ID NO: 398341 - protein, 333 aa, unidentified
MNNYAVYVGVDVSKNSFTTTLLLDELRKTFNVSSKPEQFENRLRPFLEELGVDKSNVLIIMESTSNYHLPLAEYLAERQYNVGLANPFSMKRFMDAKMSRAKTDKVDSYFIAEYGKQIFKGPLFKPKTEAQKEIEAMVKTLERFNKQLTMLKNQREALSLIPMKGLKKILAHYDRIIELVKKEIEVLEKGIRGLCKKHFPEEYRLLKSIPGIGDRAIAVVVSILRNFEGFKRAKDVGSFVGLCPSLVESGSSIRGKGSIKKRGNPYVRQVFYMCALSAVRSNPYCKDLYERLLERGKSKTEALVAVAHKLLRQCYGVLKSRTPFRVKEKEVTP

SEQ ID NO: 398342 - protein, 322 aa, unidentified
MQGKVSPEPNATRVYVGIDVCKDRLDVYIHPVGLTLAFANSPEGIKRLKRSLKAHEVALVAMEATGKFHRPAHRSLHADGFAVAVVNPLRSRLFAEAAGALAKTTGSTAGCWRSLAKASSPTRPRRPARSWKACRKLARCRDAAVAARTALLNQLGAATARPAAVEIKRQLRAVETAIENLGAEIERLIGADPRLARRLAILTSIPGVGTVTAIALITGLAELGALSAKQVAMIVGLAPIAWDSGQMSGARHIKGGRAHVRRALYMAAVAAARFNPALKAFYDRLLASGKKPKVALVAVMRNLVILANTLVCENRTWKPHQA

SEQ ID NO: 398343 - protein, 410 aa, unidentified
MYGKAGPMIYAGIDIAKNDHVVGATDEHGRDASKPMRFANSAGGFDRCVAYLEGLAESKSDLLVGMEATGHYWLPLFCRLQDAGYAVVVINPMRTDAMRRFKGSSRVKTDIVDCVLVAETLRCGGFQPSRLGDEAVIELRQLTRLHQALKESVADLKRQVIVALDQVFPEYDSVFSDTFGESSKAFLKRCPTPEECLAVRADSLAKTLERASHGKLGRPKADEIKGIAKASCGIGLATSAFSFQIKLLIDQIDFIEGQASEVEARIRAGIEKVEPLILTIPGIGYTLGAQIVSEIGDVRRFRNASSIVKYAGINPSISQSGKFSSEENHITKQGSPYLRRALYLAAMAQLKLKSPFYDYYAKKRADGKSHREALVAVARKLVHVIYAVLSKQEPYDPNAAKSPELASRSE

SEQ ID NO: 398344 - protein, 417 aa, unidentified
MPFKIFRKNCCGLDVHKTWIYACIGITDTNGLTEYRQARFSSFSKGLRELAEWLAKYSCKEVCMESSGKYWIPVFNILEKTCFVTLAHPKYTKPQKGNKTDRKDAKWICDLFMCDMIKPSFIPPQDIRQLRDLLRFRMKLTYQITGMKNRALNCLTVSNLKLDDVFSDVFGKSSRSIIKYILDHPGETFDVTPFVNKHCKHSIEEIQAAVDGAVSREQAVKLKICLDFIDEQEKRINELDAEIFRLAQPYSFVLELIRTVPGFNSNPLTAVRILSEIGADMSVFPTAKHLVSWAGCCPRNDQSAQKIKSTRISKAGSFLKPLLVQIANALLKSKDHPEFGERYRRIKARRGHKKAIIAVCRMILTAIWNILSKLEPYSDKGYLADKITEHSHIITKSQGLELLRKRGYIFSDNLIKP

SEQ ID NO: 398345 - protein, 339 aa, unidentified
MKYTPVGVDIAKHVIQIHFINEHTGEVVDKQLRRQDFLTFFGNREPCLIGMEACGGSQHWARELTKLGHKVRLLQARFVKAFVMGNKNDVMDARAIWMAVQQPGKEIAVKTEEQQSVLVLHRTRMQLVKFRTAQINALHGTLLEFGETIHKGRAAMEREFPEALERMKERLPPYLIMVLENQYNRLNELDSLIEDIEKQLTSVAKQNETCKRLLDIPGVGPLIATAAVATMGEASAFKSGREFAAYVGLVPKQTGSGGKVRLLGISKRGDTYLRTLFIHGARAVALVAKEPGPWITELKKRRPASVAIVAMANKLARTVWAITAHDRKYDRNHVSIRPY

SEQ ID NO: 398346 - protein, 441 aa, unidentified
MGRVIVGVDPHKKSVTIEAVDEHGQVLAVGRFATDSSGYRLMLKYAREQWPHRRWAVEGAQGVGRPLAQRLLAQGETVVDVPAKLAARVRVFDTGNARKTDATDAHAVAMVALRTPRLRELAYDEELIALRLLTDRRDELSRRRVQTVNRLQRLLAELIPGGAKRDLSALQAKRLLASVKPRSLMGKTIRRMAAEEIADLVAVDAKLKAIKKELRAEVTARGSHLMDLFGVGPAGAARILSDVGDVARFPDRNHFASWTGTAPLDASSGEQIRHRLSRAGNRRMNHVIHIAAIVQIRHDTEGRAYYRRKLAESKTPMEALRCLKRRISDAVYRQLMADAQAAASFQAADADTGPGGHSGASSQSSAADLSTPVIGSSDQPLPGPAAPTLPAATAPAYPHAGSAPRPPRRRAGAVKVQRPTGRTTLTATSADAHSKSPRTRS

SEQ ID NO: 398347 - protein, 395 aa, unidentified
MFIVGIDVAKRSHEVCMITSDGQTVQRPFSIRNNCTGYNLMLEKIRKHTNIKSQIVFAMESTAHYWLALFTRLRKDGYHVILLNPIQTSAMRDMFIRKIKTDAKDSFIIAELIRFGRYAESNVAQDRLLALKELCRNRFYLVDMAGDLKRKLIALIDRVFPEYEAQFDTIFCKSSVAVLKKYPTPQKLSNAHLDKLTELLWNSSNGHFGEWKARELKELARNSFGVEDCDGAYSTLILLMLDQIQSLSGKADALEKEISRLFQSFDTTVTTIPGVGPIIGAVILSEVGDISRFSSADKLAAYIGVDPSVNQSGEFQAAHAHMSKRGSPYLRRCIWMASQVAVQRDPMFHAYYEKKAAEGLKYMTIIGHVTRKMTAVVFAILRDHKVYQPILSTAA

SEQ ID NO: 398348 - protein, 341 aa, unidentified
MKKEKQLQSYVGIDVSKLTIDVCVLCVNATQDHQQFENSLEGFVKMNAWLRNKDFFSIKKSLFCMEHTGLYTRLLVSFLLNMHAKIWMESALHLKRSIGMTRGKSDKVDSYRIARYAMTNADRASLVSVASSTLQRLKDLMSHRERLRKATQAIKVSIQELVRIDKSTGNELIKLNSPALKGLLKSKVMVEKRMLEIISQDEDLKKLYDLVTSVKCVGNVLATELLVYTNAFTRMENTGQLACYCGVAPFEHTSGTSIRGRMGTSNFANMNLKTTLHMAAVCATRYVPDIKQYYERKVAEGKHKMTVINAIRNKLIKRIMAVVKRGTPYSENYSKISLEVS

SEQ ID NO: 398349 - protein, 404 aa, unidentified
MNAVGIDVSKGKSMIAIMRPLGEVVALPFEVGHTAAELDELARFILKIDGETRVIMEYTGSYYEPIAYALHEAGLYVSTVHAQLIHDFGNNTIRRVKTDKADAMKIAAYGLANWNVLPRYTPQEDIRRQLKAYSRQYAKYTKLKIMLKNNLISLTDSTFPGVNDLFTSPPRKEDGHEKWLDFALKFWHAECVCSLSEKAFTDRYQRWCSKAGYRFSKNKATDIYAASCGHTRLLPKDDTTELLIQQSVIQLNSICSSLAVIAGKMSSLAAMLPEYPIVMGFFGVGDNLGPRIMAEIGDVRRFARKESLVCFAGLEAPPYQSGKFESTDRTISKKGSPHLRKALFQVMDCLVKKAPQDDPIFQFIDRKRAEGKHYYSYMTAGSAKFLRIYYARVKEHLNALEHTG

SEQ ID NO: 398350 - protein, 335 aa, unidentified
MKKYVCFAGIDVSKSKLDVTFLTEPSEKKQQHFVVSNDNKGIQQILLLLKKENIDLKCTLFSFEDTGVYSLPLCFFLAEKQLSYWMIPAIEIKRSKGISRGKTDKSDSKDIAFYSCTHLHKLRAGSIAEKEIMQLKLLFTEREKAMKALHLLESTMEASGFIPKDILQSVKKINAAGIRSLEKMILQLDYKIKEIISSCEAIKKQEKLICSIPGVGPQTALYLIIATKGFKAFENCRKLACYAGVAPFEYSSGSSIKGRTKVNHLADKKMKSLLYMCAMNAKRWDKELSEYYNRKVEEGKPKMLVLNNISCKLLGRVFAVINRETPFVNTYKFAA

SEQ ID NO: 398351 - protein, 391 aa, unidentified
MIYIGIDVAKDKHDCFITNSDSEVLFKAFTIFNNLDGFNDLYQKIESVMDDVTKVKVGLEATGHYSYNLLGYLIDKGLPTYVINPLHTNLYRKSLSLRQTKTDKVDARTIASILMSDVNLKSYSDISYHNEELKSLTRYRFDKVKERAKLKTSVSRLVCILFPELEKLVPTLHMASVYALLSEFPSAKHVATAHLTRLTNLLSESSKGRYGKDTAITFRDSARASIGSNMPAKSLELKHTIKLIQELDSEIDEIENEIKIIMDEINSPILSIPGINYRMGAMIIAEIGDFNRFDSPDKILAYAGFSPSTYQSGQLDGAYAHMEKRGSRYLRYALYNATKYVCHWDPTFAAYLAKKRAEGKHYNVAISHAVKKLVRVIYHLEKTKQQYIKAA

SEQ ID NO: 398352 - protein, 437 aa, unidentified
MPNVAYLGLDISQADVSVCFLLADGREPVPRWTVANTQPGAEGLSATVAQLCQTHQVGELRIGLEATGLLWWHLANVLHTAPAVQPFQPHVYVLNPHLVETFRRNYGALPKTDRADAFLIAERIRFGRQLPPPFQVDVRYAPLQRLTRFRFHLAHNLAREKSYFLSFLFLTFSSFGQVQPFGDPFGATSSAVLSELTTEELAQQSLEDLAAYLQTQGHGHFVDPAALAQTLQRAARDAYRLDKVLAEPLRIVLSTTMANIRALTAQLKTLDQTIAAELQAIPQTLDSVPGLGPVWTAGLIAELGDVNRFADDDAIAQFAGLTWPAHESGQFQAEDTPLSQRGNRYLRYYLVEAANSVRRHCPEYANYYAAKYAETPRHPHQRALVLTARKLVRLLDALLRSQALYQPPEQRPTQPGTVPHAQRPGRQRHQQQADPVT

SEQ ID NO: 398353 - protein, 472 aa, unidentified
MRQIEARSIEAMKRVNERAAGIDIGATEHYVCVPEDAVPDCGSAVRAFAAWTRDLDQLVEWLQRCKVTTVAMESTGVYWLPLAQKLEAAGIDFVLVNARHLKCVPGRKTDVHDCQWLQQLHSYGLLHGSFRPSAQIGVLRALMRHRENLTHSAAQHLQHMQKALDLMNVHLHRAVSDLNGETGLRIIDAILAGQRDPKELVKLRDSQCRKTTPEELEAALEGDWRREHLFALKQATESYRHFLKQQEACDQEVKKVLDVLVASAEESKGDAPPLPSPAFTPTPSSKKRKPKKFYARKNGTGLKTDLTKELQRICGVDLTQITGLHVLGVLIILSEIGLDMSRWRNHRAFSAWLGLCPGNKISGGKVLSSHTVGVVNRVATLLRTVAPSVGASDTWLGSFHRRMRARLGPAAANTATAHKLATLIYHLLKYRENYIDYDRLAYEARVHTNRMKRLKKQAQELGLDLVAKQQAA

SEQ ID NO: 398354 - protein, 342 aa, unidentified
MEKVSIIGLDLAKRSFQAHGALAEGGVVFRKKLSREKVLAFFAEQPRCIVAMEACGSAHHWGRAIRDLGHEVRLIPPRYVKPFVKRQKNDAADAEAIAEAASRSTMRFVAVKTEEQQGRAMLFRTRDLLVRQRTQLINALRGHLSEHGVVAAQGPANVKVLAEAVEDQGTSLPLLVVELARVFLDQIEGLSKRISELEKVTVHEAACGETTRRLQTMPGVGPITALAIETFAPPMDVFKRGRDFAAWLGLVPRQHSTGGKQVLGKISKMGQRDIRRLLIIGAMAVVRSALRKGAPEGSWLQRMLARKPKMLVAIALANKMARSIWAMLAKKQNFRVPVVAAS

SEQ ID NO: 398355 - protein, 422 aa, unidentified
MLQETQDREEIIERVAALDIGKAEVVCCVRVPDESKAGRRLQEVEAYSTMTGSLLRMSDRLRCLGVTRVVMEATSDYWKPVFYVLEAAGFETWLVNAKDVKHLPGRPKTDKLDAVWLCKVAERQMIRPSFVPPPEIRRLRDVTRYRIDLVGVRGAEKNRVEKLLEDAQIKLSVVASDIFGVSGRAMMAALIAGERHPKTLAQLARSRMRTKIGALEEAFTGHFTDHHAFLLAKMLSRIDGIDADLAELDTRIEAMIAPNEAAAARLDEIPGIGPVAAAIIIAEIGIDMNRFPTANHLASWAKFAPGVKESAGKKKGRGTTGHGNAYLARILGEAAVGAARTDTFLGERYRRIARRRGKKKAIVAVGRSILIIIWHLLSDPETRYTDLGPSFYDTRINPERRKRTHVHQLEALGYKVTLEPAA

SEQ ID NO: 398356 - protein, 356 aa, unidentified
MSSKLNTAIAVAGIDIGKNSFHVIGLDKRGAIVLRQKWSRGQVEARLANTPPCLIGMEACVGAHHLSRKLQALGHDARLMPAKYVRAYSKGQKNDFRDAEAIAEAVQRPTMRFVATKTGDQLDLQALHRVRARLVGQRTGIINQIRAFLLERGVAVRQGLRFLRIELPGILAKRTDVLSPRMLHLIEGLADDWHRLDERIEVLSSEIGALACGDPACDRLMTVPGIGPIISSATVAAIGNGAAFSKGRDFGAWLGLVPKQISTGDRTILGKISRRGNRYLRSLFVQAAWVVLVRVGPKHWDRYGLKSWIEAAKKRLHHNVLAIALANKLARIAWAVLNKERKFECIRTNKMSPRAA

SEQ ID NO: 398357 - protein, 431 aa, unidentified
MLKINPLSTLYVGIDVSSKSNYVCALDFYKNKYINSSFANNQPGAEELALKILECLKEHPDITTIVAALESTSVYSIHIANYLSSCEELMRFKPYVFVLNPKCTANYKKSYIGLGKSDPIDAFVIADYARAGNIESEPWRGSQFLALKRLTRHRLHLVECMTREKTYLVSNLYLKFSELQMLEGDDQPFCDIYGATSSSVLMEYLSPEEILASSEEDLIAFLAKKSRNRIKDISKTADLLKKAARDSYRLDKALYEPLNVSIASSFNCIETFKREIKVIDNAIEKEIKGLNPNAFIILQSIDGIGPVFAGGIIAEIGDITAFHSSDALAKYAGLTWKSNQSGDFDGEDTPMIKAGNRYLRYYLGEAANSMRKHNVEYGTYYRKKYNEVPKHQHKRALALTSRKFVRLVYGLLARNQLYSGVSLDTSIKDSN

SEQ ID NO: 398358 - protein, 341 aa, unidentified
MGQASTIGLDIAKRVFQAHGADERGRVVFRKRITRTALLRFFAAQPPCTVAMEACAGAHYWARELGKLGHTVRLIPPAYVKPYVKRQKNDMADAEAICEAAQRPSMRFVPVKSEAQQANGVVFRARDLLVRQRTQCINALRGHLSEYGYVFPQGITQADTLISCVEDPDTSLPENARAVLTVLVGTYTALEAQVRALDAEIAKRAKADPVARRLMTVPGIGPIAAAAITALVPAPEGFRTGRDFAAWLGLTPLQKSSGGKQKLGAVSKRGERTIRRLLILGASAVVRWASQRGGPEGSWLARMLARKPKMLVTVALANKTARIAWALLVKGGVYRAPVAAA

SEQ ID NO: 398359 - protein, 356 aa, unidentified
MTNVKTNFTEQTIYVGLDVHKRSWNAALFLNDHYLRNVHQPPSPQALWKFLQTNYPGADYVCAYEGGKFGYWIQRQLSGNGIRCIVVNPADIPSTHKDEVSKTDTRDARAIAMALQCGQLRGIYIPTQQQEADRSLVRHRKKIWRDLVRCKNRIKGFLDYTGVELPDKFSNSNWSRNFLQWLSAIKFDYVSNRVTLDYMIREAELLRKELLHISNDIRKLMRSSAYKKMYYLLRTITGIGPLTAALLITEIGDMKRFSSFYQLNSFIGLLPSEHSSGEKELKGRLTIRRHRQLRSDLVECAWTAKRTDPALSLFYSDQLKRGKESKLIIVKIARKLLSRIRCVWLTEKPYERGIMK

SEQ ID NO: 398360 - protein, 344 aa, unidentified
MEHFAGLDVSVKETSVCIVDDTGKIVREVKVASEPDALLAVLTNPAYRFKRIGLEAGPLSQWLFSALAEAGLPAICVETRHMRAALKAQINKTDRNDARGIAQMMRAGLYRPVHVKTLRSQKLRMLLTHRKLLQSKAIAIENDLRGTLRNFGLKVGMVGKVKFEARIKELVENLPDLAELVEPLLIVRRVLREQIAILHRRLLAIVRDDEVCRRLMTVPGVGPVVALTYRATVDVPARFRKSKSVGAVFGLTCAKYQSGEVDWDGRISRCGDEMMRTMLYEAAQAMMRSKKWSWLKAWAMQIARRRGMKKAIVALARRLAVIMHRIWVDGTEFRWTREQAAAAV

SEQ ID NO: 398361 - protein, 408 aa, unidentified
MEMETVVERGCGLDVHQQTVVACINGNGIKKEIRTYGTMTNDLLKLKEWLKEKGVTQVAMESTGVYWKPIYNILEDSFKVILANARHIKNVPGRKTDVKDCEWLCKLLQSGLLSGSFIPPKDIRQLRDLTRYKRKLVQTISAEKNRIQKTLEDANIKLSSVVSDTFGVSASQIIEELLKGKLSIEEMSNLARGKLVKKRELLKEALVGNFQEHHKFMIEASISHIKSVEKIIENINSQIAEKMQKYNKEHRLLQTIPGIKEDGASSIIAEIGVDMDRFPTEGHLSSWAGMSPGNNESAGKKKNGHTTFGNKCLKATLTEAGWAASRTKNTFFNAKYHSLVGRRGKKRALVAVGHKILIACYHILRNKTEYKELGATYLDGRKKDRIVRSYLKRLQNLGYGVTLQPLAA

SEQ ID NO: 398362 - protein, 353 aa, unidentified
MIVIGVDPHKSTHTATALDPATNSDVGSVRIEASLAEYQRLIVWANAWPERTWAIENADGLGHHLALWLLARGEVVLDIPTTATARVRELSRGGRRKNDRIDAAAAASVAALQGDARQVYPETTADSLALLDERRVNLSHSRTRTVNQLHALLRELMAGGAPTSLTPVSATGALRGFRPRTGPDRIRVELAKDLIADVRRFDEQLKANAAKLAVLLDEHGTRLREIDGVGPVLAARLLGRTGPPSRFASAAAYANYTGTAPVQIASADSSKHRLSRYGDRQLNSAIYTIAMIQIRMPASAGRAYYDKKIAEGKSPRYATRALKRHLASHLWRIMLADENRAARTPSEVVAQAS

SEQ ID NO: 398363 - protein, 346 aa, unidentified
MTILEDTRVITGGVDTHADMHVAAALDPLGGLLGVREFPATAAGYADLLSWLSGFGTVALVGVEGTGSYGAGLARYLAAAGVRVVEVDRADRQDRHRQGKSDPLDAVSAARAALSGRAAGAPKGRDGAVEAIRALMVAKRSARAERTQAINQARALLVTGPDDLRARFAGLTAAALAEAIAALRPRPGDAAQYAVRVALRELGRRVEFLDGQLDRLDDLIVPLVTARAPGLLSLYGVGPDTAALLLVAAGDHPERLRSEAAWAHLCGVAPVPASSGKVRRHRLNRGGNREANHALWRIVITRMSAHPATRAYIERRSKEGLSKKEIIRCLKRYVAREVYHHLRAGG

SEQ ID NO: 398364 - protein, 352 aa, unidentified
MVVTVGIDVHKNTHCAVAVDEAGRHLGQPVTVRATDAGHRQLLRWATRTFAEDRVEFAVEDCRHVSGRLERALLDAAATVVRVPPKLMAQTRSSARTRGKSDPIDALAIARASLREPDLPRAEHTHTSRELKLLVDRREDLVEVRTKAQNRLRWHLHELDPEFDVPARGLDLRRHQDRVQARLEELPQSLVRRLALEILGDIRELTGRINALEKEITALVSVQAPQLLALPGCGPLTAAKLVGETANPVRFRSEACFAMHSGVAPIPASSGKTDRYRLARGGNRQLNAALHRIAVTQIRLDGLGRAYYQRRRAQGDTTMEALRVLKRRLARIVFHLLRPTDQTAAAALPQAA

SEQ ID NO: 398365 - protein, 435 aa, unidentified
MEEVTDEPLYRDRVCGIDIGKASMVATIRVPSDKDPARRAAETRSFGTTRRQVLALADWLRSWQVPAVVMGATGDYWKGPFYRLEAEGFECVLADARQVKNLPGRPKRDPADSRWLAACLERGAVRPCFVATPEFRIIRLHTRYRRDLTGERTREKQRAEKVLESAAIKLSSVLTDLHGVTGRDIMDRLIAGERSPKVLAQLARAAARRKISQLEEAVEGAEFFTAGHAALLAVMLARIDRLSADIDGLSQVIEQLLAPYEDQLAQAESMPGWGRHAAQDVLAETGPDMSRFPTGAHLASWAGRAPLDHQSGTRAGRSTAKKGNRYLGAVTGETAVAAGRTQTREGARHRRLARRRGAAKACVATGNTQLRVYHKLLSSPGMRYADLGPDYYERRRDVRRQIAHHVGKLGALGFEVTLCRIPDPGPDRTGQIKHA

SEQ ID NO: 398366 - protein, 345 aa, unidentified
MREIIRIGVDTSKYIFQLHGVDAAEQPVLRKRLGRKQVLEFFAKLPPTKIGMEACGAAHYWARELSQLGHEVKLMAPQLVKPYVARNKNDARDAEGLCEAMSRPSMRFVPVKSAEQQALLMLAGIRDGLIARRTQLSNTIRGYAAEFGLIAAKGLDKIEPLLVRIAQDESLPAMARELFAMQGRDYAQLQGELKAIEARLLAWHRANALSRRLAQIPSVGPIIATALIMKTPDPHAFGSGRHFAAWLGLTPKDHSTAGKTRLGKITRAGDETLRRLLVAGATAVIRQARLGRGNPSRWLLGLLGRKPPKLAAVALANKVARIAWKLMLTGDSYDPARINAAPAIA

SEQ ID NO: 398367 - protein, 352 aa, unidentified
MNAMTVAVDLAKDVFEVAVANRAGRIVERKRLTRRQFAPFIDALPAGTTVVMEACGTAHYWGRRCLAHQLSVRLLPPQYVRPYVRRNKTDRSDVEGMLEANRCGGIHPVAVKTVEQQTLQALHRMRAQWQATRTARLNAMRGVLREYGVPLAAGARTALKRIPLVLADPTLGLPAEVSAILAMLLEDVRSLEARVAAIDQQLARVAREHPIAQRLQQVPGVGLITATAFVGAVGHIHRFRRGREFASWLGLTPRESSTGTRRRLGRISKRGDVYLRCLLTHGSRAMLLGAQRAVRMTPDRATAFQHWAVALMTRRGHNKAAMAIANKLARVIWAVWHRDVDFDPQAPCRAVA

SEQ ID NO: 398368 - protein, 424 aa, unidentified
MRFFGLDVHLDFCEVAVAEGGKVSRVGRIASTPEAIREFAAGLNGSDQVVLEASCGAMMIARLLEESDVGQVVVCNAAETRAISHARVKSDRFDAAMLAKLLSAGMLKAVWVPDEATSSLRRRVARRAGLVRARTRVKNEVHAVLARCLLGRPPVSDLFGKKGRVWLTEQQLPEEEAETVASCLRHIDFLGGEITALDRRIAQQALAFPGFQRLLTIPGVDVGTAAAMIAAVGDITRFPTAGQLVAYLGLDPKVRQSGSEPARYGHISKRGDPQARSMLVEAAWISIRSPGPLKAFGERVRARRGAQIAAVAVARKLVVLCWHLLTKDQDYAFARPSLTRQKTRRLELLAGAPPLARRHGGPPVSPTSSQRAAERELQAQAELAYRRLIEDWRTTAPKGGAGATPGRASNKPSKGKAARQATSP

SEQ ID NO: 398369 - protein, 367 aa, unidentified
MKKGSTAAAMQSRNFSQQKLTFGMDLGDRNSWYCVLDEAGQIQQEQRVRTTAKALREVFGGMPRSRVALETGTHSPWISRLLTELGHEVIVAHARKVRLIGESRKKDDRRDAQTLARLARIDPELLCPVKHRSAQAQADLTVIRARAGLVRARTGLVNTARALAKSYGERLRGCNVRNMSPEKAEGLSPELQRALEPLLSAIEELSARIGQYNQRIEALAEASYPKVALLKQIKGVGTLIALTFLLTLEDPHRFRKSRDVGCYLGLQPGRRNSGQSEPQMHISKEGDPYLRTLLVQGAQHILGPFGVDCDLRRWGLKLAERGGRNGKKRAIVATARKLAVLLHHLWVSGEAYEPLHKSSRVTAVAAA

SEQ ID NO: 398370 - protein, 353 aa, unidentified
MSELAEEREVILGVDTHLDVHVAVLIDVVGRVVATTSVPTTAVGYEHLIEWACGFGRLTRAGIEGTGTYGAALARRVQELGVAVLEINRPDRSRRRLRGKNDPTDAENAARAVLAGEANAIPKAQSGVVEAMRAVSMARRSAVKAKTQAINQLRALLVTAPASIRATLWKVKPEQCVARCARLQSLGDTPLLKALTSTLRLLARRWLILAKELHELDAALEELTKRAGRRLLARFGVGPQTAATLLVTAGDNPDRLRSEAALAALCGASPLEASSGKTTRHRLNRGGDRAANNALWTISMVRMRSDPRTRAYVTRRTAEGLSTKEIQRCLKRYIVRELYPLILADLADSIRES

SEQ ID NO: 398371 - protein, 433 aa, unidentified
MKVKYEDRLKQKIIAITPDTLVVGVDIAKNYQWARFVDFRGIEHDRALKFKNRKGGFETILARIREICKKENFAKVVVGMEPTGHYWKAFANWLEKQDGITVVLVNPYATKQAKELDDNSQTKSDKKDALTIAKLVKDGRYFELYLPHDIYGELRGLSTTRIGLNKRKNALKNTITAILDEFFSEYEEVFKHPLTGKASRHILKTCPFPKFIMELGEEGVTTEIKKAVKKTVGRKKAGQLVEAAKGSVGVDYGEEAARLKLRLMLEEVELLERQTEELEEQMEAALEKTDYAEYLLSIKGIGVVTLAACLGELGDPTRFDSPRQMSRMAGYNLVEDSSGKNKSGTKISKRGRKNLRSVLYQMSLTMVATNDEMKQLYHYLKTREKSPLRKMQALVVVSKKILTIIHTLAKKKESYEPEKVFGHVRREQFKEVA

SEQ ID NO: 398372 - protein, 392 aa, unidentified
MFIVGIDIAKHNHEATLINQDGKIIGKSLRFANKFTGYNRLMDFIRSHAVDVSSVAFGMEATGHYWLALYAHLRQAGYTVHVINPIQSDALRNLYIRQTKNDSKDSFIIAEVIRFGRFSETNISSPNMHALRELCRHRFFIVDSVSDIKRKVIALLDQVFPEYESLFTDTFGKTSLQLLSEHSTPEEILALDTDKLCEIINQSSRGRFGLDKAKQIQQTAKTSFGIMIATESFSLLIKQYIEQIKFVEKQLLNIESEIERLLVGFDCQLATITGIGTTLAAVILSEIGDIKKFDSSAKLAAFAGIDPAVKQSGDFIGTRCKMSKRGSPYLRRAIWLASTVAAFRDPAIKLLYDKKRSEGKSHMTTIGHICRKMISIIFAVLRDNKTYSPASS

SEQ ID NO: 398373 - protein, 391 aa, unidentified
MIDVGIDVAKDKHDCSICNSDGVELYPPFIIANNLEGFENLMDHIQAVSDDLSKVKVGLEATGHYSYNILGYLISQGSPVSLINPLHTNLFRKSLSLRQTKTDKVDARTICMMLSSGMNLTSYSKTSYHMEELKSLTRYRFDKVRERAKLKQSLSRLVTILFPELEKLVPTLHIKSVYALLAEFPGAKHISTAHMTRLKHLLSDSSRGRYGKDTAETIRDAARRSIGSDMPAKSLELKHTISLIRILTEEIDEIESSIQKIMHTLDAPILGIPGINYRMGAMILAELGDLSRFSSPDKILAYAGMSPSTYQSGQLTSSYAHMEKRGSRYLRYALFNATQYVCMWDPTFKAYLAKKRSDGKHYFVAISHAAKKLVRLIYHLQTTGEAYCPML

SEQ ID NO: 398374 - protein, 352 aa, unidentified
MRQVSEDSNMLTNNVIAIDLAKNVLQICHISVHGELLFNRPLSRQKAKEFLTKAKPSIVAMEGCCGCHYWGQFAEQCGHEVRIINPKKVKGYLEGHKTDHNDALAIANAAIQIGIKYSRPKPIEQQAMHSLESSRRFLSRSVVSLGQHIRGTILGYGIANPRGKKGLKASVQAVLDGETPIPANVVSVLSMLWEQYKQLKTKLIEFEKEKNALTRQIEPCKRLMEIEGIGETTAAMLYTTLGDGKQFKNGRQASAFVGLTPKQHSSGGKVFMIGIDKCGGVKELRSLLYLGAMSYVGRLPEKPKTQKDAWLTKIINRIGFEKACIALANKIVRTAWAMLRYETEYKPILLTD

SEQ ID NO: 398375 - protein, 446 aa, unidentified
MRVVALDVHRDFCEVVIGEADGLVMAGRVATSVAELERFGQKLRATDEVVLEATSNAVGIARVLRPHVGRVVLADPKAVRAAAKGRAKTDRIDARLLARLCMSGFLAEVWTPDELTRSWRRLVARRGQLVRQRTREKNQVHAVLMRNLLRPPASDVFGVRGRRWLAGLDLQPDEQLTLDGCLRHIDVLDREVVLVDQAIAGEALASPDMRRLMTIPGVNAITACALMAAIGDVGRFPSPRHLVGYLGLDPRVAQSGSEPARHGRISKQGPGEARHVLVETAWLLARTPGPMRGFHDRVARRRGANVATVAVARKLVVVCWHMLRRREDYAFARPSLTREKLRRLELAVGAPRQRGKRHPERVFAPRHQHALERELAAQAETAYRRLVADWQPHPADHGRGCRTGARILESAEATSSAAGQSPTPALELAVTRAHQEGSHARSRSST

SEQ ID NO: 398376 - protein, 369 aa, unidentified
MDHCTTVVGLDVHKDSIVAAVLPSTANRPTETIQIENQPKAVEKLIRRLTQKGPAEFVYEAGPCGYAMQRHLTQMGHHCVVIAPGLIPVRPGDRVKTDRRDAEKLAKLYRAGELTPIHIPTQRWEGARDLVRSREDALVDWLRARNRLGKFLLRQGRVFRETRTWGVKHREWLVSQRFDWPEHQQAFDAHRRSFDESETRLKALNEQLQELAQKDPYRLPVQYLRALKGVNTLGALTLVVETQEFRRFLTAPAFMSYSGLVCSEHSSAGRIRRGSITKVGNAHVRRVLVEAAWCCRHGQGVSVDLAARRAACPVEVVQIARKAQSRLCRKFLRMLSRNKMATTTVVAVARELAGFVWAIGQHFPAVAAV

SEQ ID NO: 398377 - protein, 511 aa, unidentified
MSQSPSKSFRKKTTRRKSRRSPQGTTSSGTEIEIIRYGVGLDVHKENIVVSVAAQTAQNIIVQIRTHKFRNQPQGLQELTQFLQKYLPVSHYLMECTGIYHRPVYHALEDAFPDSKTKIIAMNPLLVHRKLTDLGNKHDKADAQGMAELSFYDRLIRPSYIGTPEFFHLRDTLRNYKHAKKEATKHVNRIHRVLCSVNFMHKLNLHHEWELHFLDYMIATEGPIKRAFKAMVESSQLEKRSISSLMKHQEDYVPYFNIELPKASRFNLRQLVIQYLQAETNAAQYLLQTEKLILKDAEFEHWYLQLLRIPCLGQISALRLITELGDFRRFVNWKAFAKYCGVVPEIKESGGVFTASHINKFTNTHLRTALSQVAMLYVNGYAKGTDLGKFAHRQRVLRNLPYKKAVMRVAQKLSRIIYQVLVNNVTYDATFEQTKAKIQRLQHRNVKHGTMLESPHTRNLHRDISQLLVTNSQYLNSKSRFFLIKGFQQLIRKANRVELEGTKLDSKKNKI

SEQ ID NO: 398378 - protein, 423 aa, unidentified
MANTAAEQPESPEATPGWSHNWQISQPGGPISGKQVVPYSWQNQLRSGPFHLAADTNEQRTIEQLVTRACKGAEQVRWAIDLTSPMALMLITVLLCAEQSVVYVPGRTVNTMTHAFRGEGKTDAKDARVIAETARLRNDLSNVVLPDELVVELTQLTGYRADLMADWVRGINRLRALLGSIFPGLEAAFDYSTRTPLILVSGLCTPAEIRAAGIDGMTALLVENHAWPTGIVKSAATAAALANEQPLALPGEAGTAALVKRLARKLLELDREIKDIDKTITERFREHPYARIIESLPGFGPGLGAEFLVVTRGDLASFATAGRLASYAGLVPVPKDSGRITGNLRRPKRYNRRLRRVFYLAALSSLRADGPSRRFYDRKRAERLIHTQALLALARRLIDVLWALLRDDREFTPEKPTAATAAA

SEQ ID NO: 398379 - protein, 418 aa, unidentified
MEVLHERCAGLDVHKKTVVACVRLARDGGVEKEVRTFKTTTVDLLALGEWLDGHDVNHVVMEATGVYWKPVWHILDDGDRELVLANAAHVKNLPGHKSDVSDCDWLSDLEAHGLIRGSFVPTRQTQELRGLLRTRKQKVRERSSNTLRLQKTLEEANIKLDSVISNVIGVSGRRMIEAMIGGETDPVALAALADRRIKAPPEVLCEALRGRVTGHHRFLLGLQLEHIDALDRMIDKIDQQIDASVEPFRAAAGLLTTISGVNQLAGRAIVSEIGIDMSRFETAGHLISWAGLCPRNDESAGKRRSTRIRKGAPWLKDILVQCAWAATRTKATYLHAQFVRIRSRRGPKKAIIAVAASILTAAYHMLKNGVPYRDLGPQHFHSRNKQAQAKRLLARLRDLGFTAEFDSLKPIPDAVVSY

SEQ ID NO: 398380 - protein, 343 aa, unidentified
MQTVTTIGLDIAKSVFQVHGVDAAGQVVIRRKLKRRYVLAFFQKLPPCLIGIEACASAHYWARELQALGHTVRLMPPAYVKPYVKRQKNDMADAEAICEAVSKVNMRFVPVKTPQQQSGLVLHRTRHLCIRQQTAVINAIRAHLAEFGIVAPVGRKGVEELLHVVADGNDKRVPDVVRACLAALGTQLLSLKKQILELDRMIMAWYRSNETSRRLHYIPGVGPLLATALVANVADPGAFRSGRNFSAWIGLVPKQHSSGGKARLGSISKQGDRYLRSLFVAGALSVIRYAKAHGSKHRPWLTALLARKPTKLAAIALANKLARMAWAIMATGERYRNPVALAA

SEQ ID NO: 398381 - protein, 379 aa, unidentified
MREATRFVGLDVHAETIAVAVAEPGRGEVRSLGIIPNDVASVRKLIQKLGKKDLRVCYEAGPTGFVLYWQLMELGIECEVIAPTLIPTKPGERIKTDRRDALKLARCFRAGDLTRVWVPDQAHEALRDLVRAREAAKYDQNRDRQRLGKFLLRTGKKAPTGCSKWSQKYVEWIRALQYDHVAQQATLVDYLAEVDHAGERILRLEKAIDDAVEQASASMRALVDGLQALRGVGKLTATTLAVEIGNFARFQTAKQLMAFCGVVPSERTSGNTRRQGAITKSGNAHVRRVLFESAWGCRHRPNLSAALKQRQRGLSPTTNEIAWKAQHRLYRRYVALSARGKPSPKIVGAVGRELLGFIWAIGVQIEQEHAATKPQKLAA

SEQ ID NO: 398382 - protein, 450 aa, unidentified
MIEKALFGNNVITFGRSSYPHGATRARRFCPSGPPRSAWWGWAKISPLSMPPVDNSGKGITYFSNKAIKKRKASLRFSDIILLLNKIAPKGGLPMINHNKLHFSGQPIYIGLDVHKKSWSVSIYSKHGEYKTFSQPPEVEALVHYLRHHLPGAQYHAVYEAGYCGFWVHDQLKEKGVQCLVVNPADIPTKNKERRTKRDRIDCRKLARSLRNGEIEGIYVPCRPRLEDRSLIRTRQSMVRKQTRCKNQIKGMLLFYGVVIPEEREMGHWTRRFIQWIEQIRMERGSGDIALKAHLEELSHLRQLIASLNRAILRLARTEEYRPLVRLLKTVPGISTLTAMILLTELCEITRFRSIDELCSYVGLVPDIQQSGEKEHVEGMTQRRHSQLRWLLIEASWVAVRKDPALMMAFDQYCKGMRKTKAIVKIARKLLNRIRYVLKNQAEYVPSVIQ

SEQ ID NO: 398383 - protein, 423 aa, unidentified
MENIAARKRKQVPEGYLIIGVDPHKKRHAAVAITQDFTTRDKFKFDNTREGLETLLRRAKTEMVKSGCRGVMLAIETGGHYWRNVAYFLDEQGIPFRFINQFTLKRRREGKDLNRRKNDYRDSEVAAQLLCTGEFTETKVPQGVYAELRTAHNAYRRLVKERTRITNLVKGLLDALFPEFTHVFKDPCGLTALSVLSTCSIPSVIAGMTENEFVAAIEAQHQGRLMRRKLRALHYTARTSIGIDAGARSVSSEISFLVEKLELIRRHIRIIEGTLVSLVDETGEGKYLLSIRGLNYTAVAGLLAELGCFKAYRSAKQMIKMAGSNPTESESAGKKRARTPMSKQGRPVLRYCAWTSVIPMLRFNPDFRAWAKQRRERPVHANPLGGREVVGAALNRLLRLAFAMVKNQTYYQVSKAELTLVAV

SEQ ID NO: 398384 - protein, 348 aa, unidentified
MLIIGCDLHTRYQIIAMADPQTGEITIRRLEHENGEAKTFYARLRGPSLIGIEATGYTQWFERLLAELGHELWVGDPAEIRARAVRRQKTDTRDAEHLLDLLLSNRFPRIGVPTPEERDFRQLLKHRDKLVRMRTSVKNQLHYLAMSQGVCRKKKLGSGRGRQQLESLELGPWASRRRQELLELLDRLEPRIEELDVAVQAEAERRAEAVRLMKQKGVGPVTALAFVLTVGPVERFPNSRQLVSYLGLNPRESSSGGRQRLGHIRKQGNEMLRWLLVEAGQSAAQFDPELRRVYQRLKFRRGAKVAKVALARRLAVRLYWLLREASREATTEARQEASYLSATGSHAK

SEQ ID NO: 398385 - protein, 344 aa, unidentified
MLIIGCDFHSGFQQLAIFDNRTGEFQERKLLHPGEAAEFYRSPPEPVRVGMEAGAPCQWFRRLLSECGHELWVGDAARIRAAEPRKQKTDRRDAELIMKLMQQERFPRIWLPSEEERDVRQLLTDRHHRMRRRTQVKNQLQALALNQGLQKGRKLWSQAGIEQLRELPMMEHAARRRDELLRTVVQLDAQIAELDVLVRRQAEGRAEAKRLMTHPGVGPQTALGMVLTLGDVGRFENAGKVASYLGLIPGEYSSGNKQRLGHISKQGSSLMRFLLVEAGQTTVRGDEQLRRAYSRLAAKKSRAVAKVMVARRLAVRLYWMLRNRWTYAELARHAGKPGSSCGER

SEQ ID NO: 398386 - protein, 376 aa, unidentified
MTRIIYTGMDVHKDTYSLCSFDAQDNVIFSEITVKADTAAVLSYIKSIVKRYADDDVMTVCGYEAGPTGFSLCRELQKNNLSCVVMAPSSLPKAPDEKKRKTDKRDARSLALHLAHKTYKAVHVVSPEIETIKDLTRTRATALKAQKRAKQNLLSFLLRKGMVYPYGGRAKYWTQKFYAWLKTLEFTNDIERYSFEEYLSEVNHQMGRVSRLDEKIGEIAEDPLIKDDVKKLCCFSGISTLTAVSLVCEIGDFNRFEKASYFASYLGLCPGIHSSGLSSQTLGITKAGNKNLRCLLIESAQAMSRSQICGKKSLRLLARQKDMNPLVIAYADRATDRIKRRRSSMIFRGMNCNKATTAAAREMACFIWGLMTNNIA

SEQ ID NO: 398387 - protein, 410 aa, unidentified
MTVITIAQNTPVLVAIDIAKARHEVLIAVPGKKRRRRLTVLNELADFTRLIAALKNYGHPVRAAFEATGNYHRALAYHLATAGFEVKLVSSVALARTREALHNSWDKNDPKDAQVILHMMEIGNEQFYHDPLVRGTNDIQELSKTHDIVSKSKTELWHRILTHYLPLYFPEADRFHRSSRSDWFFAFLERYPSPHFISAMSKDAFIADAWDVVGRKVAKERLLADIYETSKVSVGLPVALDSDAISMFRLVLGEGRSLIAQRNQIEARAVALLKDLPDYQLLTSIPGIGPINALTILAEAGDLRRFGHHRQFLKFCGMDLATIQSGTFRGQTKLSKYGNARLRRTLWMAGQVAILQRTNSFRDKFERYISKDRQNTHLRRKAYTAIAAKMARTVHGIIKNGEPYRPFFEG

SEQ ID NO: 398388 - protein, 315 aa, unidentified
MTEREKEVFVGIDVSKDKLDVAVRPSGEILSFSNDEDGISLMVDFIKPLSPLLIVLEATGGLETASVGILAAKGLPVVVINPRQVRDFAKATGKLAKTDAIDAHVIARFGEAVRPEIRPLKDQETQKLDALITRRRQIVEMITAKKNRLGSATSWTRKDIQNHIAWLEKCLMKADKDLNNLLRKSPVWREKNDILRSTPGVGPVLSMTLLSNLPELGTLNRKQIAALVGVAPLNRDSGLFRGKRKIWGGRASIRSVLYMSVTCAIRFNPLIKKFYQHLRNAGKVHKVAMTACMRKLLIILNTMIKNRTCWSTVTS

SEQ ID NO: 398389 - protein, 392 aa, unidentified
MYIIGIDIGKNHHEASIVSPEGKQIGHSLRFATTHKGADSLMSFIFNNIGNSSCIFGMEATGHYWYPIYSFLKARGYTIYVINPIQSDSLRKMYIRQTKNDSIDSFLIAEVIRFGQFTTTSMADENILAMRQLCRYRDSVISSRTEIKLRISTIMEQIFPEYEKQFSSLWLSTSMGILEKYLTPENIENAPIDELFKIIKDKSHNKLTMKKAISIREAAADTFGIKIAQDAFSFQLKQLIDRMNFLDKQIEALDCQILEYYEKFDCYLHTIPGIGMIAAATILAEIGDINRFKSSSALVAFAGIDPTVRQSGEFSSTHNHMSKRGSPYLRHAIFLAATTCSFHNSPLNAYYKKKREQGKHHLTATGAVARKLTTVIYAVLRDGKPYEPKKFC

SEQ ID NO: 398390 - protein, 456 aa, unidentified
MQNYYLGADVSKGYADFVILDAHKQTVEPNFQLDDTFDGHCKLYEILSRFLQEHPDGMLFAAVESTGGYENNWLHTLMRFQATLNMKSARLNPFGVNANSKASLRRVITDKISARDVAEYMISHPEKVSYQQEDYWGSLRKLWGFFNMLTKQKTQLFNQLESLLYSANPEIMAYCKKKSPLWLLEVLRRYPTAQKLSEAIPESLALIPHVSAVRAQELIDKAKRSVASRSDGITEELIVETVEQIIHLKTVIQVQEKKMGDLCSLPEIALLMTFKGIGITSAIGLMIEIQALERFASVKKLASFFGLHPVFKISGDNIGGYHMSKQGRKNPRRILFMVTMASLSNNPHIRGIYEEHTQKGMKGMAAVGLCMHKILRIIYGMLKHNQPYDPEIDVNNREKMVQKQIAIVKDKNRRYQSFDDKAPVSRRQYKKRTERKVSHSDNFTNCGIIVSAPSRN

SEQ ID NO: 398391 - protein, 421 aa, unidentified
MNQNTNNDTQSVAPQAWIGLDWGHETHAFALQDHSGHTEAGTLKHSAEVLHQWLNDLAIRYGGRPVSLAIEASRGAVIHSLLQYPWLTIYPVNPVTSARYRTAFTPSGAKDDLPDAHVLLELVRDHAHKLRPLEAQDPQTQKLARLVEVRRHLVDRRTQLLNQLTSLLKDYYPQALELVGGLNSDLAVDFLTRWPDLVALKAARPSTIKQFYYTHHIRRPEILEARIKRIKESVVLVQDHELVQVSVLHLHVLLDQLRAFRKHLPVVEEEIKAVFATHPEAYLFRDLPGAGAQLAPRLCVAFGTLRGLHPNPASLQKLVGVAPVREKSGNQVWTHWRWLAPTFLRQTFVEWAGQTVVFSAWAKVYYQRMIAKGTKHHAVLRALAFKWIRVLWKCWQTHTPYEESRYLQQLLKRKSPNAATA

SEQ ID NO: 398392 - protein, 327 aa, unidentified
MTRIICGVDISSTSLDARIGRDGVAGSFANTTEGINALAAFCQAHQVELVAMEATGGYEQKPFTLLSEQGLPVTILNPRSVRRFADSMGQREKTDALDAGVIAWFAEVKRSKPFSLSSATQLHLRALVTRLRQLTDIRTAQRNQSRLVTDPTVLAAFVELNTLLARQIKDLENAIAALFSKDPLWHELDLAFRTIKGVADRTVARLMAEMPEIGTVSNKSISKLAGVAPLARDSGKFQGQRSVSGGRAAVREILFVVASVVGRHEPDFVAFQKRLSAAGKPRKVIRIALAHKLLVRLNAKAREVRARLALSSVNQPGLLVGANQLSS

SEQ ID NO: 398393 - protein, 387 aa, unidentified
MPLANDLSRSTMSLKQDETIIAVIEMSQSSWLVAGIVPGLARHPLKKLEPDQNALLPLLGRWRDEAAKAGRTVTRITVAYEAGRDGFWLARWLRTRGIEAHVIHPTSVAVSREHRRAKTDRLDTELLKRAFLGWLRGEPDHCSMAAVPTVEEEDARRPHREREALIGERTRIVNRMKSVLVRFGIRGFKPTLRRAAERLEALCTPEGTALPPNTRAELRRDMARLRFVADQIREIEQARAERLERAPEERTNAMVAMLARIVGVGLETADMLVHEVLSRNLRDRRAVARYAGLTGSPDESGSRRREKGLARTGNVRVRRGMIELAWRLLVFQKESALVRWFRARTEDARGATRKTMIVALARKLLVSLWRLVADGTVPEGFVLRPPT

SEQ ID NO: 398394 - protein, 406 aa, unidentified
MNMYAVGIDVSKRKSTVAILRLGGKVVLKPFDVPHLADHFQSLKDLIRHLDGETRIVMECTGRYYEPVARQLSQAGFFVSAVNPQLIHGFQGQGNPLRKVKTDKADSIKIARYTLDSWADLKQYSLMDELRSQLKTMNRQFDFYMKHKTAMKNNLIGLIDLTYPGANSYFDSPAREDGSQKWVDFIDTYWHVDCVRGMSLEAFTDHYQKWCSRRKYNFSRSKAEEIHGKAKELIPVLPKDTFTKRILKQAVEQLNSVSQTVEQLRSLMNETASLLPEYPVVMAMKGVGPSLGPQLMAEIGDVTRFTHKGAITAFAGVDPGVNDSGDYSQKSVRASKHGSPVLRKTLFQIMDVLIKTKPDDAVYLFMDKKRAQGKPYYVYMTAGANKFLRVYYGRVKEYLAALPSSD

SEQ ID NO: 398395 - protein, 350 aa, unidentified
MELATINTEYVCGVDLHSRSMYICVMDQKGKIKLHRNIRNDFQFFKSLIEEYRGNISVGCESMHSYYWLADGCIENNILFYLGHAYYMKTIHGGKKKNDKIDSKKIADLMRANHFPIGYVYPKKLRATRDLLRRRIRFMTIRAEAYAHIQSTFRQNCIIISPSEVKNKKTRRGLITKVNDKQIQHNIEMDLEVIDNFDALLNPIEAEIRAKSKLHDRTTLNLLLTVPGIGDMMSLVILYEIGDINRFASAQDFSSYSRLVRCERESGGKKTKGGYQKIGNPYLKWAISEIIIHAPGTSPVIKDFYERLIDKAGKKRAQRIISHKFGVAIYYMLKNKQGFNEKRFIQTDMR

SEQ ID NO: 398396 - protein, 412 aa, unidentified
MKDLLEISCGLDVHKEKIVACILTGPLGKPTHSEIREFTTLIPDMVALRDWIVSHDCHHVAMESTGIYWMPIYEILEDAFAGDITLLVVNARHMKNVPGKKTDMRDSEWISTLLRAGLLNGSFIPEKRIREFRDLNRYRKSVIRDITSQKNRVEKFLQSSGFRLSSFISDIFGASGRNIILRLIEHGRINRAALDSCLKTKTRNRIDEILMSVNGTLSEHQKGFLKILMNHYDSLKEHLGEVEAALMEDMAPFALQVGQLSSIYGISTTASCAIIAEIGIDMEPFKTAEHICSWAGLCPGNNESAGKRKSTSVTKGNPYIKSMLCEIAWVIAGKRNTYLSAWYWRIKQKKGAKKAIVALARKLLVIIYTMLKQGTLFDESCFEARRKSCEQKQLSRYIRELEKRGYHVEAQV

SEQ ID NO: 398397 - protein, 339 aa, unidentified
MVVGIDSHKETVAACVVDELGGELATAIFPNTGAGHDSLLSWARSRGEVSLFGIEGSGGVGYALARRLATLGEGVVEVPPFLTVRERKHLRQRGKSDPADALAIARVVAREADLPRFLIHDRARQLGQILNYRDQLVEERTRGANRLHSELTRRHPGYQAEIKNLVSRRSLRRVQALIEAGASIETALLLRRLSSHRLLSSEIADLNVHINRLVEQSRTGLIDITGVGALVAARILAEVGDVQRIASESRFAALNGTAPVPASSGTIQRHRLNRGGNRRLNRALHTIAVIQAHLDPRARAYLQRRRAEGKTQREAIRCLKRQLSNVVYRQLVADRGRLR

SEQ ID NO: 398398 - protein, 355 aa, unidentified
MSQEKYIGMDVHQATISVAVMDASGKLIMECLLETKAATIVEFIQGLQGTLSLTFEEGTSAAWLHDLLTPHVSRLVVCDPRKAALLKEGNKSDRIDARKLAEMLRTNQLKSVYHGEHGLRTLKELGRSYLTITQDVTRSMNRIKALYRSWAIPCSGSTVYAPRHRAEWLAKIEQPGVRIRAERLYQQLDSLQPLRLQARCELLRESHQHAAVQLLRQIPSIGPIRSALLVALLQTPHRFRTKRQLWAYSGFAVETHDSGEYRSVRGKLQRNRERITVRGLNDNHNKDLKNLFKSAAISASTRPGPLQDFYVALVAKGIRPTMARLTLARKIAAITLTMWKKGVSFDAKQLHRQAA

SEQ ID NO: 398399 - protein, 338 aa, unidentified
MFYVGLDIHAKRISICALNETGQVVHRSQVRSIEEMMRVLGSLPDRFEVCYEASCGYGHFHDLLRPLAARVLVAHPGQLRLIFRSKNKNDRNDAERLAKLLYLGETPTVHVPSLQVRTWRELINCRSQVIAKRTRAKNTVRALLRSAGVVPPKQPGLWTKKGLAWLRQLTLPTPSQHLRRDLLLEEIETLIRQVRRIEQQLNHQAQQTPAVAQLRSIPGVGIRTADAVAAFVDDPHRFRHAKAIGRYFGLVPCQDQSGDKNRLGHITREGAPVVRQLVAEAAWQAIRRSPTVRAYFERVQRGDPQRKKIALVATAHYLVRVMWALLKRGTVWEEKMAS

SEQ ID NO: 398400 - protein, 323 aa, unidentified
MELPPVFAGVDVSKARLDVALSGSDEVSSVPNSPDGIVQLVQRLGERQPTLVVMEATGGFEFATAAALAAASIPVVIANPRQVRDFAKSTGQLAKTDAIDAHILALFAERVRPQVRPLPDDAARALDAILGRRRQIIDMITAENNRLGFALPAVHKGIKKHIRWLERQLSDLDSELDDLIRKSPLWRAKSDLLRDVPGVGPNLARTLIAELPELGRLSNKQIAALVGVAPLARDSGLFRGKRMIWGGRAPVRSALYMSSLSASKWNPAIKVFYRRLRDRGKSPKVAHVACMRKLLIILNAMIRDGRKWDPAIPLDQLRFQHSC

SEQ ID NO: 398401 - protein, 415 aa, unidentified
MAIDVAKQVHEVLIEPPTGSRQRWRMVNCQRDFEGLRQRLDAFQAPIRIGFEATGTYHRPLAYFLHQCGFELRLISSLAVARTRDALYNSWDKNDPKDTQVLLHLLKTGVTQQYHDPLVHAVNDVQELAQTHYQVSLRKVRVQHSVMTHYLPLYFPEAERYYTNSRAQWFTHLLYRFPCPAAITRYSHEAFEQEAWAVVGRKVNKRGFLHDFYLTASQSIGLPVAKESEAIQMFRVILMEHQQLCVRRAEIEQQADQALHGHPDYQRLRTLPGVGPILALTILAEAGDLRRFPHHRQFLKFCGLDLSTQQSGQFRGTSRLSKHGNARLRYAFWMAAQGAVRMRENTFREKYARYIKGDPQNPDRKRKALCAVAAKVARVAYGLIKTGTDYRPYFEALPPSGALRSLGPSRQALTS

SEQ ID NO: 398402 - protein, 451 aa, unidentified
MTKPKRSRPERDITPTHSNAAAIDIGSRMHVAAVPPDRDSEPVRTFGTCTIDLKALADWFERCGVRTVAMESTGVYWIPAYDILEQRGFEVMLVNARDAKHVPGRKTDVSDAQWLRRLHEYGLLRASFRPKGELAALRAYLRQRERLLDYAASHIQHMQKALMQMNVQLQHVVTDMTGVTGMSIIRAIVAGERDPAVLAAHRDRRCHASAEKIAAALTGNWREEHVFALGQALELYDTYQAKIAAGDSKTASVLARLKDAAARPVSQLPPARHRDKTANAPTFDARAALHAVLGIDLTQIHGLGPSLALRLVGECGTDLSAWPDAKHFTSWLCLAPGNKISGGKVLSTRTRRSGSRAAALLRLAAVTVGRTETALGAFYRRLSARVGKAKAVTATARKIAALFYNTLRHGMSYADPGASYYEERYRVRVLANLERRAKSLGYTLREAPEPG

SEQ ID NO: 398403 - protein, 345 aa, unidentified
MTVYIGVDFHARAQTISYLTTEGGEIKRAQLDHGQPQEVRKFYEQFAGQQVMVGFESSGYAAWFEELLEELGYEIWIGHATAIRLFARRRQKNDRRDADLILDLLWRGDFPRIHRYSPESRAVLQQLRYRQRLVKMRTMIVNSLVFMASSRGVSLRTQLKSRQGIERLRQIALPQPLIEQRDELCQLLQELKTRIERVEQWLEAKANSDIRVQRLRTHYGIGPLTGLCLVHTLECVERFANPRKVTAYVGFDPVEDSSGERRRIGSISKQGSRLLRFFLVEAGQIAIRKDQDLARVYQRVLVRRGHAKAKVAIGRRLLVRAFIMLRDEIDYAEFQRRGVAARSSR

SEQ ID NO: 398404 - protein, 357 aa, unidentified
MDQVSTIGLDTAKRIFQVPGVDEAGAVVLRRQLRRSEVLKFFAKLPRCVVGMEACGGAHYWGREIAALGHEVRLMPPTRVKPPAFAGAGSTSNGRKSDKVDAAACCEAVTRPSMRFVPLKTVEQQAALMMHRARQLLVEQRTRLGNAIRGHMSEIGIIAAKGGAGLGALVAFIGNPEDQHLPAVVRTILVPLVEQWRSAGAQIAELDRQILAWHRNNADSRRLETIPQYGPILSSAMAATIGDAARFDNGRACAAWIGLVPTQNSSGGRERSGGISKTGDRYLRQLLVIAATGMVRRARAHPEDHPWFAGLLERMPPKKAAVALANKLARIGWAVLRHQTPYRARRPTAVAPALEAA

SEQ ID NO: 398405 - protein, 343 aa, unidentified
MKITTVGLDLAKNVFHVVCFDEHSKEVQKRMLQRKHVHIFFAQLQPCKIGMETCAGSHYWGRELTDLGHEVKLIPAQHVKPYLRGNKNDFNDARAIAEALSRPSMPSVAVKTTEQQDIQATHRMRSQCVKDRTALSNSMRGLLGEYGIILPKGLSVLRKRIHGILEDADNGLSISFRHLMLRRYEQLVQIDEHINFFTHELEVLSKKDDACQRLQEIPGYGPIISSAFYSVVGNGGAYKRGRDVAASIGLVPRQHSSGGKDVLLGISKKGDGYLRSLLVHGARSVVTQAGKKKDRFSLWINRIVAERGWNKAVVATANKMARIGWAVLRHNSHYQTALTVSNL

SEQ ID NO: 398406 - protein, 353 aa, unidentified
MVKYVGIDWAYRQAQWCALGAGGEVAGEGRIPADRDGLARLVLELGDEVTACLEMMSGALWVRDELVACGWQVQVADARKVKTVAPLAAKTDKVDARLLAELSRRQLVPALWLPSLDERALRERLRRRMHLVRLRTSAKGRIFGLQTQWGVRISLRRLRRADGMTLLERAGMPAVWRHSISECLALIDFLDARIVPLDAELRPFAQADPRAVLLDTIPGVAELLALTIAVEIGEISRFAGPEKLVSYGRLAPRVRQSGEGRPHTGPLNKSGSRLLGWAAVEAAQQAWRESNPWHQLYLDVSRRSRNHNSAKAAVARKILIAAWHMLSRNEPFKPAPRTGATSVPASSRLALAA

SEQ ID NO: 398407 - protein, 368 aa, unidentified
MKQHSIRRSPGRARKAQPEPTTIGMDLGDKSSCYCVLNSQGEVVQERKVATSRKGLAQAFGAIQRCRIAIEVGTHSPWVSRYLSQLGHEVIVANARQVKLISQSSRKDDRMDAQTLARLARIDPGLLRPIRHRSKQAQMDLMTIRVRAGLVEARSKLVNTARGMSKSVGKRLPSCDSDRMGVERMKELPAELQVTLEPLLEQVESLTGKIHQLDRRLEQIARERYPETELLRQVAGVGLLIALTFVLTVEDPERFAKSRDVGCYVGLRPQRSQSGQSEPQLRITKEGDRYLRMLLVQGAHSILGWRGPDTDLRRWGLKLASRGGKNAKKRAVVAVARKLGILLLRLWVTAEVYEPLRNSLTRSCQAAA

SEQ ID NO: 398408 - protein, 350 aa, unidentified
MLIIGCDFHTRYQQIAMLDEATGELAERRLQHENGEAEAFYRSFSQPVRVGIEATGPIHWFERLLSELGHELWIGDSAKIRASEVRKQKTDERDAALILDLLLSKRFPRIWVPTPQERDLRQLLWHRHKLVRMRTMLGNQLHFLAMSQGLCRKKKLFSKSGRMELIHLHLGPWASRRREELLKLLDGLNPAITELDHAVLQAAQQREDAVLLMTHPGIGPNTALAFLLAVGPISRFPCSKKIVSYFGLNPSEESSGGRRRLGAISKQGNIMVRWLLIETAHLAVRKDPELRQDYQRLKFRRGHAVAKVPIARKLAVRMYWMLRSGAAYAQLVRRQGSPGATLVNASSSLG

SEQ ID NO: 398409 - protein, 482 aa, unidentified
MKKRNIYQNRSQELLRLFEEAGNSAKVMCVPIDYAKKNHVAMLCNGYGDILRKPFTVKNSPEGITYLMEQVTRSCRHRGIKKQHVFFGGEDANSYCENFVNTLRSKGWIVAGVNARDAKKQRANLQASTDRLDLMGIATMLLNCRANCSPAQSGIYRNLRTLVRHRRKLVVMSTEVKNRIYTVVDLLFPGFLNERKSGISPFSNSSLHLMEDRFSARQIHRRRRQKLIEILKRFGTSEPESAAVKLQQLAAQVLRAPADHIDTLQLSLAQHVKHLRCLQEGVDQLENEIAVNLSQTQGAFLTSVRGIGIVLAAGVTAEIGDPNRQKPVNNLVSYSGIIPRVKQTGGPESKGYTFSVAKRCNRILKDYVVRSAWQIGVHGPEDLMADYKRRDASGQHADFGIGRRYLRLGMSLMKTSQVYLPYRFRKAKATLQERAGYYLMTWPYLRDKWKKAGALEAAFAKDRPLGLWRQIIQELYEIKLKL

SEQ ID NO: 398410 - protein, 395 aa, unidentified
MFIVGVDIAKRSHEAIIIAEDGQVVRKAFSFRNNCTGYNLLLEQVRRLTLVKSQIVFAMESTAHYWLALYARLLKDGYAVMVLNPIQSHSLRELYIRKAKTDARDSLIIADLVRFGRCKASNVPQDKILALRELCRSRAYLVDMAADLKRKLIALLDRIFPEYESLFESVFSKASIAVLRKYSTPQKVKNAHLGKLTDILMESSNGHFGEWKAHQLKETACSSFGIDDSGGVYSTLLGMFLEQILSLTAQADSLEKQISVFFQEFNNPLTSIPGVGTVLAATILSEIGDITHFSSADKLLAYAGLDPSVKQSGEFKSNQNRMSKRGSPYLRRAIWLASTVAVHRDPMFQTYYEKKISEGLHYMNVIGHVSRKMTAVIFAVLRDGQPYQPILQSAG

SEQ ID NO: 398411 - protein, 406 aa, unidentified
MLNAVGIDVSKGKSTVAVLRPAGEIVRKPFPVTHSAKCLHDLVSYVRGLDGETRVVMETTGHYHEPILKAFLDAGIFVFAVNPSLIKRHDSDENPLRKVKSDPADAKKIARYTLDRWENLRQHSVMDTTRTQLKTLNIQFHFFMQKKVSLKNNLISLLDLTYPGANALFDSPVRPDGSEKWIDYVHSFWHADCVRKIGLKAFTERYQNFCKHHGYNFQPDKPQKLFEASKDLVPVVPKDPVYKQLILSSIEQLNTVSKQIEIFRCTMNELASTLPEYQTIMSMYGVGPTYGPQRMAEIGDISRFDHRSAITAFAGVDPGVNQSGTMNYESSRASKHGAPRLRKTLFQIMTTLLQLAPADDPVYRFMMKKESEGKPYQVYMTAGANKFLQIYYGRAKECFASPSATE

SEQ ID NO: 398412 - protein, 386 aa, unidentified
MQASTVGTPTASRYGTIFITIELSQKSWLVTLHSPDQDKLSRHQLAGGDHAGLLALIDRIRDRAARALGGVPAVASCYEAGYDGFWLHRLLLAAGITNYVFDPASIAVDQRARRVKTDRIDGETMLRTLMAFLRGEPRVVRIVRVPSAEQEDARRASRERDRLVKEQTAHTNRIKALLRLLGMAIGNPRRRDWLSWLATQRDWQGQAVPPQMLGEIRHEHARLMLVRERLDALAKTPAQADPTPAAAQMIERSELLLRLKCLGPAFATTLTNEVFYKDFRNRREVASYFGLTPSPWRSGGIDRDQGISKAGNPRARCAAIELAWLWLRHQPDSKLTQEYRRRTLDAGKRIKRVAIVALARKLVVALWRYLTTGLVPEGAVLKAVKV

SEQ ID NO: 398413 - protein, 343 aa, unidentified
MQTITTIGLDIAKSVFQVHGVDATGQVVIRRQLKRRSVLAFFQKLPPCLVGIEACASSHHWSRELQALGHTVRLMPPAYVKPYVKRQKNDMADAEAICEAVSRANMRFVPTKTPEQQSCLMLHRTRHLFIRQQTAVINSIRAHLAEFGIVAPVGRKGVTELLHVVADPSDKRVSEVARACLAALGGQLLSLKQQIVEFDRMILAWHRSNQTSKRLHYIPGVGPMLATALVASVADPSTFRSARNFSAWIGLVPKQYSSGGKERLGSISKQGDRYLRSLFVAGALAVIRYAKIHGTGHRPWLTALLARKPTKVAAIALANKIARMAWAMMAKGERYREPIALAR

SEQ ID NO: 398414 - protein, 385 aa, unidentified
MSSKAFVPRDYDVFAGLDVDKKSISVTFTNHQGFIRSLHMPYSVEHLVNHVRKHFPDQKVAFAYEAGPTGYGLYDGLVANSYPCLIASPSMIPKAPGQRVKTNRLDSVGLAENLRGGQLKSIHVPSPVYRELRHLTQLRDTFVSEMVGMKQRIKSLLLLEGIGFPPAPAGSQWSLMVKAKLRKLPCSGTVRFKLDELLDSLEFNEKRVVKTTQQIRRFCQTDPELSRCMKYVMSVSGIGSIVASQLLARIGDWRELKNIRQLGGFLGLVPTEHSTGDRTDRGSITHTGDGRLRSKLIQASWSAIRQDSELREFFASVCKTHARHLASRVAIVAVARKLSVRISVVLMKQRPYVVREKVQSAPLTQEETSPQGTTRRQAEPGNKNS

SEQ ID NO: 398415 - protein, 409 aa, unidentified
MDILYERCCGLDVHKKTVVACVLVPGSGRQPTKEIRTFGTMTADLLELGDWLAEKGVTHVALESTGVYWHPVWNLLEGNVELLLVNAQHIKQVPGRKTDVRDCEWIANLLRHGLLRAIFVPERPQRELRELTRYRTSLIRERAAEINRIQKTLEGANIKLGDVASDILGVSARRMLEALIGGTTDPAELADLAKDKLRKKLPQLERALKGQFRAHHRFLLAQQLAHLDGLDELIDSLGSEIAERVRPVEQVVERVDGIPGFGRRTAEIVVAEIGTDLSRFPSYKHLASWVGLCPGNNESAGKRMSGKTRKGDVWLRSALIEAAHAASRSKDTYLAAYYHRVAARRGKKKAIVALAHTLLTIIYYLLTRDCDYEDLGPEYLNEHDREQTERRLIRRLQGFGYTITRETAA

SEQ ID NO: 398416 - protein, 385 aa, unidentified
MQKHHDDSKACLTAFVQDNTVIAVIEMSLASWVVAGLIPGVNREPLKKIAADPEELLRLLYRWRDQAIKAGKDITRIAVAYETGRDSFWLARWLRDRGIDAHVIHATSVAISREHRRAKTDRIDTAMLRRGFLGWLRGERGHCSMAVVPTIAEEDAKRPHRERESLLKERTSTINRMKAILAQFGVRNFKPSLRKAAEKIDAVRTPEGVPLPPNTAAALRRQIERFRLINEQIKTVEKTRMQGLRQNPTGKYNTMVFLLVRIIGLGVETAEQLVHEMLSRNLRDRKAVARYAGVTGSPDESGASRREKGLSRSGNGRVRRILIQLSWRMLQFQPDSRLARWFKNRTANSQRSRKPMIVALARKLIIALWRYVNTGVVPDGFKLAK

SEQ ID NO: 398417 - protein, 346 aa, unidentified
MLYAGLDLSRQRLDVHVLDEEGRTLEVTAVHPDVDALRTLAGHVLLQGQEVSAAIESMTGARFVHDQLERWGWDVAIADAVKVKGLAPLAAKTDKIDARVLAELARRDLVPEIWLPDPTVRAERERARFRLHLVHHRTALKNRIHATLMTFGYSVPVSDLFGTQGREILGRLAVPEPWAGTLATSMRMIDDLDVEISAAEADLRSLGPDHPYIPLLLTVPGVGHLLAYTIASEIGDIGRFASPKKLTGYTGLCPIVRQSGSTDRRGPLAKNGPKYLRWALIEAATHAARDVRYRDRYERTKHRLGRQRGAKVARVDIARQLAEAIWHVLTKNEPFAPAGPAMTLVA

SEQ ID NO: 398418 - protein, 408 aa, unidentified
MRTVHERCCGLDVHKKTVVACVLTSTSKETRTFGTMTHELLEFVEWLEQERVTHVAMESTGVYWKPVFNLLEGHDFELLVVNARHTKAVPGRKTDVKDAEWLADLLRHGLLRASFVPDRGQRELRELVRYRRTLIHEKTRLITRVQKVLEGANIKLGDVASNVMGLSGRAMLKELAAGNTDAAAMAELAMSNLRPKRQRLAQALEGTVAAHQRFLLRSQIELIEVMEKQIEAINVEVEERMRPFQPALDLIDQIPGIAQHGAEQIIAEIGVDMSRFPTSAHFASWARVCPGTNESAGRRSKVGTGDGNPWLRSALIEAALGAVRAGRAHPNFFAARYRRLAGRRGPKRAQMAIAHSILIAIYYMLRDGAHFIDLGPEHWDQRHKESVARRSIRRLEQLGYKVTIEAVA

SEQ ID NO: 398419 - protein, 356 aa, unidentified
MNSLTDLRDVVDVVIGVDTHVHTHSAAVLDTATGGVLDEITVEATPEGYAELVEFANNYAMLRAWAIEGTGGHGAGLSRHLGRASEIVVELDRPKRAARRNGAKSDPLDAIRAAREAMARPRLGTPRSGGERQALSVLLTARRSAINASTEAQLQVFSLVIAAPEPIRDRFRGQKLAAMLNTAASLRVHSSWDTETTNTVVALRTLARRAHAMLKEARELQKALVAIIRNWRPDLLEEFGVGPIVAATVLCAWSHPGRIHSEAAFAMLAGVAPIPANSGQVTTRYRLNRYGDRNLNNALHTVVQSRIQYQQGTRDYVARRTAEGKTAREIKRCLARYIARDLYRLLESGPQRLDEA

SEQ ID NO: 398420 - protein, 341 aa, unidentified
MNAIYYIGLDIHKKTIAYCIKKVDGTLVRQGTVCAERKALQQWQSELPGPWYGAMEATLFTGWVYDFLKPYAVDLKVAHPAMLKAITAAKKKNDRADAEKIGDLLRVNLLPESHMMSEELRELRRILRYRNMIVRTAVKMKNKMSGLLMEVGAQYSKKRLYGKKYFGELLERVEDVPNSVKELLKLSRSGFELYNGIQKKLVSALRENKKIEARVQRLMSIPGVGEVTALTWVLEIGELERFSSSNKAISYCGLCSAQHESAGKEQRGPISKQRNKHLQTTLIEAAKLAPRWNEQLALLHGKELARGNRNRATLAVARKLVEFMMAVDRRESEFETIKLAA

SEQ ID NO: 398421 - protein, 436 aa, unidentified
MNTGVTSWSARSAFAGFDWAREHHDIVVVNAQGVVVEEFRIEESAEGWQRLREKFSVYPEVAVAVETSSGMVVERLLEAGCAVFPVNPKSAQRYRERKAPSGTKTDRVDAWSLADALRLDGHTWRRLLPDDPLTVELRLLCRDEITLIGQRTALVCQLRAALHEYYPAALSAFGDWTAPSSWTFIERFPTPQRLLAAGKRQWEKFLHTQKLYHSEALYEKRLAVFAAAESFCGSAAVTNAKSLLAVTLSVQLRTLQKHLDEYRRKITELFDRHPDHDLFGSLPGAGEKLAPRLLAELGDDRGRFDSAEGLQCYAGTAPVNYQSGQVRKSRIRRACQKALRGTVHLWSDLSRRSCPWAQAYYRQKREQGKSHACALRCLGQRWLKILWKMWQTRTAYDAEQHQRNQLRHGSWVLALVPAANPSAPGSQNPSQPVERL

SEQ ID NO: 398422 - protein, 350 aa, unidentified
MTNLARSITGGVDTHLDVHVAAALDDRGALLGVESFATTTDGYKKLLGWLSDFGPVELVGVEGTGSYGAGLTRHLQAERVRVVEVDRPNRQRRRRKGKSDPQDAITAARAALSGDAAGEAKTRDGNVESMRVLRVARASARKGRTQALNQMRGLISTAPEPIRAELRGLNVFRLLERASTYRPGSKRDIVSLTKFSLRMLARRALTLEEEISEIDAILEPLVNETAPRLVGALGVGPDTASTLLVTAGDNPERLRSEAAFAHLCGASPIEASSGKQQRHRLNRSGDRQANSALWHIVITRMVYDPRTTEYIDRRIAEGLTKKEAVRCLKRYVAREVFSLLPHEKPGLDSP

SEQ ID NO: 398423 - protein, 412 aa, unidentified
MYYVGIDIAKRTHVAVIMNEDNSLEVKPFSFNNDKTGFKKLLIHLQTLCCDLSDIVIGMEATGLLFENLYRHLQSLEYNVVLLNPYQTAKFREMDTMKRVKNDNIDSVMIAALLKSGRFSEGYVSQEQLQSLRELYRHRSSIEDQIKSLKRRTSAILTVVFPELETVIRDPFNVTGLALLDKYPTAKHYTNASIERILKTFRGIRGNNFNRNKAQALLDASKRTIYSGIAKDARAFNIRTNLEQIRLLQKQLDQTLEMMQDLFNSKEVKQENQEVMEDIIDNLRTIPGVADKTILALLAECGNLDRFYAPKALIGFLGLYPTLSQSGDSTRNGRLAKRGASLAKKAIYLASIAAIRHNDEMRTIYMNYRSKGRAKKEAIIIIARKLLTIIYTIYTRNIQYDPQRVFVAKPNQ

SEQ ID NO: 398424 - protein, 337 aa, unidentified
MIVVGVDVHKHSLTAVAVDELGRTVAARSGPVDAEVLEWARRLGADRLWALEDCRHVTRTLERTLLRAGERLVRVPPRLTAPQRRRSRTRGKSDAIDALAIARAALQEPGLEGPREGEETLHELKLLVDHRDDLVDERRRAQQRLRWHLHELDPDLHVPLGALDRTIWLDRLSRKLTRREQTVQLSIARELVSRCRMLTRAILALDRELQQRTQTLAPRLTQLPGCGPVSAAKLLCEIGPIDRFRSDAQLARHAGVAPLDASSGKHQRHRLDRGGNRQLNCALHRIAITQGRIHAPARAYLDRKQSEGKSRREAIRCLKRQLARTVYTTLKTESALT

SEQ ID NO: 398425 - protein, 362 aa, unidentified
MKHVIALDVSNGKSTVVIYDRYRQCEFEGELNHTRVDFERLHERIKEITRLDGQAPEIIFEATGVYSKPVEKFFIDFGYTYCRMNPLEANLQMASMRRNKTDISDAHELAKTHFKMEREPTYVQDDYYEQMRALTRYYDEIDEEVTLLKSRMHALLHVSFPELEKLITPRSALFLNIVQLYPHPALLLAHSKTMIKNRLKVNTRKNLSLARAEAKAEVLLEAAQNSYPAIQENDIRCDQIRDYAARIMDLVEKKEFIVRQMVEMSEGRNEYEVLRSIPGIGDTTACRLIGELGDIRRFQNAKQLNAYVGIDIMRYQSGNTQYRDRINKRGNKKLRKILYFMICTLIRFGKRPITISSIITIN

SEQ ID NO: 398426 - protein, 342 aa, unidentified
MNEVSIIGLDLAKNVFQAHGAGVDGSVIFRRKLSRAQLLKFMSEQSPCIVAMEACASAHYWGRAISDLGHDLRLIPPAYVKPFVKRQKNDMADAEAIAEAASRPTMRFVAVKSEEQQAAAMAYRTRDLLVRQRTQTINALRAHLAEQGIVAPVGPAHVGRLAAVVDGEDGALPATVRDLARLLLDQIADLSEKIASLDTELRRRAGTDDTVRRLTTIPGIGPITAAAITTFAPPMETFSKGRDFAAWVGLTPRQHSSGGKERLGRTSKMGQKDIRRLLITGAIAVVRWAARKGAPEGSWLARMLARKPKMLVAVALANRMARTAWALMRKGEDYRDPAMATT

SEQ ID NO: 398427 - protein, 416 aa, unidentified
MKSWQDLAHYAGFDWAKDHHAVLILNREGSIVADFEFEHSLEGWTSFAEKTSAWPNLAVVIETSQGAAVDQLLQKGYTVYPVHPVAAQSYRERKAPSGTKTDHLDAWALADALRVDGHGWKTLQPMDPLTQQLRLLCRDEVVLIEQRTAMVNQLQQALLEYYPAALEAFDDWTDSFTWEFILAFPTPQALVQAGKRRWEKFLHTHKLWRPETAEKRLKLFAQADQFQASDPIVRAKSQLAVSLAKLLCTLGQQLKLYRKQIEALFRDHPDHDLFGSLPGAKQMLAPRLLTSVGGDPDRYGTHEVLQCIAGTAPISYQSGKLNKARVRWACDKFLRHTVHLWADCFRKGSAWGQTYYQQKRDEGKTHACALRCLGQRLLKILYRMLVTKKTYDAEFHACNQKKHGSWVFSLVNKSTA

SEQ ID NO: 398428 - protein, 366 aa, unidentified
MKKSSTLAIEGMQIFRPNQLTIGLDLGDRSSRYCIVNEAGEIILEQELPTTPKGIEQGFGKIPRSRIALETGTHSPWISRQLTELGHEVIVAHARNVRLISQSSRKDDRLDARTLARLARIDPGLLGPVRHRSVKAQIHLTVIRARATLVSARTALVNAARGLTKSYGARLPKCGTAQMNRESAKELKPELREALDPLLAEIESLNARITEYDTRIEQLAKEVYPEVARLKQVKGVGPLIALTYVLTLDNPHRFRRSRDVGCFVGLRPGRRNSGMSEPQLHISKEGDRYLRTLLVQGAHYILGPFGQDSDLRRWGLKLSERGGRNAKKRAVAAVARKLAVLLHRLWVSKEVYEPLRNNRKQMAQVA

SEQ ID NO: 398429 - protein, 366 aa, unidentified
MDKKSSKKYGWFIGVDVSRNELDFAVMKAKVVLFHREIPNSLESIKDFIKELKMQQGFTISKAIFCLESTGFYSNHLLQVLHRFKANIVIENAVKIKNSPGNMRGKNDKIDAVRIAAYASLHHENLRFWFPRRPVIDQLAELTTLRLRLRVLYGSLTTPVKEQQAFVKKKVARENAQLCSRSIEAVKLDLLDVDEAILRVINEDEQLCRLRDLIVSVDYVGVVTATEMLICTNEFRDIIDPKKFACYAGVAPFPKESGKARVKSRVSHLANKKMKSLLHLCALQAMRHSPELRPYFLRKVEQEGKPKMAVLNALRYKLILRIFACVNQNRKFEKTYVNSHVKKLKGIESESFASGKEEKETITDVL

SEQ ID NO: 398430 - protein, 411 aa, unidentified
MHNRQNYLYVGVDLHKEHHTAVIINCWQEKLGEIQFENKPSTFSEFLLEVETYVSNGLSVVFGLEDVGGYGRALAKYLVDHEQVVKEVNPALSFLERKSQVMIQKNDSWDAECVARILVNKFNQLPDAKPNDLFWSIQQLVSRRNALVKAQSALKNQLHIQLNHHYPSYKKFFSELDGKTALAFWQQYPSPSCLEGTNIKRLTAFLLDVSNNTCSIKKASDILKLVKEDGHTMKEYQETRDFLVRSIVRDIEFKKTEMKYIERELKQLVNLLDYQLETMPGIELVTASALIAEIGDVRRFSNANKLARFAGIAPVYFGSGGKGKTHKSKQGNRALHALFYNLAVQQVQVAKGSKLPRNPVFHAYYQKKLKEGKTKGQALVCIMRRLVNIIYGMMKYKTAYELPIVEEKEVV

SEQ ID NO: 398431 - protein, 359 aa, unidentified
MRATVQRNKINFKGKTVSIGIDMHKASWSITALVEGEIVAAITLARPSYDSFKKILTQFEGNYVRIVYEAGPCGFDLYDKLTDDGIECIVTPPSLIPTESGNKVKTDKKDSYKLAKLLESNILKKVWVLSPEQRAHRQVVRTRRQIVNHRSDVMRQIKSMLLFHGIEVPFSSRQQWTGRFITWLHELDCGDEYLNTSLKALVQLFDYLSMEKKKLTHEVLELARKDSYASRVKLLKSIPGIGALSAMEILVEIQDIRRFKTADELAAYLGLTPSQYSSGEHIRMGHITHMGNSRARTTLIECSWIVIHKDPRMRQKYENITSRRGGKKAIVGVARSLSACIRRMLLDQVAYEIDFRNAA

SEQ ID NO: 398432 - protein, 368 aa, unidentified
MNRASLGSTRDTRVNWQLLELEGGPEMTIVAGFDVHRRQITFDALDTETGELTRGRIDATPAAVERWVAGFERREVQVALEACTGWLFVSRALERAGAIPHLAEPVETSALRGRKRRAKTDREDARWLRTLLGEGRLPESWIPPEHVREWRSRARLRKTLIEERTQWLQRVQATLFHHGITGAPAELRSTTGREFLAALELPADARERITIALAMIDSLDRQLRPLESELRKLARRQTGCRALMSQFGMGELTALMTLCELGDVQRLSASRKAVRMAGLDIGVHRSDRRSRVGKLNRQGSPQLRWALYEAALSATRPKSPDHQDYLALKARGLTHTRASLTIARKLARRSFHILQELGPAALEPTTTT

SEQ ID NO: 398433 - protein, 465 aa, unidentified
MPRSRPRPCHLARRAKLPRELRTVNLNAAGIDVGAERHYVAVPEARDPEAQNVRSFGAFTADLHALSTWLRSCGVETVAMESTGVYWIPLFELLVEQGFDVKLVDPRQMKNVPGRKSDVLDCQWIQQLHTFGLLAGAFRPNDAICVLRSYFRQRAMLVSYASHHIQHIQKALEQMNVKLTEVVSDITGLTGMAIIRAILDGERNPRALATLRDRRCKQTEETIACALQGNWREEHLFDLRQAVDLVAFYHQQIAACDRAIEACLEQFDDRSGGQTLPPSRPRRPRGTDLAFDARSHLHRVTGVDLTRIDGIEAHTALKVVAEVGLDMTRWPSEKHFASWLGLAPGTKVSGGKKLSGRTKPSTSRAAAALRMAASSLHHSQSALGAFFRRMKARLGAPKAITATAHKLACLIYRILRFGTDYVDRGQDYYERRYQHHLLSHLTRRAKQLGYTLVKADGPSAATAPL

SEQ ID NO: 398434 - protein, 342 aa, unidentified
MKIIGCDFHPSFQQIAMVDLQTGEYTERKLTPEEARQFYAELKGPVLVGMEACGNTLWFERLLASLGIKLRLGDAGKIRALELRKQKTDRRDAQLLLQLLLEDRFPEVWVPTVQQRDLRQLLLHRHKLVAMRRQVKNELQHLALNQGVQQKRKLWSASGRQRLEELPLEGWTALRREDSLQLLDELDRRVAKLDIAAQQEADRDAVARLLQTHPGVGPITALAFSLTLGTIERFARSRQVVSYLGLNPAEYSSGGRQHLGAISKQGNPMLRSLLVEAGQSAARCVPELKRAYQRLKHRKHSGVGKVMVARKLAVRLFWMWKTQQPYAAARTQASPSHHVVAV

SEQ ID NO: 398435 - protein, 347 aa, unidentified
MSSPYDCVQWVGMDLHRRRSVLVRMAADGQRLGKMVRFNNDPARLKREIAKAGPQPKVVLEATLGWYWAADALAEAGAEVHLAHPLGVKAFSYRRVKNDERDAADLADLMRLGRLPEAWLAPPETRELRELVRGRHKLVSLRTSCRNQAHGVMGKLGIAVPMSDLFGTMGTAFLDELPLPAGYAARVRALRAVMHELSQQIGMLDKEIAARLASDTGYRAIQKIGGIGPVLAAVFTVEIADVTRFPDPQHLCSWAGLTPRHRESDTVVRRGHLTKQGSKLVRWAAVEAVQHAPENTPMRAHKDRIEARRGAGTRNIAKAAAARKLLTLVYYGLRDGEVRCLTRRDPV

SEQ ID NO: 398436 - protein, 342 aa, unidentified
MKEEKKMQKSFIGIDVSKLTLDVCIINNEGFVEHHQFENNRKGFKKIQTWLVSTKVFNYSNALFCMEHTGIYTRELVEYLLMQDAKVWMESALHLKRSMGMTRGKNDKVDAYRIARYAMTNGDKAKFVMPTNKTLQRIKDLMSNRKRIKKSIQSLKVSVKELKRVDKAAGKELEAFNKPALTGLLKSKQAIEKRMQELINSDEELKRIFQLVTSVKCVGPVLAIELMVYTHSFTRMTDVKQLACYCGVAPFSHTSGTSVKGKTGTSNFANMGLKSTLHLAAISSTQYVPELKQYYERKVAEGKKKMSVINAIRNKLLNRVLTVVKRGTPYVENYSQNNLVMS

SEQ ID NO: 398437 - protein, 419 aa, unidentified
MNKPNQLDLAACVGLDWADQQHVICLRVAGTAETESRQLEQKPDVLHEWVAQLRVRFQGRRVGIAIEQSRGAVIHALMMYDFLVLYPINPKALARYREAFRASGAKDDPLDAELLLDLLLLHRSRLRVWLPDSVETRRLQMLAEYRRKLVNNRIRHTNRTTSQLKMYFPQALDWAGELGTVQSCDFLEKWPSLSTIQHARPSQLRKFYLQHHGRNLDLIEERLRQISSARSLTDDPAIVQSLSLAVQAEAAQLRPIIDWIARFDQILAQQFASHPEHALYESFPGAGPVYAPRLLTALGTDRSRWESAADLQCHSGIAPVTEKSGKTCWVHRRLACSNFVRQTFHEFAAQSIRYSTWARAYYDQMRARGLRHPAAVRTLAFKWIRIIYRCWRDQKPYDEQIHVNSLRAKQSPLVKPDSD

SEQ ID NO: 398438 - protein, 345 aa, unidentified
MKYYAGLDVSLEKTSICVVDGDGVIVAERKVASEPRAIAEALLALGLVFERVGLEAGPLSPWLHDGLHSEGLPAICIETRRMKAALRAMRNKTDRNDARGIAQVMRTGWFRFVHVKSSESQELRLVLNHRKTLQRKTLDIENEIRGTLKAFGLKLGKVSRGGFTARVGALVADRSRLRSATEPMLKARDALMAEFDHLHRMVLEVVRGDPLCHRLMTIPGVGPVTALAFKTGVDVPERFAKSKTVGAHFGLTPRKFNSGEIDVNGRISKCGDAMVRMLLHEAANALLTRCTRNSALKAWAMRIAKTRGKKRAKVALARKLAVIMHRMWLDGSEFRWSDKASAATH

SEQ ID NO: 398439 - protein, 355 aa, unidentified
MESTKYVGMDVHEQTISIAVMNSAGKLIMESIIETKAITILQFIQGLRGDLHVTFEEGTWAAWLYDLLKPHVTKVVVCNPRKNALLKEGNKSDRIDARKLAELLRNGSLSAVYHGENGVRTLKELSRSYLTISKDLGRVMNRVKALYRSWAIPCAGTQVYAPRHRPEWLSKITEAGVRRRAEHYYQQLDALQALRHEVRKDLLVESQKHHATKLLRQVPCIGPIRAAQLVALMQTPHRFRTKRQLWTYSGLGLETHGSAQYRYVEGQLQRSKKPQQLRGLNTNHNHDLKNIFKGAATMASISSGPFHGFYEALLAKGMQPTMARLTLARKIAAITLIVWKKGARFDPQHLKQQAA

SEQ ID NO: 398440 - protein, 350 aa, unidentified
MTLYIGVDFHPHQQTAAWCDTRTGETDTIDLKHDLEGVRQFYSSFCEPGIVGIEASAKAVWFEKMLFETGHKLFVGNPVLIRKRATSRHKNDRRDAKLILDLLLKGEFPAIWRRPPESDQVIEIIGLRQSLVRQRTQCYNRLQSLAHSIGMPKGKMKTIAVQTVLKAAEMGEADSMRREHLFLLIEQLSGQIDKLNEWLKKKAEEKSSIQLLQTQRVGVGFLTALVTTHTLGDVTRFEKTGKGAVNFAGLDPCEDSSAGRVRFGPITKAGSPLLRHHLGQAAMIATRYDDRLKAFYKRLAKKKPKAVAKTAASRKLLVKLSIMLRDSITAEEFDRRGRTVGNARKPHGLK

SEQ ID NO: 398441 - protein, 341 aa, unidentified
MKKFIRIGVDLAKNYFQVHALVSDVGPAVTRKLRRSKMHEFFSQIEPSLIGMEACGSAHYWARELKAMGHEVLLMPPAYTKPYVKRGKNDAVDADACCEAMSRPGMRFVPVKSAEQQATLMLHKTRELLVKQRTMSVNALRGHLSEFGIIAAKGIGRVDELLDLVESNTTLPNAARASAKVLAHALEGLDKAIDDLEDEITNAQAQNEMTRLLYKVPGIGKIIASVIAASVPDPSVFKSGRDFTAWLGLTPRQNSSGGKQALGAITKQGNRYIRKLLVLGATSLLNVVGKRKGALRDWIVGLLAKKPARLVTVALANKLARILWAMMKTGESFRTEMFAKA

SEQ ID NO: 398442 - protein, 440 aa, unidentified
MDEKDLIRVEKFRQLKREIRGSEAYLIVGIDVAKDKHHAFFGTATGKTVFRRLVFENNRNGFDKLLDQVKALRVQHGLSKVVFGLEATANYHKPLGEHLIRSGESVVLVSGGAVKKNRELMDGRWDKHDDKDAANVADLVSQGKCLFYEHPEGALRELRDLLSLKRRLKRLEQGHRVRIRNHLVAKYFPELDRYYEQSEKVSLAVVRWCLDPSVIAGLEYGKFMQLVAPGRERLYQGNRLPLIWKMAGDSIGCEAGPEVEFEAQVMVEGLKQIRESLRAVEERIEEACSQFAEYEFLLSLPGFGPDVSSKVLGAIGNPFRFQTGKQVLKLAGYDLSAERSGKTSEGATPVISKKGKGDLRYALYQAALIASVRSRPFMAYYARQLKGREREPGIKTKMRVKLAAKLLIIAWTLMKKKEPFDPRQVRGEFPSLAAGDGRES

SEQ ID NO: 398443 - protein, 426 aa, unidentified
MKFNTQNAKITAITEKTLVIGIDVGSETHFARAFNWRGYEFSRKPLEFGNTEEGFETLRTWIMELKEKHGMDKVIPGMEPTGHYWFNLGKFLQDKGMRPVHVNPHHVKKSKEMDDNDPSKNDRKDPKVIAGLVNEGRYFYPYIPDGIYAEIRALSGLQVLARSEITRLKNRIARWFSIYFPNYKDVYGNVGAVSGLMVLKEAPLPEDIVKLGVDGVNRIWRDAKLRGVGLKRARTLVTAAEHSVGSREAQEAARIELRILLADYERYTAREKELMALIEEKIGEVPYVDKLLEIRGIGLKTVIGFVAEVGDIKRFDDPKQLQKLAGYAIVRSQSGKHKGESHISYRGRKRLRYVLYEAAVSVVSHSPEFRSIHRYYTTRDRNPLKKMQSLIAVACKLIRVFYLILQTGATYKAEKMMEDIRRPAAV

SEQ ID NO: 398444 - protein, 320 aa, unidentified
MAMQVIHPLIGVDVAKATLAIAASEAQDVMTLANEPKVIRAWLKTLTSPACLAVEATNLFHLSLIEQAHALGHAVYVVDGYRLKQYRESIGGRAKTDVTDARLLRRYLKNERQDLRPWSPPPKGYALLQRLLRRRAVLTQAKTTLRQSLACLPELKTATRALLRHMARMDALIKKRIGQALIDLQWQAQAKRCQAIEGIGPVTSAALTMIYHRGAFVGADAFIAFMGMDVRVRDSGTFRGRRKLTKRGDPELRRLLYLAAMSARRSIIWQGFYQRAIARGLTPTQALVALARKLARIAFALLKTDSEYLPKLPQTTCMQT

SEQ ID NO: 398445 - protein, 343 aa, unidentified
MQTVTTIGLDIAKSVFQVHGVDDAGQVVIRRQLKRRAVLAFFQKLPPCLVGIEACASSHHWSRELQALGHAVRLMPPAYVKPYVKRQKNDMADAEAICEAVTRANMRFVPTKTPEQQGCLMLHRTRHLFIRQQTAVINSIRAHLAEFGIVAPVGRKGVMELLQVVADPSDKRVSEVTRACLTALGNQLLSLKEQILEFDRMIMAWHRSNEPSKRLRYIPGVGPMLATALVASVADPKTFRSGRNFSAWVGLVPKQHSSGGKDRLGSISKQGDRYLRSLFVAGALSVIRYAKIHGTKHRPWLTALLARKPTKVAAIALANKLARMAWAMMARGERYRNPVALAA

SEQ ID NO: 398446 - protein, 400 aa, unidentified
MLLFFEVITMIFVGIDVAKDTHYAAVSDDSGAVLVKPFAFHNNAEGFCLLLKKLSEFDRSKLLIGLESTGIYSENLICFLYESGFRLAVINPIQTATLRKTAIRKTKTDKVDTMLIIKSLMVNSYRLYSQRDADSLKLRTLCRFRQNLKKSKARLKIQLAGYVNLVFPEFGKFFKSGIHIAASYALLKKYSSPKEIAALRTSTLCTLLSKASHGRFGKDTAEALKSLALSSVGVKNPYISIQIAQTIAQIELLEQQFKDLNSAIEEAMESINSVLMTVPGIGAVNAACILGEIGDIKRFSKPCKLLAYAGLDPTVRQSGQFTAKSTRMSKRGSALLRFALINSAWQLTLNDTTFKAYYDLKRSQGLNHYGALGHVAHKLTRVIFKLLTSDTPFNPAKLVA

SEQ ID NO: 398447 - protein, 426 aa, unidentified
MSVRDYNKQVAKRQRIKSTTLVVGIDVGKAYNAVGFMNKEGKVLGSCAKVYNSREGFEQFLKMVEDLKARYGLKDVLIGMEPTGHYWRKLAYFAKEHGYEVRFVRTTALKHYRELDESASAKSDPRDALTVTNITREGKYIDTVIEDGGLRQLRTLAKARERLLRYSVSAKNSLHAALDDYFPELHELFWSMGSRSLWAVLDRCPFPEDVRSIKVSTLKGLIVQSSRNRAGSLQKAKALYQAATKSIGLRPIGRADRYRVQICLEEVKRRVLTLKSMDQQMKSMLKEIPAAPYLLSIPGIGALSAAVFLGELGDPAHFHHARQIVKYAGYDPQESDSGSWVSRRFISKKGRWLMRKYLFFMSMRVVVLTHYFKAYYERKLETKNRVGQLPRRKEILCAVAIKLIKVIFALLRDKRNFEDTVAYSVG

SEQ ID NO: 398448 - protein, 372 aa, unidentified
MKKRSSSRQNSKPAMKAKRAQQSVTIGMDLGDKTSRYCLLSDEGEILREGQVATTKAGMTGTFGRIGRARIAIEVGTHSPWVSRLLRSFGHELIVANPRQVKLITESSRKDDRLDAQTLARLARIDPQLLRPIQHRSEKAQTALMVIRVRAALIAVRTSLVNTARGLAKALGERLPKCDADQMGVLRAESLPPKLRQVLEPLLKEVESITEKIKDSDREIEQIARKDYPETALLQQVGGVGPLIALSFVLTVEDKGRFQKSRDIGCYVGLRPRRSDSGQSQPQLRISKEGDPYLRTMLVQGAHYIISRRGPDTDLKRWGLHLAESGGKRGKKKAVVVVARKLGILLHRLWITGEVYEPLRNQNLRTGRKKAA

SEQ ID NO: 398449 - protein, 322 aa, unidentified
MQGKVLPGRSAGEEVYVGVDVCKDGLDVYLHPIGLKVRVANTRDGIKRLKRQLAIYNVVLVVMEATAKYHRLVQRMLHVVGFRVAVINPLRSRLFAEALGQLAKTDPIDARMLALLGESLSPQETPPVPALIEELQEIVRARQEAAEELTALKNRRGASQVAFVQRELARRIKGLESHNERLEDEIVRRIQSDPSLSHRYRILVSIPGVGLITASVLLVGMTELGALSGKAAAQLAGLAPIAWDSGEKDGRRHIKGGRGFVRNALYMASRAASRCIPHLKAFYERLATTKPDKVAITAVMRKLIVLANTLIKEDRLWMAARP

SEQ ID NO: 398450 - protein, 450 aa, unidentified
MWRKGKIKKTGTPTFQCMNPNAAGVDVGAMEIYIAVPADRDPQPVRCFSTFTEDLHAAADWLMASKIETVAMESTGVYWIPLFQILEERGFTVLLVNARHVKNVPGRKSDVSDCQWLQYLHSVGLLRGSFRPDQEVCTVRSILRHRDSLVQMAATHVQHMQKALDQMNLQLHHVIADITGFTGLAVIEAILAGKRDPHALAALRDRRIKASADTIAKSLVGDYRREHLFTLGQSLKAFRHYQELIGACDREIEKSLETFESKVDPESPLPKSLTDVKRLKGDPRFELRTHLYRVFGVDLTQIPGVNVLTAQTLLAEIGPDLSRFASAPTFTSWLGLCPDNRVSRGKVLSVKTRKVKNRAATALRIAATGLYRSQSYFGHYFRGMRAKLGAPKAITAAAHKIARIVYLMLTTRRPYEETIWVKNEAANRVRVEARIRKQARDLGFQLVAAS

SEQ ID NO: 398451 - protein, 388 aa, unidentified
MNRILKIGMDVHSTNYTLCAMEPTIGSEDRVFGEVQVAPDYKEVICFIETLKLKLGLNDDYSIECGYEAGCLGYTLYHQLTNAGIKCVILAPTTMLTQQGQRIKTDKRDARLIAQCLCYGGYHPVYIPTGEDDAVKEYLRMRDDHKLALKKLKQQINAFVLRHGYQYSGTKWTIKHVTWLKKLELNPMYRETLNEYMASYEEQEAKIERYDKRIEEISAEVHYKENAEKLGCFLGIRTHTALSLIVETGDFKRFAKGNTYAAFLGLAPGEHSSSSSINRLGISKAGNTHLRCLLIEAAKGICKGAIGHKSKALRTRQSGQSAEVIAYADKANTRLRSKYYKMIRHGKKKNVAVAAVARELACFIWGMMTGNISIISGGSTSVPAVSQG

SEQ ID NO: 398452 - protein, 353 aa, unidentified
MKTKTESGTGLPTIIGIDIGKEVFHLVGFGADGKITFRRKIRRLGLKDAFERLAPCIVGMEACLSAHFVSRTLRALGHDPRIIPAIYVKPFVKGQKNDYNDAEAIAEAALRPNLHFVQEKSQDQLDLQAYHRVRSRLVSRRTATINQIRAFLIEQGIAVRAGPRALRNSLFAILENRKDEISPRMARLILDLYQDWCHLDERIDAVTGEIEELSRVEAKCQRLMSVPGIGPVISTGLVAAIGTGEAFDRGRDFGAWLGLVPRQYSTGGRSVLGRISKRGSKYLRTLLIQAAKVLLMRPHNWSRYSFGAWLKTASDRLHRNKLAVALANKLARIAWSVLRHDKAFDTHLETAAI

SEQ ID NO: 398453 - protein, 344 aa, unidentified
MDHFAGLDVSVKETSICIVDDAGKIVREVKVASEPEALLAVLKNPAYHFKRIGLEAGPLSQWLFSALAEAGLPVICVETRHMQAVLKAQINKTDRNDARGIAQMMRAGLYRPVHVKTIRSQKLRMLLTHRKLLQSKAIAIENDLRGTLRNFGLKVGMVGKVKFEARISELVENLPDLAVLVEPMLIVRRTLREQIVILHRRLLAIVRDDEVCRRLMTTPGVGPVVALTYRATVDVPARFRKSKAVGAVFGLTCAKYQSGEVDRNGRISRCGDEMMRVMLYEAAQSMLRSKKWSWLKAWAMQIARRRGMKKAIVALARRLAVIMHRIWVDGTEFRWTRERATAAA

SEQ ID NO: 398454 - protein, 342 aa, unidentified
MYYIGLDVHKKTISYCVKDASGRVHQEGKLGATRCELDSWMRTLPQPWTVAMEATIFTGWIYDHLYPHATQIKVAHPLMLRAIAAAKKKNDRVDASKIADCLRCDFLPECYMAPTEIRDRRRTLRYRYLLVRQMVQTKNRISGLLMETGVTHNKQRLHKVGYFRELLASNEEVSESIRPLLRLSRDTIARLQKTERALVSSLQRDPLLTERIKRLRTVPGVGPITALTWALEMGEISRFPSIRQAISYCGLCGDERSSAEKSIRTPISKQRNKNIQFVLIEAAKLAPRQDHDLAMLYAREKEKGNANRATLAVARKMVAYLLAVDRGKRDFLPVEHGSNAAA

SEQ ID NO: 398455 - protein, 346 aa, unidentified
MKQYAGIDVSLESSAVCVVDAQGKIVREAKVLSEPEALIAWFAGLGAPMERIGLEAGPLSQWLYAAMAKAGLAVELLETRHVRAAFKTMPVKTDKKDARGIAQLMRMGWFRPVHCKSLPAQEVRAVLTARKLLQSKLHDVEMSIRGILRGFGLKVGPTTPKTYAARVRTLVDGHPTLEAIAEALLKARGVLADELRGFERRVRKMARDDERARRLMTTPGIGVLVSLTYVAAIDETDRFRSSRMVGAHFGLTPKKYQSGETDYTGRISKIGDVGVRTALYEAAHVILTRPVKGSDLKTWALGVAKRAGMRKATVALARKLSVVLHRMLRDQTDFVAHRVAPVTAAA

SEQ ID NO: 398456 - protein, 402 aa, unidentified
MDGATPARVAGLDWASRLHMVCVLDPDGQVRARFQVPHTGKDLRGLTRRLAKLAVGRVAIERPDGPVVQALLDAGFEVVVLPSRQVKHLRGRYASAGNKDDRFDAYVLADVLRTDGHRLHPLRPDSPETAGLRAVSPARKQLVDQLANQLRANLEVAFPGAAGLFAEVDSPIALRFLAQFSSAERAAWLTQARLGGFLRRVGYCGRVPTAELYQRLVHAPAGLQGSHGDACAAVTLSLVATLRAVRAQIEELDGEILERLAAHADGHIFTSLPRSGRVRAAALLAEIGDCRQRFPDPTALECLSGAAPSTRQSGTHTTVTFRFACDKKLRQAVMDFAGDSRHANPWAAHLYNQARARGHRHPHAVRILARAWLRVIWRCWQDGTAYDPARHGAYQRLIAKEA

SEQ ID NO: 398457 - protein, 412 aa, unidentified
MKDLLEISCGLDVHKEKIVACILTGPLGKPTRSEIREFSTLIPDMIALRNWIVSKNCHHVAMESTGIYWMPIYEILEDAFSGDITLLVVNARHMKNVPGKKTDMRDSEWISTLLRAGLLNGSFIPEKRIREFRDLNRYRKSVIRDITSQKNRIEKFLQSSGFRLSSFISDIFGASGRNIILHLVEHGQIDKTALDSCLKTKTRNRIDEILMSVNGTLSEHQKAFLRILMTHYDSLKKHLAEIETSLEEDMAPFALQVEQLNSIYGISTTASCAIIAEIGIDMNPFKTAEHICSWAGLCSGNNESAGKRKSTSVTKGNPYIKSMLCEIAWVIAGKRNTYLSAWYWRIKQKKGAKKAIVALARKLLVIIYTMLKQGTLFDESCFETRRKHCEQKQLSRYIRELEKHGYHVEAQS

SEQ ID NO: 398458 - protein, 400 aa, unidentified
MKATSFSGFLGIDVSKDKFDAYCIDINGEKHFYLSCPMDRTGFEKLVSHLEALSIPQESLLIGMESTACYHINLFSFLLAGGYTAVIINPLLISNFVKMQLRKTKTDKKDALVIAQFLLMHRDKLAQTSISPHVSDLRDLSRQRESLLSQMTALKCDMKRILTMTFPELEKLTGVFTKSILQLLSRFPSAHAIAQAEPAEINQLLMDHSMGRNSAKTTQAIIQAARSSIGTTSPSRELILKQKADVLIHLEGHLKELTALMIELCRSDMGDDIDIMTSLRGIGEKTATNFLVEMGGDIQKFKDHKKLIAMAGLDPAIYQSGKHDGHGRITKRGNRHLRRVIWLMTIRVIQFNDCFRQHYNKRRQDGLPFKKAVLATAHKLLRVIYAMLTQRTTFCYAANS

SEQ ID NO: 398459 - protein, 327 aa, unidentified
MMFIGIDISKEKIDLSWLRDQLTNKIKTKVFKNKHQDFEKIEKWLLNTTKSVASELVITLEPTGVYHEALMYFLHEQGFNIILANTGKAKKYADALNIIHKTDKSDATMLAHYGCAKHAVVDYWQPEALEVRELKALIRRLDALESNRQRETNRLEASEFSNVSARVRQSIKVTIAFLDDEIKQLKSDIDDHIDNEPGLKRNRKLLESIPGIGHVLSRELTYLFAAKKFNKAKEAAAYCGLIPRHNESGKLKGRTTISKLGPARIRCKLYMAAIVAGQWNKRIKRHKLTLINNGKTPMQAVCANMRKLIHICFGVIKNQEEFKLQES

SEQ ID NO: 398460 - protein, 428 aa, unidentified
MNVVDTIRREQFCQIKDEIRRSDDFLVVGIDVAKHKHHAFKGSATGKSLLRRLVFDNSLEGYCKLLERCKAIKAQNAFSKVVFGLEPTGNYHKPLARHLIKCAHHVVLVTGKAVKNNRELLNGRWDKNDTKDAANIADLVSRGKFLYYDYPSGSISQLRQLLSLRRRLKREEHSLRMRIRNNLLAQYFPELDAFYKACERESLAIVRWCLDPSRIAGMEFDDFFLMVTRSKRGIAQKKRLEKIHRLAVESVGCRMGPAAEYEAALLVQKLEQVRQQLDQIKDLMEDICSEFDEYRWLLTIPGFGPYICARILASIANPWRFDSSNQLLKLAGYDLGASRSGQRSDQAVAVISKRGNSELRYALYQAAHVASIRNRDFICYFTRMLRGRERERGIQTKMRVKLAAKMLKIAWVLMKKREAFDPAYLIIQ

SEQ ID NO: 398461 - protein, 349 aa, unidentified
MTIVEDRPVITGGVDTHAEVHVAAALDPLGGLLGVREFPATATGYAQLLDWLGGFGAVALVGVEGTGSYGAGLARHLAAAGVRVVEVDRADRQDRHRQGKSDPLDAVSAARAAQSGRASGAPKGRDGAVEAIRALMVAKRSARAERTQAINQARALIVTGPDELRARFAGHRPAQLVEAIAALRPRPGDVPGYATRVALRELGRRAQFLDAQLDRLDELIGPLVTGRAPGLLALHGVGPDTAALLLIAAGDHPERLRSESSWAHLCGAAPIPASSGKSSRHRLNRGGDRQANHALWRIVITRLGSRPGHPATRAYVERRTKEGLSKKEIIRCLKRYVAREVYHQLRGGA

SEQ ID NO: 398462 - protein, 343 aa, unidentified
MQIRSIGIDLGKTTFHLVALSDDGKVLLKKKFTQKQLITFTANLQTSLIGMEACSGAHFLSRALRAQGHDVKLIPAQFVKPFVKSNKNDFLDAEAIAEAVDRKNMRFVPIKTDDQLDLQALHRVRDRLIARKTAVINQIRAFLLERGVVFAKSPIRLRERMPDVLENADENITPRMRNLLSSLWEEWKELEQQLDLLNLEVEQIASSDEACRRLREIPGIGPLIATAIVAAIGNGAAFHKGREFAAWMGRVPRQHSTGGKAMLLGISKRGNQYLRKILIHGARSVVLNSKRDRVQMGQWMSALEARAPRNVLVVAVANKLARIAWAVLSSGNEYRAFPAPMAS

SEQ ID NO: 398463 - protein, 412 aa, unidentified
MDVIVDRCAGLDVHKKTVVACVRSPGAGRSKRAVEVRTFETFTDDLVKLREWLMESGVTEVAMEATGVYWKPVWDALEGHGLEVLLVNPAHIKNVPGRKTDVNDATWIATLLECGLLRGSFVPPMEIRELREITRYRRQLTEERSRETLRLQKLLEDAGVKLSSVASDTLGVTGRAMLEALIDGERDPAVLAALAKGRLKVKSELLARSVPGRFNDFHAVMARELLDHIDYLDLAICRLDGQVDVLMVPFVGARDRLDTVPGIAKRCAEIVIAEIGVDMGRFPTPGHLASWAGLCPGNNESAGKHKSTKTRSGNPWLTSALVEAAWAGIRTKDCYLAVRFQRIRKRRGEQRALIAVAHTLLIICWHILAEDTIYQELGPDYLAGKDQPDRRRKHLVAQLEKLGYSVELAPVA

SEQ ID NO: 398464 - protein, 343 aa, unidentified
MKTSILGIDLAKNYFQVCGLNQANKVQFNRQLTRNKLPEFMQQQPPTLVAMEACSSSNYWARKFVEMGHTVKLVPAQHVKPFVKGNKDDKSDAIAICEAAQRPNMHFAMIKTHVQQDTQMLHRIRELHVKQTTAIANQIRAYLTEYGIIVQKQIAPLLKAMPSILSDEDNDLTPMARQLLTAHYQSLLETRDKAQELKQQMEYSNTHNVYCQRLLALPGFGPIIASALYASIGNGSQFSKGRQMSAWLGLTPAHFGTGGKNTNVDTTKRGDHYLRTLLIHGARTVVSWTIIKDKDDPLSRWIKRLVERRGKRKTYVALANKLARAAWRVLQGENYDARKLSAQ

SEQ ID NO: 398465 - protein, 344 aa, unidentified
MEYFAGIDVSLEQSSVCVVDGTGKIVREAKVASEPEALVGFFRGLETGVTRIGLEAGPLSQWLYAGLTTAGFEVVLLETRHVKAALSAMVIKTDRKDARGIAQLLRMGWFRPVHAKSPAAQEVRALLVARKLLQTKLLDVEFSIRGILRGFGLKMGEVSKGRFAARVRELAAGHAMLERITEPMLRAREALRTEYARLHGEMLAIVKPDPVCRRLMTVPGVGALVAITFKSAVDDPGRFTRSRVVGAHFGLTPRKYQSGETDVTGAISRVGDGMVRMALYEAAHIMLGRVTRFSSLKRWALDVAKRRGLKRAKVALARKLATVLHRMWVDGTTFHWGKQAVAVV

SEQ ID NO: 398466 - protein, 349 aa, unidentified
MSSKTAPSTITVGLDLGDRFSRYCEMDLKSGVIAEGRLRTTDDALARQFAGREPLRVVMEVGTHSPWVSRLLERLGHEVLVANARRVRLIYANDAKNDKVDAETLARVGRLDPKLLFPIRHRGEQAQAALACLRARDCLVRARTQLVNHVRGAVKAWGGRLPATSTPAFVRKAAPHIPETLRPALQPVLGMIETLSQQIRAADRQLESLARESYPETERLRQVAGVGTITALCFVLTLEDPDRFMNARSVGAYLGLTPRQRDSGRAHPQLRITKRGDAMLRRLLVGSAQYILGPFGPDSDLRDWGLRLAQRGGKNAKKRAVVAVARKLAGLLFTLWTTGADYEPLRQAA

SEQ ID NO: 398467 - protein, 386 aa, unidentified
MNTITKTASTTTIVAIDLGKYKSVACVHDQGSGEYRFTTFDTSRAELGKLLAKEQPAVVIIEACLLAGWVHDLCGQVGVPCRVANTASEAWKFKHLKRKTDKDDALRLAQLHLLGQLPTVTLPPPAVRQWRSLIAVRQALVGRRVAVQNRIRAVFVAQGLPVPRGARAWSATGLAGIATQAKALTECGPDELWRGVLDLALTEHRQVCELVAQAETRLDALGQQNADVILLQTTPGLGPRTAETVAAYLHDAPRFQKAKQVSAYSGLVPRQHQSGELDRRGRISKRGPALLRKLLVECAWCMIRYNAWARRVYQHLTGGGQRRKKQAIVALARKILVRCWAMLRDKKPWHDPETGPKQPLPPSKQRRQAEAQRRRQAQQQAALATS

SEQ ID NO: 398468 - protein, 351 aa, unidentified
MMIIGVDYHPGFQQIAFLIEETGECGERRLNHSEGEAENFYRDLKQRGISVRVGMETTGYSRWFERLLAELGFEVWIGDAAEIKTRRAKKQKTDRQDAQLLLKLLLEGRFPRIWVPNPENRDLRQLLWHRHRLVQMRTRIMNQLQALAMNENRCWKGKLWSERGRAELEGLPLAFWASRRRQELLELLDRMNPTIEELTAAAALEAKKRPEALRLMTHPGVGPLTALAFVLIIGTPERFGCAKQICNYVGLIPSEDSSGGRQRLGHISKQGSSLLRFLLVEAAQAAVRCNADWRRRYRHLVMRRQRNIAKVAMGRRMGVRLYWMWRNGREYSPSLEFGSHAGELGTGNGVQ

SEQ ID NO: 398469 - protein, 412 aa, unidentified
MDNEVFVERCCGLDVHQATVVACLRTGPAESKPRKEIRTFKTVRCELEALRDWLEAEGCTTVVMESTGIYWKPVYAVLEGHFELIVGNAERIKNVPGRKTDVSDSDWLSYLGRIGLIKKSLVPPRPIRQLRDLMRYRWKLMAATASERNRLIKVLESANIKLAGVASDGFGVSGRAMLRALIEGKASPAAMAQLARGRMRSKLAELELALDGCVEEHHRFLLALQLRRIEAAESDLAELDQRIAAMLAPYHWALVLLMQIPGVDWVIAATIIGEIGCDMSVFQTAAYLASWAGVCPGNWMSAGKRLSGRSRTGNVFLKTALVTAAIAAAKKRGSYFKDKFHRLCARRGKMRAAVAIAHKILVTAYQMLKTKAPYQDLGATYLDHLQKRRILRNLTHRIQGLGYSVTLQPRAS

SEQ ID NO: 398470 - protein, 413 aa, unidentified
MDVVHERSAGIDISKRDAKVAVRVPGKRSGSYSTTVKTFGSTTAQVVALVDYLLDQRVTTVVMEATSDYWKPFYYVMEDKLPVMLVNAKHVRNIPGRKSDVSDAAWLAQLGAHGLLRASFIPAEPVRHLRDLTRARSMAARDRVRIVQRLEKFLESSGIKLSAVATDLTGVSARAMLEALVAGERDPKVLADLAKRTLRHKIPALVEALQGRFTEHHAFMVSQYLAQLDTQQATIEALTARIETVIAPFAQARDLLVTIPGISQMVADVIIAETGADMAVFPTPGHLASWAGVCPGMNESAGRVKSTKTRPGNKYLKGALGMAAFTAARLNNTYFSAKYRRILVRRGPMKALVAVEHAMLTAAWHMLTTGELYKEPGADYFSRHTPGRAKTRALKQLESLGYHVTLQPLHQTG

SEQ ID NO: 398471 - protein, 418 aa, unidentified
MVISLAEKRRICMKQIVSVGIDVSKGKSTVCAMIHPNTIIKESFEVLHTVEEMSMLADYIGSLDGEIRIVMESTGHYHLPVAQFLYQKGFFICVENAYIIRQFSRIMLHGAKTDPLDAKKLAKYGLAYWSELKPYKFHPSCYTELSLLSKQYQTYIKLLIAAKQNVIHLMDEMLPGFKEALDTASSVQFSKVKYVDFAKEFYHVDMIKSMGKEIFRENYKQWCKEKGYRFQSEKADELFHLAEDGIPTLPTEFPSTRLCMEVATEQVSQLGYALEQILSQMQNLAKTLPEYQTIRQMGGMGEKLCVRFIADIGDVRRFHNGKALVAYAGIDAPPYQSGQYTGTKRRISKRGNSALRKTGYEVMKSLKSHPPKTDTRVYDFIIKKENEGKSKKQAKIAGLNKFLQIYYARVIEIYKNIV

SEQ ID NO: 398472 - protein, 312 aa, unidentified
MDAIYVGIDVSKDRLDVAMRPGGESFAVSRTGAGIDELIERLKPLSSKLVAIEATGGFETVVAAGLAGAGLPVVVVNPAQVRAFAQALGKRAKTDPIDAAVIAHFAEATKPQLRQLPDAATQLLADLVARRRQIVEMIAAESQRARHVTASRLKKSIARLRKALEKELSELDDDISDHVRGSPAWAEKEDLLASVPGIGPTIARTLIAELPELGSLDRRQIAALAGLAPWTRQSGQWRGKSFIGGGRSSVRRVVFMGALVAARFNPQLKHFRDRLVAAGKPKLVAIIAVARKLLTILNAILRDKTPWQPKNA

SEQ ID NO: 398473 - protein, 357 aa, unidentified
MKIIGVDLHTRQQTIAMLDDQTGELVEKELSHEGNQVREFYSALPKPVLVGMEATGSMHWFLRLLEDLEIDFRIGHPAKIRAAEPRRQKNDRRDARLLLTLLAEKRFPAIWLPSREQRELQILLRHRDQFVRLRTRVQLSLQAVALSHGLRRGHALWSRRGQHTLRALPLARQAGMQRDALLALHPQLQGPIDELDREVEKQAQQRPQSQRLMTHPGVGPITALATEVFLGDPHRFADSKSVASYVGMIPSERSSGGRQHCGRLSKQGNSLLRFLWGEATIHAVRRDAELRRFYRRKLMQKGMGKARMAAARKLGIRLWIMLRDEIDYAEFCRRGQLRRQGSGAACAGMPGAGQWSN

SEQ ID NO: 398474 - protein, 520 aa, unidentified
MVDRYPVRKPGSEFCAQVNGNGRQFYSWLIPIRRVLFASQLGRCLQRKGKSVSPTKQTEAKNNVPRRKKRGWCQQDRPVIQSNAAGIDVGAREMYVAIPPDRDPDPVRVFKTFTADLEALIDWLVERGITTVAMEATGVYWIPLYQMLEDRGVRACLVNARHMKNVPGRRTDWHECQWIQYLHATGLLRPAFRPEQDVCAVRTLLRHRNELVRMAAQHVQHVQHMQKALTQMNVHIHHVISDITGLSAIVDAILAGERDVAKLAALRHRSIHADEETIRKSLAGDWRPEHLFTLNQSRQMYANCGINIEACDQKIAEVLGAFEPQVDLTAQPLPPEPGPSRKRRTKRTGDFRFEVRTEAYRLFGVDVTRIPGLNELAIPLFSEVGRDLAPRFPTADHFASWLALCPDNDKSGGKVLWTGVRKINNRAAQMFRMGASSLHHSHSPLGDFLRRMKAKLGPTAGITATAHKIAIIFYTLVTKQVEYDDSIWAKRDEQRQKRFEAKLKRQARRLGYQLVPIEPV

SEQ ID NO: 398475 - protein, 418 aa, unidentified
MQTEFSQYTAVIGIDWADKKHDVCVQDMATGKRRASQVRHRAEDLDEWARSLHRRFGGPIAIAVELSKGPIINVLQKYDFFVIFPIDPSKLANHRKTFTSSGAKDDPTDAEFALDLLSKHTEHFKPLNPQSVEMRTLMTLVEQRRQLMNDRVRITNRLRSTLKQYYPQPLEWFDHIDTLLFCDFIRRWPALSQVRRARRATLEKFFHEHNMNRKALLERRIKAIKSAMPLTMDDAVIVPHRLRALALVAQLEVTLECIKQYDTEIASLAPQHPDYELFDPLPGAGPVFTPRLMVAFGEQRERFNNAAEVQKYGGLAPVTKRSGQSTWIHWRWQCPTFLRQTFVEWAAQTINKSYWAGLYYHQQRAKGCSHQAAVRALAFKWTRILYRCWKTRTPYDETRYLKALQERGSPLLKMAEAA

SEQ ID NO: 398476 - protein, 477 aa, unidentified
MQQTQRSPFARTIPPRGGQLSRKERHKLARQIQSDNVTLEIVHGNAAGIDVGKGTHYVAVPPDRDAKPVQSFDSCTEGLQQMVAWLKKCGITSVALQSTGVYWIALYDVLQEADFEVYLVNARYTKSLPGRKSDVQESQWLMKLHTYGLLPNSFRPPQAIRWLRSYWRQRQNHVRSAATCLHRMDKVLIEMNVRLSSAVTDLSGATGLAIVQAIVKGERDPEKLAAYRDPRVKAKQEEIARQLQGNWQEDLLFRLGQELEAYRFYQTLITQCDQELAKLLRAFPDRSAGVALLEETRKGRRKKKRGNAPQFDLRQLLYLMSGVDLARIDGIDVITAMTVVAEAGYDMSPWPTADHFVSWLRLAPDNRISGDKIIGKGRTPTQNRLSQSLKMAASSLKASKTYLGAQYRRFRARRGPAIAVKAMAAKLARLVYNMLRHGMEYVDRGTEFYEQQQRERRVYALTKNAAQLGFQLVPAAR

SEQ ID NO: 398477 - protein, 358 aa, unidentified
MQRNKISFKGQKIFVGIDVHAKNWEVAIAPEVGIVKRHSQKPSAKELFDFLKKNYPDGDYQAVYESGFSGYSTYYALKEVGIGCMVIHAADVPTTQYEEVMKTDRVDAVKLARSLKAGLLKGNYVPEKQYIDDRSVVRIRKTIQKQLSGYKSRVKHLLHCHGVEFPERFSRKQTHWSRAFITWLMNDVRLMSDTRTSLDLLIRQVEVLRGTLLEATRQLRKMSQTERYKHRHDLLRTIPGIGIIVTMCILTEVCDVKRFHNEKEFAAYLGLIPTSHSSGEKTVHGEKTFRGNKQLGPMIIEAAWITIGKDAGLGTQYFQYKQRMEPQEAIVRIARKLSNIIFSVLKNEKEYVPYQTGN

SEQ ID NO: 398478 - protein, 416 aa, unidentified
MKIVRPICCGMDVHKNIIVATIGITNKKTRITEYIQETFSTLNPDLLNLKQWLINHKCFDACMESTGKYWIPVFNILEDEINIYLTHPKYVKAIKGKKTDKKDSKWICDLFKHDLIKFSFIPPKEIRALREISRYRYKLVGMRSSERNRYQNCMTVSNIGIGSVFSDPFGKSAQAIMKEVLESDIIEDEKILKCIHRSCKNKDKILDSIKHCNIETDQRFKMNESMTHMEELQVHINNCEIEMMKRAAPMFDQFKHITQLPGISTLSAILIISEIGVDMKQFESDKQLTCWAGLAPANNESANKKKSVRISKAGQYLKPLLVQCALGAIKDKEGYFGIKYSRIKKRRGHKKAIIAIARMMLVSIYHMILTGETFNPSDYESFRNPNPPIKQQVLTEESAIEFLKKSGFDVSKLTKP

SEQ ID NO: 398479 - protein, 456 aa, unidentified
MSTRKSKLSSKSAVSFPLVNTHAAGIDIGSRSNWVAIGTSKSSIREFGVFTCDHHEMAKWLQSHGIRTIAMESTGVYWKSLFLILQSYGFEVLLVNARHIRNVRGKKSDILDCQWIWKLHQAGLLHGSFQPDEITEELRIYNRQRQSLIKSASRSISLMQKSLILMNIQLSVVLSDITGKTGQKIVRSILAGERNGKRLAKFADPRVKASKETIAKALTGQWSEHHLFTLEQSWDSYQFYQSQIEACDTKMDMLLANQVVSNGQHDLVYEPEKKKRRTKNATRVAIDQYAYQLSDGVDLMQVDGISHNLVMTLTAEVGLNLKEKFRTSKHFTSWLSLVPNKKITGGKLLSSKTQKNKNRLALAFKQAANAAGRKKNSPLGHFFRKLAHKKGRKLAITATARKLAVIVYKMLCEKEAFNATRMIIEQTKFRTQKLKYIQKTIAKLNIKVDELDFTTV

SEQ ID NO: 398480 - protein, 343 aa, unidentified
MKYYIGLDVSMKRTFICVLNEEGKIVDESSEKTDPHVIADYFSKLGLKEIVVGFESGSLSHYLVTGFKERAIDPICMDARTLSPILALKINKTDKNDARGIAEALRSNMYTRVHCKPQESVERSILLVSRRALINQQTQLKNTVRGLLKSYGIRLGSVGAKKFSCTVMKYLEGREEVVILSITALLSAFDHLIKEIEKIDKKMLEIAGQDKEVQQLMSVPGIGPVTALTYKTEIFDPSRFKDSKSVGAYLGMTPTQYASGDVQRQGRISKCGSNELRSLLVEAGIVILTRSKKWSKVKAWGLKIMRKKGLKKAALAVGRKLAVIMHRMMIEQKEFIYGEPKTA

SEQ ID NO: 398481 - protein, 458 aa, unidentified
MQKLNKNRVLQNVVSMPLVNPNAAGIDVGDTLHAVAIPEGIAAKRVRTFGTMTCDLEAIVEWLSQTGIQTVALESTGVYWKPLFSLLNKKGFEVYLVNARQVKNVTGRKTDEDDAMWLQKLHSCGLLKSAYLPDDEQEALRSLVRYRHTLVQDCSRFKNRMQKSLELMNIKFHTLFADLAGKTSTAFIEAILAGERNPSAFLPLVDGRIKASKEIILQSLQGNWRSEHIFTLRKSYEMHKIYQHHILECDSEIENQLQQYEASVNEGAISTAKEAVNEAAVLVTKKKKQRGAPPFNVRKYLEKIYGTDVMAIYGLSEMGGLEILSEVGNDLSKWETEKHFVSWLNLCPNNKVSGGKLISSKLLKKKPNAASQAFRIAANTLQRSNHWLGDFFRRMKSKGGNKYAVVATANKIATIFYKMVTQKQIFKPLDLTAYQEKQKQSKIAFYERKLIELKTIAA

SEQ ID NO: 398482 - protein, 468 aa, unidentified
MADRREAEKRRALEGLPVVRADVAGMDLGSERHWVCARTADGAGREIADFGATTPELLRMAQWLKDRHVQSVAMESTGVYWIAPHEVLEAAGLEILLVDTRQLARVPGRDKKTDPTDCQWIQRLHSCGLLRGSFRPREAVCMLRTLVRDRSNLVAESGDWVRRMQKSLDQMNVRVHRAVSDLDGVTGMAILRAIAEGERDARELAKLRDRRCRNSEEEIAEQLSGHWREDHLFSLQQALQMYDAIQQRIADYNREILRKLGAMQREEFGEQPAPQVKNPHKAKAIRKRGEEPIREALYRMSGVDLTSIDAIGVETVQVVLSEYGPDLSRFPTEKEFVSHVTLAPRRPMSGGKPVRRKKRNTASTRVAAALRMAALSLRNSGTALGAYYRKIARRIGGDVAVFATARKLATLIYRLLRWGQPYVDEGAEAFETRYQEMRITVLKAKAKQLGYELVQNHPAPSTEEEVTD

SEQ ID NO: 398483 - protein, 345 aa, unidentified
MTQYKRIAIDTSKAVFTLHGIDQQGRPVLRTNLRRPQLIPFFKKLPATHIAIEACSSSHHWAQELAALGHEVRLIPPQYVKPYVKRGKNDRNDAEAICEAAGRPGMHFVPAKSVMQRAQGMVLKVRETLIGQRVALVNTVRGHAAEFGIIAGKGKGKIVPLLSAIEQETSIPLEAREMFVLLGQRIDEIDARIKDVDAKLNAVHKANEISQHLVTIPGVGPIIALTLAVEIDPAMFESGRHLAAWAGLTPKERSTGGKQRMGGISRAGNERLRVLLVSGATAVINAAMRPDSKQMTDWLRALLQRKPRKLAAVALANKMARTAWAMMKSGETYRRQSTRSGTVAA

SEQ ID NO: 398484 - protein, 344 aa, unidentified
MSTIRVVGIDIAKSVFQVCVWMVDGSVAWNKKISRSKLLDTIRQFEPGTLVAMEACATSHFWGRTFASMGYCVRLIPAQHVKAFVRSQKNDANDALAICETAFRPGIHFVSVKTTEQQDIKALRNTRQLMVEQRTALANQLRSLLAEYGFTIPVGILRLQQQLPELIEDASNSLTFTLRRLLSSLREDMQALNERITSLDNEIAALSSQQTVNRHLLTIPGVGPLIAAAFISEVDATQFSSGRELSAWCGLVPRQHSSGGKQRLSSVTKNGNRSLRTLIIHGTRSVMRCVKKRDDSLSIWLQRLEARRGFLKTTVALANKLTRIIWRVLTDGIDFNMQKAVAMN

SEQ ID NO: 398485 - protein, 394 aa, unidentified
MQNVLAVDVAKSKSMVTLVSSCGEVLIEPYEINHSIKDFSNLLNRINKFKLDNISVIMESTGIYHRPIERFFLENNFKVFVINPIYGKMYKRNLRKTKTDKADCFNLVNLFFTNTFKEYIKPKQLYLDLNALSRQYFALDELCVNIKNRYRNLLYLCFPEFEEIFKGNMVYSNVALEFIEKYPHADIISNTRIDKLQNFFKKHNYKSWKSKPLKIKEAASNSYPSIGINDELVSNLSQIARLVNEYQKAIDIIKYKITFLAKKSKYFEPINSIYGIGEFTTSIIIAELGDINRFNNIKELTAYCGLDPSIKQSGKSINVHGPISKSGNKYMRKILYISVSNIIRLTAISKQENDIELYYRKKRNEGKHHYASIVACTTKLLRKILALCKQLDNQ

SEQ ID NO: 398486 - protein, 413 aa, unidentified
MELLYASCCGLDVHKQSVTACLRWRDSEGRPQMQTRKFGTFTSQLEELADWLLQHQVEQAAMESTGSYWRPVWNILERKQVPLILANAQHIKNVPGRKTDVKDPEWISELLQYGLIPRSFVPHQHMRDLRDLTRMRSKVVQDHTRVVNRIQAVLEDANIKLASVVSDILGVSSRAMLQGLMEGRGPGELAQLAQGKMRSKLELLEQALQGHFRPEHGFLLRRMLMQSRFLENQEHALRRAIQNHLNEPERQAIALWDTIPGVNEPVAWTMAAEMGVEVTQFPDANHLASWGAFCPGNKVSGGKRLSGRTRKGNPWLRAGMCEAAWAASRTRHSYLSALFRRLASRKGEKRAIIAVAHSMLIIAYEMLRKNQPYRDLGENYLESLHPAKIANRLVRRLEHMGYEVSIAPSETRN

SEQ ID NO: 398487 - protein, 378 aa, unidentified
MPRGSTRAAAHNRIEEPAMAKARSLVGLDVHATKVVAAVLDAETGQLQTFAMNGETAKVAAFCAGLPRPVRAAYEAGPTGYGLARELAKRGVECVVAAPSKIPRASGDRVKTDRRDAEHLVRLLLAGKLHAVRVPGDEEEALRDLVRARDSVRADLMRCRHRLSKLLLRHGIRFDDGAAWTQRHRDWLATVTLNWPAAQATLLDARGAIEALCHRREQLEREIVAMLPSSPWVVQVGRLRCLRGVDTLSAVGLCAEIGDFERFAHAEHLMSYVGLVPSESTTGQQRRLGQITKTGSGHARRLLVEAAWHYRSRPSIGRALTDRQHSQPPAAIAVAWSAQRRLHRTWTRLEARAKRRTLIAVAAARELAGFAWAITQIE

SEQ ID NO: 398488 - protein, 355 aa, unidentified
MKQYIAFDVHKNYTWATVEREDGHKLLEGKIAHQHGALKAFLGRCQAGGEVAVETVGNWYWVADEIEAAGFTPLLVNARKAKHRMDNGNKTDKLDNRGINMLQRCGTLPTVWIPPAELRDQRELPRTRMTLVRQRTQVKNRILMTFGKYGWGSNDVSDAFGKKGRALLEQQLTYLPTHTQAAVRCMFTDLDCVNAQITALEARMREVFSPLPEHQLLDSLPGVGQLLAIVIWTEVGTMDRFGRPANFASYSGVVPRVISSGGKTRYGKLRVDVNRYLKWAFLEAANSIVMNAAKQPDRHVTQLYRRIKQKRGYQKAVGAVARHLAEATYWVLTKKESYREPASPTGKQARYAHES

SEQ ID NO: 398489 - protein, 338 aa, unidentified
MGKLKLIAMDTSKHIFTLHGVDERGNVVLRRELRRNQVEAFFAKLPPTEVVLEACGSSHHWGRRLTALGQRVRLIPPQYVKPFVKRGKDDDIDAEAIGEAAQRPAMRFVPVKSAEAQADAMMLSVRELLVKQRTQLVNALRGHAAEFGVIAAKGTQNVAALLERVTADPAVPAVAQAMFGELGAAIAAVSARITEQDRKLARLHKTNPVSQQLAKVPGIGPVSALTLALTVDARQFQSGRHFAAWLGLTPKQHSTGGKHRLGKISRQGNERLRALLVIGATSVVKLVKPEQAKGSAWLQALVQRRPRKVVAVALANKMARVVWAMMTSGEAYRRQPAG

SEQ ID NO: 398490 - protein, 366 aa, unidentified
MCPTLPLESSLAVRQEVVLGVDTHRDQNTAAVVAIDGRLCGSGEFPTTTQGYADLLAWASALGEVERAGVECTGSYGASVSRLLQSQGIEVLVVNQPDKRARRSRGKTDAVDAEAAARAVLSGRASAIAKTGDGPVEALRVLKMMRDSAVHARTKAVNQLKATMVTADPALREALSGLGAKALVRRCSTLAEPTQDGISQRATVYVLRGLSQRILALTAEANQAEAHMNELLQQHAPDLIARTGIGPDSAAALLIVAGDNHDRIRTEASFAALCGVSPVEASSGNTQRRRLNRGGDRRANAALYRIVLSRLRWDTRTQAYMTRRLAEGRTRREIVRCLKRYVAREVFALIAGSTLPVVSTTQPRAA

SEQ ID NO: 398491 - protein, 344 aa, unidentified
MDHYAGIDVSLATSAVCILDAAGRVVREAKVGSEPEELAAFLTGCGHRLIRIGLEAGPLSQWLHAGLVRAGLPAILVETRHVKAALSAMRVKTDRNDARGIAQLIRLGWFRPVHVKAVPAQEARLLTARKQIQTKLLDLEGTIRGLLRGFGLKVGPVGTAGFERRIRELVAGQSTLERVMEPMLRARQALRAEYANLHRDLLRVVRTDDVCRRLMTVPGVGAVVAITFTSGVDDPARFRCSKDVGAHFGLTPRKYQSGETDRTGRICKAGDAMVRCMLFEAANAMLTRVARFSSLKAWAMRIASRRGMAKAKVALARKLAVVLHAMWVDGTEFRWGREQATAAA

SEQ ID NO: 398492 - protein, 338 aa, unidentified
MQTGQTVLTYTLFVGVDIAAQTAMVATQRPGAKASRSLTIEQTPEGYTSLLHQLQATGSVPGQVLVVMEATGSYWISLATRLVHEGFVVSVINPAQAHHFAKALLKRAKTDAIDAQTLAQLAMILQPEPWTPPPQIYYALQQRLAQRDDLLNLRQQVRNQLHALVQHPEVIAEVRARMESLLATFASQLTEVESEITAALSQDSAWAAAATRLQSIKGVGWVTAAWTLVTTLNLTSCDTVDALTAYAGLAPMPRQSGSSVWHRPSMGHTGNGRLRTACYMATLSAAQHNPVIKAFYTRLREVGKPEKVARCAAARKLLHIAWAVVKKDQPFDPNYALG

SEQ ID NO: 398493 - protein, 433 aa, unidentified
MQDVEDEPLFAERVAGLDIAKAAAEVTVRVPSDAMAGRRQQETRTFGTTRAELESLGDWLRSWGVTKAGMEATGDYWKPVFFLLEARGFDCELYNAAQVKALPGRPKTDRADSIWLAKIVERGMICSSFIPPEPIRRLRTHTRYRRHLTQARTAEKQRVEKLLEDGHLKLSSVISDIHGVSGRDMLNALAAGQRNPKALAQLARGSMRGKVRRLEEALDCSFFTGEHAAVLAMMLTVIDHYTTQIDALTARIEALIEPYLHQVGQLDAVHGIGTVCAQDIIAETGTDMTVFPTAAHLVSWAKWSPQVSQSAGKRKGSNATGRGNPYLSAALGEAVIGASRTYSFLGARYRRMVRRMPKKKALVATGNSMLTIVHALLADPEASYTDLGADYYEQRMHARRQARSHVKSLERLGYQVTIQALNPGTGELLAPAG

SEQ ID NO: 398494 - protein, 352 aa, unidentified
MHYIGMDSHITTLDFAVVNEAGRLVKAHRVATSVNGFMEFVKTVPPPRTIYMEEGTLAAWALETCVRFREKLVITDAKKNHWIGSSGQKDDAIDALKLAQLARGGYIKEIHHPVGQRRRFRELMIAYHDAVRSTTRIKNKIKARFRQNGIQCTGTTVYSETHREEWKGKLPQEATLLLILDGLWRQLEQSEQIEKELLAAARAQAKHYPEIKHFEALPGIGFISAATISAILENPNRFADKRKVWMYAGLGVMTRSSGGKTYTEKLSTDYNRLLKYTLKQAAEAATQARDNSFRRKYLDMTLLRGIAPHRAKLTIARDMLATMWAMWRKGEKYSPEIREKQPANRARLATVF

SEQ ID NO: 398495 - protein, 389 aa, unidentified
MKIYVGIDIAKLNHFAAAISSDGEIIIEPFKFTNDADGFQLLVSKLESFDKNSIIIGLESTAHYGDNLVRYLVTELYQVCVLNPIKTCQMRKNNIRKTKTAKVDIYVIAKTLMMQDDLRFVSFYDLDMMDLKALGRFRQKAIKQRTRLKIQLTTYVDQVFPEIQYFFKSGLHQHAVYALLKEAPSPKEIASMHMTHLANLLKVNSHGHFTKEQAKELRVLAQKSVGANDSAISIQITQTIQQIELLDSQLEKIEAEMTDIMRFNDSVIMTIPGIGYINGGMILGEIGDIHRFSNPNKLLAFAGLDPSVYQSGNFQAKTTRMSKRGSRVLRYALVNAAWNVVRNNATFKAYYDAKRAEGRSHYNALGHCAGKLVRVIWKMLTDEVEFNLE

SEQ ID NO: 398496 - protein, 345 aa, unidentified
MDQISRIGMDTSKHVFQLHGVNAAEMPVLRKKLRRKEMLAFFQKLAPTVIAIEACGASHHLARLLQSFGHTVKLIAPQLVKPYVKRGKNDAADAEALCETMSRPTMRFVPVKTTEQQAALMLVGVRDRLIRNRTQLANTIRGYAAEFGLTAAKGMAHLVPLLERIAADESLPALAQELFASQAKEYTQLQAQIDEVDAKLTAWHRADECSRRLVKIPGVGPIGAVLLTMKTPDPAQFRSGRQFAAWIGLTPKNHSTAGKVRLGVITRAGDEGLRSVLVVGATAVIQHALRGGKASPWLAALLKRKSPKLAAVALANKTARIAWKVMLTGEAYGAKAAAVASAGAV

SEQ ID NO: 398497 - protein, 319 aa, unidentified
MFLGIDVAKAELVVAVRPSGERWAVANDERGLRTLVERVRRDAPALIVLEATGGYELLCAAALASAGLPVVVANPRQVRDFAKATGQLAKTDRIDADLLALFAERVRPAVRALPGADVQELDALLTRRRQLLEMLGAERNRLGQVFGRGKQPVKKSLKAHIAFLERELRTTDTDLTAMIRRSPAWRERDDLLQSVPGVGPVLSRTLLAELPELGRLSRREVAKLVGIAPLSRDSGTLRGRRFVQGGRASVRAVLYMAALVATKRNAVIRAFYQRLVAAGKPKKLALVACMRKLLTILNAMARTGERWSAEYAGAPRTPA

SEQ ID NO: 398498 - protein, 443 aa, unidentified
MTRRCIGLDVHREFAQVAIWQDGHVRQAGRIAATPEGLRLFADSLAPTDEVAIEATCNTHAIAKLLEGRVARVVISNPQKTRAIAEARVKTDKVDAAVLAQLLAADYLPAVWFADEATHALRRQVARRAHIVRQRTRLKNQVQAVLHRNLIPRCPAADLFGRKGRRWLAAQPLPGDELRAVEALLRQLDFHGQELRIIDAELGRVALASLHVRRLMTIPGVDATVALSIVAAVGDFERFRSPEKLVSYLGLNPRVRQSGGQPASHGRITKQGRAHARGMLVEAAWAASKTPGPLRAFYERVRARRGMQIAVVATARKLAVLCWHLVIKGEDYAFARPSLTAQKLRRLELRAGRPSRRGQKGTAAAYSLKEVRARERALTEQAEHAYRQLVADWQAKRPARGEGVAAANGARLSRPSNGATAARQDSAPDPALRSGVDHAHNAA

SEQ ID NO: 398499 - protein, 346 aa, unidentified
MDQIIRIGMDTSKHFFQLHGVDAAERPVLRKKLRRNEVLAFFAKQPPTVIGMEACGAGHYWARELRKLGHEVKLIAPQHVKAYVKRNKNDGRDAEGLCEAMSRPTMQFVPVKSDEQQAALMLAGVRQQLITRRTQLSNAIRGYAAEFGLITAKGLVKVEPLLAQIAQDESLPALAREMFTLQGCDYARLQVELKAVEARLMAWHRANPDSQRLAKIPGIGPIGATTLVMKAPDPGLFPSGRHFAAWIGLTPKDHSTAGKTRLGKITRAGDEMLRSVLVAGATAVIQQAKKGRGRPSPWLVALLARKSPKLAAVALANKTARIAWKLLTTGESYDGARMPVTSMLAA

SEQ ID NO: 398500 - protein, 360 aa, unidentified
MKEDTRDGSGLIVGVDLGDRWSRYCVLDRQGQVLEEDTVATTGRAFRRLFGDRPAARVVIEVGTHSPWVQRLLQELGHETITANPRYVRLIYSSGSKNDQLDAERLARLARVDPKLLHPIQHRGGTAQADRALLRSRNALVECRTKLINHTRGIVKSMGGRLPSCSSSYFHKRVREELPDELKPALTPVLDAIGALNLKIRRLETRIERLAAKRYPETGLLRQVSGVGPLTALSYVLTVEDPQRFKSSRAVGPYLGLRPRQDQSGNLDPELRITKAGDSDLRRLLVGSAHYILGPFGPDTDLRRWGLALAARGKKNAKKRAVVAVARKLAVLLHRLWVTAEVYEPLRAHRPVVATEAMSA

SEQ ID NO: 398501 - protein, 400 aa, unidentified
MIGGPSLNMQNVEGYAGLAGTEPHAWETGLMDTITYVGLDVHKATVSVALAEGGRGGEIRQVGVFENRPEILMKLAARLSKGGCQLSFCYEAGPCGYGLHRLLTGCGHDCVVVAPSLIPMKAGDRVKTDRRDAVMLAKLHRAGELTPIWIPDAAHEAMRDLVRARATAGRVLSKARQHLQSFLLRHDQIYRGVRAWTLAYRRWLTTVRFAHPAQQIVLQDYIHAVQDAEARLDRLTQQIEELLPSWSMAPVVAALQAMRGVALVVAVTVVAEVGDFRRFANARQLMAYLGLVPSEHSSGSSVRRGGITKAGNVLARRVLIEGAWTYRMPARVSRKLHDRNEKLSPAIRDIAWKGQIRLCSRYRRLAAAGKPKVVVTTAIAREMVGFIWAIARIAQPALHG

SEQ ID NO: 398502 - protein, 375 aa, unidentified
MGKNTRFVGLDVHAETIAVAVAEGRNQVRSLGTIANRPEAVRRLIGKLGKLTEVKVCYEAGPTGYALYWQLTQLGVQCEVIAPSLVPMKAGDRIKTDRRDAERLARSYQAGDLTAVWVPDSKHEALRDLVRAREAAKEDQLRAKHRLGKYLLRYGLRPADDGRPWTAAWWQWVRALKLAHPEQNTTLLELILEVDHQGQRIERFDAAIDQAVDAAPEQLKAIVDALQALRGVAKVTAVTLATEFGCFSRFEKAGQVMSYTGMVPSEHSSGPKTRRGAITKTGNSHLRRVLVESAWHYRHQPKLCKRQKELQTALSPKVAAIAWSAQQRLHRRYWALQNKSKPSAKIVTALARELAGFVWAIGVETERTLKVGKAA

SEQ ID NO: 398503 - protein, 312 aa, unidentified
MTQEALVVGIDVSKDTLDVAILPTGESFSVPNKGKGWGKLIRRLAGKPVAVVAFEATGGYERGLLKALNAARLPAARVNPSRVRDFAKATGTLAKNDRLDARMIARFAASLPPRPTEPDPAVEALAELVNVRRQLSEEITRVANQAEHALSALVKRIARRRIGSLQADLKLVEQEIAKAIAADPRFADKDVLMRTAPGVGAVTSATLLALLPELGQLANRPVASLVGVAPFDHDSGKLKGQRCIWGGRQPVRDALYMAALGAIRTRHSIFRACYQRLIAKGKRPKVAIVAVMRKLLTTLNAMLRDTRAWSPA

SEQ ID NO: 398504 - protein, 340 aa, unidentified
MNVTTIGIDLAKSVFQFHGVDEKGGIVLRKKLRRSAVLDFLRDVSPCLIGLEACATAHFWAREISGLGHDVRLIPPAYVKPYVKRQKNDAADAEAICEAVTRPNMRFVPIKSAERQGVLMLHRTRDLLMRQRTMMLNAVRGHLAEFGIVTAQGPHKILLLIREIRKGEVPGLPQIAQAALESLATQLDNLAGEIRTLERQLMTWHRADEISQRLETIPGVGIITATALSASVPDPAVFKTGRQFAAFLGLVPRQNSSGGKDRLGRISKMGDGYLRRLLVVGATSVVRRAGSNTSATGVWVRSLLERKPSRVVTVAIANKTARVAWAILARGGTYRAPRPA

SEQ ID NO: 398505 - protein, 412 aa, unidentified
MKDLLEISCGLDVHKEKIVACILTGPLGKPTRSEIREFSTLIPDMIALRNWIVSKNCHHVAMESTGIYWMPIYEILEDAFSGDITLLVVNARHMKNVPGKKTDMRDSEWISTLLRAGLLNGSFIPEKRIREFRDLNRYRKSVIRDITSQKNRIEKFLQSSGFRLSSFISDIFGASGRNIILHLVEHGQIDKTALDSCLKTKIRNRIDEILMSVNGTLSEHQKAFLRILMTHYDSLKKHLAEIETSLEEDMAPFTLQVEQLNSIYGISTTASCAIIAEIGIDMKPFKTAEHICSWAGLCPGNNESAGKRKSTSVTKGNPYIKSMLCEIAWVIAGKRNTYLSAWYWRIKQKKGAKKAIVALARKLLVIIYTMLKQGTLFDESCFETRRKHCEQKQLSRYIRELEKHGYHVEAQS

SEQ ID NO: 398506 - protein, 375 aa, unidentified
MEMMQHRQLRYIGLDVHRATIAVAIAEEEGSPSSYGTIANDPDAVRKLMRQLGGKDVELRVAYEAGPTGYALQRQLTKLRIACMVVAPSLIPVRPGDKVKTDRRDALKLARLLRSGDLTAVWVPDREHEALRNLVRARADAKADELRAKHRLSKFLLRLGIQPPVGMRNWSQRYFQWLRKVELEHLADRVVFADYLAEVTAAGERIKRLEAALRQCAESSEQVALIRALQAFRGIGFLSAVSIVAETGDLHRFRTAPQFMAYVGAVPSESSSGSKQHRGSITKTGNSLLRHVFGEAAHHARHAPRIGVTLKRRQLEAPPTIVELAWRAQLRLHSRYRHLSARIGPHKALTAVARELAGFVWAVSRVLDEQVPAAA

SEQ ID NO: 398507 - protein, 311 aa, unidentified
MSGFVGIDVSKTYLDLAVGKEGEVTRLGNEEKGISLMVTRLQEVQPDLIVVESTGGLERALITELFFAHLPVSLVNPGRVREFAKSIGQLAKTDKIDARLLAHFAQAVQPAKIILPNEQEQYLSALMTRRRQVIDMLIAEKNHLLSTPTRLRELVERNIDWLEKQLKELNVQIDDFVDHDPVFHTKNDILRTTPGVGPVLANILLSDLPELGRLNRKEIASLVGVAPFNRDSGMFRGKRRIKGGQANIRTVLYMATVAAIRWNPILKIFYNRLVAKGKVKKVALVACMRKFLTILNAMIRDMQPFHVALIS

SEQ ID NO: 398508 - protein, 402 aa, unidentified
MNAVGIDVSKGKSMVAIMRPFGEIVSAPFEIKHTASDINSLVELINSVEGESRIVMEHTGRYYEALAHQLSEANLFVSAINPKLIKDFDNDSLRKVKSDKADAVKIARYALDKWQNLKQYNVMDELRNQLKTMNRQFGFYMKHKTAMKNNLIGILDQTYPGVNTYFDSPARSDGSQKWVDFASTYWHVDCVRKMSLNAFIVHYQNWCKRKKYNFSQSKAEEIYGKAKELVPVLSKDAITKLIIKQAVDQLNSASTTVESLRTLMNETASKLPEYPVVMAMKGVGTSLGPQLMAEIGDVSRFTHKSAITAFAGVDPGVNESGSYEQKSVPTSKRGSSDLRKTLFQVMDVLIKTHPQDDPVYQFLDKKRAQGKPYYVYMTAGANKFLRIYYGRVKEYLSSLPES

SEQ ID NO: 398509 - protein, 393 aa, unidentified
MMSDKSRKMADQVLKYSVGCDISKDTFNVNFLEVGQDLSSKVKASHKFKNEIKRFSDFDSWVKKHKKLDIPINFTMEATGVYYENLAWHLYEQEREVYVLLPYKTKHCLKSLGIKSKNDKIDAEGLARMGAQQKHKPWRPYSRAIYALRSLTRQHESVNKLKTRLVNQLHANEHSAFKSTVVKKQLNATLKLMDKQLEELAIEMSKLIDNDEKLKQKYSDFKQVRGIGKLSWATVIAETNGFETFENQRQLVSYSGYDVVENQSGKHTGKTKISKKGNSRIRRVMYMPSLVSVKLKEPVLYNLYQRVFERTGIKMKGYVAVQKKLLVLMYHIWKNDVPFERNYKKTFAEEESKSLFPLGSGGTTKKSSPDKRATQDEHSYELSSEVLFPLIQI

SEQ ID NO: 398510 - protein, 405 aa, unidentified
MGKVFVGHDWAETHHDVYVEDGAGQRLGKARLDEGVSGVARFHELVSSFVVDPGEVTVATETDRGLFVGALVAAGYRVLAVNPMSAARYRERHSTSGAKSDPGDAFVLAELARTDGHHHRPVAADSELAEAVKVLARAHQSMIWTRQRQVNQLRSMLREFYPAALSAFDDLASSDALAVLALASTPSLGRGLSRSKIASALRRGGRQRRIDERAAEIQTILRADTLQAPGPVAEAMGASVRALVAVISEQVAQTARLEAELADHFELHPDAKIIRSLPGLGMILGARALGEFGDDPNRYTDAKSRKNYAGTSPITRASGKHHVVLARHARNRRLADVCYQWAFAALTASAGARAFYDQHRAAGDTHHQALRALANRLVGILHGCLRHRTPYDEHTAWGHRTAAAA

SEQ ID NO: 398511 - protein, 317 aa, unidentified
MQEERVFIGVDVAKAELVAAFATREGCRSIANEASAINAWLRELPDNALLAMESTGRCHQLLATLARAAGLQVFVLNARDVYFYAKALGARAKTDRVDAHVIARYLAQQHTRLHPWQPCSAVLTQVQDLLGQRWMAVTKRTALRQSLQDCEAAIHAEVQALDAAFAALLKAIDARIDALFEDDARLSEQRALLQSIVGVGPQSSALLASVLAQVDFASSDALVAYSGLDPRACDSGASRGRRRLSKRGQPALRRQMFLAAMSACHTKTFEGSYKALRQRGLKTTEALVVLARKLLRIAYAVWRSGKPFEPHRLTPVA

SEQ ID NO: 398512 - protein, 344 aa, unidentified
MSQVTTIGLDIAKNVFHAHGADERGAMVFSRKLTRAKLLEFFAGQPACVIALEACSGAHHWGRELRTMGHEVRLIPPSYVKPFVKRSKNDAVDAEAICEAAQRPGMRFVAVKSEDQQAAGLVFRTRDLIVRQRTQLINAIRGHLAEYGWVAPRGRAHMAMLADLLEGDEITSTLPEAARPMFTLMVELLGDLDARIATLDREIARRVKDDEDARRLMTIPGIGPIAATAILALAPPAETFRKGRDFAAWLGLTPRQHSTGGKQRLGGISRMGERTIRRLLIIGGSSMVRQASRFGAPAGSWLERMMARKPRMLISVALANKMARMVWALLTKKEDYRAPAAVAA

SEQ ID NO: 398513 - protein, 327 aa, unidentified
MSVDSLFVGVDVSKSRLDIHVADAGGSLSLANDKPGIARLVKRLGKSRPRLIVVEATGGYERPLVHGLLDAGLPVARVNPLHVRRFAQSRGILAKTDRIDAIVLADFARLNVDRLRPMRPISDNARMLQELTVRRRQLIEQCVANQCQLEHAALKSVRQSIDRTIKHLRKEIAAVETEIQQIIDQDEKLKSKQEKLLSVKGIGPRVSRILVSELPELGQLDRRQIAALVGVAPFNDDSGTHSGQRHIRGGRATVRAALYMATLVATRSDPVIQNYYQHLKNNGKPKKVALVACMRKRLNYLTSLLSERPHQPAAERNEAGAWGQSPQ

SEQ ID NO: 398514 - protein, 339 aa, unidentified
MQIHSVGIDLGKTTFHLVALGAAGKVLVRKKFTQKQLLAYTANMQTSLIGLEACSGAHFLGRALHKQGHDVRLIPAQFVKPFVKSNKNDFIDAEAIAEAVERKNMRFVPIKTDDQLDLQAIHRVRDRLIARRTAVINQLRAFLLERGLVFARTPAKLKAAMADILENAESDLTSRMRNLISGLWSEWKLVEQQIEELNDELERISAADAGCTRIRKIPGIGPVVATAIVAAIGNGAAFSKGREFAAWLGIVPRQYSTGGKAKLFGISKRGNAYLRKILIHGARAAVLHIKRDRAPIGAWLDALDARAHKNVVVVAMANKLARIAWAVLSSGNEYRPVST

SEQ ID NO: 398515 - protein, 334 aa, unidentified
MENIALIGIDLGKNSFHIHCQDHRGKAVYRKKFTRPKLIEFLATCPATTIAMEACGGSHFMARKLAELGHFPKLISPQFVRPFVKSNKNDFVDAEAICEAASRPSMRFVQPRTESQQAMRALHRVRESLVQDKVKTTNQMHAFLLEFGISVPRGAAVISRLSTLLEDSSLPLYLSQLLLKLQQHYHYLVEQIKDLESQLKRKLDEDEVGQRLLSIPCVGTLTASTISTEIGDGKQYASSRDFAAATGLVPRQYSTGGRTTLLGISKRGNKKIRTLLVQCARVFIQKLEHQSGKLADWVRDLLCRKSNFVVTCALANKLARIAWALTARQQTYVA

SEQ ID NO: 398516 - protein, 377 aa, unidentified
MSNVRFIGLDVHAETIAVAAAEPAGEVRSLGVIPNRIESIRKLVKKLGPVKHLRVCYEAGPTGYVVYWQLTALGVTCEVVAPTLVPVKAGDRVKTDRRDALKLARSYRAGDLTPVWVPDAAHEALRDLVRAREAAKKDQLRARHRLGKFLLRHGRRPPTTMKAWTQAHVAWVKSAVHFEQAAQEATLLDYIHEVDHVAARIARLEAAIDTAVRTAPARLRAVIDALQALRGIALVTAVTIAAEVGELSRFAKPRQLMGYSGAVASEHSSGERTRRGGITKAGNAHLRRVIVEAAWAYRHRPAVGAGLRKRQATASAEVKEIAWKAQHRLHARYRALTARGKCKQQVITAIGRELLGFIWAIGVHEEARTAQGKSLAA

SEQ ID NO: 398517 - protein, 370 aa, unidentified
MNNNITIVGLDTHKNSIDIVTAETGGCQEVRHYGKIGSDMASLDKAIRKLRSKGGELRFVYEAGPCGYGIYRHLTTQGFPCAVVAPSMTPRKSGDRIKNDRRDAENLARLERAGELTHIHVLREDDEAMRDLTRGREDAVKALRTARQRLGAMLLRYGYRYPGKKTWGPSHMRWLSDIAMPHPAQQITFQEYIHSVMECTDRVRRLTEQIQKLLPEWRMAPVVKALQALRGVAQIVAVTTMAEIGDIHRFAKPRQLMTYLGLVPSEHSSGDSIMRGGITKTGNGHVRRALVEAAHAYSFPARVSRFLLKRQDDLPQHIRDIAWKAQIRLCGRFRRLMARGKLKTKVVTAIARELAGFIWAIAMEVQPQGA

SEQ ID NO: 398518 - protein, 312 aa, unidentified
MKEPERFVGIDISKEELVVAVRPTAELQSFPNTKRGWLPWSGTFSRFKAHTIVLEATGGFARAAVNALALAALPVVVVNPRQIRDFARSVGLLAKTDAIDARIIARFAEAVRPERRPLKDLETQQLEDLNNRRRQIVEMISAEKNRYAMATEKRVRRDIQVHIRWMEKRLEDINDDINDLIKKSPIWRQKEKILTSVLGVGPVVTTTLLCGLPELGTLSARKLSALVGVAPFNRDSGKSRGKRSCWGGRAHVRAALYMAALTASRCNPVIREFYLRLRLAGKPAKVALVACMRKLLVILNAMVKNNTCWQQA

SEQ ID NO: 398519 - protein, 349 aa, unidentified
MLADEVDYVVGVDTHRDQHVLAVVVAGTGVVGARRSVRSSARGYAEALRFAQAAADGARVWAVEGVGHYGAGLARHLSGRGETVLEAGRGPRDQRRLQGKDDSLDAVRAARTALASETPALPRTGQQREALRLLLLARRSAVDVRRLALVQLRSVIVTCPDQLREELRGLPAGRLVERCSRLRRSPSRTPDELAATLVLRSLARRIQAATVEAAELEREILAHVRALAPQLLDEPGIGPIVAAQLIVSWSHHGRVRSEAAFARLAGVAPVPASSGQTTRHRLSRGGDRQLNRALHTVILHRRQHDPATKDYIARRVAEGKTRRDAVRLLKRYLARHLYRVLDNQGPLMT

SEQ ID NO: 398520 - protein, 343 aa, unidentified
MTRKDRVFVGLDVHKKSYHAAVRVNGVEVQTTVLAPRAEAVLAFLEPYRSARLHVVYEAGPTGFGLVRALRAAQIPAEVIAPSKTPQTPGRENKTDRLDCRHLALYDEKGMLRRVAVPTPQEEADRQVIRLRDQVVKARRCVKQQIKSFLLQHGLAEPPGLKNWSKASVRALETMPLVPALRFCLDVMLAELAHRNESLQQVNRAVENLGQEPQHARAVAPLCEHSGVGVITAMQFRTELFRPERFANARQVAAYVGLAPRVSQSGGRCRTGPLLKAGRGRLRALLVEAAWVWIREDPEAAAVYRRLLRNTGQPNKAITGMARRLAIRLWRLLVPPEARGQAA

SEQ ID NO: 398521 - protein, 405 aa, unidentified
MGIVIALDISMGKSYKVVYDDQICLSEGEIVHNQAGFQKLMTEIQTLPNDLMLVFESTGIYSKPVETFCQKNQIRYCVLNPLEAKKQLEQGTLRSWKTDKHDAHKLAQVHQQNIRSEKIQQPDIYHEMRDLSRFHQEIEDDIKRTRMHLHNTLQLCFPELEQFFSSRVTPYALSLIELFPHPEFVLQTSKTKIKNLLIKSTPKKISENRAKQKAIDIIEYAKESYPAVSSGSIQTQKVQYYSRQLLQLLKEKENISKQMIEKAKQLPEFELLISFPGIGEISAALFIGEIGDISRFSNHKKVNAFVGIDIRRYQSGKYAGQDRINKRGNPKGRKVLYFIVRNMIRQQKSAPNHIVDYYYKLKKQPHPKKDKVAVVACMNKLLKCIYSVVRNNTKYDYSHTVSTDQ

SEQ ID NO: 398522 - protein, 289 aa, unidentified
MEHFAGLDVSVKETSVCIVDETGKIVREVRVASEPDALLEVLKSHAYRFKRIGLEAGQLSQWLFSALAEAGLPVICVETRHMRAVLKAQINKTDRNDARGIAQMMRAGLYRPVHVKTLRSQKLRMLLTHRKLLQSKAIAIENDLRGTLRNFGLKVGMVGTVKFEARIGELVENVPDLAALVEPLLVVRRAIREQIAILHRRLLAIVRDDEVCRRLMTIPGVGPVVALTYRSTVDVPARFRNSKAVGAVFGLTPAQYQSGEIDRTGAISRCGDEMMRVMLYEAAHIMLVR

SEQ ID NO: 398523 - protein, 346 aa, unidentified
MKKTLFIGIDFSKKTFDVSVIHHNNLQSADYQMFENSKEGCVSLLEWVKTLTVAPCGEWLFCGEHTGLYSICLSEFLVQKGLFLWLENPLQIKRSCGIKRDKNDRADSREIALYACRFSDKARAYQLPAKALKSLELLLSYRERLVGNKQVLLVSATEIKRVMQHDPTAGFIYEESKRDIAHINRQIKEVEKRMLEQIESDEQLHENYRLVSSVKGVALINAVAILIVTQNFTRFDNSRQFACYAGMAPFGKQSGTSINCKPQVSSLANKKIKVLLTQAARCAINHDANIKEYYARKLAEGKDSRLIINNIRSKMIHRIFAIVRNRQPYRVDYVNETDKAQNGLTA

SEQ ID NO: 398524 - protein, 416 aa, unidentified
MSGKREIACGVDVHNKFIVATILSTDGLKLQDRFDTNLVGLLKFKYWLKENGCHKMAVESTGNYWVPIYSVLEGSVNFILANAYQIKHIPGRKTDTLDSEWLAEICLKNLISPSRIFPKDHRELRSLTRSRENLIKVRTKIKNWVTHELEAACIKLSSVLSDVFGKSGRHIVDGLLNGMDLETILESIPSKRVRVNKEEIRGIIQANLSRSQIFLIRSHLDMIDAITKQIAEIDTKISDMISSRKEDMKIALSIPGMGVISASTILAEIGDFRDFSSPGKLAAYCGLVPSVYQSAGKLINGHITKHGSPHIRWMIIEVAHAIIRSKRNSKLKKFFLRVRARRGTKIGVVALARKVLCILYHLLISQELYQDDLLGKPRSIKHAGRHSTASMSLDEMIRTIIKAGYEVRKNECLESG

SEQ ID NO: 398525 - protein, 343 aa, unidentified
MLRTNVIGIDLAKNVFQVCNISCQGELLSNKAISRQKLKELLAKAKPSLVALEGCATCHYWGRYAESFGHEVRIINPKKVKAYVEGHKTDANDALAIANAALKIGIKYSKPKSMEQQTLMSLEANRQFLSKTIVSLGLHIRSIINEYGIVKGKGTKGLAALVTSTLDERDVLPASLITTLSMLWQQYLNLKEELNHLQKSMNATTRQIEPCKRLMDLEGVGEVTASMLYANLGDGTQFTNGRQASAFIGLTPKQYSSGGKVTMMGIDKFGGVKDLRSMLYLGAMAYIYRLPDSPTNQKQAWLIKLVNRVGFKRACIALANKTVRTAWAMLRYETKYKSKTLSC

SEQ ID NO: 398526 - protein, 372 aa, unidentified
MNYNTVYVGMDVHKESFSLCAYTIEAEKASHYQRTEADYKKVLNYLEFLRTIYGDDANFICGYEAGCFGYTLYHQLTANNVKCIILAPTTMLEQRSKKRIKTDRRDAEIIAKCLAQHNYSPVHIPTAKDEETKEFLRMRDDHKLALKKVKQQILAFCLRHNYRYDGKSHWTAAHLKWLKALTPEALYKEILDEYLLTYQTLSDKIERLDKRIEELATQDEYREAVKKLCCFIGVKTHTALSVLVEVGDFKRFASAQHFASYLGLVPGEDSSGDDQNRLGITKAGNRHVRLLLTEASQCYARGQVGFKSKELKSRQSGNTPAVIAYADKANERLRRRYYKMVLNKYKKHNVAKTAIARELACFMWGMMTDNIA

SEQ ID NO: 398527 - protein, 372 aa, unidentified
MNDVSIFVGLDVHKDSIDIALVEADRKATVRFYGTIGGNLADLEKAVRKIRKAHPFAIFHFVYEAGPCGYDIYRYLTRAGYECMVVAPSMIPKRSGNRIKTDRRDATMLASLHRAGELSPVFVPREEDEAMRDLVRAREDAVKAERVAKQQLKGFLLRHGIKFAGSGNWKPSYMRWLADLKMPNTAQQIVLQDYINAVKDGTERIVRFNIQIREVLPSWELAPVVNALQAMRGVALMVAVTVVAELGDLKRFENPRQLMSYLGLVPSEHSSGGTRRLGSITKAGNGHVRKVLVEAAQTYRLPARISKTLLERQEGLPKAVRDIAWKAQVRLCARYRKMVARGKKTQTVICAIARELCAFMWAIAREVKPVAV

SEQ ID NO: 398528 - protein, 345 aa, unidentified
MSIAMIGLDTAKAVFHVHGVNEAGKAEVRRKLRRRELIGFFEAQPACTVVLEACGAAHHWGRVLTGLGHTVKLIAPEAVRPFVKKGRKNDAADAAALCEAARRPEVKLVPVKGLEQQGTLALHTARALLVKQQTMLANALRSLAAEFGLVAPLGFSKLGELVAQVEAEASVPEAARQALRALHGQFHAAREAAAELEAAVVAHARQDETARRLATIPGIGPITASLIAATIVDVGLFKSARHVAAWLGLVPRQHSTGGKARLGRITKAGNEQIRTLLVLGATSMARRAEQWNSAAGAWVRGVLARRPARLATVALANKMARVAWAVMAHKEDYRPFGRAAAAVAA

SEQ ID NO: 398529 - protein, 337 aa, unidentified
MIVMGLDQHRGQVTAEWIDTESGEVSRARVSPAHREPVRRFLGRFRGAELEVALEATTGWRFVVEELRRVGARVHLAEPAETAARRGNKKRAKSDRADARHLRELLMISRLPESWIPPDHILDLRARVRLRHTLSDQRGEWQQRIQAVLYHHGCPQRRDLMTREGRAWLQAQPLPETAREQVTVAIAMVDALEIQLAPITQQLRAYARRQVGCRALMGHYGIGELTAVTILAELGDCRRFSSSRHAVRYSGLDITVHQSDQRRAPGHLSRQGPPALRWALFEAAQVARRTGSPDRDYYQQAAERLGANRACLAIARKLLKRSYHTLRELGEEALQPA

SEQ ID NO: 398530 - protein, 357 aa, unidentified
MEVVFPRCAGLDVHRDTVAAAVRVQSSKGPAKVEVRTFTTTGGSLGPLADWLAENKVTIVGMESTGVDWKPFFHMLEDRFECWLLNAAHVRNVPGRKTDVADAVWLADLVAHGLVRASFVPPKPFRDLRDLTRARRTVVEEKTREVQQMEKLMQDAGVKLTSVASQLLGVSGRAILEKMIAGERNPEYRAELARGRLRGKIPALTEALAGTFRSGHHGFLAAQLLARIDLCDEQIAELDQRIEVMIAPFVETVDRVTTIPGVGRVTAIVLLAEVGIDMSRFPTAGQLASWAGICPGNHTSGGKRLSGRTRHGNKWLRTSLTEAAWAAARSKNTYLIDAAKHLVEIHSIRHRRDVYHL

SEQ ID NO: 398531 - protein, 437 aa, unidentified
MKPGYRRCCGIDVHRDQVTVTVLAPVGRTDVKVKKQEFRTFTRNLRRLRAWLLACQVTEVAMESTGQYWQPVWNILEGAIPKMLLLNPLHVKALECKKTDAIDSERIAMLLQNHELRGSFVPSREVRELRELLRRRVHLLQEINRVKNRAEGVCQSGNIKLSSVATNIFGMSGRLMLEGIVEGQRSAGWMADYAHTRLRSRKVELELALEGSFTEHQRSLLAAHLRHLKWLEEEVAAVEQDVKQRMERYPTQLERLDAIPGVDSLTAWTLVAELGPDASAFADDKHAASWAGLCPGNHESGGKRKSGRTGHGNRYLRRALCQAARAAARTKGSYAAALYRRMLPGMGDQAAIVAVAHWMLVVSYHILHDASEYYELGGNYFDELNKPKVVQRIVERLRRLGYRAELTEVGAEAPVKGCRKAQAVLTQVTGKRGVPAG

SEQ ID NO: 398532 - protein, 412 aa, unidentified
MDVIHSRCAGLDISKKDAKVCVRINGAGRRKTSETVTTFGATTRQIMSLRDHIAAQQVTCVVMEATSDYWKPFYYLLEDLPGVEVMLVNARHVKNLPGRKTDVADATWLAQLGAHGLVRGSFVPPEPIRQLRDLTRTRTAVTRERTREIQRLEKLLEDAGIKLSSVASDLNGMSSRAMLEALIAGDTDPAAMAELAKKQMRVKIPQLTEALYGRFTSHHAFLTRMHLDLIDQHTAAIDQLTDRIQVVMEPFRGFRDLICTIPGIGGYTADIVAAETGADMARFPTAQHLASWAGTTPGNNESAGKVKSRRTRPGNPYLQGALGTAAMSISHTRDTYLAAKYRRIATRRGPLKANVAVQRALLVAIWNITTTNTPYHDPGGDYFTRLNPQKARNNAVRQLEAMGYHVTLDQAS

SEQ ID NO: 398533 - protein, 339 aa, unidentified
MKLYAGIDLHSSSSYLAIIDDKGARKYKKKLPNNLEGILQQMKPYKKVIAGVVVESTYNWYWLVDGLQAEKYAVHLANPSAIQKYTGLKHADDKHDAFWLAEMLRLGILPEGYIYPKEERPVRDLLRKRGHLVRLRTSLIISLQNIISRNCGIRLNGDEVKRLKTDHVTPLLAQNEDLRLAGAVSKESIDFLTRQIKSIEKVIEPKVELKEPYRQLLSMPGIGKVLALTIMLETGPIGRFEHVGNYVSYCRKVGSQWTSNGKAKGKGNKKNGNKYLAWAFSEAAELARRYDDQVRAYYNRKLQKSNLMVAHSALAHKLARAAYYIMRDEVPFMPEKLFS

SEQ ID NO: 398534 - protein, 316 aa, unidentified
MNEVKSSTKIAGIDVSKRSLDLAVGPHEPIERFGNDAAGHDALVGRLLVQGVRRVGIEATGGYERAVCARLQQAGLEVVLHQPLEVRLFARLNRQRAKTDRLDARLIAAATAHHDGLRAAADPRLTELAERLTAYEQATELVSQLKTHLEHTRLPDLMAQMQVQLAALLAHKRTLALDLERRLKRHADLRRRFELVRSLPGVGVIVGLAIVIRMPELGHMRHGQPAALLGVAPFAHDSGAHKGQRFIAGGRRRPRRLLYLAALAAKRCDPALKTFADRLAAAGKPPKLIVIAVMRKLVEAANLILARNSIWRPQPN

SEQ ID NO: 398535 - protein, 411 aa, unidentified
MDVLIERCAGLDVHRDTVVATVRRPGPGGARRSETRTFTTMTGQLEALAEWLTAQDVSLVGMESTGIYWRPVYYVLEDSFPVWVINAEHLRNVPGRKTDVADSMWIAQLIEHGLVSPSFVPPRNVRLLRDVTRHGRRLTEERTRAIQRLEKVLQDAGIKLTSVASTILGKTGRAILAALLAGEEDPAVLAELAKGRLRPKIPALREALTHRFRLEHHGALIAQMLAHIDFLESAILETHQRTEVLLRPVADIVELVMTIPGVGRRTAEVLIAEVGLDMTVFPTAGHLASWAGICPGNNSSGGKHRPGRTRHGSMWLRIALTEAAQVAARGKNTYLAAHHAQIRGRRGTQKAIGATRHDIPIAYYHIVRDRVPYQDLGPDWNDRRRSTEQQTRRLVRQLERLGVTVTINSGA

SEQ ID NO: 398536 - protein, 454 aa, unidentified
MCLEDRPVLEPNAAGIDIGAREIFVAVPPDRDEQPVRVCATFTEDLERMADWLVACGITTVAMESTGVYWIPLYDILESHGLKACLVNARHMKNVPGRRTDWHECQWLQYLHSVGLLRGAFRPEADITALRTIMRYRQELVQMSSQHVLHMHKALTQMNLQIHHVIDDITGLTGLAIIDAILAGQRDPVKLAKLRNWRIKADEETIRKSLVGNWREEHLFTLQQSRELYRIYQQQIVKCDQKIERLVDGFEPRVDPKERPLPPDRKRYRSDKKRAKKSGRPETGFNLRIEAYKLFGVDVTQIPGLETMALPLFGEVGRDMSKWPTADHFASWQGLCPDNDISGGRVLWRGTRRVQNRAGQLFRHAAYSLHHNLTPLGDYLRRMKTRLGPAAAITATAHKIAVIFYTMVKNQVEYDETIWATRDIKRKNRIEAKLKRQARQLGYQLVPLETEPAA

SEQ ID NO: 398537 - protein, 250 aa, unidentified
MNVEIDVSKDRLDVELIDEAQHTHYIQVSNALPGWKALCKWLKKAGASPCRGCLEATGRYSEGVATYLYEQGYAVSVVNPARIRGYANAQLHRNKTDKLDAHIIADFCRTQETQPWSPPSEEIRVLQGLVRHLAVLESEKGAVDNRLRDKAALPALVVEKLHNQQALLHDQIEQLKIAIQNHIEDYPDLKRARDLMDSIKGIGSLTAAKLLAECRPLTEFDDLGQLVAFAGLNPSHYQSGSSIKKKTLIS

SEQ ID NO: 398538 - protein, 340 aa, unidentified
MGNVTTIGLDLAKNVFQVHGVDAEGTAVLRQRLTRGRMLKFFAKLPRCLVGIEACASSHYWARELVALGHDVKLMPAQYVKPYVKRGKNDAADAEAICEAVTRPTMRFVGIKSPEQQSAMMLHRVRLILSRQRTQLSNVLRAHLAEFGIVAPIGRNGIDQLVGVIADTADERVPIDARMCLEMLVAQLHIVKQQILENDRRIMASARETELGRRLMEIPGVGPLLASAMVATVPDPAIFRSGRNLAAWIGLVPRQNSSGGKERLGGITKAGHRYLRQMLIVGAMAVVRYAERNGTKRPWLVQLLARRKAKVAAVALANRNARMIWAMMASGERYREPQVA

SEQ ID NO: 398539 - protein, 338 aa, unidentified
MTILYVGIDLAKSVFAVHGVNEAGKTELLSPKVARTKLLELIASLPPCVIGMEACSGAHHWARLFMAHGHTVRLMAPKFVSPYRLSGKRGKNDAADAAAICEAVQRPNMRFVPIKSLEQQSQLSVHRVRQGFVEQRTAIINRVRGLLSEFGIVLPLKASTVRRQAMACLEDLPGWSNTVIGDLLSELTRLDERIALYDRHIAQMARGDTRAQQLMRLRGIGETTATAMLAMIGNGHDFKNGRQFAAWLGLVPGQYSSGGKTRLGHITKAGDSYMRSLLVLGARSMLNSAKSKTDGVSRWATTLAERRGYWRAIVAIAAKNARMAWAVLSRGETFAMPA

SEQ ID NO: 398540 - protein, 320 aa, unidentified
MSDSLDIGVDVDSKEFVPAVADRKAGDRIANTRAGIAQWLNTLPQRCRIGMEATGRYYELLARMAGQAGHVVYVINPRLIKHYGRATGSRGKTDAMDAEAIARYVKKENDRLREYVPRTDEQQQMHDLLRKRQTLVKTRARLEQSFGVSKSAPGELSDLFCALAGTLSELESELQRLGRDGEHGALYKRLLTIPGIGPAVAAHLIYYMTRWPLANANAWIACTGLDPRPNESGGRTGRRRLSKQGAPVLRQMLYMAAMGLKRCRRGQPLYDELSKRGHPSTAVFNILARKLARIAWGVFKSGRDFDPAMLKVGQACFQQA

SEQ ID NO: 398541 - protein, 355 aa, unidentified
MNDAKYIGMDVHQATISVAVRDSRGNLVMEAILETKADTILEFIHGLRGSLSVTFEEGTWAAWLHDLLQPHVTRVVACDPRKNALLKVGNHNDRMDARKLSELLYLNKLSPVYHGEQGIRTLKELARSYITITRDLTRVMSRLKAIYRSWGIPCAGQQVYAPRYRAEWLAKISEAGVRRRAELYYQQFDALAALRQGTRRELLAEARKHPAMRLLRQIPAIGPIRAALLIALIQTPNRFRTKRQLWAYCGLALRTYTSGEYRFVAGQLKRSKKVLAVRGLNINHNHDLKNIFKGAATRAASSVGPFQDFYQACVARGVKPHLARLTLARKIAATTLLVWKKGVRFDAEHLKQQAA

SEQ ID NO: 398542 - protein, 343 aa, unidentified
MQRDLGMVVGVDTHKDSHSAAMVDPMGALLAATDVGANRKGYRRLLEWARCQAPQRTWVVEGTGSYGAGLASFLAASGEVVFEGDRPQRRKPGAAGKSDQLDAVKVAREALAREHHAVPRQRGNREAIRVLLSTREGAVSAYRQALNQLYALVVSAPEPIRERLIRLKGEHLVTACGALRSAAGDIETSVTVRVLRQVARRTRNLQAEAAEHQALLEKLVAEAAPSLLAQPGVGAITAAQLLVSWSHAGRIRNQNAFAALAGVAPVPASSGRVIRHRLNRQGDRRLNRALHVVAVCRSSFHAPTKAYIARRTTEGKSTREIRRCLKRYLARRFFRLLQRLDNL

SEQ ID NO: 398543 - protein, 319 aa, unidentified
MAQNDSIVVGIDVAKDKVDACIRSLSQRQTFQSTAEGRRRLIAWLRRHKVEKAVMEASGGYERDWAKALRQAGIGVRIVDPKRVRSFAQSAGRLAKNDAIDAEMIAWFAETFSEAPGQTHDAAREELQALVKARIALVDLKTRLQSQNEHAAPGPVQKAHARILKSLAAEIAKLEATISAKVKATPDFAERAEIIESVPGFAETTSANLVAGMPELGQVSDDIAAALIGAAPYDDDSGKRRGERHIKGGRRWVRNAIYMPCLGAATQNNPVLKAFYNRLIAKGKEPKVALIACMRKLIIILNTMIARRQKWDPSRYVVN

SEQ ID NO: 398544 - protein, 398 aa, unidentified
MYLNIGIDVSKNKHDACILNENGEQIGKFMKLTNTRTSLDKFLEQIKIISEKQGAEVRIGLEATGIYWYSLFSKISEDHKISIYNPTQIHAFANVNVRGSKTDKIDAKTIANMLRFGNAPQTDYSDKQRLELREYVRFHWKLTNNKTNLKKRFKRNLHLVFPGYDQVFKDVFTKTSREILSQSPTPDDILEMGEGKLLELMKKASRNHIDKEKARELIVKAEDTIPSEILKESSLFELQIMMEMIVNLEKHLDTLENRIFAIWDKVKDKHFIQTIPGISEFRAAMIWAEIGDIENFNHPDQIVAFAGLDPKVRKSANKEVIGGPNKRGSSTLRWALGWAVQESKNVNPVLAPYFKKKIDEGKHYNTARCAASKKLIRIIWSVEKNKKPFQIPNNLQSS

SEQ ID NO: 398545 - protein, 315 aa, unidentified
MSSAAFVGIDVAKDKLDIAVRPSAEQWVMPQTEEGIHTLVERLVALAPALVVLEATGGYELPVVAALATAGVPVAVVNPRQVREFARGIGQLAKTDALAAAVLARFAEVVHPTPRPLPEAQAQELSALLARRRQVLAMLIAERQRLATALLAVRPHISRHVCFLEAELSDLDRQLRDAVQASPLWRAQEDLLRSTPGIGPTTALALLAEVPERGQLNRKKIAALVGGAPFPCDSGKLRGRRIVWGGRARVRTALYMATLVATRHNPVIRAFYQRLCAAGKPKKVALVACMRKLLTILNAMVRHRTPWCASVAAAS

SEQ ID NO: 398546 - protein, 433 aa, unidentified
MNLNRLQVGIDFSRQRADFCLLFPDGQPLVSHRAFANSRPGYQQARQLLLDSLQRYAFDGLDVSGEATSYYWFPFFWQLAHDGELEARDLDLFLLNPRWVHWFKKSLPPDDKADSTDPFYIAERTRTRRPKGAWDPQDDWLPLRFYTRLRFHLAQTLTREKNYYLVHLFLLHNTYRRNQPFSDPFGVTSQQVLGGEQSLDELLHLPIEELAERLDDWSSGKLDNPLETAQQLQQVARDSFPLQEPLLTPVQHILDLTLQHIRFLENQIEQVEGWITSEIHAHHPEALFLDSVPGVGLVLAAGIVAEIGNLERFFETLKWDKKHNRARRRTLREVEDAVAKIAGLWWPKADSGDFVAEDRHLAKTGNRYLRYYLVQAANGMRRHIPAYTSFYRLKFHEATRHKHQRALILTARKSVGLFVGLLHRKEPFRSKED

SEQ ID NO: 398547 - protein, 355 aa, unidentified
MDNVKYIGMDVHKAAISIAVLNSSGKLVMESTIETKAITILDFLKGLRGSLHVTLEEGTWAAWLYDRIKPQVTELVVCNPRRNALLKEGSKSDRMDARKLAELLRSNMVRAVYHGEHGVRTLQELSRSYLTISTDLIRVMTRVKAIYRSWGIPCRGKQVYAERYRAEWLGKIQEAGVRRRAEFYYQQFDALRALRQQVRRELLAEAQKHEAWKLLREIPFIGPIRAALLIALMQTPHRFRTKRQLWSYSGFGIETHSSAEQRFVQGELRRAKKPASIRGLNRNHNHELKNVFKGAATVAAAKAGPFKEFYDALVAKGIRPEMARLTLARKMAAITLIVWKKGVRFDAQHLKPQTA

SEQ ID NO: 398548 - protein, 375 aa, unidentified
MNNYSEAFVAFDTSKLRNAVAIADGGRVGEIRFLGEIENSGAATAKLVKKLAAKYQRLTFCYEAGPTGYGLYRQIKSLGHECIVVAPSLIPKRPGDRVKTNRRDAISLAKLLRANELTAVWVPDRGHEAMRDLTRARETTMMDLRSKRQQVSAFLLRQGLHYSEGKKTWTKTHMNWLASQKLEYAEQRLVFEEMMLAVRQAQERLERLEQAIRVAVPDWSLAEVVTALLAMRGLDLISAATFLAEIGDLSRFQHPRELMGYLGLVPSEDSTGDKIKRGSITKAGNRRARRMLVECSWSYQHPPRVGQEKQEKVAAAPRAVREIAWKAQCRLHRRYRALVRRGKLKTVAITAVARELAGFIWAVSREITAARAAAQ

SEQ ID NO: 398549 - protein, 402 aa, unidentified
MWYAGIDWANEHHDSLVIDEKGGQVGTLRVDHSPQGISRLNTFLEQIIGAESKEQMACIIETTHGLLIAHLLEAGWPVYPVNPRTVDRRRAASGAKTDTIDAYLLAKTGRADLADLHRLTPDSEKIAELKLLTRDQDALIQMQTRLVNQLTACLKAYYPVALELFAKLQQKSTLRFLQTYPTPQAAMAVSAEQIQEVLRQAKHSNPTPVAVKIFERLHQPHLQADAVITRTKSRLMLVSQLVPLIEQIAQYDKEIETLFLTHEDHEIFASLPRAGKRLAPRLLAEIGDDRKRYQDASSLQALGGTSPVLFQSGMYSKAHRRLGCIKPLRNALHQFAWQTTQSEPWAMQYYQRKRAEGKSHTVAVRALANVWVRIIFAMWFHHRCYEATTFEIARQQHARRAA

SEQ ID NO: 398550 - protein, 349 aa, unidentified
MDENEVILGVDTHLDTHVGVLINTNGNLLGCLAVTTDTSGYLKLVTWANSFGMLKRAGVEGTGTYGAGLARVLRDHGIEVLEVNRPDRSKRRLQGKSDPTDAESAARSVLSGNATAIAKTQSGVAEAMRVVSVARRSAVRAKTQAINQLRALLVSAPQDIRERLWKTKPGDCAKGCARLRSRSATEFLNILTTSLCLLGKRWLALAEEVEKLDAILENLTRQHARRLREQFGVGPQTAAVLLSTAGDNPERLKSEAALAALCGVSPLPASSGKTVRHRLNRGGNRSANNALWTIAMVRMRGDPKTQSYVARRSAEGLSSKEIQRCLKRYIVRELYPLILADLADSARSC

SEQ ID NO: 398551 - protein, 351 aa, unidentified
MKNMSKQLQGEELFVGIDLHKHRWHITIRTADVEIFSSSIAGRWQELRKVLNRYNGCSIHAVYEAGYFGFWLFDHLTQYGVQCIVTPPSLIPQEYGNRVKTDRLDSRKLAQLLAKGLLKSVWVPSVEERFHRQVIRRRRQLVGDRVRTQNRIKSELCFYGIDLPATRSKWSQVYFTNLQRIKFKNHWMQKNFNQLLEQYEFLCAQIDKQTQLLKQLAKLPLYCDRVNILCSIPGIGILTAMEILLELQDFSRFRRAEQLAAYVGLTPSQYSSADKIRMGRITGAGKNAVRSALVESCWHLIRKDKAMRKKYEQIKARAGAKRAIVAVSRKLLLCIRRLLLDNRPYVYEPVI

SEQ ID NO: 398552 - protein, 375 aa, unidentified
MKKVRFLGLDVHAETIAVSVAEIDGEVRSLGIIANRQESIRKLIKKLGPAEQLQACYEAGPTGYVLYWQLTALGVKCDVVAPSLVPVKAGDRVKTDRRDASKLARSYRAGDLTPVWVPDEEHEALRDLVRAREAAKQDQLRARHRLSKFLLRHGRRAPSGVKVWTQKHLDWIKEQVHFKQPAQEYTLLDYWHEVEHVTAHIRRLEQAIEEAVKLAPARMQEVIQALQALRGIAQISAVTIVAELGEISRFERPRQLMGYSGAVSSEHSSGKRIIRGQITKTCNAHLRRIVIEAAWSYRHRPSHGWALRKRQKDLSEEVKEIAWKAQHRLHQRYRKLLAAGKDKQKVVTAIGRELLGFIWAIGIQVERNNQQSRVA

SEQ ID NO: 398553 - protein, 347 aa, unidentified
MRFYTKQHQFYCGIDLHARTMYLCVLNQDGEILLHRNMPAGPEPFLKAVAPYRTDLVVCVECIFTWYWLADLCAREGIPFILGHALYMKAIHGGKAKNDKIDAQKIAVLLRGGMLPQAYVYPAAMRATRDLLRRRMHLMRKRAELLTHVQQTNWQYNMPEIGKKIAYKANRAGVAERFADPAVQKSVEVDLALIDYYDELLRDLELAIVKTAKQHDAHTLYLLQTVPGIGKILSLVLLYEMHDIARFPRVQDFVSYCRLVKCAKESAGKRYGTSGTKIGNAYLKWAFSEAAVLFLRNNPAGQKYLARLEKKHGQGKALTILAHKLARAVYYMLKRGTAFDMAQFLSS

SEQ ID NO: 398554 - protein, 382 aa, unidentified
MSRQTKQADPLEPERHHCARVGVSSNHSRDRGSTMNVTTYGLDLAKRVFQVHWVEPDTGELKRKALARAEVAAFFARRAPGVVAMESCGSAHHWGRVLSGLGHQVRLIAAQFVRPFVKTNKTDAADAEAIWEAVQRPGMRFVALKSEEQQAVLSLHRMRAQQVKIRAMQAYQVRSLLYEFGVVAPKGFAALKAKAATVLAEPTGCPVPELARVELLSQLEGLQSLTARIEALERRVGSWQRREAECERLAAIPGVGRLTATAVVATIADARSFRSGREFAAFLGLVPRQSGTGGRVKMLGISKRGDPYLRTLLIHGARSVMFTQSRAERVMDPWLKELLARRPKNVAIVALANKMARTIWALLAHGRSFDPNWGRTAIVALA

SEQ ID NO: 398555 - protein, 441 aa, unidentified
MAMRARDEEIVFPNAAGIDVGASSHWVAVPRHATDESVREFGAMTGELNAMADWLLACGVDTVALESTGVYWIPVYEVLEQRGLKVWLVDARQMKYVPGRKSDVQDCQWLQKLMSLGFLRAAWRPDGEVCVVRAIARQRDVLLADQASWVQRMQKALVQMNIQLTEVLTDVMGMTGQAIIRDIVAGERDPKALARHRNGRVKASAQEITQALTGNWRDEHLFVLRQALAMYDDIARHLSECDTKLQALLTQLGQAKVDLGKAPRPGSKLRQEFDARQILANWAGVDLTRINGLGLAAVMKILSEIGPDLSRFETVKHFCSWLGLCPGTKISGGKVLSAKTKRTANRVRQALKMAAMSLSHSDSALGAFYRRLCSRMDKPRANTAVAHKLARMVYFMLTRGEAFVDQGQQRYEEQQRQRSIAALKRRAAALGFQISPASVPA

SEQ ID NO: 398556 - protein, 333 aa, unidentified
MKIKYILGIDLAKLSFFYRLDDASGNRIASGTWQNNPQAAKQFIKHLKTLLGGSLEELHAGMESTGRCDAHLFPTLQGAGARVSLINPAQIKFFAISLNRRGKNDPMDAATIAHFVRERHPRATVPLTITQRRLKEIVAEIEHLVTERVRVKARLSEVGPACREVALSLNHQKKFIDQQIAKLEADILSLVQADQELAAEFQLLNSIPGVANRTASRILAQLSGKDFQSARQMAAYAGLTPRENTSGTSLKGKTRLSKQGNGKLRHALYLPAMVFWRHCNEVKPWADAIALRTHSKKAALGAVMRKLLHVIFGVLKHHKPFNPAFVSSPVCDA

SEQ ID NO: 398557 - protein, 348 aa, unidentified
MDHYAGIDVSLEQSSVCVVDGGGKIVDERKVASEPQALIEYFGSLGIALTRIGLEAGPLSQWLYAAMREAGLAVELLETRHVHDAFKAMPVKSDRNDARGIAQLMRLGWFRPVHCKSIAAQELRAVLTARKLVQSKRRDVENSLRGILRGFGLKVGATTARSFAGRIRELAAGQANLEMIAQALLAVHAVLLREFNSLEKRVRNMARTHVQAKLLMTTPAVGPIVALTYAGAIDDPARFTSSKQTGAHFGLTPKKYQSGETDIDGRISKIGDAAVREALYQAAHVMLTKPVKGCPQLKSWAMRIARRAGMRKAKVALARKLAVIMHRMLADGKEFDAAATSQPAAAAA

SEQ ID NO: 398558 - protein, 436 aa, unidentified
MTSHCRSCNYKISGGVLLAFKIFRFNCCGLDVHKTWIFACIGLTDANGRTEYKEKRFSSFSRGLRDLAAWLASYNCTDVCMESAGKYWIPVFNVLEKTCNVILAHPKYTKPQKGNKTDRKDAKWICDLFMCDMIKPSFIPPAEIRHLRDLVRYRFKLTNMLTGEKNRAQNCLTVSNLKLDDVFSDVFGKSSRSITEYILAHPGETFDVTPFVDRRCKTPIEEIQAAVDGAVSPEQAIKLRQCLDHIDELEKHKAEMEREILRVSDPYLDALELIRTVPGFDKNPFTAIQVLSEIGGDMSVFPTDQHLVSWAGCCPRNDQSNFKIKSTRISRAGSYLKPVLVHVANALIKSKKHLEITERYRRIKSHRGHKKAIIAICRMLLTAIWHILTDLKPYTAEGYLAPRPVKTEKILTTSQALNLLKLRGYVIKDDLPDTAS

SEQ ID NO: 398559 - protein, 338 aa, unidentified
MKTYIGIDLHKRLQTWVALSEDGESILFTRTLPVTPEGVREGIRLARSVGGELITAIEPTCGWMWVVPMLREAGMEVHISNPRKVKAIADSLQKNDINDAHMLARLCRTGLMYESVEVAPEIRKLRSLVRERNFLVRTRASMKCRLEGVVTQQGRHLINGSLLTKKGTEAIIASGNEEWKRSVDTITDVSAHIVELDRTIAAYAKEDVPRLLMTIPGVGPVTAVSIFAEVGDFARFSSPAKLCAFAGIVPTERSSGGVQKLGHITRAGSTILRYVLVEAAMRVRKCDENIALYTFYRNIKERRGAMRARVALARKMLTISWHMVMKGEVYQQRLPAHL

SEQ ID NO: 398560 - protein, 373 aa, unidentified
MSLLVMGALFYVGIDWAASSHAVCVLDQTGRRVAAFSIEHSAAGFTSLVRGLSRLATVDRIAVAIERPDGRLVDILLEAGFAVVPVSPNTIKTWRESEAGSGAKSDAGDAYVIADYLRCRAARLDPVEPYSAATVALRTVVRTRDDLVATRVAATNQLAALLDAHWPGAKAIFADVESPIALAFLTRYPTAAHAKGLGAKRLEAFCREHGYSGKRSGEVLLARLRAAPPGTTDPTVRAAVAEAVLTMVATLKVLGETLKGLGQAYDGPDAVAALAGVTAVTKESGKHRAVHSRWACNKRLRVAITTFADNGRHASPWAARVHAEARARGHDHPHAVRVLARAWIRVIWRCWIDQVPYDPGRHGNARRLQPSWG

SEQ ID NO: 398561 - protein, 343 aa, unidentified
MEHSAGLDVSVKETNVCIVDDAGKIVREVKVASEPEALLAVQTNPAYRFKRIGLEAGPLSQWLFSALAEAGLPAICVETRHMRAALKAQINKTDRNDARGIAQMMRAGLYRPVHVKTLRSQKLRMLLTHRKLLQSKAIAIENDLRATLRNFGLKVGVVGTIKFEARIKELVEGLPDLIVLIEPMLVVRRTLREQIGVLHRRLLTVVRDDEVCRRLMTVPGVGPVVALTYRATVDVPARFRNSKAVGAVFGLTPSKHQSGEVDRSGAISRCGDDMMRTMLYEAAHIMLVRSTKWSWLKAWAMQIARRRGLKKAVVALARRLAVIMHRIWVDGTEFQWTRKAAAA

SEQ ID NO: 398562 - protein, 418 aa, unidentified
MDEEIIARLSRRYLALDIHKYYSIVAGVNFDGKVVLEPVRVEHAELEAWVKKHIQATDYVVIESTTNAWYIYDLLEPLAEKVLVANPIKVKQIAQARVKTDIRDTLILARLLAANMIPAIWVPSVEVRNLRYLLSQRRHLVGMHTQTVNRMHSVAHRHHLSHPKGKRFNEKNTGWQQDDELSDSEKFQLELDMSTKQHLDEQAGKITQKLARMSHEKPWAESMLYLMQLPGFGVITGMTILAAIGDITRFEDTKKLSSYSGLTPGLEQSGTKNRGKGITKEGRKDLRWAMVEVAGRAVKSDPHWRRRFDELCRRMHRNQAIVVIAHRLLELVWFVLTRRQPYRHFTHERIAYKYLTWSWQVNENDRDGLTRQQFTRYYLMRLGIGHDLERIALNPKYPRKLASEAELLALRPELTQTE

SEQ ID NO: 398563 - protein, 410 aa, unidentified
MEAIVERCAGLDVHQASVVACLTIGAAGAKPTKQIRTFGTTLPELEELRDWLAANKCTLVAMESTGIYWVPVYAVLEGHFEIVVGNARHIKNVPGRKTDVKDCDWISDLARHGLIAKSFVPPRPIRDLRDLTRYRSKLVQTASAERNRLIRLLESANVKLASVASDVFGVSGWAMLQALVEGQQSPAEMAQLARRRLRRKLVELERALHGRLEEHHRFLLGIQMRRIEAIEADIAELDRRLRAKLAPYARQMRLLMQIPGVDWVIAGVIIAEIGVDMSAFVNAEHLASWATMCPGNHESAGRRRSGKTRKGNVHLKTALVMAAKAAGRSKGTYLGEKFRRLTARRGALRAAVAVGHKILVAAYCMLASGSDYKDLGAGYLDQLNHHRAAGNMLRRLRQMGYDVQITPRAA

SEQ ID NO: 398564 - protein, 393 aa, unidentified
MGYVLFEQSDKKKKGKSHIFGYSSVVTPTKLSERRLAMIKRNKLDFTGQPIYIGLDVHKKSWSVSISTKYGQYKTFSQPPEVDKLVHYLQHHFPGALYSSAYEAGYCGFWIHDRLREKGIGCLVVNPADVPTKNKERKTKRDRIDCRKLSRSLRNGDLEGIYVPPRGKVEDRSLIRTRLSMVRKQTRCKNQIKSMLLFYGVVIPEEKEMGHWSRRFIRWIEGIRMKRASGDMALKIHLEELCHLRQIIAKLNRAILALSRTEEYRSWVLLLRTVPGISTLTAMILLTELGEISRFPSIDELTSYVGLIPDTDASGEKEHIGGITQRSHSQLRWILIEASWRAVQKDPALMMAFDQYCKRMRKTKAIVKIARKLLNRIRYVLKNRSEYVPAVLE

SEQ ID NO: 398565 - protein, 386 aa, unidentified
MQAPSVSTPITERISTIFVAIELSQKTWLVTVHSPDKDKISRQKVQGGDHSELLALIDRVRDRAARTLGAVPAVASCYEAGYDGFWLHRLLMAAGITNYVFDPSSIAVDQRARRVKTDRIDGETMLRTLMAYLRSEPRVARIVRVPTPEQEDARRGTRERHRLIKEQTAHTNRIKALLRLHGFAVGNPRRRDWLSWLAAQRDWQGQAVPPRILTEIEHEHARLMLVRKQLEALAQAPAAADPTPAAAEMTRRGELLLRLKSLGPAFATTLTQEVFYKDFRNRREVASYFGLAPSPWRSGGTNRDQGISKAGNPRARCSAVELSWLWLRHQPDSDLSQWFRQRTLNASGRTKRIAIVALARKLMVALWRFLTTGLVPAGAVLKPAKA

SEQ ID NO: 398566 - protein, 445 aa, unidentified
MQFHRTIGIDLAIRGDHVAQIFDNGRPVGRPIRFRHTAESLGTFIEAARAGLPPDVTVTAVMEPTGISWFPVASWLARAGIAPIRVKGQRVKALRRYLSEHAKTDATDAHVLGALPSFGGPTLDPVYVPTPAQHALQRLTKQREGYQADACAAKRRLLDLIRWACPALEVVLPDLLTRLALALLAEWFDPHRVLAARPRTLVAFVSRKAAGNHPHSGPVVDKLVEQLRHAARATLALHGAAVDFALLQFEVGLEIARLRLLLTQMDELEQHIETLYAELHPTDALRTIPGVGIHLAPVLLGVLHDGGRFRSQRHARGFCGLFPTRSESGGQARPGQHLTKSGNDRLKKALYLAADAARRVDPGLAEVYWRLMVRKGHHHKQALCAVATRLVNRIHAVLKSGRPYVLRDIDGRPIDLSEGRRIVAERFSVPDEICQARRRQPQLAA

SEQ ID NO: 398567 - protein, 412 aa, unidentified
MERVYERCCGLDVHKATVVACLRVPGERGRRRIEVRTFGTTTTELLALGDWLTEHRCTHVAMESTGVYWKPVFNLLESVCEVLLVNARHIKMVPGRKTDVRDCEWIGELLELGLLRSSFIPPEPIRDLRDVTRYRKTLIQQRAAEANRVQKLLELANIKLGNVATDVLGASGRAMFDALIAGERDGERLARLAKGRLKRKRAALGPALTGRFTQHHAFLLGQLLRHIDELDEHIAQCDRKVDEYLSPFANEAELLQTIPGVGRRTAEVIIAEVGVEMDRFPSAAHLASWAGLCPGNNESAGKRKSGKTRKGNQWLRRALIEAAWSSTRTRDTYLSSLYSRLARRRGAKKAAVAVAHSTLVAVWHILKNHVPYQDLGASHFDKLHTERLTRHYLRRLEDLGLKVTVQPIDEAA

SEQ ID NO: 398568 - protein, 340 aa, unidentified
MTIATIGIDLAKNVFAVHGVDHNGKTVLVKSRVTRAALPELIAGLPPSVIGMEACSGAHYWARLFRQYGHEPRLMAAKFVSPYRMAGKSGKNDAADAQAICEAVRRPHMRFVPVKDESQQAMQCLHRTRQGFIEEKTAIYNRLRGLISEFGVIAPQSTDALRRIVSEQKSYLPLQVQQCLDDLLENIDRIEDKVSEYDRTLSCMAKTDHRSQRLMELKGIGPTTACALVASIGNAHDFKNGRQLAAWLGLTPSQYSSGGKSKLGRITKAGDSYLRTLLVQGARSVLIGAEKRSDSFSRWVCSLVERRGYWRAVVAIAAKNARLCWASLHYGDDFRLYSAS

SEQ ID NO: 398569 - protein, 424 aa, unidentified
MKKRSYRSVSVKVVDTKQLCQELAWKRVVVGTDVAKEKFMAVLMTEDQQVGSTVRWNHPKETPLLIGLLVELKNSGAEIEVVMESTGSYGVAFQYALRKVGIPIYQMGAKRVHDAAEVYDGVPSKHDPKDAAIIAKLHLDGLSKPWPAPSDEQRELGAAVAIMRVFQEQASIQVSRLEGLLAMYWPELPRELELGSAAMSRLILKFGTPAEVSKREDEAREMMRRMCCPAEWEKKIERVIESAKISLGVPPVAGELEALQTLVMDMNRAQRAYRQRRKVVQEMGQQNEAARNMSTVLGKTTAAVIVSEVGDPRDYSSASAYMKAAGLNLKERSSGEHKGQVKITKRGSGVARQYEYFTVLRLIFRDAVVKAWYLRKVERDGGVKMKAIVAIMRKLHRALWYVARGALFDSTKLFDVRRLGLVAS

SEQ ID NO: 398570 - protein, 344 aa, unidentified
MPTEADRTLYAGLDLHKRNVFCGIKDQAGKPIYRQRLPAELPAILEALAPYRSQLRALAVESTFNWYWLVDGLQAAGYPVRLANPAAMEAYGGLKQTDDESDALWLAELLRLGILPEGYIYPAAERPLRDLLRRRLLIVRQATQSLLSLQSMVTRHTGRSVSAAVLQRWTANEVQATFAEAYTQAAAGGLLELLGAQRALQHRLEKQALAAVKRHGPFVRLLTLPGVGNSLGMTITLETGPIARFASAGRYASYCRTVESRCESAGKKKGENNRKNGNKYLAWAFVEAAHFAQRYNPRAQAWFARKTARAGRAVAVKALACKLAKAAYYVLRDDVEFDEQRLFG

SEQ ID NO: 398571 - protein, 466 aa, unidentified
MKHNRRRRPGKPRVSPSVLERINPNVAGIDCGSAEHFVAVPPDRDATPVRSFSTFTTDLHRLADWLTACRVTSVAMEATGVYWIPIYEILEARGFEVHLVNARHVKNVPGRKSDVSDCEWLRELHSVGLLRGSFRPTDAIVALRAYLRHRQTLIESAGAHIQRMQKALVQMNLQLPLVVSDITGVTGLRILRDIIAGRRDPSQLAEHRDHRCRASKAEIVAALTGNYRPEHVFVLQQNLELFDACQTQLAACDTAIEAHLQTLTAPMAAPATPLPPPRVTKKPRDNEPRFEIRIPLHQLTGGVDLTQIDGLTSYTALKLLSEIGTDMGRWPSEKHFTSWLTLAPKNKISGGRLLSSRTQPSANRAAAILRMTVMSLGRTQTALGAFYRRLAVRIGKPQAITATARKLAILIYRALKGELVYRDPGADAYDTQQRTRVLRRLRQRAATLGFELVSRETGEVLDGAVS

SEQ ID NO: 398572 - protein, 390 aa, unidentified
MVVAKQQQGLPHTKGGHQMNHNTIYVGMDVHKENFSLCAYTLEAEKASYHQRTEADYKEVLKYLEFLRSIYGNDANFICGYEAGCLGYTLYHQLSANNVNCVILAPTTMLEQRSKKRIKTDKRDAEIIAKCLAQHNYSSVHIPTAKDEETKEFLRMRDDHKLALKKIKQQILAFCLRHSYRYDGKSHWTAAHLKWLRSLTPEALYKEILDEYLLTYQNLSDKLERMDKRIEELASLEEYREAVKKLCCFIGVRTHTALSVLVEVGDFKRFASAKNFASYLGLVPGENSSGENQTRLGITKAGNRHIRLLLTEASQCYARGKIGFKSKELKSRQSGNTPEIIAYADKANERLRRRYYKMVLGSCKKHNVAKTAIARELACFMWGMMTDCIA

SEQ ID NO: 398573 - protein, 393 aa, unidentified
MICVGIDVAKDKYDCFILSSEGEVLADVFTIPNNAEGFDTLLQTIRRCARPADKIKAGLEATGHYSYNILGFLLNEGLDTYVINPLHTNLYRKSLSLRKTKTDRVDARTIAAMLMSDVDLKSYTDTAYHNEELKSLTRYRFDKVRERAKLKQSVSRLVTILFPELEKLVSSLHSASVYALLSEFPGAKQISSTHMTHLKAVLKNASQGRYGQEMAETIRNAARSSVGSVMPAKSLELQHTIRLIRELDAEIEDIETAIQAIVDEMQSPITTIPGMGVRMGAVILAEIGDFSRFDSPDKILAYAGMSPYTYQSGQLSLSGAYSHMEKRGSRYLRYALYNATKHVCHWDPTFAAYLAKKRAEGKHYNVALSHAAKKLVRLIFAMEKSQRPYCAAP

SEQ ID NO: 398574 - protein, 297 aa, unidentified
MTITTVGIDLAKNVFAVHSVDQNGRTVLVKPKVSRAALPELIASLPPCVIGMEACSGAHYWARLFRQYGHEPRLMAAKFVSPYRMAGKSGKNDAADAQAICEAVRRPHMRFVPVKDESQQAMQCLHRTRQGFIEEKTATYNRLRGLISEFGVIAPQSADALRHMVSVQKSSLPLQVQQCVDDLMEHVDRIEANITEYDRILSHIAKTDHRSQRLMELKGVGPTTACALVASIGNAHDFKNGRQLAAWLGLTPSQYSSGGKSKLGRITKAGDSGKIHEHARIYRLRSVAGSQILNFMS

SEQ ID NO: 398575 - protein, 320 aa, unidentified
MRNAVGLDISQNTFDAAAIVNGQRKQALFDNSINGFENFKAWLDGFDCELHICMEATGNYFEDVADYIGQFYIVSVINPYKISEYGKSRFHRTKTDKQDARLIAEYCHTAMPKDLPVRQKISIGHYRLKRLLALYDQLKTQKTAQKNRLKVAKDEFVRKIHHAQIQELDQHIQKVEAEIQAITNSNQDLKAVSDRLQTIPAIGKLTAAILTNYLLSGDFKTANQFTAFAGLNPQEKESGTSVKGRSSMTRYGNRRLKSALFMPAMVALNRNYFPDFVKRLKAKNKPKMLILGALMRKLLVVAYHVYKTQKPYNPERYKSA

SEQ ID NO: 398576 - protein, 302 aa, unidentified
MEHYAGIDVSLESASLCVVDATGRIIREAKVASEPDVLIAWFRGLEFAVTRIGLQAGPLSQWLYASMREAGLTVELLATRHVRAAFKAMPVKTDRKDARGIAQLMRLGWFRPVRCKSLLAQEVRALLTARKLLQTKNHDVEMSLRGVLHGFGLKVGPTTPRTFATRIRELVAGHPTLSTAAEALLAARSTLFEQWQQLEKRLRSLAREDHRVRLLTTVPGVGAIVGLTYVSAIDDPGRFRSSKAVGAHFGLTPKKYQSGETDVTGRISKIGDGGVRTALYEAANVILTRPVKGSTLKSWGCV

SEQ ID NO: 398577 - protein, 460 aa, unidentified
MSKKKAKASNQKIVVEMPLVNPYSAGIDVGDTEHVVAIPEGIDEERVKKFGTMTCHLQAIIEWLKSCCIQTVAMESTGVYWKPLFTMLVCHGFAVYLVNSRHVKNVTGRKTDEDDAMWIQKLHSCGLLKSSYLPDDEQEALRTLVRYRKTLVKDMSRFVNRMQKSLELMNIKFHTVIDDITGKTGKAVIEAIIAGERNAANFLPLIDSRIKADHETIQKSLEGNWREEHLFTLKESYEFYKVYRERIAVCDGQIEKQLQQYEASRNEGEIQIPETKQKAVSANPVKKKRSNKNNPLFDVRRYLERIHGVDVLAIYGLSDISGLELLGETGTDLSKWENELHFTSWLNLCPNNKKSGGKLISSKLMAKKPNAASQAFRSAANAVQKSDHWLGDYFRRMKTKGGNKYAVVATANKIAIIYYKMVRYKQEFKPLDLEKYQQKYKQAKIAYLEKKLKEPKQQIA

SEQ ID NO: 398578 - protein, 412 aa, unidentified
MDVTVERGAGLDVHKATVTACIRLPGPDRERAQVLQTFGTTTAALLTLRDWLTAHQGTDVAMESTGVYWKPVYYVLEDAVCVLLVNAAHMANVPGRKTDVADCAWIAQLLECGLLRGSFVPPPAIRELRDLTRYRTALIQDRTREANRLHKLLEDAGLKLASVATDVLGVSGRAMLPALVAGTTDPAVLADLARGRLRAKLPALRQALTGHVRGHHAFLLTHLLAHLDYLDELLAALSQEIEAHLVPFAAEAARLQTIPGVKQRSAEAIVAEIGVDMTRFPTAGHLASWAGLCPGNTQTAGKRRRGRARKGDPWLKGTLVEASLAAIRVKGSRFGALYRRICRRAGHNVAIVAVAHAILEIAWYLLRHGTTYHELGADYLDRRDKQRTTDHYVRLLEKLGHRVTLEPAAIAA

SEQ ID NO: 398579 - protein, 310 aa, unidentified
MIITRGFIGIDVSKHELDIFEGGSNRSYRIANAKDALSSLAVQWKADGAFVVFEATGRYDILLRRTLAAAGIAFARVNPARARDFARAAGFLAKTDRIDARMLAAMAQALSPAPAAEPDGDLEALTLAHKRRDQLVHMRQQERTRRTECDDAVLTSDIEAHLRWLDTRIAQWDEEIRSLLARSQRLSRIARLLRSIPGIGPVAATTLIALMPELGIQQPKQITAMAGLAPFNVDSGQFRGLRRIKGGRKRVRDALYMAAVAAARSHERFRSMYQRLRIRGKPAKVALIAIARKLLVTANAVLRDKTAFQT

SEQ ID NO: 398580 - protein, 363 aa, unidentified
MGTITMGVDLAKQVFSVSELDGNGRVRQRRDLKRDAFAAWLVQQPTGTVVAMEACSGAHHWARRCLEHGVVPQLMAAQFVKPFRKSQGNRNDRNDAEAIATAARQGNMRFVAVKTVDQQARLSWHRVREGYKTEGLAISNRLRGLLAEFGVVVARSDQALGRALADDGVRQQLPPMLHALIDDLQQHWQHVRRRITACDEGIAAHAKADVRSVRTQQIIGVGPLTADAVVATIGDGREFTHGWQLSAWLGLTPTQHSSGGKQRLGAISCRGDDYLRTLLIQGARSSLQRANVVALERATAEQIWIRSLSQRLPFGKVLVAIANKHARQLWAMLVRDEDYDAQAWLRHPMVQRPANHKNRSAAA

SEQ ID NO: 398581 - protein, 382 aa, unidentified
MQASTVDTPTAGHCGTIFVAIELSQKTWLVTLHSPDRDRISRRTLEGGDDAGLLALLEGVRTRVAGKLGTAPKVVTCYEAGYDGFWLHRLLTAAGITNLVFDPASIAVEQRSRRAKTDRIDGELLLRTLMAHLRGEPRVVRIVRVPSVEQEDVRRASRERDRLVKEQTGHTNRIKALLRLMGMAVSNPRRSDWLSWLAQQRDRQSRPVPPHLMSEVAREHARLMLVREQLAALEQAPTAAVAAAPAPMAERRNLLLRLKGLGAVFAATLTNEVFYKDFHNRREVASYCGLTPSPWRRGGIDREQGISKAGNPRARLKAVELAWLWLRHQPDSALSRWFAARTANAGKRARRIAIIALARKLIVALWRYLTTGLVPEQAVMKA

SEQ ID NO: 398582 - protein, 401 aa, unidentified
MPTLQDNGKRIKQFRELKATLRTNRSRLLVGLDIAQAEHEVQVRHAHTRIVVPQCTIPNTTRGFAQLWARIQQAQRATGCREIVCGLEPTGTYHQAVAAFLEGQGATVVLISSSVAYWNRRTQDGTWDKHDRKDAANCAELLEQGKVLFYSQPDGPLAALRHLVKLLRRARAELASCKARWRTTLRPALGPMGEPLPNRLRAELPAVLQPWERAAPGRPAVAKGRLPLGLATACADLGAQVTAVQARIAAIEAARTPLAERLPAYALLRTIPGIGPTVGAILLAEIGDVAWFTQFSQLRKLAGLDIIRVQSGQFAGQARISKCGRGLLRWALSQAALGQARTAAGRARLAALKAKRQGDRFAGLKATVELAAKVLRVVWGVWRSGTPYDPRRMGGRQRQAR

SEQ ID NO: 398583 - protein, 383 aa, unidentified
MRHGGILIEANDSEGEPMKKHTTINQSLSADVSTCVNVAVDLAKKVFQVAGENALGQVIFEDRIKSREAFQAFLLKLPASVMVLVETGPGAQAWARLLQAQGNSVRILPAQHVATHRSGPKNDRNDALAILRAGRDCRISAVPVKSAAALAMQALHRARQGYIRRRTAVGNQMRGLLLEQGVSMPQGEMAISQRIPRILEDATQPLPDLLRELIAELLVEWVHLGDRVNVLTGRLETAAKNDETAKRLMTVRGVGPIIATALLAKQTEPERFANARQFAAYFGLVPNQHSSGEKVRLGKMSKKGDAYVRSLAVQGAHAVLRQVRPDSEQPDDQRLQRWVSRLGRKEAAVRLANRNLRILWRLLQNDQTYRRQPGNSQETAMSH

SEQ ID NO: 398584 - protein, 330 aa, unidentified
MEVRRFVGVDVAKARLDVFIQPSGESFSAANDERGISELLRQLEPADFVIIEATGGLEVPVASALATAGIAVAVVNPRQVRDFARATGQLAKTDALDAQVLARFGEAVKPQVRALRDAQAQALEALVNRRRQLVEMLTAEKNRRANSPKVIHKSIDEHIRWLEKRLSGLDDELAGLVRETPIWRERDELLRSVPGVGKVLSTTLLAHLPELGALNRKQIAALAGLAPFNRDSGSLRGSRYIWGGRAQVRRVLYMAVVAAVRSNPAIKNFYAQLRARGKYPKSALTACMRKLLVILNAMLHNKTHWHATALTSSTSTLFSLGGAVSEHGCC

SEQ ID NO: 398585 - protein, 402 aa, unidentified
MNAVGIDVSKGKSMVAIMRPFGEIVSAPFEIKHTAGDIHSLVELINSVEGESRIVMEHTGRYYEVLAHQLSKANLFVSAINPKLIKDFDNDSLRKVKSDKADAVKIARYALDKWQNLKQYNVMDELRNQLKTMNRQFGFYIKHKTAMKNNLIGILDQTYPGVNTYFDSPARSDGSQKWVDFASTYWHVDCVRKMSLNAFIDHYQNWCKRKKYNFSQSKAEEIYGKAKELVPVLPKDAITKLIIKQAVDQLNSVSTTVESLRTLMNETASKLPEYPVVMAMKGVGTSLGPQLMAEIGDVSRFTHKSAITAFAGVDPGVNESGSYEQKSVPTSKRGSSVLRKTLFQVMDVLIKTHPQDDPVYQFLDKKRAQGKPYYVYMTAGANKFLRIYYGRVKEYLSSLPES

SEQ ID NO: 398586 - protein, 354 aa, unidentified
MKRRTKYVGLDVHQAMTVASVREEGGRVIARSIVPTEEPALVEFFSGMRGSIHVAFEEGTQAQWLHDLLLPVVDRVVVCDRRGESRRGNKGDQVDADHLSELLRRGGLRAVYHGSADRVTLKEFTRTYGNMVEDMTRAMLRLKALFRARGIKTPGKRVYHLKERAQWLAKLPERGARFRAQVLYTQLDVLRELRPKAKSVMVAEARRDPAWPVLRSIPFLGPVRVAQLMAIMRTPWRFRSKRNLWGYCGLAVVTSTSSEFKLVEGRPVRRRRKPLTRGLNRNHNPVLKDVFKGAATAATGRPGPLQEFYHAMIARGMEPELARVTLTRKLAAVTLRLWKTGERYDPTMLTVQAR

SEQ ID NO: 398587 - protein, 378 aa, unidentified
MPSENTVHIAIELSFSSWLVAARLTGAKKSRLHRIEGGDTGALLALIAELRSRALTELGGAAEVACCFEAGRDGFWLYRLLTAHGILVYVLEPTSILVNRRSRRAKTDRLDAEGMLRVLAAWLGGDRQVCSMVRVPTPEEEDGKRPHRERERLVQEKLRIENRIEALLFTQGIRARPSLRSWERELTELRTGDGRTLPPLLRAELDRLRRRLVLILEMVRELEAERAAALAAAPDEAMAQKITSLQRVRGIGANFSAVLVREVLYRSFANRRQLASYVGVAPMPFQSGGMDRDRSISRAGNARARTTLIQLAWLWLRYQPGSALATWFRERVGTLQGRTRRIAIVALARKLLIALWRYVEAGVLPAGVEIRTGTVPAA

SEQ ID NO: 398588 - protein, 343 aa, unidentified
MDHFAGLDVSVKETSVCIVDETGKIVREVKVASEPEALLSVLKNPAYRFKRIGLEAGPLSQWLFSALAEAELPVVCVETRHMQAVLKAQINKTDRNDARGIAQMMRVGLYRPVHVKTLRSQKLRMLLTHRKLLQSKAIAIENDLRGTLRNFGLKVGLVGTVKFEARIKELVENLPDLAVLVEPLLVVRRVLREQFVILHRRLLAIVRDDEVCRRLMTTPGVGPVVALTYRATVDVPARFRKSKAVGAVFGLTCSKYQSGEIDWSGRISRCGDEMMRVMLYEAAQSMLHSKKWSWLKAWAMQIARRRGKKKAIVALARRLAVIMHRIWVDGTEFRWTREQAVAA

SEQ ID NO: 398589 - protein, 344 aa, unidentified
MDNHTQYSGFAGVDLAKKVMQIHFVTGDGEITDKQVKRAEFLDFFRNRTKCLIGMEACGASQDWARKLEAMGHEVHLMSPKAVKPFVSGQKNDYNDAIGIYKAMFNGVRRVPVKSTEIRDLQTLRRIRSQVTKDKVKEINHVRGLLAEYGIVMGKSITAFNKGISSALESLKERGDVSPLVAEELQTTVESIKTKIERQKRLDREIEQLARGCKNYENFLKTPGVGPFTAAMLCVLLCDPAIFANGRQFAAYIGLAPRSRGSGGKNFIIGIPSKFNCDSESRAVLVECAQAIARCKNKSLWVEEILRRKPKKVALIAIANKLARQVWAMANKGESFKQMTILTA

SEQ ID NO: 398590 - protein, 430 aa, unidentified
MTTEDRVAVWLGIDWADQRHQWAMRINGETRIQQGELEHTPEAVDHFVSALAMRFPGQRVAVALEQSRGALIYMLGKYEHLILYPIHPNTLNHYRKSVYPSGAKSDPCDAALILDFLHAHTDRLRPFHPDTVETRTLQLLVEGRREAVDEKTRYLNRLTSQLKMFFPQVLEWFSTPDAVIVGRLLQKWSTLDALQQAPTRQVVRLLREQRLPDSRIADLQQLIKHAVTAIKDKAVLEASVLVVRRLVRQLEILRETIAEHDKTIADLAQSHPDYSIFSSLPGAGPAMAPRLIAAFGTQRDRYATASALQCYAGIAPVTESSGKQRWVHWRWACPKFLRQTFHEWAWLSTRKSQWAKAFYDQQRERNKSHHGAVRALAFKWLRILFRCWKDRVPYDQPRYTLALQKTALAKPVEFRLKKISGFTTLDGLSC

SEQ ID NO: 398591 - protein, 320 aa, unidentified
MSNKKSKPFIGIDVSKQQLEVAAHERDFKFRCPNKASAFGELIAELIVLRPALIVLEATGGLEIPVVNALHAAGLPVLVVNPRQVRDFARALGQLAKTDPLDARVLAYFGAALRPALRPIKSKEAQDLDALAGRRGQLIEILTDEKNRHASAATKTVRDQIKKHIDWLEDCIAELDRQLKMLVQSSAGWKGKDQILQSVPGIGPVVSLSMIADLPELGKLTRQQISKLVGVAPLNRDSGKQRSPRHIHGGRARLRSLLYMAAITAKRHNPVIKEFYERLRANHKPFKVAIVACMRKLLTIINVMLRDSTCWKFQNESVSA

SEQ ID NO: 398592 - protein, 392 aa, unidentified
MLFIGIDVSKSKHNCYLVDSEGTIYENNLQIQNDIHGFKTLSQKITSICQAHNHKKVKIGLESTGHYSTNITNYLYSEGFEVIIFNPIITNNNRKSNTLRKTKTDKTDAKVIATMLFTDDSKSYSPISYQIIELKSLTRHRHRMVSQRSKFKVSLTRLITIIFPELPEHIYSIHQTSSKALLLELPTTKDISNCHLTKLTNLLKKNSRGKYSRNKAIELKNLAAESIGSSNRATAFELKQTIRFIQFLDSEIKIIDKKIKELMDEINTPVITIPGIGHTLAATIIAEIGDIHRFPKPSKLVAFSGLDPSVCQSGNYNATHTIMVKRGSKYLRWAILQAAKTVTMRDKTFKDYLSKKLSERKHYFVALSHVGKKLIRVIFHLLKNNISFVPQT

SEQ ID NO: 398593 - protein, 349 aa, unidentified
MKEQRRSYAGECVYVGVDVHKETYTGTCVCHKQIVKPATVQAEPGGLAVSLPRGFPGATLYSVYEAGFSAFVLHRVLTKAGITTMIVNPASIAVAANDKVKTDRRDSKKLAIDLADGRLRGIYVPTEAAELARLLPRTRAQIVEHRATIARQINAKLHQFGLIAPSSRRMISNRYLREMATWTLPPELSVSLTLLAEQWRFATRQLIEMRRLLRDQAKAQEEIEKVYRSVPGIGEVVARTFATELGDMTRFANERALFSYTGLTPSEHSSGTAVRRGSISRQGSSRVRHLLVETAWRAIPRDKALKEIFDRIAATRGKKRAIVAIARRLTGRIRAYFRQGTTYAVGTAA

SEQ ID NO: 398594 - protein, 344 aa, unidentified
MTYSNVIAIDLAKHVFQVCKASHDGTVIYNRTCSRQKLKELLVKEKTALVAMESCGGTHYWARFAREQGHELKAIAARIVKPFRQGQKTDANDAIAISVAARQPHIHSSRLLSIADQCQQSIVRARDLLINQKVKTSNHIRSLMLELGIAITKGDKALKQAIPEILEDAENDLTTGFRMTLNVMYKHFQILLDEIETVSRQLNQEVAQDEICQRLKALEGVGPICAIQLKIALDPAHYTKGREASACIGLTPVQHSSGGKQKLGSISKRSTHNALRSALFQGALAVVVNVEKREARTHKDAWLKALIARGGKKLAAIALANKTVRTAFAMIKHNQEYQPQLLVA

SEQ ID NO: 398595 - protein, 317 aa, unidentified
MSNPESFVGIDVAKAWLDVAWLDGATLRIDHSDEAVAGLVQRLRSQPPTLVVMEATGGMETELASALVAAGMAVAVVNPRQVRDYAKACGRLAKTDRIDAMVLAAFAAAIRPQVRELPDEHTRALSDLLARRRQLIDMRVQEKLRLPRASSVQRTSLREHIAWLDERIDRLDVELTHALRNSAAWRDKDDLLKAIPGVGSLTRATMLGLLPELGTLSRRQIAALVGVAPFNRDSGRQQGQRVIWGGRAQVRRTLYMAAVAALRCNPVIRGFYQHLRSQGKPAKVALTACMRKLLIIMNVMLKHHRAWSPALDTQHGC

SEQ ID NO: 398596 - protein, 460 aa, unidentified
MTLLAQLGSQLPQRYYLSLDIGYKEHVAVVIDLQTFVRGDDRWKRARCLHFPSTRVGLKKFQKYVDRFCPDPAAFLGLCEPTGGFYGATVLQYLLDGGYQMLLVENATTRHMREKIFPNLPKTDEMDARVMARIGYLHEAVGEEFTLRPLELPDPDDADLMALCRDSWKLSTLITRARNQFTQLIAVTFPELKTFFTSSVSTVVPVSLITAYPTPALLAEAPAEEVHQVLWEARDYQHARRVDGLQALARNSSGLLPDPGRVWRLNWLTCFLLTNFHHQAALDKRIKELLEQREDYELIVHVPYSGPATLGVILAVTGDVGRFSNYRQYVAYTGYFAGLEKSQTIDRTRMSKRGNRDLKRALFQIAAPLVWFDQGDNPYKALYERKMAEGRAWYEAMPFVCAALARHIYHCLKFKDPYDVERAFRGSSPIPASEQALVDLRADLDERFEVMDVHLCQIEG

SEQ ID NO: 398597 - protein, 279 aa, unidentified
MKAYVGLDVSQKKTAICVVDAAGEKICQASVDTSPVAIRSYLVAQGCEDAKVGMETGPLAVWLYHSLKSADVDVDCIHAQHVHAALSMQLNKTDQNDALGIAKLVRSGWYRPTHVKSLDCHHQRLMMTAREKLVQIRVTITNQIRGLLKTFGVILPPGKNSVFKRSILESEPTIEAVKPVVLMLLDTWTHITAQIRTLDKILAQQAKNDPVCQLLTSIPGVGMLTAISFKTAVDDPTRFNSVSDVGAFLGLTPKKYQSGEVDRNGGISKHGSRQTRSLL

SEQ ID NO: 398598 - protein, 341 aa, unidentified
MKKTEYVVGVDIGAESVSIAALKGPDGAGLAELSVTNNPEGFEGLKGWLTKHSLTIENAAFCLEATGVYGEALCYYLCSRGFHVAVEPPLKVKRAFQQSAHKNDAVDARQIAEYGHRFFDELSWWTPPAAVLEQVRVLLTAREQFTGQKIANANALKALERKTITTRIAIQAYEQAIARLTENIKEIDQEIKRLVKQDDSFNRLISAITSTPGIGMLLAANLVVMTGGFARTRNHKKIASYTGISPIEHSSGTSVYRRPRSRRFGPSRMRKLLYLAAMSVSTHDPAFRRYYLRKVAEGKPKRLVLNNIANKLLKVVCALVRSESTYIHHYRSVQPFLLKTA

SEQ ID NO: 398599 - protein, 406 aa, unidentified
MEGPIITVDVSKGSCHYQPFIENGHPMRKPKQLSATIDGFQKLGQTIKDLEAKTEREDIPVIFEATGVYHRPLQKYLEDHKIRYYIISPLLSATYRKTDLHSNKTDALDCAHIAKAYYCEKELRQYQAQPQEYKRLYQLSRIYESELVHLRKRKVSLRSMLDIIYPRIDKTFKGNQNLYDPIPMEILKRYPHPSLLLSHREDTIVKTVGHRTGHLKGYTERIVHKIYEKAKECYSGCEINDIEVINLPRLIENVQEQKKKCDSLLKEMIEIARTCPYFASVVSIVGIGENLASRIIAELGDVNRFDNRAAIVAYAGLNPKIQQSGDIDGLHLKISKKGNKHLRCLLYLGAQCNYRLRKEDPLYEFTKKKRQQTQCPLSSKAAYTASAHKLLVIIYSLCKNGTRYHS

SEQ ID NO: 398600 - protein, 319 aa, unidentified
MPNVSVGIDIAKLSYQVHLVINNHSYSKPFRNSPADFYKLLDWLEKVPAGQVHVCMEASNRYWEHLAKFLYDAGLMVSVVNPTRIHNYAKCKLTRNKTDPLDAALIADYCTTQNPPLWTPPAPQVQELQAMIRHLDTLKQMRTQEYNRSLLENPSESVSDFVSQHLSFIEHQIQQLTDGIRQHMESHEDLKTSLALLESIPGIAFLTAAKLLGENIQNFKSTRELAAYAGLNPSFGISGTSVRHKPKLSKIGSIHLRTALYLPAVVAMHHNPSIIDLRQRLEKRNKHKMVIIGAAMRKLLALSLGVLKSGLPYDPAYSS

SEQ ID NO: 398601 - protein, 376 aa, unidentified
MLISVTEGKQMRKAGTERLCVGIDLHKTQFTACALSETGEYLLEKKYLTKEEGYHEFCSEMHDREAEGYSIELAVETTGNARFFKNRMEKEGFVVKVVNTNKFKVITMSTKKTDANDAATLAYYLVKEMLPESHLCSQTSEEIRRLLKTRSILVQSMVKIKNQIHGMMLGYGIETTAAQFQSKRKRQELMDDLADHKYSDFTASSLKVMLKILDDLSAEIKEIEKHLEEMVKRNGDVALLMTVPGIGINTATTIAAYTENLERFEGDYKRFAAYVGIVPSVHNSNETTHYGRITKHGPQELRTAFVQAAMGMLRLTKETSEWRIIKEYQRRKAEKGSGRAIIALARKITRIVFVMLSKRKSFNPALMRYDDIQQTA

SEQ ID NO: 398602 - protein, 341 aa, unidentified
MRIVEVTGGVDTHADSHVAAAIDDNGGLLGIESFPVSKTGYVELLAWLADLGEISRVGVEGTGSWGVGLSRFLTDHDVTVVEVDRPNRQQRRKVGKSDPSDAVSAARAALSGTATTTPKSRDGAVEQMRVLLVARRSARQQRIQTLNQLRHLVFCAPEPIRTRFKDRYKTGLISEAANMRPRPGSDPVTYTTNLVIRGLARRIQTLNSETKTIDHALTQLIEETAPSLLDLHGVGTDTAASLLVAAGDNPDRLHSERSWAHLCGTTPLPASSGKTTRHRLNRGGDRQANAALHRIVLTRMSSHPETRIYVARRRAEGLNTPEIMRCLKRYVARQTFKHLTT

SEQ ID NO: 398603 - protein, 399 aa, unidentified
MFYGLDVHKEFIQVCALAAKGTKRKEFRIGGSAEEVEAFAKKLRPDDQVVLEATFHTWILHDILSRHVDRVVVANPLQVKAIAQAKIKTDKVDAFTLAKLLRADFLPEVQLPDSKAWALRQLISHRRLLVKQRTATKNSIHAVLNRRLVHNPNKDPFSKRARQWMKSLELPAAESFLLQNSMTLLEDLDDRIDAVNQELLEQASIESNARLLMTIPGIGVTAAIGLIAAIGDVHRFATPDQLASYFGLVPRVSQSAGRCHHGKITKTGSSTVRSLAVESAQILARSSSPLTATYWRVRRKRGHNVAVTALARKIIVLVWYLLTKQEPYRYGEPLLARRKLRKATLPELRQRSKRVPQTLDAVYEEAGLPPLAHPSEAERRTVAINRRARTRISNSLKTH

SEQ ID NO: 398604 - protein, 392 aa, unidentified
MVISVGIDVSKDKHDCFIVSSEGEVLADVFTIPNTMDGFHCLLQRIRDCITPQDKIKVGLEATGHYSYNLLGFLLDNGLATYVLNPLRTNLYRKSLSLRKTKTDRVDARTIAAMLLSDAGLKPYTDTAYHNEELKSLTRYRFDKVKERAKLKSSVSRLVCILFPELEKLVPTLHMASVYALLEVFPGAKQIAAAHLTRLKALLESSSKGRYKRDMALEIRDAARNSIGSRMPAKSLELQHTIRLIRELNAEITEIEEQIQSIMDELHSPITTIPGLGFRMAAMILAEVGDFTRFDSPDKLLAYAGMSPSTYQSGQLKNCYPHMEKRGSRYLRYALYNATKYVCHWDPTFADYLAKKRAEGKHYNVALSHAAKKLVRLIFAMEISGMPYRLAA

SEQ ID NO: 398605 - protein, 466 aa, unidentified
MENNYILYVGMDVSKGKADAAILKVSDRRSVKPKFLRKKLSFKFVKSEVASFLETVRSYSDVNCTSICFALEVTGIYSTNVYNFIKDNLNDNESIKFLNTDFVNQWRNAHNIAKSDPLDAQTISTIIGTDSDVQYVNDNVFENKNGYQDLKALVHRHYQIKKIYSQEINRLIAQCDCLFPELQYVFEPKSAAFIAVLSSYPTTHDIINASRVEVFDVVYEATKHRCSMDKVDKLFELCQDTLVPNDISSYGKSIILDLVENIKNIKGQLKSIERYIKDIASLNPAYKLLLTITGCGPLTAATVIAETGDIKRFKNADCFVSYSGTSPRNKRSGTSVETMGKISKKGSRYLRHAIYMIAEFARRHNPVLKHQFERIKNGNKKRHKLANIAIANKIARYIYSIMKNESSFVILHEHIMRLPEETQNTFFNSISLDFPKNTRKQIYQYSDINGELHRFVYIKTDEMIPA

SEQ ID NO: 398606 - protein, 410 aa, unidentified
MSILGVAVDPATVIVAVDPGKVLNRVWVSNGSGLLDDPISLPVSREGIDHLERLLTAHAAPGPLVAIEATGSLHRSWASELERLHPGAVRLFAPSETKAARVQLGSGRFKTDDRDCAALTYLARQGAGRRHCEEVAVDALRAAVRHRRGLVADRKVAQQRLHDQLNALCPGLSAPSGHGRRLAIETSTGQAVLTCAAAFAGKAPKTRSLIDRAPGRLTEATAGYWVQRWRGCLPAPADAEQRARRLGRDLERYRILRLDIAAVEDEICVLLRATDGQILTSLPGVATLRAGAFAAHSLPIGRFPDAEHLYSATGLAPALYESATVRRRGRISRQGLAEHRDALMGIAWGLSRCSPSFARRDAELRARGMRPIQARVAIARNACRLAYRLLVTQEPFDEEAYLRGRLSRGR

SEQ ID NO: 398607 - protein, 415 aa, unidentified
MTKLMEAMFRCCAGLDVHSETVAACVRRMDDLGRIHAEVRTFETMTHDLMALSEWLKAEGVTHVAMESTGVFWKPVYNILEERFQILLVNARHIKNVPGRKTDVKDCEWIAQLLQYGLLKGSFIPPLAQRELRDLTRMRTQLTREMVSVANRIHKVLEDTNIKLTVVATDILGVSGRKMIQALIAGETDTAKMAGMARGRLRNKIPLLQHALVGKVTEHHQFMLKMLMEQLIYLESQIDRFNRRIEEAARPFEKAITTLIPMPGYERVSAQSVIAEIGPDMNPFPADTHLCSWAKLCPGNNESGGKRKSGATGHGNRWLRTILVQVAWAASHKKGSYFQAQYRRLAGRRGKKRAIVAVAHSILTVTYYMLKFERSYKDLGGDHFDRTARDRVRRYHTKRLESLGYDVKLTEKKAA

SEQ ID NO: 398608 - protein, 352 aa, unidentified
MKTQSTALIPKLYIGIDVHKKSWTFHYQTDLFDGKTITQPANPNTLVEWVQKHYPKHEVTCAYEAGFSGYSAARLFHKQNWNVLVLNAADIPKPQKQNVVKTDQIDCRNICKQLKNDALNSITIPEEQRESFRSLFRERNNLVEGLRHVKLQIKSHLMYYGIVIPEEFDNPNWSKNFIEWIQTQKMSYETGTEKINFLLKRFNFMHYELLNISNQLRAYARKHYKKDYYLLKSVPGIGGIVAVSILAELGDLRKYNRFDDLASSVGFVPGIYSSGDTTIVSGITPRAKGLLRSYIIEASWQAVRFDPVLQEYYRSHYGKKPNKIIVKVARKLLSRIHAVIKTETPYQIVIIK

SEQ ID NO: 398609 - protein, 421 aa, unidentified
MFKIIKFNCCGLDVHKTWIYACIGITDSNFRTEYYEARFSSFPKDLRRLSSWLQEHKCEEVCMESSGKYWIPVFNVLEQTCKVKLAHPKYTKPQKGNKTDRKDARWICDLFMCGMIKPSFIPPPAIRHLRDLIRYRTKLTNMLTSEKNRALNCLTVSNMKLDDVFADVFGKSSRSITEYILAHPGEKFDVTPFVDRRCKTPIDVIQDAVDGAISPEQAVKLRECLNHIDELKAHKDRIEKEIFDLVEPFSGCLNLIRTVPGMDKNPMTAITILSEIGSDMSVFPTAKHLVSWAGCCPRNDRSAKHVKSTRISKAGSCLKPLLVQVANAVIKSDKHPEFHERYRRIKSRRGHKKAIIAVCKMFLTAIWNMLSTGEVYNPSGYLIQTPRPTPETKVLTQKQALELLRLRGYVIKDNPSEPSFA

SEQ ID NO: 398610 - protein, 410 aa, unidentified
MDVVYGRCCGIDIHKRIAVACVIVSEKKGRTRKEIRTFGTMTDDLLALADWLASEGVTHVAMESTGVYWKAPFNLLEGQFEVLLANAQHIKTVPGRKTDVKDAEWIADLLRHGLLRASFVPDRPQRELRELTRYRTSLVRERAAEANRLQKTLEGANIKLGDVATNVLGLSARQMLDALVAGTAEPATLAQLARGRMRAKIPQLERALSGRFAAHQRFIVGQQLAHIDYLDEVIERLSAEVAERLAPFDTMIERLDAIPGIARRTAEILLAEIGSDMSRFPTAAHLASWAGMCPGHHESAGKQYDGKTRKGSPWLRQALIEAAAAAGKTKDTYLAAQYHRLVPRRGRNKAAVAVGHSILVIVWHLLQHDCPFVDLGSTYFDERDRAATERRLVRRLEQLGYSVRLDRPAA

SEQ ID NO: 398611 - protein, 316 aa, unidentified
MEAIFENCCGIDVHKKTLTACIMIGGEGKITKKEIRTYSTMTEDIEGLRDWLKSEGVTHVAMESTGIYWRPVYNILEEGFEIMLVNARHIKNVPGRKTDVADSEWLCRLLRNGLLNGSFIPPIYIRQLRDLTRYRSKLNNNIAAEKNRLQKYLEDANIKLSSVATDTLGVSGRLMIRDIIKGNTDAEGLSELAKGRLKNKKEELKKSFNSRVTEHHRMLIEMSLKHIEYIEGMMVKLEGEMDELIKKQNLANDLELLDTIPGVDKIAATAIVAEIGADMSKFPTDAHISSWAGMSPGNNESAGKKKAQGPRMETYG

SEQ ID NO: 398612 - protein, 387 aa, unidentified
MDTIYIGVDFHARQQTIYIGVDFHARQQTICYLKTETGELVICELKHQDKQKVRTFYAQFRGQVIVGLEASGYSPWFERLLEEQGCEVWLGHATEIRRRARWRQKNDRRDAELILDLMLHDEFPRLHRPAVESREVLRMLRYRQKLIKIRTMSKNSLQALALQAGLARGNRLFTKDGQQQLGAAEMSPVMQWQREHWLQLLQPLNQQLLETMVWCKAQSKGDICITRLRTHPGIGLLTSLCLVHTLQPVSRFRNSRKVAAYAGFDPVERSSAERKCFLGISKAGSRLLRYLLVEAAQTAVRKDEDLKRFYKRLAERRGRPKAKVAAARKLLIRAYIMLRDEIDYAEFRHRAVAARLARRGQRPNVPEVLIGQPASAAGQEELTRVHK

SEQ ID NO: 398613 - protein, 344 aa, unidentified
MHITSIGIDLGKTTFHLVALGERNKVLVRKKFSRAQLLSYTANLPSSLIGLEACAGAHFMGAALREQGHEVRLIPAQFVKPYRKSNKNDFIDAEAIAEAVTKQNMRFAQIKTEEQLDVQAMHRVRDRLVQRRTALINEIRGFLLERGITFAAGPTHLRKNLPEVIEDAEQNLSPRLRWLLGRLWQEWKQVEIDIQAITDEIERISKENALCRRLRQIPGFGPLVSTATVAAIGNGAAFRRGRDFAAWVGIVPRQYSTGGKQKLFGISKRGNMYLRRMLIHCARAVLLRVKYDTGGFGQWVHRLAQRAPRNKVIVAIANKLARIAWAVLSSGKDYHHQPLQMTAA

SEQ ID NO: 398614 - protein, 371 aa, unidentified
MDHTRFVGLDIHKERISVAVAESGRSGAVEYLGEISNDAVAIDKLCERLARPGKPLAFSYEAGPCGYGVYRQLKSLGHRCDVVAPSLVPKRSGDRVKTNRRDATMLARLHRAGELTPVWVPDADHEAMRDLIRLRGAVRQVVTRARQHLQGFLLRHGRKHGRGTAWKMAYRRWLSTLSFEHPAQQIAFQDYVDAVMDGERRLKRVEEQIFGLLPDWNLRPVVDALQAMRGIALINAVVLVTEVGDFTRFPNPRQLMAYFGLVPGERSSGETIRRSGITKTGNSYARRALVEGAWAYRMRARIGRHKVDRIEALPKIVRDIGWKAQVRLCTRYRRLRARGKTANVVNVAIAREMVGFIWSIACTVQSAPQAV

SEQ ID NO: 398615 - protein, 468 aa, unidentified
MPSKKSPKKRELDQLACVFPNAAGLDIGSAEIVAAVPPDRDAEPVQVFQTFTPDLHALVAWLLECGIDTVVMESTGVFWIPIYELLEAAGITPYLVNARHVKTVPGRKTDWNDAQWLQKLHALGLLAASFRPDAEIRTLRTLVRYRAELIERRAPHINHMIQALKHMNIQLNLVLTDITGKSGLAILRAIVAGARDPQQLACFRESGCKHSEAEIAKALTGTWDDAQLFILEQALEIFDYYTAKITGCDDKLEQQYQALESRAEKEAALPDLPPAKKDSRSKNALSFNARAQIARVVGVDLVAVMGLSAVTVQTIISEIGTDMELFPTVKHFCSWLGLAPHNDKSGGKVLRSRTMKVRNRANQAFRQAAQSVAQSDSSFGAYYRAMRARLGPKQAIVATAHKIARTVYHLLKTREPYQEESAAEYDRKRRERELKHLARRAQKLGYTLTVAQATAPESSPEPGGEGRF

SEQ ID NO: 398616 - protein, 358 aa, unidentified
MQIIGVDFHIRQQTIAMFDTETKELVKKTLKHDGAEVREFYSALPRPVQVGIEATGSMYWFLDLLEELGIERHVGHPAQIRAAEPRKQKYDGRDALLLLRLQIENRFPAVWIPSKELRDLHALLRHRHQWVRMRTRVQNALQAIAVSHGLRRGPSLWSQIGQHAIASLPLAPHAADRRNELLTLYATLSTKIDELDEQVKDQALQRSGAKLLLTHPGVGPVTALATDVFLGDPTRFTDGKALSSYIGMIPSEYSTGGRQRLGGLSKQGNPLLRFLWCEAGMHAVRRDPELKRFYRRKLHQKGLGKVRVAVARKLGIRLWIMLRDQIDYQEFCRRGQLRQKSGAARAGMPEGVHGPATS

SEQ ID NO: 398617 - protein, 332 aa, unidentified
MDNFYFIRVDVSKKKLDFCVLFEGKVLREEQVSNHQQAVARLIGELKNDLEMDNEQFLICAEHTGQYTFPLVCACKSVECKLWLENPSQIKYSSGMQRGKNDKVDAKRIAIYASRFGDKVKYYDRPSEEIERLKQLERERALYVTDLAKYKGQMYDQKDFMPAALYRKKTKRMKGLIQELQAAIDAITAEMEKIIGSTEVLARQMELLMSIDGVGKVVALNVIIETEAFSRFDNPRKFCCHAGVAPFSYTSGSSQHSKNKVSHRANKNIKKLLHMAAVSVTHRKEGELKAYYMRKVEEGKNKMSVINALRAKIVARMFAVIKRNEFYTPIYS

SEQ ID NO: 398618 - protein, 342 aa, unidentified
MKQYVGLDVSQKETSVCVVSETGQVIFEGKAKSDPGALIAVIRKHAPHAARIGFETGSMASWLWHELRRVDLPVVCIDARHAHAALSVRMNKSDQNDARGLAELVRVGWYREVKVKSEESQRIRSMLVARSRLVGIRRDIENQVRSMIKEYGLLFRRAVGLQFRNEVDLLVGEGHQLRAVIEPLLLIHGQVCEQQSKFDDEVRRLAKSDETTRRLMTVPGVGVVTALTFRHTVDDPSRFHSASSVGAYLGLTPRRNQSGETDRNGRISRWGDGLMRTYLFEAATVLLYRTKKWSSLKAWGMKLAKRIGMKKAKVAIARKIAVILHCIWVDGTSFEWGAMKAA

SEQ ID NO: 398619 - protein, 427 aa, unidentified
MLSETERLNAFRQMRSSIRNSGQYLIVGIDIAKEKHHAFFGTAAGKTMCKQLIFSNDISGFELLVARAEQLRLQHQLIQVVFGMEPTANYHKPLAEYLIQRDAMVVQVSGTAVTRNRELLDNRWDKHDRKDAANVADLVGAGKCQFYDNPPQAIYDLRELLSLRRRYRKLESGLRTRIRNNLLALYFPELDRRFSTYQQDCLTIISTCFSPVVIAAMPFEEFCWRIVTRKKGNRQIAFLEDIWNTAHHSIGRPVDESVQYMAERMVAQLGQIRADIADLDQQIFKIASSLPYYQYLISIPGFGPFITAKFLATINDPGRFSNEAQVIKLAGFDLCASRSGKPAGKAVPVISKKGNAELRFALVQAAIVATTRNTLFIKYLSQKLQGREQEKGILKKMRTKVASKLLVIAWTLMKHNEYFNAEHLKLT

SEQ ID NO: 398620 - protein, 321 aa, unidentified
MNTFYLGIDVAKAKLDCALRLANGKYKNKVIDNNLPGFKLLSEWLVKQQVTTLQVCMEATGVYWEAVAEYLADQGVLVSVVNPAQIKAFGKSHGVRSKTDQIDAQSIALFCSEHHPKAWQAPTPGERALRAMVLRLEALQVMRTQESNRLLVARDAVKPGITSHIEWLDKEIKALAKKISEHLDSDPDLKDKQALLDSIPGLGERTIATYLAFYANPADFGNARRAAAFAGLEPRHHESGSSVKHPPRMSKIGHAFLRKAFYMPAMVTLYKTAWGKRFRERLAAAGKPPKLIIGAMMRKLIHVAFGVLKSGKMFDPALHGC

SEQ ID NO: 398621 - protein, 481 aa, unidentified
MKAKQRGKSDPASFAKRSKWHDMNRKQRRETMRKLQSEDLSLEVIHPDAAGIDIGNESHYVAVPQKRDREPVRRFGCTTAELKSIADWLKQCGIRTVAMQSTGVYWIAVFDILEEAGFEVYLVNARETKNLPGRKSDVQESQWLMKLHTYGLLRNSFRPAQEIRTMRTYWRQRNDLVRSASRHIQRIQKTLTQMNIQLANVLSDVSGVTGQTIIKAILGGERDPHQLAAFRDPRVKASQEEIARSLEGHWEPDLLFVLKQEQEGYEFCQKQISQCDGQLEHYLLQREDRSHGAPLPEEKRKTRLRKKYGNNPQFDLRAELFRMTGTDLTRIDGIDIVTATTIFSEAGYDMSRWETENHFVSWLRLCPDNRIRGEKIIGQGRLPTNNRATIALKMAASGLRKSQTYLGAQFRRLRTKLGAPVAIKAMAAKLARLVYRMLRYGMNYVDQGVQFYEAQHRKLQINSLKRKAAQFGFQIVEALAA

SEQ ID NO: 398622 - protein, 449 aa, unidentified
MGKAKPQVIDDDEQQRVFDRVAAVDVAKATGMVCVRLPRQDGSRYSKVWEVTATMGAVTELGRQLMKDRIEMVTLEATSDYWRIFYYVLEMCGLAVQLVSPSQAKNLKGRPKTDKLDSMWLARLTEWGMLRPCFVPPAPVRALRDYTRARTDLVRERTRCWQRLEKLLEGALIKLSSVASKLTTQSAQDMITAMIAGERDPRVLANMAQTRMRAKHDALVEALTGMFDSHHGELAEMELDQIAFLNKRIGKLEASIRETLAQIPAAQGVNADGTTGPDAGRGPDAAVLPAALRLAEIPGVSEQMAAAIIAETGLDMTRFPTAAHLVSWAGLCPVASQSGPRSRGGKKGHGNTYLRSSLGQAAIGSARTATFLGERYGRIARRRGKAKAQVAVARSILVVIWHLLADPAARYTDLGPDYVARRTDRDKKIRNHVRGLRAMGLEVTLTPAA

SEQ ID NO: 398623 - protein, 377 aa, unidentified
MKRIKFVGLDVHAETITVAVADQDGEVRSLGVIPNREESIRKLVKKLGPVEQLRFCYEAGPTGYVVYWQLTTLGAKCEVVAPTLVPVKSGERVKTDRRDALKLARNHRAGELTPVWVPDAAQEALRDLVRAREAAKKDQLRAKHRLGKFLLRHGRRPSTGVKPWTLNYLSWVKHEVHFEQMAQEATLLDYLHEVEHADLRIARLNLAIEEAVKSTPPKMRAVIEALQVLRGVAQVAAVTIVAELGEVSRFSRARQRMGYGGIVASEHSSGGSNWRGGITKSGNAHVRRVVVEAAWAYRHRPNVGRVLRKRQEGVSEEIREIAWKAQHRLHTRYRKLMVRGKEKGKVVTAMGRELLGFIWAIGIKAEAAQKETERQAA

SEQ ID NO: 398624 - protein, 326 aa, unidentified
MMNASELSFVGIDVSKDSLELAMDEKGKTQCLSNNEDGINKLLAAIKSADGNVGAVVLEATGGFERLSAVALCRAGLPVMVINPRQARDFAKAMGYLAKTDAIDARVLSHFACMLYQSDRRERLLMKLPDANQEALQGLVTRRKQLIQMVVAEENRLALSNKRQRKSIETVLKLLKKELAIIDHDIDGQLKEHFAEKIALFKGFKGVGVGTQASLMAALPELGSLSHEQVGKLVGVAPLNCDSGKHKGKRITWGGRADVRSMLYMATMSAIRFNAVIKPFYERLLAKGKPKKVAIVACMHKILTILNAIVKSNKPWDEHHFSPKTT

SEQ ID NO: 398625 - protein, 443 aa, unidentified
MSKKRTAHLRGARGQAFADLTRGISSEHILCVSLDISKYFHVVMIHNGLGEIVTPTFEIDIFQSGFDQLCQAIDQAKSRTNVQLVLIGMEPTSHYFENLARRLLQRTQPVTLINSFAVKQNREQQLMRREKTDEIDVAAIGDLLRRGEGTPFRPPTGIYLQLQQLDRVRLGKVKIQAMLKNQILGHLDRIFPGLVILGDEAKERYTPLFEADFWTCQTLQHLIRVCPNPHQLARMLSAQLVQVFHAHQYRLGPAVAAKLIAYAQKVLLPDPQLAAIRCELLQHDLTLLDEVQAHIAALERRLADLVAQTPYQIWTKVKGLSTVQVASLAAAIGDPDHYTHAGQVFRRSGLVSGRNDSGRRQRKGKGNRVLKTGDVYLRRALMNAVATLILHQPTLGRYNQLLQKNKPAGVARVATARRSIGILWATLRDQYPTTLISCKGAEM

SEQ ID NO: 398626 - protein, 492 aa, unidentified
MPQLNKNATIKWPTESKGVGRSKSRRVSKSRRSSADPTEGLQVGNPNAAAIDIGCSEHWVAVPAGRTERPTQRFGCCTAELNRLADWLKECGVDTVVMEATGNYWVVLYDILEERKLNPVVVNPRYAKNMSGKKGDICDCEWMQKLHTYGLFSNSFRPTQEIRVLRAYLRQRETLVGAAAQEIQHMQKALTEMNVQLANVISDISGETGLRIIDAVLGGERAAGVLAKLKGPRIMASLVTLERSLEGHWKEEELFRLEQARLSYAHFQEQLQQCQQRIEQQMQTIQGRVPLEGQGRAPRTMPTADKAAEPVPGQGDGRKSKSFDLGVELKRVLGVDLTQIDGVGPVAAQVILSEVGTDMSRWRTEKHFASWLGLCPDHRISGGKILGRATRPVVSRARNALRLCAYTLTHSKSWLGAKYRRLKHKLGAPKAIVAMAHHLARLIYRMIKNGQDYVDKGMEVYEAKYRENRIKWLKKQAKELNLELHEMQALAS

SEQ ID NO: 398627 - protein, 340 aa, unidentified
MDLGDKQHVVVVFNEEGEEVEVRKFANTSRQVQKFFAKHPGAVVVMEAGSHSAWISRLLTSMGHEVHVGNPRKLRAIWDADDKSDERDARILGLMYRLEPPLLHPIFHRSEEAQMDLELIKARNQLVECRSKLINHVRGTVKGIGERLPGGSAECFARRAREHMPQKLEESLAAVVEVIEQVNEQIRQQDRLIERACTEKYPESKWLRQVPGVGPITALAYVLTLEDPGRFEKSRSAGAFLGLTPRRDQSGQTDKQLRITKAGNTYLRQLLISCAHYIMGPFGQDSDLRRYGERIAARGGKNARKRAVVAVARKLSVMLHRLWSDEAEYVPLYRSMRKVA

SEQ ID NO: 398628 - protein, 381 aa, unidentified
MAHESTTQATWYPEEKKLYMALELSKAKWLVRCSSGGQKAHQDVVLPNDEKGMAALALRAKEKLGLAEGAKVVSCYEAGRDGFWPHRFLENLGIENIVIDAASMKVSRQGRRAKNDRIDVKLLLNELVRFHRGDDDVWRVVRVPSEEEEDDRRPHRELERLKKERTQHRNRVRSLLAIQGVQIAGDLMKLLRDLDRLKIWNGQPLPENIKAEIKREHRRLELVEADIADIQRYQRSSVKRPASAKLEKVAKLQTLRGVGLDSSWLIVMELLGWRMFFNRREVGASVGLVGTPYDSGEMDREQGISKAGNRRVRERLIELSWLWLRYQPNSDLTKWFNKRYSESGKRSKRIGIVAVARRLLIQLWHFVEHDVTPKDAIIVKP

SEQ ID NO: 398629 - protein, 410 aa, unidentified
MRLFVGDDWAEDHHDVEVMNEAGKVLARRRLPEGVAGMAALHELIGRQLGDDDAAEVVIGTETDHGPWVGALVAAGYQVFAVNPLQASRYRERHGVSGAKSDSADAHMLTDMVRTDSHQLRAVAGDSAEAEGIKILARTHKTLIWERTRQVQRLRHQLLEYFPAALEAFDDLDAADTLELLGKAPEPARAAKLTRAQVSAALKRAGRRNITERATAVLAALRSEHLGQPLAVTAAYAVTVRSLIAVIAALNEQVKILQGQVEADFGRHPDAEIYRSQPGLGAVLGARVLGEFGDDPHRYADGKGRRNYAGTSPLTRASGKKKVVAARFICNSRLVDALNAQAFSALKASPGARALYDELRARGIEHNDALRRLANRLVGILHGCLKTRTLYDEATAWGHRQNLPQSSFAA

SEQ ID NO: 398630 - protein, 373 aa, unidentified
MKYSTVYVGMDVHKETFSLCCYTNEKEQAEYPQKVDGHYSKVINYIEAMRFHYGDDALFICGYEAGCLGFTLYHQLTDHNVKCIILAPTTMLQQKGRKKVKTDKRDAALIARCLAHHDYSPVHIPTEQDEQTKEYIRMRDDHKLALKKVKQQILSFCLRHNYRFDGTTNHWTQAHLKWLRSLKPEGLYAEILQEYLLTYDNLTDKLERFDKRIEELASDETYQENIHKLSCFIGVKTVTALAVLTEVGDFKRFASAQHFASYIGLTPGEDSSGDNQNRLGITKAGNRHVRSLLVEAAQSYSRGQIGFKSKALKARQAVNSPEVIAYADKANERLRRKYYRMVLRNNKKTNVAKTAVARELACFMWGMITDNVA

SEQ ID NO: 398631 - protein, 355 aa, unidentified
MTSTKYIGMDVHKESVSIAVRNDAGKIVMECVIETKASMILQFFDGLRGDVHVTFEEGTWAAWLYDLLKPHVTKVLVCDPRRNALLQEGNQNDRVDARKLAELLHNNQLRSVYHGDHGLRTLKELVRSYLTITQDLSRVMTRVKAIYRSWAIPCTGKQVYGPNHRAEWLAKINEPGVHRRAEFYYQQLDALRCLRQQVRRDLLAESKKHPTWKQLCGIPSIGPIRAAELLGILQTPHRFRTKRQLWTYGGVGIETSSSADHRVVKGQLERKKKPVEIRGLNSNYNHDLKNIFKGAAIVAATKPGPFAEFYAELLAKGMRPEMARLTLARKIATIVLIVWKRGVSFDARHLKPQTA

SEQ ID NO: 398632 - protein, 412 aa, unidentified
MRVTFTRCAGLDVHKKSVSVTLQTDSPGSSLHEETRTFGTTTAELLRMRDWLEEEKITHAAIESTGVFWKPVFNILEGALEVWVVNAQQFRNLPGRKTDVKDSVWLCDLLRHGLLKPSYIPSLPTRELRDLTRYRSRLIGNRAAEVNRIQKVLETANVKLASIATDVLGASGRAMIEAIIAGETDPHRLTALAKGRLKAKRLELVEALHGYITSHHRFMLKQHLAHIDHLALQISGVEARIEENLRPFSDLLVWFDEVPGVGLRTAQAVLAEIGTDMSRFPNAAALASWAAICPGHNQSGGKHRAAKTRKGSPWLRHALIEAAWAAVRTKDTYFSAQFARLKSRRGARKAIVAVAHSILVVLYHLIRDRVPYRELGADYFQRHNRAALTQKHMRALRQLGYEVEIKEHLDAA

SEQ ID NO: 398633 - protein, 409 aa, unidentified
MRYYLGVDWADQTHAVWVVDGSGMKITARAVLHSAEGLGEWGRELDEWRAQGIELWAAIERPDGRVVDFLLDHGVVVYAVNPKALDRARDRFRQSGAKSDPFDARVLADFLRTDHGHLRALQPSSEAAQELKLLTEDCQRHIRQQTRLVNQLTAILKAFYPRALEVGVLTTALVREFLQAYPTPAALTALTHRQWQRWAQTHRLTEARTRELWEVLQRPQLPVPAHVVRAKTRMMQSLVEQLAPVVAAVAQYRKVIDDFFGSMPAAQWARSLPIGKHGVTAPTLWARLGDAPGRWESFRHLQAHAGTVPVTKRSGKQRMVQFRFACDKALRYVVDQVAFLSMLSSEWARAYYDQQRARGHSHRQALRALGAKWLKIIFVMWQRQLPYDEQYHLATMTRQQLRQRQQQNA

SEQ ID NO: 398634 - protein, 423 aa, unidentified
MEIMYERVAGLDIHKATIVACVRRGADRNVTRECRTFDTTTDGLRALLAWLEECRCSHVAMEATGVYWMPVWKILGEGDFALIVANAAHIKNVPGRKTDLNDAMWIADLLACGLIKPSFVPEEDVQELRSLLRTRKQLGREQTRHVQRIQKTLAEANVKLDSVLCDIMGASGRRMIEAMIAGVRDPRRLAALANTRIKATPKQLYDALHGRLTDHHRFLLTLHLRQWDNLDATIRKIDQEVEARIARMDKEVKADEAPFRDLIGLLCTIPGVSTLSATTILSEIGRDMSRFPTAGHLVAWAGLCPGQNESAGKRKPVRLRKGAPWLKTMLVQCAWAAKRKKDSYYKAQFFRLQSRRGPQKAICAVAASILTAIYHILKNGTEHHDLGADHFNRRSTEGQTKRLVAQLTRLGFEVQLQRTAEAA

SEQ ID NO: 398635 - protein, 347 aa, unidentified
MRFYNEVHAYYCGIDLHVKTMYVCILDGVGQVRVHRNVPSTPAAFLEVVAPYRTGLVVAVECMFTWYWLADLCAAEGIAFVLGHALAMKAIHGGKAKNDKIDSHKIAILLRGGMLPQAYVYPAAMRSTRDLLRRRLHLVRKRGQLLAHIQNTRAQYNLPAFEKRLAYPGNREGVVEHFPDPSVRKSIEVDVALIDQYDALITDLELTIVREAKRHDADAFHRLRSVPGIGKILALTILYEIHDITRFDRVQQFASYARLVKCRHESAGKVVGGGGAKIGNVHLKWAFSEAAVTFLRQNRQGQQLRARLEKQHGKGKALSILAHKIGRAVYYMLARETVFSMEKFLAA

SEQ ID NO: 398636 - protein, 460 aa, unidentified
MRKPTEKQLSGMKRAGKSGFPLLNPDAAGIDVGAREHYVAVPADRDAQPVRCFGAFTEDLHRLAQWLLQCGIKTVAMEATGVYWIPLYQILESYGLAVKLVNARHVKHVPGRKSDVQDCQWLQQLESFGLLSGSFRPEAKICVLRSYMRQREMLIRQASRHIQQMQKALTQMNIKLHQVISDLSGDTGLRIVRAIVAGERDRLKLAALKDRRIKSEVALIAKALEGDYRAEHLFALKQALELYDYYQRKIAECDAEIYKEMKTLETRGSAAPLAKHKPRSPHNPLGFASQAELYRIMGVDLTRIDGVNENTAQLILSELGLDICQKWPTEAQFTSWLGLCPNHEISGGKLLKRGTRKVVNRVANALRMCAQSLLNSKSALGAYARRMRARKDTPVAITATAHKLARLIYRTLKYGQDYVDVGSDSYEAKYKAAVVKSLQKRAQSLGYQLVSCQTPGAVVP

SEQ ID NO: 398637 - protein, 375 aa, unidentified
MLPPYQQRMLAGGTEDKEHAMSQNLDVSPAAIGIDIGKTSFHIVGQNKGGAIVLRQKWSRGQVEARLANLPPCRIGMEACVGAHHLSRTLKALGHDARLMPAKYVRPYSKGQKNDYRDAEAIAEAVQRPTMKFVATKTADQLDLQALHRVRERFVGQRTGIINQIRAFMLERGIAVRQGLRFLRAELPNILATRTDALSPRMLRILEDLSADWRRLDARIEDLSSEIEALARQDKGCERLMTVPGIGPIISSAMVAAIGTGDAFSKGRDFGAWLGLVPKQLSTGDRTILGSISRRGNRYLRTLFVQAAWVVLVKVGPKHWDRYGLKSWIEAAKKRLHHNVLAIALANKLARIAWAVLHKGRAFECAKTNEAYRPA

SEQ ID NO: 398638 - protein, 343 aa, unidentified
MIYIGMDVSGKEFVVHAIDQRQQKVFEGRIAPSRAGLRRLVEDLGVGPKLFVFEAGNQMKWVALLLMRQEGVRIHAVHPNEVKWISQSSGKTDKVDARKLAQLARGNLLPRPVHVVEGKTRQLRELVSARGQLQSKRVALINTVRGYMKQEGVSLPEKFFGRPDWKSVLEAKPLGSTQKIILKSFMDGINALERSETEITEKMIEIQDGRCELLETIPAIGKIASRVLVSALDDAGRFDNKRCVANYGGLAPTIYQSGNTTNLGRINRDGRQEVRKVLLQCAHTIQRMISHDASPIREFFERIEKRRGKKRAVVATARKLLTIAYGVLKSGVPYDPMRLRAFA

SEQ ID NO: 398639 - protein, 356 aa, unidentified
MSYDVKYIGMDVHKEAIVIAVLNEGGKLVMESVIETKASSILQFLHGLRGELHVTWEEGTWAAWLYDLLQPQVQHIVVCNPRRNALLKEGSKSDKVDARKLADLLRTGMLRPVYHGENGLRTLRELGRSYQTISKDLTRVMNRLKALYRGWGIPCAGTQVYAARCREEWLSKIPQAGVRRRAELLYQQLDGLQALRREVRPEFLAESRKHKAAKLLRQIPCIGPIRAARLIGLMQTPHRFRSKRQLWTYSGLGIETHDSAQYRFVRGQLQLSKKPQQVRGLNRNHNHEMKEIFKSAATRASCGKGPFYDFYTALLAKGMKPEMARLTLARKIAAITLTLWKKEERFDAEQLKTQAA

SEQ ID NO: 398640 - protein, 448 aa, unidentified
MSNGNGVSRGDRNRNARLNRLRELVPVTHAIVGIDLADNKQMVVVTDHDSKVLARRTFRCRAWDLGLALDWAGQQASKAGFAGVTVACEPTGHRWRVLGQLAADRGMAFVCVQTLLTSWARRSEDLTFDKTDEKDAVLIARLTAQLRCYVPEPLDETWGRLRHLGARRERLLAETVSQVQQVRDLLECVWPASLDTAKHPFRSRTWLAGMSVILARTGGDPTRLRRLGPARFEAAVRREIVARQGKKPCLRIVRLLFAAATDPRGVTTHRPGALERVQFLLDDFRDTGRRQGETEARMVEVLDELQLTELVCSIVGLSALGAATILAETGDLTRFASARAVVKHSGLAPREKSSGTYTGRTKLTGQGRPGLRRAAWRAVWGAQKANPVYAAKFTHLTTRTENKLNRGQAHAAIAAAILRQLYAVVSTGQRWDAAIAAGGRCGVIEPAA

SEQ ID NO: 398641 - protein, 391 aa, unidentified
MKKLIKYVIGLDIAKDKFDACLMSMDAELNCKVKSTHKFSNNLKGFKELLLWQQKHCKEIVPVQILMEATGVYHEKLAIWLTDQKLQVFVVLPNKARKFMQALGLKSKNDKIDAQGLALMCAQHKFDAWKPISKFFHELRTLTRYYQSTQESKTKFTNQHHALQHGGYSEKTVSKQLLKTITLFNKQIKESKQSIIALININDEIKRKVYQICKIKGIDVLTVATIIAETNGFELFKNIGQLVSYAGYDVIENQSGKHVGKTKISKKGNSRIRRILHMPSLNVVRFNEPAFVNLYERVFDNTKIKMKGYVAVQKKILVIIYTLWKNDQEYNRDINQEITSREDEPKNTFLMNEKVATTNSLKVVVLPVSSTTQDEHQYEKSHEVLFPYLQK

SEQ ID NO: 398642 - protein, 344 aa, unidentified
MGGSRVYVGVDVHKNFSFVCAMKENGEIILEKKVRTEELEKFLENIPGNRTIILEPTTTAINLARKLRKKNEVLLSHPYKTKLIAESKKKTDRVDAKVLADLARTNFLPTAYLPPDEIMELREIIRERIRLKKLSTSTKNRIHSILAKNGIKYDGNLFNSEGREFLNSLNNEWIDRYLRILSSIENEIKEIDKEIRQKCLENEETVLLTTIPGIGYFSALLIYAEIGDIKRFPNSKKLCSYAGLVPSTRQSGNKTITGRITKEGNKLLRWVLVQCAFVAIRKDERFRQFYERIKQRKGSQKAIVATARKLLTVVYAVLRDKKPYISYTPTSYYGEECTPVTNWA

SEQ ID NO: 398643 - protein, 342 aa, unidentified
MTFVGCDLHTRMQQVAVLDTRTGEVSERQLAHDGSAIEEFYAALPGPVTVGIESTGYATWFHTLIQRLGHTLLVGDAAKIRAMVVRKTKTDRRDALHILDLLRHDRFPTIWVPDPATRDLRALLAHRMRLVRIRTMVKNGLHAIALNYRLARGSKLLRQAGLAQLHALALPPHTAQRRDQSLELLAGLTTQIRELDEAITTAALAHPDAPRLITHPGVGALTALATIVVLGPVARFHDSKHVVSYVGLAPALNASADKYHLGHITKQGSTLLRFALGQAAAHAARMDADLKRTYFTLVHRRGRPKAKVAVARKLLVRLFIMLRDQIDYDEFRRRGRTALASA

SEQ ID NO: 398644 - protein, 435 aa, unidentified
MNRKAYRATRVNDVNWEQIARGKEGLGLTLGVDVGKFDVLVVCRWADGRFERPWRIKNPWEIATLVALVRQFKSDRKLVVAMESSGTYGDALRQALGDNGIEVQRVNGKAAHDYAEVFDGVPSQHDGKDAAVVAELAALGKAKPWAYQAADSWEEELTYWVEEMVIQRQMVTLWQGRLEGLLARHWPEASQVLKLSSGTLLRILKRYGSAQALALDAEAAKQLARWGRSLLSPEKIEELLAGARSSVGVRVGQWQQRQIQEYAEQALTARQRSDRAQRRLGQLAKGHAVLQAQGKVVGVPTACVLWVSTGDPRNFDSAAAYRKAMGLNLVERSSGTYQGVLRISKRGSPRTRQWLYFAAMRLVQKCGVRPWYEAKKARDEGDARRVLVAVMRKLAVALYHVGVRNEEFQPRRLFGRIGRRSGKSADRSVSSKEPA

SEQ ID NO: 398645 - protein, 377 aa, unidentified
MSKLRFVGLDVHAETIAVAVAEAGGEVRAIGVIPNRLESIRKLVNKLGPVQHLKACYEAGPTGYVLYWQLTQLGVACEVIAPTLVPTKAGDRVKTDRRDAEKLARCHRAGELTAVGVPSAAQEALRDLVRAREAAKKDQLKARHRLGKFLLRHGCQRPGEIKTWTKKHREWIKSHVRFEEAALEATLADYVEEVDHVGTRIVKLEKAMDDAIRQAPPEIRAVIEALQALRGVAQTTAASIVSEVGSLSRFPSAPQLMGYSGLVASEHSSGNRVKRGSITKTGNGHLRRVLVESAWAYQHRPNVIGHLLRRQKDLAISDEVKDIAWKAQQRLHKRYKSMAARGKNKNQIVAALGRELLGFIWAIGVRTEQQQKLAKAA

SEQ ID NO: 398646 - protein, 425 aa, unidentified
MNYKQNEKINQVKESTLVVGIDIGSTTQYARAFDWRGIELGKVFTFSNSREGFESFKAWMQHLQDKYRKSDVIVGIEPTGHYWFDLGAYLEDEGILLVMVNPYAVKQTKELDDNSQSKNDRKDPKVIAKLVTEGRYSAPYTPDGVYADLRIMVANRKRLIREMTQIKNRFARWFAIYFPEYTDVFGDYEAQSSMLLLKKVCTPEAIVELGAEKINQIWRDAKLRAVGMKRATTLCETAKRSIGLKKGSSAARYEMKLLLEDYEYKKAQLDAVMEEIEKLCRKIPESEQMLAIKGIGVITVAGFLAEVGDVRRFESPRQIQKLAGLSLRENSSGKHKGQTTISKRGRRKLRAVLFNAAIPLIAKNPEFKSLHEYYTTRANNPLKKKQSVIAISCKLIRVFYAILANGVTYDPQKMLSDIHRQPQGA

SEQ ID NO: 398647 - protein, 353 aa, unidentified
MHTQQKSSDPVATIGLDIGKNTFHLVGLDQRGAIAMRIKVSRNQLIRRLVNLPPCLIGLEAGSGSHHIARQMKPLGHDVRLIPAQYVKPFLKGHKNDYRDAEAIAEAVQRPTMSFVAIKTPEQSDLLSLHRVRSRLVRQRTAIINQIRGFLIERGITVRQGPAPLRKALPEVLSSPPEALSPRILRLIAELAEDWRHLDARLEALSAEIESLSQHDVACQRLMTVPGIGPIISSAVVAAIGTGSGFKQGRDFAAWLGLVPKQESTGDRTKLGRISKRGNKYLRTLFVQAAHVVLERRPAAAMRALWPWIERASKRLAHRNLLAIALANKLARIAWAVLARGRDYEPRITPNAA

SEQ ID NO: 398648 - protein, 430 aa, unidentified
MESIKLSSKNCQPVPDHERGVVFGLDISKSDITYRVCRPEAYSKAITVHQDMKGFSKIVSAMEDFKRSGHEVWVGYEPTGPYSCCVLEFLAERGWNVVQINPKHTSKYNEIMDNKPGKSDPRDPRGMAGLIWQGCYRHPVHLTGTYAELRVASAQWSSLTCESTRLRNQLHSLLHLWFPELGMVFKDVLCKSGRALVRKYASVDNIARVGVSRLRLVLRKASNGSTARRAEALLEAARASTALRSGRQTRYQSILDHLDRLEMVEKQKERLRSEMERMLSLLPESQWLLSIKGMGVVVTALLLGECGNIADYSVEQMEKLVGLNLHEFSSGKHKGKRKISKCGRAGVRFALCLAATGMTARGGIYHDVAEEMRALGRKFGQIRIAVARKLLKLLHALARKQQSFDPQRFVARRGTADDLLARQDRRPTAA

SEQ ID NO: 398649 - protein, 427 aa, unidentified
MNEKQNSRIDEFRQFKRQIRGSKQHLIVGLDIAKRKHHAFFGDANGRTLLKGLIVENNAEGLRHLLSQVRFYMNREGFNQVVFGVEPTSVYHKPLAEHLIEKGYLVVYATNEAIKKNRSLLNGRWDKNDTKDSANVADLVSQGKCHYYDLPEIRLRDMRSLLLLRKRLKKQLHSCQIRIRNNLVAQYFPELDRFWKSAGSGNLAIAKSFLDPASIRRMSCEEFIAKLKTCRGGLRQERRLRDIWEAAEHCIGCRPGPAMQMEAELLVDTLQSLQAQLERIEQAIEELARGFEEYGYLKSIPGFGPYISAVTLAAIGDPHRFENRAQLIRLAGFDLSANRSGEKSNAAVPLISKKGKADLRYALYQAALVASSLTSQFQDYYSRLLEGRQREKGIRTKMLVKIATKMLVIAWTLMKRKESFDPAYMPA

SEQ ID NO: 398650 - protein, 335 aa, unidentified
MLYVGVDAHKAHSQMTVMDETGTVLQRRRAASSREGMLEALGRHRGEPMKAVLEAGYGWGPLYDWIGEVADEVVLAHPLKVRAIADAKIKTDRLDSEMLAHLLRADLIPEAYAPSKEVRAKKRVLRQRMFLVRVRTMLKNRVRALLFQHGVEPPPVSDLFGKKGLTWLKEEPELPDPDGWLLGEDVELAETLKGKIRATEGLIKELAEGDEAVGWLRTLPGVGEFFSVLIRHEVGEMERFPSPKKFASYTGLVPSTYASGARITHGRLTKEGNKWLRWAFVEAVSPAIRCSPYLRAYYQRIKARRGTKDARTATARKLAELAWAVWTERREYEER

SEQ ID NO: 398651 - protein, 343 aa, unidentified
MNITSIGIDLGKTTFHLVALDKHGKVIVRKRFSRRQVLAYTANLQHSLIGIEACSGAHFIGAALRDQGHDVRLIPAQFVKPFVKSNKNDYLDAEAIAEAVGRENMRFVPIKTDDQLDLQALHRVRERLVQRRTALINQIRGSLLERGIIFAKGPANLRKQMPTILEDAGQHLTPRMRDILDHLWREWKQLNDELESISEEIDTISTTDAACQRLRQIPGVGPLVCTATVAAIGNGAAFRKGREFAAWLGLVPRQHSTGGKAQLFGISKRGNNYLRRMFIHGARAVLLRVRYDTGRLGQWAQALEARAPRNKVVVAVANKLARIAWAVLATGEPYRTVPATARA

SEQ ID NO: 398652 - protein, 412 aa, unidentified
MKYVGVDWSDGFHWIYVTDDAGERLAAFSIEHTPEGIESLFLKVKECATNQVEVLFTLETPKGLLSSAILEAGFTLYPINPKAVDRYRDRYKVSGKKDDYFDAMVLANILRTDRQNHRPLTPDSLLTRELRAYTQGYQSLVRTQTRLTNQITSCLKSYYPVALGIFDKIDQPVTLGFLSKFPTPDSFRHTSKGKIECILKKNRYPGVKEKTLQIYALSKKPQFEVEEPIARANSLLLLSLIRQLKETLASLKEFELKIAQLLEQHPDKDVFSSLPGAANITAAKLISNFGDNRDRYRKVSCVQADAGTCPITASSGKSRHVFFRHSCRKQFRSAVTQFAFTSLKESEWAKQRYNKYRQKKEHNHALRCLANAWLEVIFPMWRDRKPYDVEKHLIGIFKEQNFFSKDKIPAVA

SEQ ID NO: 398653 - protein, 410 aa, unidentified
MDAFCGIDWAEDHHDVALVDHGGAVLARLRISDDAAGLTRLLGLLAEHGDSAENPVPVAIETPRGLLVACLRAGRPVYPVNPMAVARYRDRHSVAGRKSDKGDAAVLANVLRTDIHAHRPLPADSELAQAIAVLARAQQDAVWDRVTAHNKLRSHLREYYPGFLAAFAAAKGGIMRPEARAILAAAPTPATAARLTLAQLRALLRKAGRSRGIDAEAARPREAFRQEQMRQPPLVEEAMGRQSRALLRQLDAACQNASDLEAAAIGSFSQHPDAGIITSFPGIGALTGARVLAEIGDDRSRFADGKGLKAYAGAAPITRASGKSRSVTRRHVKNNRLAAAGYIWAFSALTASPGARAHYDRRRDAGDRHAAAERNLFGRLLGCLHHCLATSQDYDEATAFPSHPAIPAAA

SEQ ID NO: 398654 - protein, 342 aa, unidentified
MQIAVLGIDLGKNSCSVVGLDSSGRAVLRRRLSRDGVVKLALGLPGCMVAMEACCGAHHLGRKLRGQGHQVRLMSPEYVRPYVKAQKNNDRDAEAIAEAATRPTMRFVELKSEEQLDMQSLHRAWDRLVGERTALINQMRAILMERGIIVPQGRRKLEAFLGTLLAAEQVPLSPRTRRLIEDQRAEWRDLDRRIGAFGEEFARQARTDEAARLLTTIPGIGPLNATALIAAVSRAETFGRGRDLAAWLGLVPRQMTTRGKPKLLGISKRGNVYLRKMLIYGARAALPMLSKGETPLGGWLRGLAARAHRNTVVVALAAKLARIVCAVLRSGKRFETQAAIAS

SEQ ID NO: 398655 - protein, 310 aa, unidentified
MDTIFVGIDVSKDRLDVHVRPSREAFAVARDGQGLEELIDRLRALEPQLIAIEATGGFETIAAAAIAGASLPLAIVNPAQVRHFAQAIGKRAKTDPLDAEVIAHFAEAVKPQVRPVANEQARQLAELVARRRQIIEMIVAERQRERRAAIVRVRKGILRHVRTLEKDLLDVDKDIGAMVRSSPVWREKEDLLVTVPGVGNTLARTFLAELPELGTLNRREIASLAGLAPFTRQSGRWKGKSMIGGGRASLRAALYMASLSAIRCNRSLKAFYQRLLSAGKPKMVGLIAVARKIIVILNAMLRDKTQWQPA

SEQ ID NO: 398656 - protein, 430 aa, unidentified
MKSNTQNAKIEAITEKTLVLGIDVGSETHYARAFDYRGIEYSKKPFKFSNTEAGFVTFKEWILDLKERHEKDKVVPGMEPTGHYWFNLGKFLQDNEMKPVLVNPHHVKKSKELDDNNPTKNDRKDPKVIAGLVREGRYMIPYLPDGVYADLRTASNIRFQLQAELTRIQNRISRWFNIYFPEYKTVYGKPDAKSGMLILKAAPLPEDILTLGIDGVNQIWRDAKLRAVGRARAKTLIEAAEHSVGSKEGAVSARMEIRMLLEDYESRNTRLQEVMVLIEELVRKIPMAEKLLEIKGVGIRTVSGFLAEVGDISRFNNPKELQKLAGLALVENSSGKHKGETTISRRGRKRLRYLLFEVAMSLVSKNQEFRELHNYYTTRRLNPLKKMQSLMAIAAKLIRVFYAMLTKGVDYDPKKMISDIKSPAVYLQVA

SEQ ID NO: 398657 - protein, 339 aa, unidentified
MNLYVGLDLHSSNTYIGVLDQQFNRIFKKRVCNELDLILQTLEPFRGRLRGIVVESTYNWYWLVDGLMDAGYSCIHLANPSAIKQYEGLKHSDDQHDAFFLAQLLILDILPQGYIYPKEARPVRDLARKRLFLVQQKTAHILSLQSLLARCCGQRVTSNQLRKVSGRDLKQWLKEDHLVLSAKANLDNIVFLKQQICRLEAAIQKQVKLSEAFNCLLTVPGIGKILAMTIMLETGDIHRFANVGNFASYCRCVSTQRLSDGKSKGSGNRKNGNRYLSWAFTEAAQMARRFNSRFRSYYDRKAAQTNSILATRALSNKLARVCYYIMRDQVEFREELASS

SEQ ID NO: 398658 - protein, 353 aa, unidentified
MLADQADHVFGVDTHRDSLSAAVLAATTAVVEGQITVAANERGYRRLLGFAREKAPGRRAWAVEGTGSYGAGLAVFLQCQGELVLEVDRPRRPARRDRAKSDELDAIRAAREALSREHLAQPRLRGEREALRVLLATRDSAVRSKRAAILLLKALLVCAPPSLREGLRGLATREQLARAARLRISPTHSSEQRATTITIRASARRALALEEEALELQREIEPIVARIAPMLMAEMSVGAIVAAQILCAYSHPGRIRSEAAFAALGGAAPVPASSGQTIRHRLNRSGDRQLNRALHTIVLCRMRDDPRTRAYTARRQAEGRSTREIKRCLKRYTARHLYRLLNSTLPNPANSET

SEQ ID NO: 398659 - protein, 342 aa, unidentified
MVQPVTVGLDIAKNVFHAFGADAQGAKVFSRKLRRGQVEAFFSKLQPCLIGIEACATAHHWARTFQTMGHKVRLMPPAYVKPYVKTQKNDEADAEAICEAVTRPNMRFADIKTVDQQRVLVLHRTRTILIKHRTRMGNTIRAHLAEFGITESLGREGLARLIDMIVTGKDDRITEIIRRAMICLVDQYRLLQDQILDLDRQVMAWHRSSETSKRLATIPGIGPLAASALVASVGNASSFKNGRSFAAFIGLVPRQSSSGGKERLGKISKRGDHYLRWLLVVGSLAVIRYAQRHGTRRPWLVKLLQRRTAKIAAVALANKLARIAWVLMTRGGAYREPVPQAA

SEQ ID NO: 398660 - protein, 446 aa, unidentified
MVQRRRLKLDIANPNAAGIDVGSASHFVAVPPDRDDEAVREFTSFTEDLERIADWLVGCGIDTVAMESTGVYWIPLFELLESRGLTVYLVNARHVKNVSGRKSDVLDCQWLQQLMSYGLLSGAFRPKDEICALRSIMRQRTMLLSYQGQHIQHMQKALSQMNLQLGNVISDVVGETGQRILRAIIAGERDPQKLAELKHGRIQASKEQIAMSLHGNWREEHLFALTQAVELFDAYSQALQRCDVRLESMLGALSRTKDEPGPTKRRRISKVKNAPKFDVRTYLFRICGVDLTAIDGIDTTTALKVIAEVGPDLSRFKSAKHFASWLGLCPGTKISGGKLLSGATKRTANRVAQALKMAAISLRASQSALGAYFRRMCARLDKGKAVTAVAHKLARLIYAMLTKGAAYVDQGQEYYEERYRQRVLFHLKKKAAAMGLELVPAQSQQT

SEQ ID NO: 398661 - protein, 359 aa, unidentified
MEQKIFVGVDLHKDQFTICILKDGKVLEEGTKYELNKDGYRNFIAMIKELSYSTGYEEVVLAIESTTNSRYFKDIMVRQGFRVEVVNTLRFKVVNQSTKKTDKNDARTLAEFLSRDILPTSHLCSAETEGLRRVLKTRNLMVRDVVALKNQAHAVLSAYGIITKTAEFQSRKERESVLARLPVKAALPVGIIFGTIDAVEKQKKVLESRLRVITEKDHTVGLLMTIPGVGIVNACTIRAYIDDIDRFETYKNFSAYCGLVPWVQSSNETAYYGRITKRGPQELRTALVQCVVAMVRMENKTGDFGIIRQYHELKDSKNSGKAIIATARKLSRIIYMMLKTDSTFNSARAIGHSALPEGA

SEQ ID NO: 398662 - protein, 364 aa, unidentified
MTAAQAGRQAASSTVEVVGGADNKKDNHTAAAVDTAGRVLGSAQFPTDAAGYRALLRWLRGFGTLLLVGVEGTGVYGAGLARMLAAQGVAMVEVDRPDRKARRWQGKSDPVDAEAAARAALARVRTGVPKQRDGRVEALRTLRVARRSAVGQRADVQRQIKALIVTAPESLRAQLRKLPDRELIEVCADLRPDRANADDPGTATKIALRSLARRHRRLSVEVADLDELLGPLVAQINPGLLALKGVGAEVAGQLLVTAGENADRLTNEAAFAMLCGAAPLPASSGKTTRHRLNRGGDRAANCALWRIVITRMGTDQRTKKYVARRTTEGLAKPEIIRCLKRYVAREVFLALQSASTEKRPANAA

SEQ ID NO: 398663 - protein, 412 aa, unidentified
MDVMYSCCCGLDVHKKTVAACLMTSTEGPEPLKEMRTFRTMTADLLALADWLQEKGCTHVAMESTGVYWRPVSNLLEGQFELLVVNAQHIKAVPGRKTDGKDAAWIAELLRHGLWRGSFIPSKPQRQLRELTRYRSTLVQEHARTLNRLQAVLEDANLKLASVVTDISGVSARAMLAAILAGERDVEALADFARGRLRAKRDQRKEALAGRVTAHHSFLLTEHLSMLEYLDEAVARVSTEIDQRFTADQEAIALLDTIPGVGPRAAEMLIAAIGTARSRFPSAKHLASWAGMCPGNHESGGKRLHGKTRKGSRWLRQILVEIAHVASKTKNTYLAAPYRRIAARRGKKRALMAVGHTVLTIVYTMLSRKQPYQDLGAAYFDQRERHRVERRLVQRLERLGYEVALQPRALAS

SEQ ID NO: 398664 - protein, 364 aa, unidentified
MYDSTTTVTVGLDVHARSMRLAAVRADELLEERTLPYDEEAVERVLRRWPGVRCCYEAGPTGFGLYRHLTQRGIDCVVVAPGLVPQRPGVRVKTDSRDARKLARLLAGGLLQGIHVPSRELEAARDLVRAREDARLDRMRDRHRLSKFCLRHGRTLPTSSWTVVRRKWLGEQRFEFAAQQQTFDTYVHTVDLVDARIEQLERAIRETAEQEPWRELVARLRCLRGIDTLTALALVSEIGDFSRFRSAEEFMAFVGLVPSEHSSGEQRRLGSITKVGNSHVRRLLVESAWHARRRPKVGYELARRQRGQDALDVERAWRCQQRLYQRWQRMAGRGKPQQKIVVACARELAGFVWAIATEQPLRTI

SEQ ID NO: 398665 - protein, 318 aa, unidentified
MSGSVVVGIDVSKAEFCVAVDPSGETWMSATTPAAMDVLVERLRAVTPQLVVLEATGGYELPLAGACASAGLPVAIVNPRQVRAFAHALGRSAKTDAIDAAVLALFGARVRPEPRAVPDAATQALAALVTRRRQLLEMLGAERQRLAQARPAGPVTRNLRTHIRWLERRLAEVDDDIGSAIQASPVWRVHEDWLRTVPGIGPTTARTRLAELPERGRLDRRAIAALVGVAPFNCDSGQQRGYRRIAGGRASVRASLYMAALTASRRNPTLAAFYQRLRAHGKPPKVALVAVMRKLLTILNAILKQCAPWNPSAQIVNA

SEQ ID NO: 398666 - protein, 351 aa, unidentified
MVIIGCDFHPGFQQVAVLDTGSGEIRDLRLGHKEEARQFYAGLRGQEVLVGIEASGYSQWFEQMLEGMGYGYRIGDAAAIRASYVRKQKTDRRDAGHILRLLVEGRFPALWVPSAAERDARQLIVHRHKRVQMRTRVKNQLHALAMNQGLRLRWQLWTAKGLEQLRALPLLPYAAARRADLLRQLEEMDAEIARLDQAVRKEAEARAAAVRLMSHPGVGPVTALGFVLTIGEVRRFAKARQVASYLGLIPSERSSGGKQRLGHISKQGNPLVRFLLVEAGHTAVRGDAELRRCYQRLQHRHSTGVAKVAVARKLALRLYWMLRNEIDYAQLRGPYAGKPVSFCGRKTRPAA

SEQ ID NO: 398667 - protein, 339 aa, unidentified
MPLYAASDLHANNNFLAIIEENGKRVFKGKLPNDPERILAALHPHQKDLVGIVVESTYNWYWLADALIGEGYQVHLANPSAIQKYSGLKHADDQHDAFWLAELLRLGILPEGYIYPKEERPIRDLLRKRGHLVRLRTSLIISLQNIVSRNCGVAIQVNDVKRLKEDRISPLLEGNEDLALAGRVSKETIDFLTRQIRAIESVVERKVELKAPYRHLLTMPGIGKILALTIMLETGPISRFAKVGNYVSYCRKVSSQWESNGKAKGKGNKKNGNRYLAWAFSEGAELARRFDAKARVYYDRKKQKTNFMIAHGALAHKLARAAYYILRDQVPFRPEKLFA

SEQ ID NO: 398668 - protein, 477 aa, unidentified
MKNKRNTKHRHKASQPSAQRRQGKRAATSVRLELRQLKLDAAGIDIGSEEHYVAVPADRDPQPVRTFGSFTPDLHEMAAWLKHCNIKTVAMESTGVYWIPVFQILESHGFEVILVNPRFAKNVSRRPTDVGDAQWLQQLHTYGLLPASFRPDDPTCVLRSYWRQRADLIQCASRHVLHMQKALTQMNVSLHLAITDITGVTGMRILNKILQGERDPKTLAQLRDPRVKCSEETLVKALTGDFRAEHLFALRQAFDLYLIYQEKIAECDQQIAGHMATLESKLAPDAPPMPPSTKGKSKPRRNEPKFDLRGELHRITGVDLTQIDGLDVSTIQTVISEIGTDMSRFPTEKHLGSWLGLSPHPQITGGKVVSSKTRKVLNPAADSLRMAAQALNKCDTALGAFYRRLRSRIGPAKANTATAYKLARLIYRGIKYGQTYIDEGSRYYDERYRKHILANLLRRAKQMGCILLETETGEILA

SEQ ID NO: 398669 - protein, 370 aa, unidentified
MTGVMPADRVVIAVDPHKASWTAAAVDAALQPVDVIRVDASPQGYRRLRRFAQRWSDPGWAIEGAAGLGAPLTQRLHADGIAVTDVPAKLAARVRVLSTGHGRKTDEADAISVGIAALTATRLHTASVDAAITALRALLEHREDLVKTRTQTVNRLHVLLTHLTPSGAARGLTADRAADILRQIRPREPALKTLRSLAADLVAEIRALDRRIAKAAGDIAAAVELSGTTLTELSGIGILNAAKIVARVGTVHRFRSADAFATYTGAAPIAASSGDVTRHRLSRAGDRQLNCCLHTMAITQIARDTPGRDYYRRKRAAGKSHREALRCLKRRLSDVVYRQLIRDAARLGAGPGGHSGATPISSAASSNPAC

SEQ ID NO: 398670 - protein, 408 aa, unidentified
MNAVGIDVSKGKSMVAALRPMGEVALLPQEFLHTEVGLEQMAYAIVALGEDTRVIMEATGRYHEPIAAALHEYGIYVCVLNPLFIKQSGGGSIRKVKTDKADAMKIAKYGLDNWVELREYTPMDTVRQQLKLCSRQYNLYMKTVVSLQNNLISLTDKSFPGVNELFSSPERADGHQKWVDFVMTFWHCDCICRVSEKAFTDRYQKWCKRKGYHFSTEKALDLYAGSCGHFTTLPKNDNTKLLITTAAQQLLAGKTTLAALRTEMTRLAKQLPEYDTVRAMYGVGETTAAQLMAEIGDVRRFPRRSSIVGFAGVDPAVDQSGKHSAKSVPTTKRGSPHLRKTLYQIVCTYLKRSPADEPVYQFLDKKRAEGKPYFVYMTAAQNKFLRIYYARVKECLEAFDERQDTVQN

SEQ ID NO: 398671 - protein, 405 aa, unidentified
MSELEKDLVFAGVDTHKDTHTLCLLDHMGRAIGTFRFAADAKGYDALAGKIGGPATCVGVGIEGTGSYGAGLTRRLLELGYCVYEVMVPGRARRKPGRPKSDPADAEVAARQVLARVNLSKPKDQSGWTEELRQLMIARDRLVQATSAMINAAKSLIVTAPEDLRRSLEGLSRKNLRSALSTLDPAAGGIILALGSLGKAWDLQDREADAIEERMKRVLEANAPALLTIYGCGTVSPAALAVAGGGNPERLKSEAEFASLCGVAPLLASSGKTERHRLNRGGDRRANRALYQIAVTRMSYDQRTKDYVGKRKRDGKSKKEAIRCLKRYIAREVFRALRNPLEIKGPSWKDLRPARQALGITLVEAGKALNVGFQRVSYAETGRLMNVRFLEEYDAWLKSQAKRES

SEQ ID NO: 398672 - protein, 350 aa, unidentified
MLIIGCDYHPGFQQIAYVDSETGELQERRLPHPEGAEKFYRDLWEGSVKVRVGMEASGHARWFERLLEELSFELWMGDAAKIRAKRVRKQRTDRLDAQHILKLMLKDDFPKIWVPNWGNRDLRQLLWHRHRMVQTRTRIMNQLQAVAINEGVRYKKRLWRDAGRKQLESLRLPQWASRRRQDLLEVLDRINPTIAELTQAIENEAEKCCEARRLMTHPGVGALTAVAFVLIIGEAHRFDCGKQIAAYLGLVPEEDSSGERRRLGHISKQGNSLLRFLLVEAAQATARSDGRWRNQFFHLAQRRGRKIAKVAMARRLAVRLYWMWRRGWDYEQLQSFGSRAGQPGYPHGVQ

SEQ ID NO: 398673 - protein, 460 aa, unidentified
MKDHGSAQASSADGRCPSEPLRIVHPHAAGIDIGSQKHYVAVPPDCDPEPVRCFGCLTPDLHAMAQWLKACDITTVAMESTGVYWIPVMQVLEEYAIEVYLVDARQAKNMPGRKTDVKDCQWLQQLHVHGMLTRAFRPADAICVLRSYWRHRKDLVEMASMQIQLMQKSLEQMNLQLHKVLSDITGVTGMKIVRAILAGERNPVVLAQMRHPLVKSSEDTISKALTGDWRAEHVFTLRQAVELYDVYQQKIQACDRQIESYMQSLDTRGDPKDLEPRGRGTRRKNQVHFDLRGQLHRVSGADLTSIDGIDAMTAQTVISECGIDMSRFATEKHYSSWLGLCPNHQITGGKIRRRRTRKVRNRAAQALRVAAQSLHKSKTALGAYYRRMRGRLGPAKAITATAHKLAILIYRMLKYGMKYVDQGQQAYENQYQQRTLQAIIKRAKQMGYAMVDLRSGEVVS

SEQ ID NO: 398674 - protein, 360 aa, unidentified
MKRVSTKSVSVVSGKKVFIGIDVHKDSWHVTARTDGEEVFNGRIPASYHSLMKLLERFKDCQIRVAYEAGPCGFSLYDKLIEDGIATIVVPPSLIPIESGNRVKTDKRDSRKLARLLESDMLKKVFVLTEEERMHRELVRTRRQLVDHRGSVARQIKSKLLFYNISSPFPSRYGWGRPYLQWLKGIVCQSQYLKESFEILIDLYEYLTKEIKRITWSVIDLSRIDKYAERMRLIRSIPGIGILTGMEILVELQDFARFKTSEEIASYIGLTPSEYSTGPYVRQGRITRCGNKRVRVALIESSWILVGRDPLMKAKYLKLKSSKGAKRAIVAIARKLIIRIRAMLLQNAPYRTDGSLLKAA

SEQ ID NO: 398675 - protein, 300 aa, unidentified
MECYVGLDVSLKQTSICVVSRTGSVVREGVVDSDPDAIAGFVRSKAPGATRVGLETGPTTTWLWTELKRLGLPVICIDARHARAVLKMQINKSDRNDAAGIARIMQTGWFKEVRVKDVVSHSVRALLASRALLVKIKRDLENQIRGLLKNVGLVIGRAKFNVFTMRTEELIADRPELIAVVGPLLKARQAIEQQTDDLDRKVLKLARYDAQVRRFMTVPGIGPITALCFKATIDDPTRFKRSRSVGAYVGLTARRHASGEIDWTGRISKCGDAMLRSYLFEAASVLLTRVPKWSALKAWG

SEQ ID NO: 398676 - protein, 343 aa, unidentified
MQISTIGVDLAKNVFQVHGVDNDGKVVISRQLRRKQVIEFFGKNPPCLVGMEACGTAHHWARELTKLGHTVRMMPPSYVKGYVKRSKNDAADAAAICEAVTRPSMRFVPVKTAEQQAALMLHRTRDLLIRQRTQLINALRAHLAELGLVAEKGREGVVELAAIVSDESNSHALPSAMKQALQVLLDQLTALQQQIGQLDRCIHVQHRASDVSRRLESIPGIGVIGATAIAATIADPSAFKTGRDFAAWIGLVPRQYSTGGKEKLGGISKQGDRYLRRLLVLGAMAVIQHARRHPEKNPWIMRLLAKKPAKLVAVAIANKTARIAWAIMAKGGTYRAPVLAAAA

SEQ ID NO: 398677 - protein, 361 aa, unidentified
MRIIGCDLHARQQTLAMLDTETGEIVNLTLEHEDNCVREFYSKLPRPVLVGIEATGSMPWFLNLMEELGIECRVGHPATIRAAEPRKQKHDRRDAMLILKLLAENRFPAIWLPTKELLDLRALLLHRHQWVRMRTRIQNALQAIALANGLRRGPGLWSYDGQTKIAFLPLMPHTAYRRTALQAMYKTMESEVENLTEQVAEQAAHRSGARLLMTHPGVGPVTSLATEVFLGDPKRFVDGKALASYVGLIPGERSSGRRQRLGKVTKQGSPLLRFLWGEAGAHAVRRDPELKRFYRRKLVQKGLGKARVAVARKLGIRLWIMLRDEIDYQEFCRRGQKQQSGAACAGMPETRNGANRHRPVD

SEQ ID NO: 398678 - protein, 343 aa, unidentified
MQAVATIGLDIAKSVFQVHGVDVHGKVVVRRQLKRRYVLAFFKKLSPCLVGIEACATSHYWSRELQALGHTVRLMPPAYVKPYLKRQKNDATDAEAVCEAVGRPNMRFVETKTAEQQSCLMLHRTRHLFVRQQNAVINSIRAHLAELGIVAPVGRNGVEELLDVVADPDDDRVPDAARECVAALGAQLRMLKAQILEFDRRILAWHRSNETSKRLDEIPGVGPVLATALVASVADPKAFRSGRDFSAWIGLVPKQNSSGGKEKLGNITKRGDRYLRSLFTAGALAVIRYAKIHGTKHRPWLTALLARRPTKVAAIALANKLARMAWAMMSKGERYREPAALAA

SEQ ID NO: 398679 - protein, 273 aa, unidentified
MKQYVGLDVSQKETSVCVVDDAGRTVYEGTVKSDPGALTELLRKRAPHAERIGFETGAMASWLWHELRRVELPVVCIDARHAHAALSVRVNKSDRNDAKGLAELVRVGWYREVKVKSEESQRVRAILVARSRLVSIRRDIENQVRSIIKEYGFLFRRAIGLQFRNQVIELLGEDHHLRAVIDPLLSIHEQVCRQQDKFDDEVRHLAKSDETTRRLMTVPGVGVVTALTFRHTIDEPSRFRSASAVGAYLGLTPRRNQSGEADTNGRISRWGDR

SEQ ID NO: 398680 - protein, 376 aa, unidentified
MSKVKFVGLDVHAESIAVAVLEPDGELRSLGIIPNRHESVRKLVRKLGPVEHLRVCYEAGPTGYVLYWQLVALGVKCDVIAPSLVPVKPGDRVKTDRRDAAKLARSYRGDLTPVWVPDAAHEALRDLVRAREVAKRDQLRARHRLSTFLLRTGWQRPAHLKTPWSKPHLEWIKMKVHFDQPAQEMVVSDYVHEIEHVAARIERLEAAIHEAARSAPPRMRAVIAALQALRGVAEVAAVTIVAELGTISRFSKATQLMGYSGLVPSEFSSGKRCYRGSITKSGNAHLRRVIVEAAWAYQFRPWCGGYLLKRQVGLSEEIKEIGWKAQNRLHLRYRKLLARGKNKPQIVTAVGRELLGFIWAIGSKVEAEFQENRVAA

SEQ ID NO: 398681 - protein, 433 aa, unidentified
MKVLHERVAGIDVHKEMIKVAIRSPGEKPWTRTTQILEFRTFYGVLQAMARELRRRDVTHVVMEASGVYTEPVYYALAEQDFTEVAVINPAHAKALKGHKTDAKDCARLAELFECGLLRGSYIPPAELKEVRDLTRYRIKTVQARTSEIQRLAKALESAGIKLGSVASSITGKSATAMIEALIDGERRGAVLADLAKGPMRTAGKLADLSMALTGRFTGHHALLCRLHLDRIKVLDEAVAGLDRRIAGKAARWQREQDLLTSVPGFGDVVAQAWLGEIGPAPHLHFASHEKLASWVTLCPGNNISARKRKHGRTGDAGTYIKPMLIQAAWAAIRVRGRLQARYNRLVRRFGGNKNPGAKKKAITAIAHTLLKIAYQVLKSGTPYQEPGADFYTRRESPEQKQAWLQRQLQKLHPGCTITITISPPEAALPPGA

SEQ ID NO: 398682 - protein, 320 aa, unidentified
MASRESLFIGIDVSKQTLDVAFGADPHAPLETIPYTDEGVQLLVTRLQRLQPTLIVLEATGGLERMVFAQLLQAGLPTARVQPRRVRALAHAEGRQAKTDRLDARLLARFAERVRPPHHQATDEQRASLRDLLVRREQLIQMRTAEINRLTAAAPNLRPGIQKHIDWLDQEIRALEQELDNEAERTDELRRKRELLESVPGIGAITALNLLLRLPELGTINRKEAAAFVGVAPYANQSGAQRKPRHISGGGRDVRSVLYMATLAATRCNPTIRAFYQRLCHAGKPRKVAIVAAMRKLLTILGAILRQQKPWDPAVHTSAP

SEQ ID NO: 398683 - protein, 366 aa, unidentified
MLARGTEDKEHAMSQKLNSEITVIGIDIGKNSFHIVGQDRRGALLLRQKWSRGQVEARLANLPPCLIGMEACVGAHHLSRKLKALGHNARLMPAKYVRPYSKGEKNDYRDAEAIAEAVQRPTMKFVATKTADQLDLQALHRVRERLVSQRTGIINQIRAFLLERGIAVRQGLHFLRAELPGILAKCPDVLSPRMVHLIEDLATDWRRLDERIEGLSDEIGALARHDKGCERLMTVPGIGPIISSAIVAAIGTGDVFSKGRDFGAWLGLVPKQISTGDRTILGPISRRGNRYLRALFVQAAWVVLVKIKPEGWERYGLRSWIEAAKQRLHHNVLAIALANKLARIAWAVLHKGRAFECVKTNASRAA

SEQ ID NO: 398684 - protein, 347 aa, unidentified
MRFYTGRHRYYCGIDLHARTMYLCILDHESGEKLLHRNLRCDPDLFLQAVEPYRDDLVVATECIFCWYWLADLCAREGIAFVLGHALYMKAIHGGKAKNDRVDSHKIAVLLRAGALPKAYVYPPGMRATRDLLRRRLFFVRNRGELFAHVRTTHHQYNLPTPSGQLLYQCNRAKVPDAFLDPIVRTSVEADLALAGHYDGIIRSLERTILRTAKVEDPETLDRLQTIPGVGPILALTLLYELHDIARFKRVQRFMSYARLVKSQKSSGGKVLGTSGAKIGNAHLKWAFSEAAVFFLRKNPRGQKHIDRLRSKHGKGKALSILAARLGRASYYMLRSSTDFDIDRFMN

SEQ ID NO: 398685 - protein, 354 aa, unidentified
MSQTPNTAIAVIGIDIGKNSFHVVGHDARGAIVLRQKWSRDQVEARLANIPPCLIGMEACVGAHHLSRKLASLGHDARLMPAKYVRPYSKGQKNDFNDAEAIAEAVQRPTMKFVATKAAEQLDLQALHRVRERLVSQRTGIINQIRAFMLERGIAVRQGIGFLRTELPTILATRTDALSPRMLRVIEELTGDWRRLDQRVDGLSREIEALARQDQACSRLMTVPGIGPIISSAMVAAIGTGDVFSKGRDFGAWLGLVPKQISTGDRTILGKISRRGNRYLRVLFVQAAWVVLVRIKNWERYGLKSWIDAAKRRLHHNVLAIALANKLARIAWAVLAKGRAFELTRTDDAGVRPA

SEQ ID NO: 398686 - protein, 334 aa, unidentified
MNYTTFIGIDISKKSFDLALIKGNSTERMITAKFSNSHEGIVALEQFIRKQDLVKPEILFCIEHTGLYCRVLSSYLVENQYAVWLEMPVQILKSLGVQRGKNDQLDAKRIAMYANTFKDKARLWQPPREEVQKIHDLLTLRDRLVESRKSILTPIEELEATGLSEVASSLRKHCRKSVESLEKEIEQIEKELDDIIDKDTNLKNKYKLVKSVPGIGKITALALLYYTNEFSLFRSAKKLACYCGVAPFPRESGTSVRGKSRVSNFANKAIKKLLHMASMAAISSDRELKAYYLRKVAEGKNKMLVLNAIRNKILHRLWAVIKRNSPFQDQYQIA

SEQ ID NO: 398687 - protein, 358 aa, unidentified
MNNADSGEGKMTVGLDVGDKFVHACFLDHDGIIVEETRVGATALALRRRFGGDERHRVILEAGLHSPWMSRLLIDLGHEVYVANPRRLRAIYLNESKSDRVDAEYLARIGRLDPALLFPLRHRSAETQADLALLRSRAMVVKARSTLIQYVRGVVKSAGGRIPHCDARTFAHKAVLHLPSELEPVLSPVVATIANMDKTIVAYDKQIEQMTEERYPETELLQQVAGVGAITAATFVLTVEDPTRFPHSRSIGSYLGLRPRQDESGTIKKQLRITKAGDEHLRSLLVSCSQYILGHFGPDTDLRRWGLHLAERGGKNGKKRAVVAVARKLSVLLLRLWITGEIYEPLRNARLRGELSTA

SEQ ID NO: 398688 - protein, 428 aa, unidentified
MNIKEIKRLERFSQIKREIRGSNKHLIVGIDVAKDKHYAFMGTATGKSLVGKLIFDNTIDGFEKVLTRAKKVCDKNKLTEMVFGLEPTGNYHKPLGEHLIRCHLDVVFVSGVAVKRNRELLNGRWDKHDTKCAANVADLISQGKCLYYESPSTGIIELRELLSLRQRLKKNEVSLKMRIRNGLIAKFFPELDQFCKTTENIVFSIVNWCLDPNHILNMEFNDFVNLVTSRKPSLSQQKRLEKIYDLAAYSIGCPMGTGAKYEAQLLINKLRTVRDEIDELEDLLKSLCSSFQEYESLMSIPGFGPHISSVVLARIGNPFRFNNRSQVIRLAGYDLQACRSGKTSNTAIPVISKKGNGTLRYALYQAAFVASSRNSYFKKYYMNLLEGRERERGIKTKMRIKLAAKMLVVAWTLMKKKELFDPAHLIIE

SEQ ID NO: 398689 - protein, 343 aa, unidentified
MELHAIGIDLGKTVFHLVGLDSSGKVIVRKRCSRTQLLAYTANVCVQVIGMEACSGSHFLGRALRAQGHDVRLMPAQYVKPYVKTNKSDYIDAEAIAEAVQRPTMRFVPIKTEEHLDLQAVHRVRERWVMRRTAVVNQIRGLLLERGLTLPKGRSHVDHALPEILTDPTLRLSGSFRVLLGQLQLELEQLTARIEQMDAVIQQTARENEACQRLTAIPGVGPVTATALVAAIGTGAGFRRGKDLAAWVGMVPREYSTGGKQKLLGISKRGNSYLRRLFVQGARVVMQYRTKQAPGLSVWLSQLMARTHQNVAVVALANKLIRMAWAVLCKNERYRVPLLATAP

SEQ ID NO: 398690 - protein, 400 aa, unidentified
MPYHGGLDWGGAAHAVCVVDATGRIVARIEACHDAAGLADMLARLKRVAPPAELPVAIERPSGLIVDALVEAGHPVIPIHPNVVKTCRPRYRAAGGKSDPGDAYMLADILRTDGHRFRPLMSLSDDIRALRALVRARDDLVSQRVTLANQLRSLLEGFWPGAAAVFTAIDSPIALAFVSRYPTPDSASRLGEKRMASFMAQHAYSGRRTPAELLARLRAAPSGLASNAEAKAKGEVVRALASLLERLVGEIAKLSSRVEHAVAELPDGKIVMSFPRTGRINAAQILAELGDVRERFPTEDQLAAEAGVAPVTHASGKSRGVVFRWACNKTLRQAITCFADNSRHASNWAADIYARARQRECKHAHAVRILARAWVRVLWRAWQDGTDYDPAKHKAAARIA

SEQ ID NO: 398691 - protein, 467 aa, unidentified
MLSDAMQTLAGRDADMWAEAPDATSQRRVASCPVRERPRISWMRGDAPPRISFGRLRSRALGQAPPHRRREPGMIYAGVDIAKTDHVIGAVDERGAEMCRPMPFKNTEAGLERAVAWLEGLAGSPSDVVVGMEATGHYWMACYSFLVARGYSVAVINPMQVKAVRKLKKLDKVKNDRIDAWLIAETLRIGQYDETRLATDEVASLRSLSRYLQSLRGMAAELKTQCVCLMDAHFPEYAGIFSDMFGAGSRAVLSKSPLPFELARRRADSLARDIAEASRRGGKSAGYAARIKAAARSSIGVRLGQEAASFQVKSLIRQIEFADSECAKVEARVRALLDEVEPLVLTIPGVSYATGAQIVSEIGDVSRFRNAPALVSYAGLNSSVSQSGQFDSGGGPITKHGSPYLRRALWLAANRARQYDPGLRAFYDKKRAEGKPHRVAVTAVARKLCHIVFAVMRDQVPYDPGME

SEQ ID NO: 398692 - protein, 342 aa, unidentified
MSVYVGIDVHRKRSQVAVIDAKGVVLANRNVPNGVEPILKVIGGLPLGTPAAFEACYGTSWLVQLLEDYGFAPHLVHPSRCKAIASARLKNDKVDAAILAQLLRADLLPEAWIAPPAIRQLRALLRHRVALVRVRTRLRNRIHAIVADYGYDRPAGEYWTGPGRAWLACLPLPAVSRELVEDDLGLIDAMQGRIDRLDWEIRRRARSDPRVKVLTQLPGVGPFTALVILAEVGDISRFASARKLASWAGLTPTVRGSDRVAHYGHISKEGSVWLRWVLCEAAQTAKRHPEFAATFQRIAQRRGKKIATTAIARKLLTRAWHLLTDAKHAAPPHPAAPPAAAR

SEQ ID NO: 398693 - protein, 315 aa, unidentified
MVDVPCFVGIDVAKAQLDIALRPCGERWAVPNDAGGVVTLVERLQALHPTLIVLEATGGLERAATTALATAGLPVVVVNPRQARDFARATGQLAKTDALDARALAHFADVIRPTPRPLPDAQTQELRALLGRRQQLIVMRTAEQNRLAGTSERLMKDIEAHITWLNARIATLDDDLEELLRASPLWRENDDLLQSTPGIGPVCARTLLLELPELGTLTRQQIAALVGVAPLNHDSGTLRGRRTIWGGRAHVRTVLYMGTLVATRFNPRIKAFYERLLAAGKVKKVALTACMRKFLTILNAMLKHRTPWQVQEVQS

SEQ ID NO: 398694 - protein, 318 aa, unidentified
MNTNTLQNINIGVDTGKSQLDIYIRPLDLFFTVPNSDKGIKQALTSIKKHNPQRIVIEATGRLEMPFVLACVEAKLPIVRANPVHIKRFAGAIGRRAKNDRLDAELIAHYGEAIQPELTIIKAKNIRLMSDLVIRRNQLLSMQTMEKNRMQILPKTLHSTIKPMLTAMKNQITKLEEKLVKLIEDSPEYQAKNTILQSVPGIGNIAAASIISNVPELGYITNKQAASLIGVAPITRESGRYKGKRVIQGGRAQVRTVLYMAMMSAMQCNPVFKATYSRLVDAGKPKKVAIIACVRKMVVILNSMLRDGAMWDENTAKS

SEQ ID NO: 398695 - protein, 335 aa, unidentified
MNVIYLGIDLAKNVFQLCGLNQSGKPVYKKRPDRKTLLQTVANIPACLIGVGASTGAFYWQREFEKLGHKVKVISPQYVKPFARGQKNDGNDAQAIAIALMQPTMQFVPPKSPEQQDIQALHRARQRIVNHRTATVCQIRGLLLDPGITIGTAVSRVRHAIPLILEDTENGLSTRMRRTIAELYDLFNDLGRRINFFDKEIDTVFRQSEACQRIAKVKGIGLKTATAVVAAIGKGTEFKNGRHFAAWLGVHSSGDRQVLMNITKKGDKHLRPLFIHGARAVVRVAANNNEGYLNQWVNQLKERQGFNKTTVAVANKNARIIWSILHNETEYRPAV

SEQ ID NO: 398696 - protein, 346 aa, unidentified
MLYAGLELSRKRVDVCLLDEDGKRIAVTAAPPDADGLRGLARRLAGHGQPIYAALESMNGARFVHDTLEEQGWHVELADAQKVKGLAPLAAKTDRIDAYVLAELARRDLVPAIWLPAPGVRAERELARFRLHLVRHRSALKARIHASLIAHGHPCPVSDLFGVRGRKLLDDFELPEAWRASTEASLRVIGHLEAEIDACERELRRQGADHPYVPLLMSAPGIGWVLAYTIAAEIGEIERFSGPKKLCGYTGLCPRVYQSGASDRRGPLAKNGPKYLRWALIEAATHAASHPCYAAHYQATKRRLGRQRGAKVARVEVARKLAEAIWYMLARSQTFAPQGPTLPLVA

SEQ ID NO: 398697 - protein, 359 aa, unidentified
MKEETAGHPGVVGGVDTHKDLHMAAVVDEHDRVLGSACFATTRHGYRQMLVWMRSFGELLRVGVECTGTYGAGLLRYLQHAEVTVLEVTAPDRSDRRKRGKDDMLDAQNAAHAAFAGIRTVTPKSRDGMIESLRVLKVCRKTAIAACRVALQLIHNTIVCAPDELRESLRVMTRMQLIRTLAAWRPDLSDYRNLASAYRITLKSLGRRYLELHDEIADLDVMIAALVDELAPELVSRNCIGYESAAQLLLTAGDNSDRLHSEAGFAALCGVSPVPASSGKVTRHRLNRGGDRAANSALHIIAIGRLRTDPRTRAYVDRRVSEGHSKLEAIRCLKRYIAREVFYLIQRRNRQIGQVQVAA

SEQ ID NO: 398698 - protein, 471 aa, unidentified
MEREQKRLEQFRLLRKEIRGSQQYLVVGIDISKDTHNALMRTVSGKILYRRLTFNNTREGFETLLLQVEAVQVQHGLKEVVFGMEPTANYHKPLGEFLINQNHQVVLISPEAAKQNRPLLDGRWNKHDGKDCANIADLMCQGKCLYYEYPSPELRDLRNLLSLNRKLKKLEQGLRLRIRNHLVAQYFPELDQYCHWGANEGLALVRWCLDPAVMAALSDEELIKRLGTPGRTIAQRKRLSALKDKAPSSIGCQFGDSVEFEGQSVVKLLKEVRQAMEDAQEQIQGVCQKFKEYSYLLSIPGFGPTLSAMVLGAIGNPWRFQNGAQVLKMVGLDLSASQSGKSQGVPIVSKKGKAEIRYALYQAATVASSRDKHFVAYFTDQLRGREKEKGIKTKKRVKLAAKMLMIAWTLMKKHERFDPKYLSAQTQPIAAHTTVKTRSGGIPEVQPAPRVVYRANMKAVFLRLPTKRTST

SEQ ID NO: 398699 - protein, 333 aa, unidentified
MHVLEEGGATREVTAVSPDADALRTLAAQAARWGEPVRAAIESMNGARFVHDTLELHGWDVEICDAKKVKGLAPLACKTDRTHAWVLAELARRDLIPAIWLPTPGVRAERERARFRLHLVRHRTALKNRIHAALIAFGHPCPVSDLFGRAGRELLRGLGLPEPWAGTVAASLELIEDLDGRIRGCEAELRRLGADHPYVRLLVTAPGIAWVLGFTIASEIGDISRFPSPKKLAGYTGLCPRVHQSGGKDHRGPLSRNGPKYLRWALIEAATHAARHPCYREHYERTKRRLGKQRGAKVARVEVARKLAEAIWHMLTRNQPFAPAGPTRSALVA

SEQ ID NO: 398700 - protein, 337 aa, unidentified
MTLYCAIDLHSTNNVPVVIDENDKILFQKRLPNDLTVVHSALAPYQSELHGVAVESTFNWYWLVDGLIDHGYRPVLVNTSAVKQYEGIKHTNDHSDAFHLAHLMRLDILPTGYIYPREERAVRDLMRKRLQLVRHRVTHMLSAQNQLWRSTGVNTTTKLIKQADLSLLNLVEDRHIKMAIKSNLVIIQALSQQIDLLEKTVKRQAGLKPEFQSLLTMDGVGDILGLTIALEIGDIRRFPRVGNFSSYCRCVDSSRLSNGKKKGDNNRKNGNKYLSWAFIEAAHSIIRHNKTAHRFYQRKRAQKNGALATKALAHKLARAAYYMIRDREPFKLDLLFR

SEQ ID NO: 398701 - protein, 419 aa, unidentified
MNKLFVGMDISLDDVKVHILDQDGIDACSRFSIDNNPSGCNILVSHILDCCNKYNIQKVFIGLESTSVYGWHIQYYLADHASLKPFNPSVTTFNANTVKAFKKSLGNLPKNDWVDAFVIAEKLRFGRLPKSCPVDFRYLALQRLTRHRFHIVDSIVREKNYFLSNLFLKFSGLCQTKVFSNNFGTTATEIFNEFLTLDDIAARPLEDLVAFLVDKGRDHFNDPNATAKLLQEAVRKSYRINANVNDSLNFVIKSCLDNIQYLEKQKKASEKTIANEVKGFKNQFLCLTSVNGIGPTIAAGLISEIGGISRFDNDNALAKFSGIYWSEYQSADFKAEDTYLKRTGNEYLRYYFIQAADQLRKYCPEFSQYYARKFNESKTHKHKRALVLTARKAVRLVFALLREEKLYKPPAMKGDDCKE

SEQ ID NO: 398702 - protein, 390 aa, unidentified
MRGIFEGGCDYHPGFQQIAFVSTDTGKVGERRLEHTEEAEQFYREVGKHGEVVRVGMEASGHARWFERLLHNMQFELWIGDAAEIRTKRVRKQKTDRQDAQLILQLMLENRFPRIWVPDAENRDLRQLLWHRHRLVQMRTRVMNQLHVVALNEGLRRKKALWRPEGRAELQALSLAPWAGRRRQDLLDLLDRLTPKIHELNGKLEQIVERRPVTRQLSTHPGVGPLTALAFELVIGTPERFACAKQIASYVGLAPSEESSGDRRRLGHISKQGNVLLRFLLVEAAQVTVRSDAQWRSQFFHLAMRRGRKIAKVAMARKLAVELYWMWRRGWDYRQMQQLGSHAGEPENPHGVQSITAVMIGHPAPLHRGVRTRNHDRGCDRRDGWVGLSS

SEQ ID NO: 398703 - protein, 364 aa, unidentified
MEITTIGIDLAKSVFALCAADSSGRVVMRRQLRRAQVLNFMRGLPRCVVGMEASGGAQYWARQLTALGHEVRVMSPALVMPYRKGNKTDRNDADAILEAVTRPSMRFVMVKSVAQQDLLALHRVRAQLVKSRTALCNQLRGLLRERGVVVRTGAAALKRSLPAALADESSELSGELREFLSEMSQWLGTLEQRIASCEARITRKFKHDERCVRLAAVPGVGPLTATALVAAVGNAQRFRNGRELSAYLGLVPRQHSSGGKTVLLGITKRGDRYLRTLLIHGARSVLRQCKGDARNGWARRISAERGPNVAAVALANKNARVLWALLARGDRYRATSKITSAGLRPGSPSAVRRARGANLRVVKD

SEQ ID NO: 398704 - protein, 352 aa, unidentified
MPETEVDTFAGIDVSARELSVALRRGKGEDKPAIAKFSNHHAGHKALIAHLFRGGRRVRVCLEASGNYSLDLALTLQAHRQVEISVINPRRARRFAESLGQRSKTDPVDARVLCEYAARMPWVAWQPPSSVALHLRAVARAIADLAVIHTQQNNRAHASAASQALPVLVVKEMQRHQKYLEQRMTRLRREALRLIAGDSELDRRFRLMLTTTGIAETSALQILGELAVLPDILDARQWVAFSGLDPRLFKSGKSVEKRPRISRGGSRHLRRALYMPALVALRRDPYLRCFYQNLLARGKARLQAVVAGSASWGVFQVATGQQPPLALIGVAVAGAFAWFLIRGATKAKTDPR

SEQ ID NO: 398705 - protein, 294 aa, unidentified
MNFYTQQHKHYCGIDLHAKAMYVCILDQTGTKLVHKNLPTTPEAFLRLIAPYRDDVVVGVECMFTWYGLADLCAKEGIAFVLGHALSMKAIHGGKAKNDKIAAHKIAVLLRGGMLPQAYVYPAEMRATRDLLRRRCHLVRKRAELLAHIQNTHSQYNLPEIGNKLAYKANREGVEEPFPDPSLRQTIAVDVALIHHYDQLLGEVELSITRTATAHAGQTFARLQSVPGIGQILALVILSEIQAIARFPRVQDFVSYCPLVKCAQESGGKRLGTSGKKIGTVHLRWAVAEAAVLF

SEQ ID NO: 398706 - protein, 343 aa, unidentified
MQAITTIGLDIAKSVFQVHGVDAAGQVVSRRQLKRRYVLAFFQKLPPCLIGIEACASSHHWSRELQALGHTVRLMPPAYVKPYVKRQKNDATDAEAICEAVTRPNMRFVATKTPEQQSCLTLHRTRQLFIRQQTSVINAIRAHLAEFGIVAPVGRNGVDQLLAVVTDTNDKRLPEVARACIIALGAQLRTLKAQILEFDRQIRAWHRSSEASTRLDAIPGVGPALATALVASIADPKAFRSGRDFSAWIGLVPKQNSSGGKERLGNISKRGDRYLRSLFTTGALAVIRYAKIHGTKHRPWLAALLARRPTKVAAIALANKIARIAWAMMAKGERYKEPVALAA

SEQ ID NO: 398707 - protein, 418 aa, unidentified
MEIVFSRVAGIDVHKRQVTVAVRVPSDQSGDDEVRAQRVRRFATFYGALLEMASWLRAEQVTHVAMEATGVYWRPVFHALAEAEGLEIVLCNAHHVKNVPGRKTDANDAVWLAQLCEVGLLRGSFIPPAEIAAVRELTRYRRKLTEERTRETQRLHKVLEDGGIKLDSVASDSLGVSGRAMITALIAGERDPAVLADLARGVMRKKIPDLTMALAGRFAAHHALLAGLHLAHIDHLNEMIGALEVRIDAAIAPFARQRDRLMTVPGIGKRAAQTIIAEIGVDMSRFPTADHLASWAGLCPGNNESAGKRKKTSTRNGNAQLCSVLVEAAWAVARTQTRLGARFRRLHRRFGKAGGKKAAVAIAHTILVIVWHILHDEVDYTDLGADYYTQRDNPEVRKRRLLRQLEGLGYRVEISPAA

SEQ ID NO: 398708 - protein, 338 aa, unidentified
MTIYAGLDVSDKTTHVCVVDGAGGLVWRGECATDPEVLARTLRKHAPGLVRVVLETGPLSTFLYHGLVERGVPVTCVCARHAKGVLSVRSNKSDVHDAEGLAQLARTGWFKAVHIKAEATHLDRAQLKIREQLIEAHRAMANQLRGLLKLFGLRLGKVTTPNKRAERLRTLFAQKPEIEPILQPLIESLAGLEVQIGRSTRQLAAKAKADPVAARMMTVPSVGPITAMTFKSSIEDPGRFDRGRDAGAFAGLVPRRHQSGERDYKGRISKAGDPMLRSALYEAANNLLSRVKRPCALQTWGKRIAETRGPKRARVAVARKLAILLHRLWQSETEFCWN

SEQ ID NO: 398709 - protein, 352 aa, unidentified
MKITTIGLDLAKCVFQVHGVDATGQVVVRKSLRRSQMLPFFANLPRCLVGIEACGTSHYWARELIKLGHEVRLMPPAYVKPYVKRGKTDAADAEAVCEAVTRPTMRFVPVKSPEQQAALSMHRTRDLLVKQRTQLINMIRGLLAEFGVDIPKGLERALLMARRIVDGKAPDVPMEAAKIVSTLSQQALDIHVRIRQIDRDLLVWQRGNDVARRLMTIPGIGPVGATALAASVTDPHQFHSGRQFAAWLGLTPLQKSSGGKERLGRITKMGDKYLRKLLIVGMTSLVCRAKHNPQTIEPRLANLLARKPVRVATVAMANKTARTIWAIMTRGETYRAGRQPALAHKNNVTRIS

SEQ ID NO: 398710 - protein, 397 aa, unidentified
MYIVGIDIAKRKHEAAVIDGEGTVIIKPFSFTNNCSGYNRLLAMLTKAKLPLDEVSFAMEATGHYWLALFTRLQKEGFRVQVINPVQTNSIRSFYIRQAKTDPRDALLIAEVIRFGHFSESTLHPEKIYELRELCRGRHAIVSMQADVKRKVVALLDQVFPEYETAFTNLFGDTSMAILQTCPTPKELSEMPFEELCHLIEVSSHKRFRMAKAQELQELARNSFGFAMAGDVFSTMIRLYAKHLDFLKQQVREMDRKIAEIMDTLDTPITTITGIGPTLGAYILSEIGDISRFSSAAKLAAYAGIDPTMRQSGEYNGVRNRMSKRGSPYLRHAIWLAASSAVLHDPALKLYFQKKRDEGKPYMASVGHACRKMVSIIYAVMRDNKTYTPCIPNEISA

SEQ ID NO: 398711 - protein, 376 aa, unidentified
MVRKMADKKRGKVKGCKMNSIVAGIDLGDRESLTTVLSPIGDVTDRFTFPMSEEGYAYFANRVPKEARVAFESTIMAYPIMRALRGHGYTDITVAHPKELAWIVRSKKKNDRADSLKIAKLHMAGMLPESRLLDRDAQIVRDLLVQRAKLGVEIGRLKNSVIGYLKREGVYDSLPRTGDSFSVKRRQAIHLLRFNDNRDLVLGTMIDRLEFLEKQCAPLEDKVRENARLSDDVRLLMTITGVDFYLASLISSFIGDVNRFPSDDHLASFFGIVPTSRDSANVKRRGKMTKDGSSTARWALSIIVDTVVQHNEPVKDYYRSVKKRTGSGKLAHVATMRKLTRMFYHMLKTRDHWKWENTLLTERKMSRLQLDGGVVS

SEQ ID NO: 398712 - protein, 338 aa, unidentified
MKTHVGVDLHQRFCYLTAVSASGKVFKQGQVVNEGDALRSWLRQLPVPRQVVVEASGFWPAFARATRAESERLVMVHPQRVKAIASAKLKNDRVDSETLAHLSRCDLLPEAWMADEATQQLRLLVRLRIRLGRQRARAKNQLQAVLHQEGFKKPVTDVFGKRGRAWLAGLELSVAGRLVVDTWLREVDHLDVELDAQTAELERMATADARARCLQTVPGIGAYSAMVILAELGDVKRFGNKRALASYAGLTPVVRESAGKRKRGGITHQGSNTLRWIMLQVTQVAARSSPGARSDYAGLRARQPAQVARIALARKLLTVVWALLHHGVCFDEELFARG

SEQ ID NO: 398713 - protein, 399 aa, unidentified
MPQIWAGVDAGKAHHHCVVIDGQGGKLLSRRVANDEQALLELIADVRALDPDAQWAIDLNSGGAALLIALLLGSGQKLFYIPGRTVHHASGAYRGDGKTDAKDAAVIADQARMRRDLQPLRVEEDIAGDLRILTARRYNLAADRTRAINRLRAQLLEYFPALERAFDYSVSKAALRLLTGYQTPSGLRRMGQARLAGWLKARGVRNAPSVAATALEAADAQHSTVPGEALAAAMVVRLAKEVMDLDKEIAEIARLIEARYCEHRHAEVIASMPGFGPLLGAEFIALTGGNLDAFASPDRLAAVAGLAPVPRDSGRVSGNLRRPRRYSRRLLRVFYISAQVAAVHCPVSKQFYERKRAEGKGHKQAILALARHRLNVLWALIRDNRKFEPHPPTPLPAAT

SEQ ID NO: 398714 - protein, 340 aa, unidentified
MTITTVGIDLAKNVFAVHCVDQNGKAVLVKPKVSRAALPELIAGLPPCVIGMEACSGAHYWARLFRQYGHDVRLMAPKFVSPYRMAGKTGKNDAADAIAICEAVQRPHMRFVPVKDESQQAMQCLHRTRQGFIQERTATYNRLRGLVSEFGIIAPQSTDALRHIVSDQRETLPVQVRLCIDDLLAHITNIEEKIAEYDRVLSRVAKTDHRSQQLMELKGIGPTTASALVASIGNAHDFKNGRQLAAWLGLTPSQYSSGGKSKLGRITKAGDSYLRTLLVQGARSVMIGAENRTDSFSRWVCSLIGRRGYWRAVVAIAAKNARLCWASLHYGDDFKLYSAT

SEQ ID NO: 398715 - protein, 356 aa, unidentified
MTSAKYIGLDVHQATTAAAVLDANGKLLMESILETHASTLRDFLAGIRGELNLTFEEGVAAEWLYGVLKSDVDKIVVCDPRKNALLKAGNKNDRIDARKLAELLRGGQLKQVYHGNRGVRTLKELARSYVVLTRDVTRVLNRIKAVYRSMAIRCPGQRVYHPRYRQQWLEQLAVPGLRRRAERLYQQLDLIQPVRQQARRELLAESRKHAARQLLEQIPSIGPVRAALLMAILQTPHRFRTKRLLWAYSGLGLEIRTSSDHDFKNGQLQRRRPKQISVRGLNRNHNPELKNLFKSTALSASLRPGAWQECYQRMLAKGIKPAMAQLTLARKIAAVVLTLWKKGENFDPDKLTMQAA

SEQ ID NO: 398716 - protein, 361 aa, unidentified
MKRCHFIGLDAHCQFTEMAVVNPHGDVVQRGRCPTTIPALTELLDAVPRPCAVALEEGPLADWLWRNLAPRVDQFTVCDPRRNGLIAKDSDKDDPIDAAKLAQLLRGGYLKAVHHPEALGRAVFKQWVLLYHDRVRQRVKEANRAMAYLRRYGVFVREKAFRDPGDRAGLAGRLPPEPLVAAHLGVLWQSYDLAAAQVRQLRQRLTREAAREDVIRRWRELPGIGWVRAVSLWVYLDTPWRFHGKAALWKYLGIGLERRHSGPGPGRVQVVRRTNRVLKGIILGAAQRAIGQGANPFAAQYQRWLKAGVSLGSARRNVARSLAATVWGMWKSGSAYHPEWVGAVPAATAARGGPSWAGPRV

SEQ ID NO: 398717 - protein, 446 aa, unidentified
MSNEVAVTTAAPEPQWAAFVALDWADQKHSWRLSEASSQKQEQGELDNTPEAVAAWAADLNVRFGGRPIAVCLEQARGALVYMLLKFPHLVLFPVNPQMAARFRQAFYPSGSKDDPVDTRVLLDILLHHRDRLRRLKPDTPETRLLQRLVEQRRLMVNEKTRQSNRLTACLKLYFPQILKWFENPTVPLVGALLERWPNLEQLQRAHDGTLRRFFHQHNCRSEELIKERLDAIRQAVPATTDAAVLEAEAMAAHGLIQLIATLRANIAELDERIAKAFAAHAERALFDGLPGAAAVMAPRLLVAFGTDRERLAQAHEMECFSGIAPVRAASGQCEWIHFRRACPKFLRQTFHEFAGHSIVKCQWARAYYDLQIHRGNSHHAAVRALAFKWIRILFRCWKNRTPYDEQVYLQSLQKRNSPLKALLPPGAGLGWKDVAGFQKLSEEPS

SEQ ID NO: 398718 - protein, 345 aa, unidentified
MTEAYDGRQVVGMDLHRRRSVLVRMTEDGRKLETVRIENSPAALRAVIARAGKNPRVVVEATYGWYWAVDVLEAAGAEVHLAHPLGVKAFSYRRVKNDERDCADLADLLRLGRLPEAWIAPEPVRALREITRYRHKLVGQRTSCKDQVHAVLAKAGIPVTRSDIFGRGGGIWLDGLPLPQPYAGKIASLRALISVLDGEIARLEEQAAAMLAGDRGYAAIRQLPGIGPVLGAVIAAEIGDITRFRNPGQLASWAGLTPRHYESDTRVIRGRVSKQGSRMLRWALVEAIQRQPAGTRPRQVKDAIIARRGTDVRGIAKTAAARVMLTQVFYGMRDGHIRRATSQAA

SEQ ID NO: 398719 - protein, 331 aa, unidentified
MDNQIDLKYYIWRYSHALCGIDVAKNKHDVTALNVSGKTVLKPLTFSNNKAGFELLDLSLRQLNQDYLIALEDTGHYAFNLLNFLHEQGYKVYTYNPLLIKKFAKSLLLRKTKTDKKDAHGIALKLLSDPNREQFQHDNRQVELKILTKHIHRLKKKQSDWKVQYTRCLDIIFPELDKIVGKHSEYTYQLLTCYPNPQKRLEAGFDKLIEIKRLTASKIQDILSVAPRSIGTTSPAREFEIIENIKHYKRLIDKAETCVNDLMAEFNSVITTVTGIGNRLGAVILAEIQNIHAFDNPAQLQAFAGLDSSIYQSGQIDLAGRMVKRGSPHLR

SEQ ID NO: 398720 - protein, 330 aa, unidentified
MKNYKEVVGIDVSKNTIDAYCYQSQVHREFVNDIVGYKSLLKWVLKTTKGVAVFYCFENTGYYSLKLALYLDSQKVIYVEESPLKIKRSSGIVKEKTDKLDAALIARYAWLYREELKPSQVKSKSHLELGRLLALRDLLVRNNAGLKGTLKEMKVLLSSPTTDTGCIVLKRSIDYQEKQVKSIEERIKEIISADALMSKNYELLTSLKGIGLVVACQLIYHTGNFTRFASWRAFSSYCGTAPFEHRSGTSIYKRKQCHYLGDRKMKSLLSMASVSAIQHDSELRLYYNRKLAEGKDKMLAINNVRNKLIARAFAVVKRGTPYVVLQQYAA

SEQ ID NO: 398721 - protein, 346 aa, unidentified
MAMTIAVLGIDLGKNACSLVGVDPCGAVVLRRRVKRETLIGLAAKLPPCVVAMEACCGAHHVGRVFAAHGHDVRLMSPEYVRPYVKAQKNDDRDAEGIAEAATRPTMRFVELKSQDQLDIQTLHRARERLVGERTALMNQTRAVLLERGIVVAKGKRKLAEALGVLTNEPGGAGLSPRVVALIADARAQWAELDRRIAAFDAEFVSWAKENEVARRLTTIPGFGAMTASALVAAVGQAESFDRGRDLAAWLGLVPRQFTTGGKPKLLGISKRGNKYLRKLLVHGARAAMPYVAERDTPLGRWAKELLDRAHPNVAVVAFANKLARIAWALLRRGETFVAGRSPVAA

SEQ ID NO: 398722 - protein, 341 aa, unidentified
MEKPKFFIGIDISAETFDAAVFQENKPVITAKEPFVNNPDGYGLFCSWLASLNINNQNSAMCLEITGAYSECICYYLHEKGFVVWPEAPHKVHRAFYRQVKNDKVSAMQIAEYIYRFFDKINPFQPNESIVEQIKTLLATREQLQKQSTASQNILHSIKRKYYQTPLANDILADTIKNLKSSIDKIDKELNSLINNNSKFAPIAKALDSIPGIAMLFIANYIVITDGLTRHMEYKELASYIGICPNEQRSGTSVYKKPRSSGYGPSRLRKLLNLASKSIKHHNPKFHNYFVLKQAQGKLETLIINNIANKLLRIVCAISKNGLTYNKNYTSVHPRFLMQNA

SEQ ID NO: 398723 - protein, 363 aa, unidentified
MSKQIVALGKPAISSEQYPHPQVKKLFCGIDVGAETLAVAVLEPDRPSVQREFANTATGHKALLGWLGKMRAQVRVSLEATGIYSMDLALTLDATECVEVAVLNPKRVHDFARTLRRSKTDSADAQVLAEFSLRMPFAAWQKPSQSALALRAVSRHLEALVVQQRRETNRLHAAKGSMATPRCVIADLKRSLAGVGRRIVKLRREAMTLIAADAHLSERFRLLTGVPGIAAVSALQILGELVLLAPDMKVRQWVARSGLDPVHQDSGTSVHKPARISRAGSRHLRRALYMPALAAVRWDPHLKAFYEALLARHKRKLQALVAVARKLLHAIYGIFRSRTPYDGRKLFPAMTLAENSNPLPASI

SEQ ID NO: 398724 - protein, 317 aa, unidentified
MSKHTTVSAGIDTGKCKLDIALDRCPERLQVDNTDDGHAVLWGWLRQHRVNRVGIEASGGYEQAVVSALRRKGFLVIMFQPAQVRAYAKYRLQLAKNDKIDAALIAACTAEAKKIHPPPDPRLAPFAELLTVIEQLTEDIARLKTRRATSRDEQTRRFWNEEIARLKRLQSQKLKQLVAAIREHRDLADRLELIASVDGVGLRTAVAILVRMPEIGRITREQAAALVGVAPYDADSGSHIGLRHIEGGRERLRKSLYTAALPAAFNWNPELMAIYKRLTAAGKPHKLALVACARKMIIFVNTVVARGTPWVPREVLT

SEQ ID NO: 398725 - protein, 400 aa, unidentified
MSGLRGLFQGFVGIDVSKDKFDACGIREDGTKLFQFSAAMDRNGFEKLKMHLSSVPIASVLIGMESTASYHVNLFSYLASEVYAVVVINPLLISNYVKMQLRKTKTDKKDAWVIAQFLLANKDSLIRRAASPLISDLRELARQRESLVGQMTSLKNDIKRILNITFPELEHLAGIFTKSMLKLLQRYPSACALKDIDPDQLTRMLIEDSYGRKRGAFAEALLKAVRSSIGTPSPMKDVILKQKVSLHLQLDEALQEITEMLLQSSRGMMGDDRDILNSIKGIGEKTAASFLIEMGGDIQQFDQPGKIIAMAGIDPAVRQSGKYEGSSRITKRGNRHLRRIIWLMTTQVIHYCDVFRAYYLKRKKDGLPYKKAVLATAHKLVRVIYAMLTQRTAFCPVVNS

SEQ ID NO: 398726 - protein, 349 aa, unidentified
MMIIGVDYHPGDQYIAFADTETGECGERRLNHGDGEAEKFYQELKQRGVSVRVGMEATGYSRWFERLLAELGVEVWIGNAAKIKTKRVRKQKTDRNDAQLLLRLLLENNFPKIWVPSPENRDLRQLLWHRHRMVQMRTRIMNQLQALAMNEGRRKKRWSEAGRAQLEKIPLATWASRRRQDLLDLLDRMNPTIEELTAAIEQEAKKCPEVLRLMTHPGVGPLTALAFVLIIGSPERFPCGKQIGSYVGLIPSEDSSAGHQRLGHISKQGNALLRFLLGEAAQAAARCDADWRRRYVHLAMRRQRNIAKVAMARRLAVRLYWMWRNGWEYAQWAEFGSNAGQLATGHGVH

SEQ ID NO: 398727 - protein, 412 aa, unidentified
MEVLYPRCCGLDVHKKTVVACVLITEAGKAIRKEIRTFPTMSADLLGLADWLRECGCTHVAMESTGVYWRPIYNLLEDDFTLLVVNAQHIKAVPGRKTDVADSEWIADLLRHGLLRASFIPPRPQREVRDLTRYRTSLRYERVAEVNRLQKILEGANIKLASVVSDITGKSGHAILLALVAGTTDAAALAHLAYGTLRGKIPQLERALAGQFSAHQRFLVAHQLAHIDALDQLMDQLSAEITARLAPAAVEVTLLQTLPGVGQRTAEVIVAEIGTDMTRFPSAGHLASWVGLCPGNQESAGKHQSGRTRKGSPWLRSALVEAAQSAGRMKRQPTYLAAQYRRLAARRGAKRAAVAAAHSLVVMIYHMLSRHEPYHDLGGGFFEEREPHERERRLARHLESLGYTVTPPAAVA

SEQ ID NO: 398728 - protein, 371 aa, unidentified
MGESSKTLYVGLDVHKESIAVAYAPEDRGAEVASLGSIGTRQCDIDKLIRKLQSKGATLVFVYEAGPCGYWLYRYLTRTGLSCHVVAPSLIPKKPGDRVKTDRRDAITLARSMRSGDLTAVYVPQIEDEAIRDLSRGREDAMRDLKATKHRLKAFLLRQDIRYEGRANWNAAHLRWLSEVVCPTRAQQIVFQEYVRAVTEQHERLQRLETELHEEVKGWRLYPVVEAIQALRGVELTGAVIVIAELGDLTRFDTPRKLMSYLGLTPSEYSSGERRRQGGITKAGNSHARRALVEGAWAYRYPAKVSRHLQLRLEKLPAEVQAISWKAQVRLCKRYRQLTARGKHVNQVVVAIAREMAAFAWAIARTVPLAP

SEQ ID NO: 398729 - protein, 337 aa, unidentified
MKYCGIDLHGNNNWVVIIDEQDRVLYSRRHANDLPRLLAVLAVYRSELRGIVVESTFNWYWLVDGLQEAGYRVLLANTAAIKQYDGLKHRGDESDARQLAHLLRLGLLPEGHIMPKAARAVRDLARKRMQLVQQRTAQILSIESSLSRHSGWKLSSNRIKCLRQADLDEMQLGEMPMLGLKANVAVMQTLQAQIDSLEKVLADYCRTEPGYQLLRTVTGIGEVLATVILLETGGIERFADAGNYASYCRCVGSAHLSNGKKKGQGNTKNGNRYLAWAFVEAANFAVRSCEAARRFYQRKKAARNSTVAIKAVAHKLARACYHMLKTQQPFCVDRCFA

SEQ ID NO: 398730 - protein, 398 aa, unidentified
MLYLAIDLHSRQITVNLRNEEGVILLRRQVSTEWEKLREFFAEVRGLAALHGGFCAIVEVCGFEEWLLKMLRESGCVTTVLVQSKERSKRKSDRIDANKLGEQLWMNRVRLAKGQRLQLRRIEPPSVEDAAARQVTMVRVRMGRERTKMLNQIQRLLRKHNLQQECPAKSVCTKLAREWLGAVQLPAMDRLEMDLLLARWKLWDTQVVKIDAQLQRLHQTHRIAQLLSTIPGLGDYSSLAIASRIGSIERFAKPASLVNFWGLAPGCRNSGETRQRLGSITKEGSTIVRFLLGQAVYHVLRKCPRWRTWYKQLKARRGSKIARVAVMRRLATTIWHLVKHNVPFDPEAGFGQHSTKTKSQAETTRRSVVEGTSRPPSSLPPHPQPPSPLLCCSAEEAR

SEQ ID NO: 398731 - protein, 322 aa, unidentified
MTIIGFDVSKNELVGIRTDKSAAVKETIIMENTRETIDQFLDGAKERYPHLTISSEATADYHRTLAQRCLKREIPFRLINPILTKQFTRATIRKKKTDLTDAHIIAKLTLQGEGTLLTASSFDPAKSLSRTASKINRLFKMFSAISARMERILPEEEMVIAEMKKHLVPLRETVEKLRQEARGRIDQKVCALLCSITGIGPTLAPILITEIGDISRFPSGKSLVAYAGLDPRVKQSGISMKRNTKITKRGSPYLRHAAYIAATIAKRHDPELKIYFQKKIKEGKRYKEATVATARKILYRVYAVWRRGTPYVRKESYQQGDA

SEQ ID NO: 398732 - protein, 344 aa, unidentified
MKITTIGLDLAKSIFQVHGVDATGQVVVRKSLRRSQMLPFFAKLPPCLVGIEACGTSHHWARELLKLGHEVRLMPPAYVKPYVKRGKTDAADAEAVCEAVTRPTMRFVPVKSPEQQAALSMHRTRDLLVKQRTQLINMIRGLLAEFGIDIPKGLERALLMARQIVDGKPPEVPFEAAKIVSTLSQQVLDTHVRLREIDRDLAIWLRSNDVARRLMTIPGIGPIGASALAASVTDPHQFRSGRQFAAWLGLTPLQKSSGGKERLGRISKMGDKYLRKLLIVGMTSLVRRAKYSPGKVDRRLADLLARKPTRVATVAMANKTARVIWAIMSRGETYRAGHRPTLAA

SEQ ID NO: 398733 - protein, 341 aa, unidentified
MRHLGVDLHKRQFHVCYYAENQTQHHNYQMDELNQFKSSLHPDDHVAVEATGNTRYFVKSIESHVAKVVVVNPRQFRVIEASIKKTDRNDAELLARFLSFDGLLPEVRLPDETASQLKSLAHTRNKLVQLRTALKNKIHGILNFHGIVLKKEVMSSEKGLQRVLSVDGLTDSARFEVEILVDQIRSLNGAIKKIDAELEKRGKALKGHRNITSIKGIGDKSASILLSVIGDVKNFPTRKHLDSYFGIVPKVRNSGDTIRHGHISKQGSKLGRTTLVQCTLIAIRYSPYLRSFYERLKSKKGSGKAIIATARKLLGTIYLLLSEDLMFEDFEAGVIVKATNS

SEQ ID NO: 398734 - protein, 429 aa, unidentified
MTATHSTLTTVLVAIDISKHRHEVLIGIPGKKRRRRMTITNTLEDFQRLSAALTSYDLPVRIGFEATGNYHRALAHHLGQAGFDLKLVSSVGLARTREALHNSWDKNDPNDAQVILHMLEIGAVQFFHDPLVAGTADIQELSKTHEIVSRSKTELWHRILTHYLPLYFPEAERFHRSSRTDWFLAFLEKYPSPHMIKAMDREAFVADAWQVVGRKVSKERMLSDIYDTAVESVGLPVHPDSDAVRMFRLVLAEGRSLIRQRDEIEARAVELLSDLPDYQLLTTIPGIGPINAMTILAEAGDLRRFRHHRQFLKFCGMDLATTQSGMFRGQSRISKYGNARLRRTLWMAGQTAVLKRTNSFRDKFERYISKDRHNAHLRRKAYTAIAAKMARTVHAVVNHGAPYRPFFEGVSPGGRTSLCSSRGGSSLTS

SEQ ID NO: 398735 - protein, 343 aa, unidentified
MQVSTIGVDLAKNVFQVHGVDSAGKVVITRQLRRKQVIDFFSKIPPCLVGMEACGTAHHWAREVSKLGHTVRLMPPSYVKGYVKRPKNDAADAAAICEAVTRPSMRFVPIKSADQQALLMLHRTRDLLIRQRTQLINALRAHLAEFGLVAETGREGLAQFAAIITDQSNREALPSAMKQALQAIVDQLAALELQIGTLDRAIHAHHRANDMSCRLETVPGIGVIGATAIASTVTDPSDFKSGRDFAAWIGLVPRQHSTGGKERLGGISKQGDRYLRRLLVIGATAVVRHARQHPKKHPWVMRLLAKKPAKLVAVAVANKMARIAWAIMAKGGYYRAPELAAAA

SEQ ID NO: 398736 - protein, 355 aa, unidentified
MNQEKYIGMDVHAATISAAVKNAEGKLLMECVLETKAATILEFIQGLRGTLALTFEEGTLATWLHDLLKPHVSRLVVCDPRKNALMRDGNQNDRVDARNLAELLRTNQLKPVYHEEHGIRTLKELGRSYSTLTQDSTRVMNRIKSVYRSWAIPCAGTSVYSRRHRAEWLAKLVEPGVRIRAEHLYEQLDSLEPVRQAARRELLREGHKHAAVKLLRQIPAIGPIRSALLVALLQTPHRFRTKRQLWAYSGLAVQTYDSGEFRFVRGKLHRNRERITVRGLNRNHNHDVKNLLKGAAISAIGHPGPLQDFYAALVEKGMRPSMARLTLARKIAAITLIIWKKGVSFDPKQLQRPTA

SEQ ID NO: 398737 - protein, 347 aa, unidentified
MALATISVLGIDLGKNVCSVVGLDASGAVVMRRKMRRETLIGLAEKLPACVVGMEACCGAHHLGRVFAAHGHDVRLMSPEYVRPYVKAQKNDDRDAEGIAEAATRPTMRFVDLKSQDQLDIQTLHRSRDRLVGERTALINQLRAILLERGMVAPQGKRKLEQFLTVLMDEQGGEGLSPRMILLVADARAQWAELDRRIAAFDTEFIRWAKENDNARRLTTIPGFGAIVASALVAAVGHAESFDHGRDLAAWLGLVPRQFTTGGKPKLLGISKRGNKYLRKQLIHGARAALPYVAERDTPLGRWAKALMARTHHNVAVVAFAHKLARIAWAVLRRGEPFAVTGIPAAG

SEQ ID NO: 398738 - protein, 313 aa, unidentified
MMIIGCDYHPAFQQIAFVDTDTGELRERRLQHREEAEKFYRDLAAQGIKVRLGMEASGQARWFERLLAELNFELWIGDAAEIRTKRVRKQKTDRQDAQLILKLMLKDDFPQIWVPSWENRDLRQLLWHRHRMVQARTRIMNQLQAVALNEGLRCKKRLWREAGREQLEAFRLAPWASRRRRDLLELLDRLTPTITELTQTIEQEAEKCPEARCLRTHPGVGSLTALAFVLIIGRAERFQCGKQIASYLGLVPLEESSGNRRDTSRNKGTRCCVFCWWKRRKSRHAASRNGAISTSTWRCGEAGRLPRSPWPAG

SEQ ID NO: 398739 - protein, 347 aa, unidentified
MKDSKDIVLVVDYHLENLVIRQFNHSTGEERSFRRKNTSQEILRLVGDAQVEAAACGGKVVWIMESTTGWARVKDLLGERAEFILANVLQMPLPPKARRRKTDKIDTARLLREYRNGDLPRAYQPLAQLRQVRRLVDCRQDLVRRQTALKNWISHFLSHETWHVSDNLWSDRGLRRLKSLEFGLSDTWLVRLKISDLEQVQQLIVQVEDKIMEVYACWPQAQRLDDVRGIGPISAVTILAYIGPIDRFASSDDLIGYAGLAPGVHTSDKRGHNLRIGGGGTHTRLRYFLIEATKWLATIPRYQDAHKRVLAKRGKKVARIVLARMFLRSIDKMLRADVHFEPQGRAA

SEQ ID NO: 398740 - protein, 348 aa, unidentified
MNLKRIGLDTSKAVFTLHGVDHDEKAVLRRNMRRAEMEAFFAKLPPTHVALEACGGSHHWGRRLAAMGHTVQLIPPQYVKPFVRRGKNDRNDAEAISEAAARPDMPSVPVKSAEQQAEAIVLSARELLVRQRTQLVNAVRGHAAEFGIVAAKTISQLPSLLDAVAAAETVPVTAKEMLAFLGEQVAQLDAQIAELERRMKQQHKANPVSQLLAEVPGIGPIGALSLALTIDPGRFTSGRHFAAWLGLVPKEHSTGGRQRLGGISRAGNERLRQLLVLGATAVIQYAKPGSKSASAWLLALLERKPRKLAAVALANKMARIVWAMMATGEAYRGSKTVATSAAGAAAAA

SEQ ID NO: 398741 - protein, 403 aa, unidentified
MAAVSGIDWASQWHDVDIADELGTRLLAARFAHDERGVCALIAALAEHGVERVAIERPDGLLVARLLAAGITVLAIHPNQVAAARDRFRAAAGKSDLFDGFVLRELCRTDSHRFPVLAPCTDETLALRALVRTREDLVGARVALANQLRAQLDAAWPGATRIFRDTDSPIALAFLRRYPSHADARGLGPKRLDAFLARHGYCGRKTPEQLLKRLRSAPTPAIGEHEADARRNAVLGLVAALEPLVCQISQLTGEIRGAIRRHPDGPIFLSLFRDPKSVVCAAGLLAEIGDNRARYPHSDALAADAGQAPVTKQSGKHRAVSFRWACDKRLRNHIGVLADSTRHWHPWAHDVYQRAIDRGCDHPHATRILGRAWTRVLWRCWQDHTPYDPTQHRALTRHITLQG

SEQ ID NO: 398742 - protein, 378 aa, unidentified
MNRIIKIGMDVHTTNYTLCIFEPSFEHDGTVHCITQVKPEIKKIIHVIETFKKKHENEELNIVCGYEAGCLGYSLYHELKEKGVECVILAPTTMKTEKGGRKLKNDYRDAKMIAECLAYGGYSAVHVPTELDNSVKEFIRMRDDIKENLKSIKQQIIAFLTRNGKQFNGKSYWTKKHIDWINTISFSEPLLLDTLKEYMIEYNHLCDRVETLDKQIEEISLKEEYVEKVQQLQCLIGIKTHTALSLIVETSDFNRFKKGKMYSAYLGLIPGDDSSGGHEKKLGITKAGNSHLRKLLVEAAQGYTRGKVGFKSKDLKARQEKCSSEVVAYADRANERLRRKYYRMILRGKKYNVAKTAIARELACFVWGIMTNHIDLCS

SEQ ID NO: 398743 - protein, 347 aa, unidentified
MEYVGIDLHKKESQICLLTETGEVMERRIRTEAQRFAEVLGGRPRARILVEASTESEWVARCLEALGHEVVVADPNFAPMDATRTRKVKTDRRDARALQEACLLGAYRPAHRLSDAQRHVRGRRAVREALVRTRTRYIARTRAVRRRHGWRVPPGSADPFSRRVRALSLPGRLRSEVAPLLAVMQTVNQPLAYSDGVIEAVTRPDARVPRLRTVPSVGPGTAAALVATIDDAQRFRRAHEGEAYLGLVPRELSSGESQRRGRITKAGKTRMRWVLVQAAVSILRCRHAQTDALRTWATGIAARRGKKIAVVALARRLAGILYALLRDGTTYAARTVPHRAARAAVPV

SEQ ID NO: 398744 - protein, 418 aa, unidentified
MDTLLSKVAGLDVHRKNIQCAVRCQQPQTGKLLRQVRCFGTMTRDLRALADYLAALGVTHVAMEATGVLWKPVWNVLEEHFTLLLVNPRHLKKVPGRKTDVSDAEWIAQLLQYGLLRGSFVPPRALRNLRDLTRHRAQLAAEWTRVVNRLHKVLQDANIQLGAVASDILGKSGRAMLRALERGVMDAEQLAELARGRLRKKLGELRLALEGCCTEHHRYLLGRLMRHLGYLEQEMEELSFQIASILEGLLPAEDFERLDRIPGVNRVTIENVVAEIGVDMSVFPDAHHLSSWAGICPGNEESAGRRLRSRTRKGNRWLRRALSEAAWAASHTKGSYFSAQFHRLVRRRGKKRALLAVAHSLLIVIYFVLKEKVEYRDLGADYFDRLEPERLRRHLVKRLESLGYDVTLTPTTPDSPAA

SEQ ID NO: 398745 - protein, 343 aa, unidentified
MGEAITIGVDLAKNVFQVHGVDAAGEVVFRRQLRRGQVLPFFRKQGPCLVGMEACATAHHWAREIASLGHEVRLMPPRYVKPYVKRNKNDAADAEAICEAVTRPTMRFVAIKSPEQQSVLMLHRTRELMVRQRTMLVNAIRAHMAEFGIVVRVGLPQVEALLATIDNEADDRLPPLARTCLSGLAAQFMSLQAEIGVAEKRIHAWHRASEVSRRLETVPGIGPIIASALAASITDPSVFKSGRELAAWIGLVPRQNSTGGKDRLGRISKQGDHYLRWLLVAGAMAVIRQARRRDTANPWLARLIANKPTKVVAVALANKIARVAWVLMRHGGTYRRPVAAAAA

SEQ ID NO: 398746 - protein, 346 aa, unidentified
MEHYAGIDVSLELSSVCVVDTQGKIVKETKVASEPEALVDFFGSLDFAVKRIGLEAGPLSQWLYAGLKRAGFEAVLLETRHVKAALSAMTVKTDRKDARGLAQLIRMGWFRPVHAKSMGSQEIRALLVARKQLLGRLIDVELSIRGILRGFGLKVGPVTRKGFEARIRELVTGQATLERIAWAMLSARAALKSEYEELHKTVLAIVREDAVCRRLMTVPSVGPLVAITYKSAMDDPNRIAKSKAAGALFGLTPKKYQSGEKDVTGGITRAGDEMVRTVLYEAANVLLSRITRFSKLKRWGMDVAKRRGSKRAKVALARKIAVILHRMWVDGTTYRWTAAEQIAAQA

SEQ ID NO: 398747 - protein, 398 aa, unidentified
MALIIVETRAITGGVDTHADVHVAAALDPIGGLLGVREFPVTPAGYASLLGWLGGFGTVCLVGIEGTGSYGAGLCRHVTAAGVRVVEAGRSDRQDRRRQGKSDPLDAVSAARAAQSGRARGAPKGRDGTAGAIRALMVAKRSAAGERTQTINQARALVLTGPDDLRARFARHTAAALVAGTASLRPRPGDVVGYATRVALRELGRRAEFLDGQPGRPGELIVPLVTAHAPGLLALYGVGLCTAALLLIAAGDHPERLRSEAAWAHLCAAAPIPASSGKTVRHRLNPGGNRQANHALWRIVFTRMGSHPATRAYAGRRTDLAALTARRAAHRPLLPRCWELRDNLTVYDAANVALAEALKATLLTGDRRLARAPGPQCPIEILQPTPWAPTRGVRLRYH

SEQ ID NO: 398748 - protein, 433 aa, unidentified
MRIIGLDIHRAFAEAVAWEDGRLRRLGRVDMRRDLLAAFAAKLSPNDVGVIEATGNATSATAVVAPHVKKVGIGNPKQVRIIAYAKIKTTIEADVLAQLYASGFLPEVWIADEPTQALRRQVTRRNQIVRQRSRLKSVIQSILHSHLIPSCPHADLCGAKGRTWLIEQVVPQDERLAIDRHLREFDRLGEDLQVIERDLARSALEDEGVKRLMTIPGVDITVALAMKAAIGDVSRFDDPQKLVTYLGLNPSVRQSGQVRPTMGGSPSRAVVMRAACSSRRPGRPLVLPDRCEPSPCGVRARRGQHVAAVATARKLSVVIWHLLMKGESYAWARPSLHAKKLARCGTQGREQGCARPKGSRARLQHKEPPGRRAPLGGAGRGRLCTPRRRLEPTRSEEGRHGCRKRGATIEAARQGSHLGPCSSPRGRPCATGE

SEQ ID NO: 398749 - protein, 354 aa, unidentified
MSKIIRIGMDTSKHVFQLHGVDENEMPVLRRKLRRHQVLGFFAKLEPTVIGMEACGASHYWARQLAALGHKVVLIPPQYVKPYVDRGKNDAADAEAICEAMSRPKVKQRFVAAKTVEQQAAQMLIGVREALLRRRTQVSNAIRGHAAEFGLVAPKGLARIELLAEQIAQDVTIPPLAREMFLVLVGQYRHANAQVTELDARLMAFHRSNEQSLRLAEVPAIGPVTAAALVAKVSHPETFRCGRDFAASIGLTPKDHSTAGKLKLGVITRAGDETLRTLLVCGATAVIRQAKSRPPSPWLAELLKRKPPKLAAVALANKTARIAWKLMVSGQHYDPRKAQPQPNPANPEMRKQAA

SEQ ID NO: 398750 - protein, 356 aa, unidentified
MQTKITKKIDFSNHNFYIGLDVHKKSWYVTILTDGMELKTFSQPPSAHLLFDYLNNNYPNGRYFSAYEAGFCGFGAHRELLNLGINNIVVNPSDIPRMDKELSYQTDKSDSRSIARELRNKQIHGIYVFNQANEEFRALFRYRITLAKEIRKTCNRIKAFLFYRSITIPAQYDNANWSKGFLLWLEQLPLEQAPAKFILGQMVTDYHQLHIKKLEVEKQLRTMAKLKDTQLLIVLQSVPGIGPITAIALMSEIGDINRFKTFKQFASYIGLIPRISQSGEKSYTGKMTYRNNNYLRPLLVEAAWQSIRSDPAMLAYYKNACIKTMSKKAIIKVSRKLLSRIMYVMKNRKPYQNNIK

SEQ ID NO: 398751 - protein, 370 aa, unidentified
MEQYTEAFVGIDTAKNKHALAIADPGCDGEIRYLGEIDSAPAAVQRMIRKLAGHYEKLYFCYEAGPTGYGLYRQVRALGHDCIVVAPSLVAKRPGERIKTNRRDAVTLARLLRAGDLTPVWVPDAAHEGVRDLVRAGTAASEDLRRKRQQLLSFLLRHGRIYSGRKHWTKMHLHWLAQQKFDHPAQQIVFHDAVDAIEDAATRLRRLDQQVAEIVPSWSMAPVVEAYQAMRGVSFGVAVTFVAEIGDLRRFDNPRQLMAFLGLVPSERSTGERVWRAGLTLAGNKRARRVLVEGAWSYRYPARVSQTLQARLEGLPKTVRAIDWKAQLRLCARYRRLTAAGKKRPLVIAAIAREMAAYLWAIAQHVAPAA

SEQ ID NO: 398752 - protein, 340 aa, unidentified
MTELYAGIDLHSSNNVIMINDKEGNQVYRKRLRNQLGSVEKALEPFQEDICGIVVESTYNWYWLVDGLMDLGYIVHLANTGAIQKYSGLKHVDDNTDAGWLADMLRLGILPEGYIYPKGERGIRDLLRKRAHLVNQRTSNLLSMKNVVTRNTGSSPRSSALKIISDETIETMFSDVNVALSLKAGAQIVRALTEQITLIEKTALKQVRLRDAYQNLVTVPGIGPVLALTIMLETGDIGRFASDGHYASYCRCVGSAHFSNGKKKGSGNRKNGNRYLGWAFAEAAAFAMRYNQQIQRYYQRRKDSGKHMMSARAAIAHKLANACYYMLRDNTVFDVNKAFR

SEQ ID NO: 398753 - protein, 342 aa, unidentified
MDEYDGRQFVGIDLHRQRSVIVRQSESGEQLSAVRIVNDPVALALQLEQAGSDPEVVLEATYGWYWAVDVLQDCGARVHLAHPLGVKGFRYRRVKNDVRDAGDLADLLRMGRLPEAWIAPPQTRELRELVRYRAKLVGIRSGLKAQIHAVLAKAGVLIAVSDLFGVTGRQRLAKVPLGPAYAERIRSLLELIDILDGHVARFAAMIAERLHTHRGYQAIQQLPGVGPVLAAVFVAEIGDVHRFAGPAQLCSWAGLTPTHRESDTVVRRGHITKQGSKLVRWAAVEAIQRQPDITKIALDRKRIEARRGRNIAKIAAARKLLTLVYYGLRDGHIRALARQVAA

SEQ ID NO: 398754 - protein, 343 aa, unidentified
MNYYAALDVSLRSVHLCVMDQDGDIQAEGQVDSEPQDIEAFLQTLGLEITTVGLEAGTLTQYLTYGLQAAGYPVVCMEARQVKVALSAMRNKTDKNDARGIAHLLRTGWYSPVHIKSIESHQIRALLSSRKAVLNKCIDLENEIRGLFKVFGIKLPPKLGHGSFDPAVRESIETDPALCHALLPLLDARLVLYHSFRELDNRTRNMAHQDPVCQRLMSTPGVGFVTALTFKAGVDDPTRFKHSRTVAAHFGLTPRRFQSGEMDHPGHISRAGDPDVRCTLYVAANAMMTRSSRWSPLKVWGMQLAKQRGHKRAVVAVARKLAVILHRMWLDGTTYRWGTEGAP

SEQ ID NO: 398755 - protein, 342 aa, unidentified
MDMGDKVHSICILDASGTVRECAEVSNTRAGIYKFFAKMEPSLIALETGTHSSWVSRILEELGHEVLVGHARKLRMIWNNPQKNDMRDAEMLARIARFDRKLLHPIQPRSMKAQCDLAAVKARDQLVKVRSSLIAHVRGLVKSVGARLPTCSPECFAKRAAEAVPEELALALEPVIVSIAELTVRIRHCDQLVQKLADEEYPATKRLQEIPGVGPITSLAFVLTLEDPKRFARSRDVGPFLGMTPRRNQSGQVDQQLPITKAGNAYMRRLLVQCAQYILGHYGPDCDLRRFGLKLAERGGKNAKRRATVAVARKLSVLLHSLWKTGEEYEPNRCRRQNRKTA

SEQ ID NO: 398756 - protein, 341 aa, unidentified
MRLFIGLDVSLAKTAICVVSEHGKIVREAEVASEPEPLLAWLQALDGNIAALGLEAGPLSQWLHRGLTDAGLDVVLMETRQVKGALKAMPIKTDRRDAEGIARLLHLGWFRPVHCKSVSAQEVRAILSARKAIQQNMITLEMSLRGLLRNFGLKVGAISRGRFEHRIRELAEGNAMLETATTPILRARASLRQELASLEKLVRQMAQDDPVCLRLMTMPGVGAVVALTYRSAVDDPARFTRSKNVGPWVGLTPSRNQSGERDVSGGITKAGDVSLRRALCQAATVMMNRGQATWLRTWGAQVAKRRGRKRAMVALARRISVILHRMWIDGTTFRLEAAPTT

SEQ ID NO: 398757 - protein, 406 aa, unidentified
MVNVGIDLHKTQFTVCVRTGKESWFAKYPTTPEGYRDFLAQAAEWQKKGEAVRAGVESTGNTRYFKNRMEEAGIGVTVINTLKMKVVNESVKKTDKHDAATIAEFLEKDMLPESQLCSRESEQLRRLLRARESLVTTEVVIKNQIHGLLTSEGMEDVKGSLQSKKGRREVLDALQANKNGLAAQPLFETIERLEENIKGIEKELRLLTKGDRMVELLMTIPGCGEICSWTIRAYTDDIKRFASPKKYASFAGLAPWVQNSNETVHHGSITKRGPKELRTAMVQVVMGLRRMKEKTFSWRFMQRYEAMKKSKGSGRAIIATARKMAVVIWNMLTGDAEFDIGLMVDRKLAKKAESMSGAAGTAEQALNEAQEKQEKPALVEEVKRSEGVKKTVKKSGVARKKIKKVG

SEQ ID NO: 398758 - protein, 344 aa, unidentified
MSYFVGLDVSLRTVALCVVDADGYIVLERTLDCEVEAIDDYLCKFGEPIAKLGFEAGVMSQMLFHGLQALGYDAVCMEAHQVSAALSAMRNKTDKNDARGIAQVVRTGWYQPVHMKSRESHYNRAMLSSRKAMRRKCVDLENEIRGLFKTFGIRLPSTLAHHRFDDTVRPLIEADEGLAFALTPMLEARGALYVHYREMDKRVKRVAAQDPVCNLLVTVPGVGAMTALHFKAAVDDPSRFSSSRTVAAHFSLTPRRFQSGEMDNPGRISRAGDTEMRAALYTAASSLLTRTKDMSPLKAWGLRLVKRRGLKRGTVAVARKLAVILHRMWVDGTPYRWSDVEVAK

SEQ ID NO: 398759 - protein, 387 aa, unidentified
MAQQLDDLSRSPTPLDQDSTIITVIEMSQATWLVAGIVPGIERHPLKKIEPNELELLCLLMRWRAEAMKKGRTITRIVVAFEAGRDGFWLARWLRVRDIESYVIHPTSVAVSREHRRAKTDRLDTGLLKRVFIGWLRGEPDHCHMAAIPTLAEEDAKRPNREREGLVRERTRLVNRMKSCLVRFGVRTFKPTLRNAPDRLATLHTPEGVPLPPNTLLELRRDMARLRFVMDQIKEVEAARAQGLKQAPQEKTHAMVNLLARILGIGIDTADMLVHEVLARNLRDRRAVARYAGLTGSPDESGSRRREKGLAKAGSARVRRGMIQLAWRFLLFQKESALAQWYRARTADARGGTRKTMIVALARKLLIALWRMLTTGEVPAGVVLRAA

SEQ ID NO: 398760 - protein, 426 aa, unidentified
MKALRTHVAGVDVHKDMLAITVMIGKGDEDPRLEHFECSTMTDDLRAMGIVLKGKGVCDVAMESTGVYWKPVYNVWAPLGLNPIIGNASHMKNVPGRKTDQKDAEWIARLHRFGLIRPSFVPDGIYQRLRLLSRHRTNLTEDHARVKNRVQKVLEDGNIKWSSIVSDTFGVAGIKILDLIADGVTNAQTLSNSVTTKIKRKEDAKKALTNCLTAEHIFVIKELMIQYRDLESRILEVDNELVEKMKPFAHLIEELKKIPGIDRVLAMGLLAEATADMSSFADERRFAAWAGVAPGNNESAGKKKRSRCRKGNPALRKILIQAAHGAKMKRGSFYRAKYNKLVYRLGSKNKAKVAIANRLARTIYKVLGGSPFKDIGYMRGDPHEEKVKRLVAQLKSLGVNISHQNHQMIVSSTRKVTVDDTGIVLQ

SEQ ID NO: 398761 - protein, 365 aa, unidentified
MKIMHWIGIDDHADKWTIAQFQGNEENPRKEFELTPNESGYRKLIAFAKALAGTVRIVYEAGPCGYELYRRLTKAGLQCEVAAPSLTPRKPGQRVKTNRRDAAKLAHYLRSNELTLIAVPDEQRESLRDLIRGRTAAQKDLVSIRHQITKLLLRYGHRYRDGRAWTDRFWAWFGKITFEAEHSQFVLEEMIATHGERVERVARYNDEIEAAAKNPKYKSYIAALSVLRAIDTLSAMTILSELGDLRRFPTAPQLMAAVGLVPAEQSTGEKATRLSITKTGNAHVRRVAVEAAWHYQGRIANGPTIQRRRKDQPQELLDMARRCDQRLNRKFFRMTSRGKRSVVAAVAVARELMGFIWAIGQVVHP

SEQ ID NO: 398762 - protein, 413 aa, unidentified
MEVLYPRCCGLDVHKSSITACILLAQAGKPLKHIRRFGSTTRELGELVAWLREFGVEHVAMESTGVYWKPVWNVLEAHFQIVLANAQHIKAVPGRKTDTKDCQWIAELLQHGLLRASYIPSVLIRDLRDLTRARTSLSQEHSRIASRIQKVLEDANIKLASVASNALGKSGRAMLEAIIGGEESPERLADLALGHLRLKIPQLQTALEGRVRDHHRFLLRSLLRQLQFLEAEIELLDGRLDQIGREHLDLAEALDRWITVPGVDRVAAWSFIAEMGIDVTQFPTAAHLASWAGVCPGNNESAGKRISSKTRKGSPWLRRMACQSAWAAARTKNTYLSAQFKRLAARRGRKCAIIAVAHSILAIGYHLQRQRCTDADLGSSYFDRLHADGLKRYLVKRLESLGHAVILQPAPPE

SEQ ID NO: 398763 - protein, 403 aa, unidentified
MNSVGIDISKGRSTIAVMRPFGEVVISPFEVRHTGSELSKLARQLKSLDGETRVVMEATGNCHASVAKLLHNAGLYVSVVNAKLVHDYGNSELRRVKTDRKDAVKLANYGLDRWLTLPRYIPEEDTRLLLKNCYRQYRQYSKVQTVLKNNLISLLDTVCPNANRLFSSPIRGDGSEKWVDFVAEFWHCRCVSEKSERAFTSKYLRWCRKHGYNFREAKAHTIYAEASGHIDVMSKSETTKLLVEQAVAQLRATSTALAALKHEMQSLASMLPEYPVVMDLFGVGPTLGPQLIAEIGDVRRLYSKKALVAYAGLDAPPNDSGDVTGRHKSMSKIGASSLRRTLFLVMSVYLQTAPLDEPVYQFMDRKRAEGKPYRVYMMASANKFLRIYYATVKAYLEPLERTA

SEQ ID NO: 398764 - protein, 448 aa, unidentified
MRQGKRPASRGVARRNAKLKALRELVGKDRAIVAVDLASQRQAAVVCDHDSVVLARRMFRGSAWCVSEILAWAEPVAKKAGFAGLVLACEPTGHRWKPLVVTARAQKIPAVCVQPLLVRRAREGEDFTRSRSDFGDAVIIARLAAELRCYVPYLPEGPWARLRHLGARREGLVERCVADRQQVRDLLECAWPAVLEAAADPLESLTWRAALAVSVDPAVIAAMSEQEFLAVLREKLVALGGKKVWRRIALAVRVAAADPGGIAAERDAIVERAAFAYQDWMSALAALADVESRMLAVLDELGLTRLVTTIPGLSAVGAAVILAQTGDPARYDTPRAWVKHAGLAPQANESGKYRGKTRQSGRGRPGLRTAAWRAIWGALRCNQVYATRHGQLTTRERNRLTNGQAHAALAAALLRQLFVVVTRRIPSDAAIASGAAAPAETTVVVPAA

SEQ ID NO: 398765 - protein, 359 aa, unidentified
MTGAVADERPVPLRVLKPVGERGSSSVVPSNPNSRVGRKRSPIAQGGVQMDATVVGIDVSKDRLDVYVYPSAEDFSVARNAEGLDALIARIGPLQAQAIAVEATGGFETVVVASLGGAGLPVIVVNPSQVRAFAQALGKRAKTDPIDAAVIARFVAATKPEIRALPDSETRLLADLVTRRRQIIQMMVAERQRERHLPSRHLKKSVARLLKALEKELSALDQGIDETVRGSPAWREKEDLLKTVPGVGNIVARTLLAELPELGQLDRRQIASLAGLAPFTRQSGRWRGKSLIGGGRSSVRAVLFLSAMVAKKHNPPLKTFHQRLIASGKPKMVALVAVARKLLTILNAILRDQRPWQPA

SEQ ID NO: 398766 - protein, 336 aa, unidentified
MTIIRIGLDTSKHVFQIHGVDENEKPVLRRQLRRSEVEKFFAQLPPTRIGIEACGASHHWARLLRGLGHAVLLMPPQYIKGYVKRGKNDAIDAEAICEAMSRPTMRFVPVKTAEQQAALTMLGVRDLLVKQRTMLINALRGHAAEFGVAAAKGPHKIVELLQRLATGEGVPALAREMLGMLASQLEAVNGKLKAIEARLMAWHRQDQTSQCLATIPGVGPIAGVSFALKIPDARAFRSARHFAAWIGITPRENSTAGKHRPGKISHEGDESLRRLLVLGATAVIQRAKRGRVSPWLLGLLARKPKKLAAVALANKMARVIWAMMVSGEVYRHPQET

SEQ ID NO: 398767 - protein, 470 aa, unidentified
MREKRELLTSWCYLVARWILVWVAQNARTRIGVYHSLPTKPRPNLQTQGESSMNEERNTRGSKRYVALDIHKHYCVVAGVDREGRVLLQPVRVEHADLEGWLKKQLCSTDQVVIESTTNAWHVYDLLAPLVERVVVANPIRVKQIAQARVKTDIRDALILARLLAANLVPEVWVPPVHIREMRQLLSQRRQFVETHTQIVNRMHSVAHRHHLQHEQGKRFNEKTTGWHKDKTLSSLEQFQLQLEMENLNYIEKQIERVSKEVRKMCHQKPWAESMTYLMQLPGFGVITAMTVLAAVGDVQRFESPKQLASYSGLTPGLEQSGTKNRGKGITKEGRRELRWVLVEAAQMAVKSDPLWKHRFQEMQKRMHRNQAIAAIAHRLLELVWYVLTRRQAYRHFSHERIAYKYLTWAWKMDEVARDGLTRQQFARYYLMKLGIGHDLTRIALDPKHPRKLASEAELLALRPELTHIE

SEQ ID NO: 398768 - protein, 338 aa, unidentified
MGTYAGIDLHSSNNYIGIMDQDQKRLFGKRLPNALDKILMVLEPFKSDLKGVVVESTYNWYWLVDGLQDHGHRVHLANPSAIQQYEGIKHTDDKWDSFWLAHMKHLNILPEGYIYPKEQRAVRDLLRRRLFFVRHRTANILSLQSTITRNLGIKMSSNEIKKLDMHDAGDLFDSSNLVFMAQNNICTIKHLAKIIKGIEKEVKSQVKLRKEFVMLTTTPGIGLILGLTIMLEVGDIRRFFKVGNYASYCRCVGSKRLSNGKKKGENNKKNGNKYLAWAYVEAAHFAKRHIPKAQRFYQQKMAKANGAVATKALANKLARASYFIMRDQVPFDEDMLFR

SEQ ID NO: 398769 - protein, 387 aa, unidentified
MPQPNDLSKSLVALDHNSTIIAVVEMSQSSWLVGGVVPGIERQPRKKLEPSPERLLALLHRWRDEAIRTGGNITRIVLAFEAGRDGFWLARWLAARGIEAHVIHPSSVAVSREHRRAKTDRLDTELLKRAFLGWLRAERGHCSMARIPTIAEEDAKRPNRERECLVRERTRIVNRIKATLARLGIREFKPTLRKAAERLAALHTPEGPPLPPNVSAELQRDLARLGFVVSQIKEIEKARQRRLEQHSESGPHATVRLLARVVGIGIETADMLVHEVLSRPMRNRKAVARYAGLTGSPDESGAKRREQGLARAGNARVRRGMIQLAWRFLLFQKQSSLAQWYRARTADSRRGTRKTMVVALARKLLIALWRFTTTGEPLEGVILRPVG

SEQ ID NO: 398770 - protein, 316 aa, unidentified
MSQSEVFVGIDIAKAQLDVAIRPTGDTWTAPNEEAGLAHLVERLNPLRPALIVVEATGRLELPLLGALMAAALPVVVVNPRQVRDFARALGHLAKTDRLDAHVLALFAERVRPTLRPLPDPATQELSALVARRRQVIEMLTAEKNRCGQAPPALQPDIAGHITWLETQLQQLDDALGRQIRNSPGWRAQDALLQSAPGVGPVLSRTLLADLPELGRLTRKQIAALVGIAPLNRDSGTLRGMRTCWGGRAPVRAVLYMATVSATRCNPVIQAFYRRLCAAGKAKKVALTACMRKLLTILNAMMTHRTPWRTQVSQCA

SEQ ID NO: 398771 - protein, 371 aa, unidentified
MDESTKMLFVGLDVHKDTIAVAYAPDDRGADVVSLGIIGTRQCDIDKLIRRLESKGATLVFVYEAGPCGYWLYRYLTRRGFGCSVVAPSLIPRKAGDRVKTDRRDAVTLARLRRSGDLTSIYVPSVDDEAIRDVSRGREDTMRDLKRAKVRLKAFLLRQDLRYEGRANWNAAHLRWLSRVVCPTPAQQIVFQEYVRAVTEQTERLQRLERELHELVKGWRLYPVVEAIQALRGLELTGAIVLVAELGDLTRFDTPRKLMSYLGLTPSEYSSGGRRRQGGITKAGNGHARRVLVEGAWAYRYPAKVSRHLQLRLEKVPAEIQGIAWKAQIRLCKRYRQLSARGKHANQVVVAIAREMAAFAWAIARTVPVAA

SEQ ID NO: 398772 - protein, 347 aa, unidentified
MSITMIGLDTAKSVFQIHAVDETGKTEIKRKLSRHDLLPFFKKQELCTVVLEACGAAHHWARILTGLGHDVKLIAPEAVKPFVKKGKKNDAADAAALCAAASRPDMKFVPAKSLEQQGILALHSARSLLVKQQTMLANAMRGLATEFGLTVPKGIGKLEELTVLVDADEAFPVKARQAFTGLFDQCKALTESIVTFEAEIVAHASHDETARRLATIPGIGPITASLIAATVGDIGMFKSARHFAAWLGLVPRQHSTGGKTRLGRITKTGNREIRKLLVLGATSMVYRAPQWNSAAGLWIRGVLERRPVRLATVALANKMARIAWALMTRKEVYQAKGRVAAAAVAAA

SEQ ID NO: 398773 - protein, 398 aa, unidentified
MENPCITLDVSKGKSYFQGFISIDKPFSKAKQIEHTKTGFDFMMATAENLKKEGDVTFIFESTGIYHKGLQKYLDDHEEKYIILNPLEAAKIRKSQLRSTKTDQRDCKNIAVAYFSRDYRIHQRQDDIYERLQQMNRDYGFIVQQLRMLKVAYRNTLDVVYPHFDQLYEDVYSDIAMAVIEINSHPDEILKKRIETLSKQLEKNTKHHKNYCMKQAQAIKTYAQNVQSGVSSNDYEVSELNHYREATKAQIIEVEIHLEQMIRVSKDIPLFKQLVTIPGIGENLAARLIAEIGDISRFSNKRQLVAYAGIDPRVYQSGQVSGQHLHITKKGNKQLRTLLYLAVSSSLRLKKPSVIRDFYNKKRQQTNPLSHKAALIACANKLLRIIYGMSRNGSTFLI

SEQ ID NO: 398774 - protein, 358 aa, unidentified
MLFIGDDWAEDHHDVEIVDGRGHRLAQRRLPEGLEGIARLHALIARCMPEQWAQLDPVEAASRVKIGIETERGPWVRALVAAGYEVFAINPFSTARYRQRHSSSGAKSDAGDAHVLAEIVRLDRAHHRPVAADSDDGEAIKLLARTHQTMVWERTRHLLRLRSALREYFPAALQAFDDLDAPEAVELLAAAPDPDRAARLSKAKITAALKRANRRAVQDKAAQIQSILRASALHQPAPVQGAFAVIATSEIRIIATLNLEIERLSEVVAKHFGRHPDAEIYASQPGLGVILGARVLGEFGDDPHRFANAKARKNYAGTSPITRASGTKRIVAARYARNDRLGDYVNSPTASSASCTAA

SEQ ID NO: 398775 - protein, 344 aa, unidentified
MPTEAPQSVYAGLDLHKRNVFCGLINQDGQPLYRRRLPAELPTILQALEPYRPQLKALAVESTFNWYWLVDGLQAADYPVHLANPAEMQKYSGLKQTDDETDALWLAEMLRLGILPEGYIYPQAERPVRDMLRRRMLIVRQATQTLLSLQSMVTRHSGQSVGAAKLQGWTLQEVRATFANGFSQQTASALLELLGEQRRIQHSLEKQVLAVAKPTGPFQRLLNIPGIGNILGLTITLETGPVARFASAGDYASYCRAVSSRCESDGKKKGENNRKNGNKYLGWAYVEAAHFSQRYSPRAQAWFASKTARAGRVVAVKALACKLAKAVFYVLRDEVDFDENKLFG

SEQ ID NO: 398776 - protein, 323 aa, unidentified
MNKYKETFGVDISKDVFDVYGSECGHSQFKNDEQGFKLFVKTLATDSLVVMEATGYYHYRLAQFLYKNGITVSVVNPLSVKRFIQMKLAKVKTDKSDSKAICNYGLSNEVPLYNALSDVQAECLQLFRLMDSYLKKRTATKNKLHGEEVLGLPSKYVYRSLKRDLKHLNKEVKGIEDRLLDLVKKDQQQQLTLLTSIPGIGIKTALFLVVITDGFSKFEKASQLCSYVGITPTIRESGSSVRGRSRISKVGNKKLRNLLFLCAFNACKHNKGCREIYERIVAKGKSKKLALIAVANKLLKQAFAIAKSGLPYDENFVSVLTKG

SEQ ID NO: 398777 - protein, 310 aa, unidentified
MEQSFIGIDVSKDRLDVYVRPSEVSFAAARDGKGLADLVERLRPLDPCLVVLEATGGFEQTVAAALVAAGMPLSVVNPRQIRDFARATGQLAKTDALDAKAIALFAEKVRPEPRPVPDAQARALGELIARRRQLIEMITAERNRRAQLSSRRLVKGIDQLLALMQKQLSELDREVGDSIRGTPAWRERDELLRSVPGVGDIVARTLIADLPELGRLDRKQIAALVGVAPLNRDSGKMRGRRTTWGGRAKIRCVLYMAALVASRRNPVLAAFYQRLLRAGKAKKLALTAVMRKLLTILNAMVRDNRQWQNA

SEQ ID NO: 398778 - protein, 323 aa, unidentified
MKKKDYQYLQFVGVDVSKAKLDLAFGDGGQALSIDNTQKQIVTQLIERIENPKTTIVVMEATGGYESLLVTLLHQHHIAVAVVNPRRVRDFADGIGMDAKTDPIDAKLLAFYGQVVKPAAQAAKSAEEKKLKALVERRRQLLGLVNQENNRLQQTTDQEIQGYIQQSLETLKKQVKEIDERLKECVASNTANARKVEILQSVKGLGPVAVSTLLAELPELGQLNRGQIAKLVGVAPLNRDSGKSSRQRRTSGGRSYVRRVLYMATLVATQFNSKIKAFYQRLLASGKPKKVALVAAMRKLITILNTLIKNDELWNTEPNKTSV

SEQ ID NO: 398779 - protein, 352 aa, unidentified
MTRITTIGLDLAKKVFQVHGVDAEGKVVVARKLRRKEVLAFFAKLPPCLIGMEACGSAHYWAREIIKLGHTVKLMPPKYVKAYVKRGKTDAGDAAAICEAVTRPNMSFVPVKGLEQQGLSMLHSARSQLIGQRTQLINGVRGHLSELGVIAARGLLGFAELAAIVRDESDQRLPVTARAALMVLVRQIEMISTEIAALDSTLRKENKASELGPRLETIPSIGPVIASALRARVTDAKLFENGRHLSAWIGIVPENDSSGGKVKQKGLSKKGDRYLRSLLVNGAMAVVRRAQRRPDKHPLVAKLLGRMSAKQVAIAIANKTARIAWAIMVHGGVYEAGHRAPQYRAQACAAAG

SEQ ID NO: 398780 - protein, 429 aa, unidentified
MNINSTTQTSASTTLYAAWIGLDWGDKEHAFCIFHSNTAPLESGKLEHSAESVHRWFKQLEQRFGGRPVALGVESNRGALLHVFAQYPWLVIFPINPVTSARYRKAFVPSGAKDDLPDAILLLDLVRFHQDKLRALSWEDENTRQLSALVLARRDTVDRRTQTLNQLTHLLKSYYPQALELVGGDLSAPLALEFLRRWPDLIALKTVRPSTLRAFYYKQNVRRPELVDKRLEQIKQAVALTTDQAVVSVAQLQLKLLLQLVNTFNQHIERFEEEIARLFATYSQAALFRDLPGAGRILAPRLAVAFGTDKTRYPNPESFQKYAGLAPVREKSGNQLWTHWRWQAPAFLRQSFVEWAGQTVVWSKWAKHYYQRMKAKGKKHHVILRALAFKWIRILWKCWQTGIAYNEELYLKALAKRNSPNLPLPTKTT

SEQ ID NO: 398781 - protein, 359 aa, unidentified
MKGRVFAGIDLHSNNVMIGIVDGKGRRVKHQKLPCDLEAIDSFLQPWKKQLESVAVESTYNWYWLVDGLRSRGYPVHLANPARMEQYSGIKHADDKNDAFFLAELQRLNILPQGYIYEPALRPVRDLLRRRQSLVRQRTALLLSFKGLYARTTGQAIPLVKVKMMEPEESKALYQHPANSLIASVQKQHIDHLRGSIASIEKEVLSCARKLPRFDNLLSLPGVGKILGMTIRLEVGEISRFKSAENFASYCRTVDSRRLSNEKKKGENNRKCGNRYLAWAFVEAANFAKRHHDHCRRWFDRKAARTNTIIATKALACKLSKAAWHLMNEGSDYDPERMCPQVRTKDEKQEFVRTTASQE

SEQ ID NO: 398782 - protein, 366 aa, unidentified
MKKNSTMATSRKQIFKGQKLTIGMDLGDRFTYYCVLDEAGEVMVEQKLPTTKPAIQQAFGRMPRSRVAMETGAHSPWVSRQLTQLGHEVIVAHARNVRLIGESSRKDDRLDARMLARLARLDPRLLSPVQHRSAEAQAHLTVIRARAALVGARTMLVNAARGLAKSYGERLRKCGTQQVSKDLAAGFSVELRAALQPLLMEVASLNERIAEYDRRIEQIATQVHPEVALLKQVKGVGTLIALTYVLTVADPRRFRRSRDVGCYLGLRPGRRNSGSSQPQMHISKEGDRYLRTLMVQGAHYILGPFGQGSDLRRWGLKLSERGGSNAKKRAVVAVARKLSVLLHKLWVSGEVYEPLRNSSAAVGAVA

SEQ ID NO: 398783 - protein, 318 aa, unidentified
MSGASPVFCGIDVSKDHLDIALLPSGESWSVANDAAGIQLLLGKLGDVSPTLIVLEATAGYEAPVAASLAHAGHAVVVANPRQVRHFARATGQLAKTDRINAAVLALFAERVRPEPRPLPDEKAALLDALLTRRRQIQDMLTAEKNRLPLAPGPVQKRIRQHIHYLTRQLDEVDHDIERMIKESPLWRTKDDLLQSVPGIGPVVSRTLIAQLPELGTLSRKEIAALVGVAPLARDSGTLRGRRVVWGGRGAVRSALYMSALVASRRNPVIRAFYLRLVAAGKPRKVALTACMRKLLTILNAIARTQTPWNPAIPEYSC

SEQ ID NO: 398784 - protein, 338 aa, unidentified
MRLYCGIDLHSNNSVVVILDEADKVVYQKKLNNNLELILQQLSVYKSKITAIAIESTFNWYWLVDGLMNAGYHVKLVNTAAVQTYSGLKHTDDKDDARWLAHLLRLEILPTGYIYPKEERAVRDLLRKRSQLVRQSTTNILSLQNILARNTAQSLSSYHIKKLDDAQAEKLLEDPNITLALKSNLYIIRCLQSTITEIEKTVLKQIRLRPEFKKLLTVSGIGEILGLTIMLESGDMSRFQKVGNFSSYCRCVKSERFSNGKKKGEGNRKNGNKYLAWAFIEAANFAIRYNDKVKSFYQNKKSKANGIIATKAVANKLARAYYHILKDQVPFDVNKAFT

SEQ ID NO: 398785 - protein, 334 aa, unidentified
MEISTIGLDLAKNVFQVHGIDADDNVVVRRTLRRAQLLPFFASLPPCLVGMEACGTAHHWARELIKLGHDIRQMPAAYVKPYVKRGKTDAADAEAICEAVTRPTMRFVPVKSPEQQAALSMHRARDLLVKQRTQLVNMVRALLAEFGINIPQGIRLALEMPVPREAAKIAGRLSQQALDTHAQLREIDLDLLAWQRTNDTARRLMSIPGIGPIGATALAASVTDASQFRSGREFAAWLGLTPRQHSSGGKERLGRISKMGDKYLRTLLVVGMTSLIKGVKRKPETADPRLVALLARKPVRVATVAMANHTARVAWAIMARGETYRAGHQPRLAA

SEQ ID NO: 398786 - protein, 262 aa, unidentified
MAMKQSKSVNIGIDVGKHVLDVYIHEREIHFQVSNDADGIRKLLGRLNRYQVQRIVVEATGRLERDVVSAALEMELPIIVVNPLHVRRYAGAIGLLAKTDKLDAKLIAQYAAMIKPEARAQFGPEQRKIKDLLVRRRQLIENATMEKNRYQVMPKFMRGDIKRHINHIQKQIEKLDKLLSKTIEACDQWSEKRKILESMPGVGEQVVFAVLADLPELGQLNDKQVAALTGVAPYNRDSGSLRGKRRIRGGGVMACAPHSSWQ

SEQ ID NO: 398787 - protein, 364 aa, unidentified
MNKCHVNTELSSLEETRCQFNGGSGAIKLGIDVHQDFYVVVMQEGGTNPKPPQRFPKQGFLRWAEQLPRRGQPVHALYEACGFGFGLQRQLSSLGIQCHVVCPQKLDEQNKRVKTDGLDAKALCLKLDRFVEGNRAALALVRVPSEAEEQARALHRQREQLVKVRKQLEAQGRSLMVNHGLEPIQQWWKPRAFAALDVPPWMKHLLSNTQPTLIGLQQKIAALSLQLQAAAEPRQPRGLGLMTSVIIDREIGDWHRFRNRRQIASYTGLCPGEYSSGKSRLQSCITKHGNPRLRAALVELAWRLVRFQPNYKPVQKWRAILAKGALTTGAARKKAIVAVARQLAVDLWRIRTGQLTPEQLDLTF

SEQ ID NO: 398788 - protein, 343 aa, unidentified
MKIVRIGLDLAKYVFEVHGVDAEDKAVLRKTLRRDAVPQFFAEQPPCVVGMEACSGAHYWAKVLSDLGNEVRLISPQFVTPYVKSNKNDRNDAEAICEAISRPSMRFVPPKSAEQLEIQAVHRIRQRLVANRTRLVNQIRGLLAEYGVAIPRDISNLRRAVGQIAEGVDDGLSSFFRGLVCDIRDELGEVDQRIAAYTQRIRELFRSNEMCQRIGKIEGIGPITATALVAAVGDRTCFKNGRQFAAWLGLVPKQRSSGGKSRLFGISKRGDRYLRTLMIHGARAVLGKANGKTDPRSQWIGQMRERRHPNVVAVALANKNARIVWSILSRQEDYRPAQMAAAI

SEQ ID NO: 398789 - protein, 337 aa, unidentified
MIHVGVDLHQAFCYMTALDSTGRSLKAGPVANEPAALRRWLRGFSEPVAVAVEACSFWPAFKEAVEKEVSEIRLVHPQRVKAIAAAKLKNDRVDSATLAHLLRCDLLPAAWMADRQTRERRQRVRLRISLGQHRAALKNQAHAILHQHGKRCEWSDVFGKKGRAWLKKVQLPPAARGAMDTYCALIDEVGGHIREQERTIGWMAKADARAKWLATIPGIGVYSAMILLSEIGEVQRFSSAKALYSYAGLVPWVRESAGKKSRGGISRCGSPRLRWVMVEAAHTAVRCSPAAKSYFERMRQRKHPHVARVALARKLLGAAYALLRDGVCFDESIFAAV

SEQ ID NO: 398790 - protein, 407 aa, unidentified
MTVMIGVDPHKGSHTAVAVDEGERSLAELRVRSGPKQLARLLKWAEQFPARTWAIENATGLGYLLAQQLVAAGERVLDVQPKLAARVRLLATESTNKNDPHDALSVAIAALRSPSPKEVGVEDHAAVMKLWARRHRNLSSSRTQIACRLHAVLCELVAGGIPDEIYAEKAALLLAEVEPDSAVAAARVELAEELLDDLRRVDGQLAESKKRLEQVVAASGTTVIDIFGVGPVVAATVVGVTGDIARFPTRDRFAAFNGTAPIEVSSGGRKVWRLSRRGNRTLNHAIHMAAVTQLRFAHSPGRGYYDRKIAEGKTPKEALRALKRRISDALWVAMVTDARRVAATAAASKAGSGGQPGNDSVASAAGSHPETPALRPSHSRTRTKATTTKRSPRRTMSRTPATTRTTT

SEQ ID NO: 398791 - protein, 385 aa, unidentified
MLYVGIDVAKYKHDIAVIDEFGTIVLKHMQIKNNQEGFYQLHDWLSRAVENPNDDIKIALEDTGHYSRNIVMFLRANFYQTFSYNPYLIKEFAKSVSLRKTKTDKKDALTIARKLASDTPTVHQMPAQEMDDLKFLTRHRDRLKRKLTDFKVQYVKVLDLIFPELDKIVNLKNKSTMALLEKYPTPAKILRAQEASIYNIKSLKAVKASEIIKAAQTTVGNTSFALEFELKQTLQAIQFLEKMMTEVNTQIKDIMDKLDQVITSVPGISTTLGSIILAEIRTIDNFRNCDQLLAFAGLEPSVNQSGQSEHSGKMVKRGSTHLRWALLQAAEKTALYSPTFKRYLTKKLQQGKHYNKAKSHTAKKLVRVLFYLLKNHKYFDESLVR

SEQ ID NO: 398792 - protein, 428 aa, unidentified
MRAARNMNTEWTAHQYFAGLDWAKDHHDVVIVDRLGAIATEFRFAHTAEGWGEFAEKMKPYAGAPLSLETSSGPAVDQLLQRGWDLYPVNPKAAERYRERKMPSGNKSDRPDAWTLADALRTDGHAWRRLLAQDEATATLRALCRDEIALIEQRTLLVNQLIAALHEYYPAALQAFDDWTQPSAWALISEFPTPAALQKASKRRWEKFLHTHRLWRPSTAPERLKLFAKANALPASAAVTASKSLLASSLVRILQTLQAQLEQYRQRINQAFNDHPDQHIFGGLPGAGEKLAPRLLGELGSIRQVFPDADALCCQAGVSPVRYQSGQIDKARIRWACDVVLRHTVHLWADCSRKVSAWAQTYYQGKREQGMSHAAALRCLGKRWLRLLWRLWQDRTSYEPQKHQQSASAHGSWAIRRLNGLQATIPNR

SEQ ID NO: 398793 - protein, 474 aa, unidentified
MTINSPKTSKTDGRRGGGKRHDRNRPSKTQHKINTEANPDAGGIDIGATEIVVAVPPGRCAEHVRTFTSFTGGLRELRDWLLACAVTTVAMESTGNYWVNCYDLLEEAGIEVCLVNARHVKGVPGKKTDVCDAQWLQQLHAAGLLKKSFRPAQDVLRLRYLVRHRDSLVRENAGHVHRIQKVLTEMNLKLHHVFSDIDGVSGRAIITAILAGEREPKVLAALRDGRCRSSEADILAALEGNYRPEYLFVLGQLQTQWDEIRRHLANLDEEIAGLVGGIGPAAVPTAEPTRRPGGKRKQTGKNAIALDFRKESFRYYGVDLLEIDGIGSGVLTALMSEIGPRDNLLESFGSADRFCAWLGVCPCNQISGGKVLRSGTRKTRNRLAEALRLAAFGLDKAKCRMGEYCRRMKGRLGKAEGITATAHKLARVIHAMIANGRSYDEAQAFRTNPGMERKRLKTLKTLTEKHGFKLIPIQ

SEQ ID NO: 398794 - protein, 424 aa, unidentified
MTKRVHASGKTQVHARFSITGGCDTDQNIIVAAVYHANSGSLEARKFRQHREDALQAAEWFRSQNVEFVLIESTANYHILYYDTLREQGINIAVINPQVVKSLLRVEGKSDKGDAMSLARLAASFALKTSNMPDSQQRELRLMFKRIDVRKVQRTQLTNCTNGTLTAHGFTVFRMVPINSSAGMKIMQAIIDRRSPAEIAALHRNKAKRAEIEKSADVHLPDYILVYLQEVLSEVQFLNQHIQLGEAALLAKITDCGLRDQVDLMCTVPGVTKMLALRVIAEMGANYHQRYPTASAFAKAIGGVPSNEVSGGKLLKRRASHGNQRLKFHLLSAAMAFAIHGRGPLRSWFDAYRSRSNFFKSTSALARRMAEALWWVMQRNEPYKFWQGESAREGAEVTQIGDLLVSATTGEVLATIDDAQSVAE

SEQ ID NO: 398795 - protein, 370 aa, unidentified
MKQRLLYVGLDVHKKTTDVAIASGRSNGKVRSYGKIPSTLDALNKLLKKLQDGDKELRFVYEAGPCGYQIYRYLDAKGIYCSVVAPSMIPRRSGDRIKTDRRDAINLVRLFRAGELTSIYVPTVEDEAIRDLVRCRDDMKRFERKARQRLLSFLLRHGYQYSGKRNWTKGFYTWLATVRFSYPAQQVTLQEYIDVTNECSERIKRITQQIQVHVEEWSRAPFVKAYQALRGVSIIVAATVVAEIGDMNRFQNPKHLMAYLGLIPSEHSSGKTVRRGPITKTGNSHVRRVLIEAAWTYKMQARVSNILLNRQKGLPKSVCEISWKAQTRLCARYRRLYARGKSRQTVVTAIARELSAFIWAIDKEVQLAIL

SEQ ID NO: 398796 - protein, 401 aa, unidentified
MMTTATHNVHDTTTERVLFVAFELSEKTWKLGFTTGHGQKPRERSIAACNQARLLQEGAQAKKRFGLPDTAPVVSCYEAGREGFWLHRFLQAHGITNYIVDSSSIEVNRRRRRAKSDGLDVRKLVSMLIRYAHGERAVWRVVHVPSVAAEDQRHLHRDLETLKQERASTTSRIKGLLSSQGVRLTSLSKLPEQLEALRLWDGSPLPSGLCRRVLRVYAHHQFLSQQIAELEAERRALLQTSQEAALEKVRQLMHLRGIGINGAWLLVMEFFGWRAFKNRREVGGLAGVTPTPYHSGESAQEQGITKSGNRHVGWMTMELAWSWVRYQPESALSCWFRQRFGGGGKRLRRIGIVAVAREVAHCPVALPRDGSITGRRRTQRGVGRLALLSHLLTLVLVEATR

SEQ ID NO: 398797 - protein, 357 aa, unidentified
MAEGSWVGLDVHARTTVASVLDAASGELSSQRVPARSEETVAWLLSLAQPLRVAYEAGPTGYGLARACVRAGIACTVAAPSKIPRAPGDRVKTDRRDAERLARLLRLGELVSVRVPDPGEEAARDLVRAREDARADLMRARHRLSKLLLRHGLVYEGSAWTLAHDAWLRRQRFASQPLTLAFEEYYSAVLQVRGRRDALDRAIAELASEAPFSDVVARLVCLRGVSTLTALALTVELGDWERFRPQSLGPSRGVVPSEDATGGRRRQGAITKTGNTHARRLLVEAAWHQRRPLRASAALERRRQDQPATVRARADESARRLHARWHALEGRGKRRTIVAVAVARELAGHCWALATMK

SEQ ID NO: 398798 - protein, 344 aa, unidentified
MLQYVGLDVSLAEVAICVVDEDGTIEFEGTAPSEPDAITDWLLEHDVHPEKVGLEIVGLARWLYAELANRGLPMICIDPRRLRALTKTMPVKTDRNDARAIAQVIRVGSYRPVHIKSPVGQELRMLLANRKTLLVKYGDIENEVRGTLRAFGLKLSGRIASGQFEQRAMELVEDRPRLAAMVRPMLIARSALREQCAVLHKMLLDAVAHDDTCRRLMTVPGVGAVTAVTFLAVIDDPSRFQHSRDVDAHLGMTPRKYASGETDRNGSISKTGDALMRTTLYQASLALLTRSKKWSTLKAWGMAVAKRRGLRRAIVAVARKLAIVMHRIWADGTEFRWTREEAVA

SEQ ID NO: 398799 - protein, 416 aa, unidentified
MNAAGIDVSSRKSTVAVLRPFGEVVRVPFEVSHSAEGLASLVQQLKAVEGETRVVMEHTGRYYEAVANVLHEAGFFVSAVNPLLIKEYGGNSLRRVKTDKADAVKIARYALDNWADLRDYTPMDRIRYDLKTLNRQFHLASKQKTATANNLIALLEQSFPGVRKCFDSPVRSDGTQKWVDFAHDFWHADCVRKHSLATFMERYRKWCKRHGYNFKQSTAQKVYDLAKSVVVLVPKSDLTKVLVQEAANQFTTISKSVETYRAEMDRLASQLPEYPVVMEMYGVGDSLGPQLMAEIGDVRRFERKQSLVAFAGIDPMPNQSGEKNVRSNKASKRGSPYLRKALFNVMTCYLQKAPADEPVFQFLDRKRAEGKPYYVYMTAGANKFLRRYYGKVMEYLSTLENLPPVGMDSTGLPKPQ

SEQ ID NO: 398800 - protein, 419 aa, unidentified
MRRLLERCAALDVHKASVTVCARILGSGGEIEEFMAEFSTMAADLLALRDWLKELAVTHVAMEATGVYWKPVYYALEDDFELLLVNAQHVKNVPGRKTDTMDAQWLSQLLECGLLRASFVPPKPIRELRDLTRYRKALIKERQQEANRLHKVLEDAGIKLACVATDVLGVSGRQMLEALIGGTRDPEVLAELARGRLRAKLPALKQALVGNFKPHHALIVSHILAHLDYLDETIAVLSEEVERRLAPVAYKAENLCTIHGVAERTSHVILAELGPDMSRFATDRHAASWACICPGNDESAGKRRSGKTRKGNPYLRAALIEAANGAIRTKNTYLRAQYEQVKRRQGHKKAIVAVAHSILIAAYHILKDDIPYQDLGGDHFARRADPERITKRLVAQLERLGHTVTLQTSTAKEAAAAPA

SEQ ID NO: 398801 - protein, 545 aa, unidentified
MATPAHEATRPRPLPRGEQAFVRLLSVPLLGGVRGAFTAPMHARKRNGTFHESPIPFGIPLRMKITLSSRCRLAWVTGRFWFRVCEPDHESDRGASLYRIMSPPFGESTRGNLTTSTGAWLGTADTQNSTSNLERSMQVIHVRCAGLDVHKRTVVSCVMISLPDGGVEKHTRTFGTMTPEILALSDWLKGYGVTHAAMESTGVYWRPIYQLLEGQFTLLVANAQHIHRMPGRKTDVKDAEWLADLLRHGLIAPSFLPAQPQRELRELTRHRSNVAARRAQCINEVHRTIEGTNIKLSSVATDITGKSATDMLRHLLSGQYDADFLAELARGVLRKKIPQLRQALQGVVRPHQQLILSQLMADIEALEQQVKALDAEIGRRLEKEQELIERLDEIPGVNSKVAQVIVAELGTDMKRFGSASRAAAWSGMCPANRQSGGRHYRARSRFGNKHLKSALTEAGRAAGRSIDTYLGAQFRRITARRGSKRAALAVGHSILTISYHMMERATRFEDLGADYFDRRNPQAVKNRLVQRLEKLGYKVSLEQTS

SEQ ID NO: 398802 - protein, 389 aa, unidentified
MLLAHPSDGPTAIQTQFGAIFVSLELSRSNWLITSLSPGKGEKMSRHSVPAGNVAELSALFAELKRKAEVRTGQGYPIITLQEAGLDGFWLHRVLQQQGIESHVVDPASIAMPRRRRRAKTDRLDGETLLRALLAYKRGEPRVCAMVVAPSPGEEDRRRLCRERRTLIEERVTHGNRIKGLLFAQGIFDFAPMRRDRRARLEALRTGDGRELPPHLKAQIGRELDRIELLLGQIKTVEAAQDALLAAARKPASEDAAPDPVTMLLALKAVGANFAAVLWSEAFYRQFANRRQVAAYAGLAATPWQSGGVRHEQGVSKAGNPRLRTTMIQFAWLWIRHQPQSALTRWFKQRSPQGRKRAIVALARKLLVALWKYVTQGVVIEGAVMKPAA

SEQ ID NO: 398803 - protein, 429 aa, unidentified
MTRISAGVDVSKNRSTVCIIDQDGKVIMRPFLVWHSTEELDFLADTLKRLNGEVRVIMESTSIYQYPIALHLKEKGIFISIVNAYKVKKFANTDFRGGKTDKKDSRTIASYGISYWDKLVEWQIPKDTYFNLDLLNRTYMNAKKHRQIILQELQHYIDCAMPGMDKELHSLNLSTKKDFMLDFVEKFWHRDEIVNMTEAEFTEVFTAWAKKKGYRPVEGKAAKIYAIAKSCIPYYPANPTVKTILQCIVDKLSGVNRTLVTIVTQMIEEAKKLSEYQIVREMPGVGDPLAARFFGSAGDIRRFKNSKALVAYAGIDSPPDESGDFSSTHRHITKKGSKVFHDTGYEIMMALRAQKRTWEKVRKNPEVYDYMLRKEAEEKPRKVAKIAALNKFLRIIYARIKELYDNMALAERAKAKTKSKTKAKTKATA

SEQ ID NO: 398804 - protein, 344 aa, unidentified
MKLRTIGIDLGKTSFHFIGMDECGNVLLRRRFSRTALITYLSKLDACLIGMEACSGSNILGRTLRAQGHTVRLIPAQFVRPFVKSNKNDYNDAEAIAEAVQKPNMRFVPIKTEDQLDLQAIHRTRERFVTQRTRVINQIRAFLLERGIVLRTGRLYLQRQMALILEDGEQRLSGLVRRLLDVLWQEWKHLDVQIAELQQQIETIAEQDEACQRLMEIPGIGPLASTLMVAAVGNGSAFRRGRDFSAWLGIVPAQASTGGKPRLLGISKRGNKYLRQLLVHGARSCKTHMNREKHPFGEWVTALEKRSHSNVVSVALANKIARIAWSVLARGERYRAHGPAAQVA

SEQ ID NO: 398805 - protein, 347 aa, unidentified
MSITMIGLDTAKSVFQVHGVNETGKVEIRRKLRRSELLPFFEKQEACTIVMEACGAAHHWARILSGLGHEVKLIAPEAVRPFVKKGKKNDPADAAALCTAASRPDMMFVPVKNIEQQGILALHSARSLLVKQQTMLANAMRGLATEFGLTVPQGIGRLEELLALVDTDKAFPEKARQVFTGLFDQCRALAESIRAFEVEIVAHARQDETARRLATIPGVGPITASLIAATVVDIGLFKSARHFAAWLGLVPRQYSTGGKTRLGRITKTGNREIRRLLVLGATSMVYRAPQWKSVVGVWTRGILERRPVRLVTVALANKMARIAWALMTRKEVYRATGRVAAATEAAA

SEQ ID NO: 398806 - protein, 387 aa, unidentified
MSQTVAALIPAAVNYERTLVLAIEVSNKSWVLAAQVPGLPHTKAKRTIDPEAEALLAAISGYRARTTATGRSIERVIAVYEAGWSGFWLARWLMRHGVEVYVVQPSSVPVDRRMRRAKSDGIDAELLLRTLLAWLRGEPRVCSMVPVPDEADEDARRCVRERTELISERVGLTNRIGAVLATLGVSDYNPLLRNRSRRLAELRTALGEPLPANAHAKIKRLLARLELVLAQVAELERERDAVVETEASDKASKMIQQLTGLRGIGVQSATVLVREAFVRRFANGKALGSYAGLASSPYSSGGINREQGIGKAGNRRVRTVMVELAWLWTRYQPGAAQVCWFRERVGSTGRRVRKIMVVALARKLLIALWRFVTDGVVPEGAVLKPAA

SEQ ID NO: 398807 - protein, 411 aa, unidentified
MEVLYRCCCGLDVHKKSITACVLWSDGKKRKEKRRFGTFTEDLLKLAEWLRECGVTHVAMESTGVYWKPVWNILEGQFTEVLLVNAQHIKAVPGRKTDQKDSEWIAQLLQHGLLKPSFIPPRPTRELRDLTRYRVSLAQECNRVANRIQKVLEDANIKLASVATDALGASGRQMIEALIAGEQDSAVLAQMAKGLLRNKIPELKLALEGRVNDHHRFLLNEMLDDLRHIESKMTKVEAEIEGRLRPFEEQVARLCTIPGVDRITAWGLAAEMGLNMEQFPSAAHLASWAGMCPGNFESAGKRLGGRTRKGSRFLRRHLCQAAWAVSTKRDSYLSALVRRLAARRGNKRATMAVGHAILVIAYHLLKRQENYRDLGPNYFDQKNPESLRRSLVKRLERIGYAVSLTPVAEAA

SEQ ID NO: 398808 - protein, 339 aa, unidentified
MIKNAPGFDLFCACSGLGIDVSKASLELVGIENERVWRRELGNNESEIESLAQCLKTGRYQGKIVCESTGHYHLLLGLVFARYGLDLRIINPLQSSKHQKARIRKTKTDRVDGYVLATMCETERDLPKAAQLQPKQVLMRLKQGQLHALDKQIQKMSRSTATYAETYQRLGLVTDSSAEMLQQVLTNLKAAKRQLQKELEALFIACAQDHEDIDRIRALPGFSPMVAGLVSSVFDRGAKSDRSWVAYAGYDISVRESGTWKGKGRLTKRGNSYIRKRLFCAAWGAMMHYPEVRRYYDSLKAAGRNHVEALCIIARKLLRIAYAVLVKGKTYDVKIAFPA

SEQ ID NO: 398809 - protein, 345 aa, unidentified
MIIGCDFHPSWQQVSWLETETGETGERKLGHASGDAKMFYEQLAAPVLIGMEATGNSQWFIELVQDLGHEIWIGDAAQIRASYVRKQKTDKRDAAHILKLVVEGRFPRLWTPDREQRDLRQLVLHRHKLVEIRSRVKNELQHLSLNKGMQRKAKLWSQAGQKLLRELPLKPWAACRREDLLGLLAMLNQQIGKLDQAVQLAADEHPQARLLMTQPGVGPNTALAYVLTIGDVSRFARGKQVASYLGLIPREESSGGRQKLGAISKQGNRLVRSLLVEAAQIAVRFDPGMKKEYLHRCHQKPKGVAKVAAARKLAVRLYWMLRTQTAYPEIVRIESSPRVPLVGAS

SEQ ID NO: 398810 - protein, 313 aa, unidentified
MQDGIVFTGVDVGKAELVVARQPSDRQQPNGQKLRLPNTDSSILKWLRTLPPGSHIAMESTGRYHQRLALLAYQAGMKVYVLNARDVHFYAKALGMRGKTDPSDALVIARYVAEHHEKLRLWGPGTPEQRRLIEMLRRRAAIERHLSAIDDSLEDVVDLARQKASMARYAAKLLATIDAKIQALIASDVDLFERQQRLQTIAGVGPQISAVLAAVLSRNEFANVGAVIAYSGLDPRPNDSGNKRGRRALSNAWPGRAAQDALAGRVLSQPQQGLQGRVPVDQEPRLQRHRGAGDPGAQAAEGGLGCLAHGNTI

SEQ ID NO: 398811 - protein, 355 aa, unidentified
MERRTAMQHYAGIDVSLGLLSVCIVDAKGKIVKEAKVGSDPDILVAFLRGLDLAIERIGLEAGPLSQWLHAGLTSAGFEAVLLETRHVKAALSAMTVKTDRKDARGIAQLIRMGWFRAVHCKSAGSQEVRALLVARKLLLSKLLDVEFSIRGILRGFGLKMGMVTRKRFEARVRELYADHAMLEQICSAMLTARSALQTEYAKLHKALLVIVREDEVCRRLMTTPGVGPLVAITFKTGVDDPSRIHKSKAVGALFGLTPKKYQSGETDVTGGITRAGDEMVRTALYEAASVLLSRVTRFSALKRWGMDVAKRRGTKRAKVALARKIGVILHRMWVDMTSFRWTKGAPTTMRLARV

SEQ ID NO: 398812 - protein, 337 aa, unidentified
MIVVGVDVHKYSFTAVAVDDVGRPVAELTVGSARDLVAWSSTLGPERLWAVEDCRQLSGALERALLAAGESLVRVPPKLMAPQRRTGRARGKSDPIDALAVARAALREPQLNRPRPGEQATRELKLLVDHRDDLVDERRRAQQRLRWLLHDLDSELAVPAGALDRTVWLDRVARRLRRGEQTVQVRIARELVGRCRNLTRTILALDRELNARIESFAPALLTLPGCGALSAAKLLGEIGPIERFDSDAQLARHAGVAPLEASSGKYQRHRLDRGGNRQLNCALHRIAITQARVHPPARAYLERKQAEGKSRREALRCLKRQLARTVYTTLKNEPLLT

SEQ ID NO: 398813 - protein, 314 aa, unidentified
MTFYLGIDVSSKTLDVAFFRAGEHTGACEQFDNSPAGAKKLLRIMARLDVQHVVLEATGGYENLILDAMAQIYTVTRIASHRGTAFVRSLGKFAKTDKADARALAHMAQTITPQPYKPPTPAQRHLRGLVKGRDQLIRQRDDNRRRIKRCESMVVQGALERVDALLTAEIKALEGLMAEAAKAADAPLAEQLLQVPGLGKIAVATLLAFLPELGQRGNRQISALVGVAPYTKQSGRRDGPRQIMAGRPFVRRILYMAALAAIRSTQSPLRAHYQALKERGKPPKVAIVACMRKLLITLNAMVRDQTPWHGTVEA

SEQ ID NO: 398814 - protein, 426 aa, unidentified
MTTPAGDSLQPDQMHVAHPRAAGLDVHKLQITASVRLCQPGGGVESATRQFSALPPGLSSLTQWLESHRVTAAAMEATGIFWQAPWEALEAAGITPQLLHAQFVKQVQGRKSDVADSLWLARICQFDLCRPSYVPPRKFRQLRQLSRYRRKLVGERSRARNRIHKTLDHDGLRLGGALSDIFGRNGRKILAGLAEGLPPEEILASLSGHVRHKRELLEQVLEAQLDAHAVWKLGDLLRAHEAANQSIAELDARLAEGLAEMVEQVHLLETLPGIDRGSACAILVELGPDLTAFDKTANVAAWAGLAPGNNESAGKRRSGRLRRGNATLRATLAECAHGAVRTKGSQFHGYHNMLTARMPYKQAILATAHKLLRTIVAMLRDQRPYIDPGIDYDKLLVDRNAARWLRKLDEHGYLERIRSGGQPAAA

SEQ ID NO: 398815 - protein, 426 aa, unidentified
MTNSLFIGVDVSLQSNQICVVNFDQHKFFNLKFPNTPDGCEEAINRIKDIYDKFYFDKIIVVCEATGMYSFHLACYFSSHEYLNNFNTEVYQINAHDFAKYKDSFPDVEKTDPSDAYILADFARVGRTKQLHPFRGSQHIALQRLTRQRYHISKNLVKEKLYVMNNIYLSFSGLIIANKKNKPFSNMFGATSCAIFDNFDSPDQIAETPVDDLLDLISKVGKNRTKNPNEKIDLLNKAIRSSYRLDQTAYNGINIAVASSLSAIRFLENELKQIDKAILDTVSGLNSNAYNSLISIRGIGKVYAAGILAEIGDINYFKHNSNLAKYAGLYWNRTQSGKFEKEDKKFSQHANKYLRYYLIEATASCVRMNFPFIKNFYDSKFKEVTKHQHKRALVLSARKLVRLIFGLLRKNQYYSPIDSNTQSLIN

SEQ ID NO: 398816 - protein, 355 aa, unidentified
MSVSEQYAGHQIVGMDLHRRRSVLVRMTETGEQLETVRISNDPEYLQAVMARAGEAPDVVLEACYGWYWAADTLAELGATVHLAHPLGVKMFSLRRVKNDQRDAADLADLLRMGRLPEAWIAPPACRELRGWVRHRAKLVGLRSQLKCQIHAVLAGAGVQVLMSDLFGVAGQDLLAAIQLTSESRARVDSALRVIGGLDFEIELFGKLVAGRLRADPGYLAIQAIPGVGPVLAAVFVAEIGDIDRFRRAAQLASWAGLTPKHHESDTTVHRGPITKQGSRLVRWAAVEAVQRVPGHTRLGQVRDQVGQRRGRNIGIVAAARELTVLVFYGLRDHHIRALSRPPSITATTPTTPAA

SEQ ID NO: 398817 - protein, 340 aa, unidentified
MGEYIGLDVSLKETAVSIRRDGQRIWRGKCVSDPQALAGLIRKRAADAEKVVFETGPLSVWFYHALTSHGLPAICIDARHAKAALDMAANKTDANDADGLAHLAEAGFYREVRVKAFDSMLSRTLVNARSKLVRIGIEISNQIRGMMKIFGLMVPRSAGSKFDIQVQDLLSAHSELSAIILPLLDAWRAVRARAADLGRKVLAQARADEKCQLLMSVPGVGAITATAFIAAVEDPANFERSRSVGAWLGLNTRHYQSGEVDYDGHISRRGDAHLRGLLHEAATVILTRTGPVVICGPWGTKPRERIGFKRAAVAVARKLTVIMHAMLQSGELFNKVTAAV

SEQ ID NO: 398818 - protein, 414 aa, unidentified
MRIVYQNVAGLDVHKKFIVVALRVLDEAGQWRQEKRSFETMTVDLLALLDWLLAQGVTHVAMESTGDYWKPVFNILENNVEVILVNAQHLSRVPGRKTDQSDAEWLAELLQYGLLKASFIPPVGQRELRELTRARSTFVRERATLVNRLQKALESANIKLASVASDVMGVSGRAILAALIEGESSPTAMAELAKGRLREKRAQLGKALEGRVKPHHRFVLSELLCQIDNLDESITRFNEQIETYCHPFEEAAALLDTIPGVARQTAEVIVAEIGTDMSRFPSAHHLAAWAGVAPGNHESGGKHYSGKTRHGNKALCAALNQAAHGAAHTKDTYLAAQYHRLVVRRGKKKAIVAVMHSILVIAYHLIQRKEAYRDLGGNYFDQRRPELTAKRLLQRLTKLGYQVSIQQAPLPLAA

SEQ ID NO: 398819 - protein, 404 aa, unidentified
MHDSTFYFGGVDWAADTHAVCVVDDAGQVIVEFDVAHTAEGLAEMCSRIERAGAGRVAIERPDGPVVDALLEAGLEVVVVSSRSVKALRERYGTSGNKSDRSDAYVLADCLRTDGHRWRNLEPDSPATVTLRAHVRARKDLVRTRVAVANQLRAHLRVVFPGAVGLFAEIDSPISLRFLQRFPSATPAHWLSEKRLAAWLRANAYCGRTSPGELYRRLVAAPAGPTGHPSDARGAITLAYIAVLKSLRAQIDALTHRLEVLLDAHPDGAIFRSLPRCATVRAATLLGEIGDCRARFPDAESLSCLAGVAPSTRASGRHRAVTFRISSDKKLRDALCDFAGDSWRANAWAQARYRKLRADGKSHPHAERILARSWAHIIWRCWQDHTPYDPTRHRGHQRLTQQAA

SEQ ID NO: 398820 - protein, 355 aa, unidentified
MIIIGCDYHPSFQQIAFVDTDTGEFQERQLQHREQAEKFYRDLAAQGMKVRVGMEASGHARWFERLLAELQLELWIGDAAEISSKRVRKQKTDRQDAQLILKLMLKDDFPQIWVPSGENRDLRQLLWHRHRMVQARTRMMNQLQAVALNEGLRCKKKLWREAGREQLEGFRLAPWASQRRHDLLELLDRMNPTIAKLTQAIDLEVEKCPEARRLKTHPGVGPLTALAFVLIIGRADRFQCGKQVACYLGLVPLEKSSGNQRRLGHITKQGNSLLRFLLVEAAQVTARSLPEWRSKYVHLTMRRGRKIAKVAMARKLAVRMYWMLRKGWDYGQLTKFGSQGRKSGSHAGEPTASTR

SEQ ID NO: 398821 - protein, 374 aa, unidentified
MGTQGITFVGMDAHKKAINVAMLLPGQLEPVEWQVANEPAAIRRLAKKLEREAPGEVRCCYEAGPCGYVLMRQLEVAGGVVCEVVAPSLIPVKPGERIKTDRRDAHKLARLLRSEDLTMVHPPTAADEAVRDLCRCREDARRDLLRTRHRLATFLLRRACLYTLTRRTWGQPYRAWLQGLKFEHAPDQVTLADYVTGIEQLEQRLASLDQQLAALAEQAPYREPVAWLRCFRGIDTVTAIALVSELHDFRRFETARALMAYLGLVPSEYSSGEQRRQGAITKAGNTHVRRLLIEAAWHYRHRPHVGVALRQRRQGQPSAIIAIADRAQHRLYHRFHKLMQRGKPSPKVVVAIARELVGFVWAALYPAASGASAR

SEQ ID NO: 398822 - protein, 339 aa, unidentified
MEGITVVGIDLAKNVFEVTGRNSEGRTVVQRSLRRERFREFISQLPSTVIGMEACGGANYWGRLFREMGHEVRLVAPQFVKPYVKSNKNDRADSEAICEAVTRPHMRFVAVKSLEQQDVLSVHRVRERLIKNRTVLCNEIRGLLTEYGLVFGQGVSVLRRTLPQLLEEAENGLTDRIRALIADLWEELKELEERITRTNTKIEVEVRASEVCQRLKGVPGVGSLTASAIVASVGNPNVFKNGREFSASLGLVPRQHSSGGKERLLGISKRGDGYLRKLLIHGARAVLQHLGSKVDPRSEWLRKLEARRGHNRACVALANKNARILWVLMARGEKYRKAA

SEQ ID NO: 398823 - protein, 363 aa, unidentified
MNSVYHTELSSHEGTRCQFNGGRCAIKLGIDVHQDFYVVVMQEGGSNPKPPQRFHKEAFLQWAAKLARSGAQVYAVYEACGFGFSLQRQLSALGIECYVVCPQKLDEQNRRVKTDGLDARALCLKLDRFLQGNRHALALVRVPSIEEEQARALHRQREQLVKVRKVLEAQGRSLMLNHGIEPVQQWWKQRAFATLAVPQWIKELLGNSQPVVLSLQQKIDQLTLQLQSAAQCQPPRGLGKMTSVIIDREIGDWRRFNNRRQIASYTGLCPGEYSSGQKRLQSCVTKHGNPRLRAALVELAWRLVRFQPNYRAVCKWKDRLKKGQLTTGAARKKAIVALARQLAVDLWRVRTGRLTPEQLGLEI

SEQ ID NO: 398824 - protein, 326 aa, unidentified
MEHELHYIGIDTAKEKLDVDVLRPDGRHRTKKFANTTKGHDELVSWLKGHKIDHAHICIEATGTYMEPVAECLYDAGYIVSVINPALGKAFAQSEGLRNKTDTVDARMLAEFCRQKRPAAWEAPHPLERALRALVVRHQALTDMHTQELNRTETAREVQRPRIDAHLLWLEAELQRLEKQIKDLTDDDPDMKHRRKLLESIPGIGEKTSAVLLAYIGLKDRFAHARQFAAFAGLTPRRYESGSSVRGASRMSKAGHVSLRRALYMPAMVATSKTEWGRAFRDRLAANGKKGKVILGAMMRKLAQVAYGVLKSGVPFDASRHNPVAA

SEQ ID NO: 398825 - protein, 459 aa, unidentified
MKRDKRKAKRLPSQLAAVNLHAAGIDIGAQEHWVAVPADRDLQPVRRFGACTADLEAIADWLQQCGVTTVAMESTGVYWIALFELLEARGFAVVLTDAREVQRAPGRPKSDVQDCQWLQRLHTYGLLAAAFRPTEQVCVLRSYLRQRAMLVTYASQHIQHMQKALTQMNLKLQPVISDVTGVTGMTILKAILAGERDPQKLAHFRDRHCQHSEAEIARALQGNWRTEHLFALQQAVELYEFYHQQITTCDHQIEAHLQTFVDKSEGKELPHRPRKRKRRATEPRFEARTPLFRLSGVDLTAIEGIDENTALVLLSEIGTDMSRWPTEKHFASWLGLCPHHKISGGKVLSRKVRPSANRAATALRLAAQCLHHSHSALGAFFRRLKARLGAPKAITATAHKLARLVYRLLKYGEDYVAQGMEEYEQAYRARTLQNLVRKAKALGYKLLPTSDAASQGAPA

SEQ ID NO: 398826 - protein, 375 aa, unidentified
MGDHSEAFVAFDTSKLRNAVAIADGGRAGEVRFLGEFESSTTATSKLVRKLAAKYQRVTFCYEAGPTGYELHRQIKALGHECLVVAPSLIPKKPGDRVKTNRRDAVSLAKLLRAGELTAVWVPDCRHEAVRDLTRGRETAVIDLRSKRQQLSAFLLRQGRWYPAGKKTWTKAHMNWLASQKFEQPERSIVCEEMMFAIRQAQERVERLEQAIRAAVPDWSLAKGVTALMALRGIDLISATGLLAELGDLSRFRTAPELMGYLGMGCSESSTGDTIKRGPITKAGNRRARRTLVECAWSYQHPPRIGIAKQEKVAAAPPKVREIAWKAQSRLNRRYRALIRRGKLKTVAITAVARELAGFVWAVAREAGSAEAATK

SEQ ID NO: 398827 - protein, 349 aa, unidentified
MRNVTIGMDLGDKKHVITILDEDGVITKSCSLNNARASIIKYFKKYQGSTVAIEAGTHSPWISREIKALGCNVLVGNPRKLRSIWNSDDKADVHDSEMLARIARFDPELLYPIAHRSKQAQTDLELLKARDMLVKTRTSLINHVRGAVKSFGERLPKCSAESFHKHCRDFLPENLKAVLQVIIETIEHITDRIKEFGRQIEKISREVYPETELLKAIGGVGPLTALAYVLVLEEPGRFSKGRQVGKFLGLTPRRDQSGETDKQLRITKAGNRFLRRLLVGAAQYILGPFGPDCHLRQFGLRLAERGGKSAKKRAVVAVARKLAVLMHRLWRNGEIYDPLYKEAMIKNIV

SEQ ID NO: 398828 - protein, 365 aa, unidentified
MSKDTKKPAGETRRYVGIDLGDKKSRVCTLDERGEIVLQEWVVTTPEAFLKRFRGEAKVDITMEVGTHSRWASDLLGRCGHQVVVADPRQLGLITKNDAKSDKRDARTLAQLLRADPRLLSPIQHRAEKLQMDLTVIRMRDNLIETRTRLVTSVRGVVKATGARLPSGETSSFPQRVSERIAEPLRPAVAPVLEVIDRLNEATYEYDCLLEHWAQTRYPESSRLTQVKGVGTLTALTFMLTVGDKERFSRTRDIGPYLGLRPRLGQSGDNEPQLRITKAGDGLLRKTLVECAQYMVGPFGQDSDLRRWGLTMIAAGNGSKRARQRAVVGVARRLAVLLMSLWKSGQTYEPLRHSRAQESRQEVAA

SEQ ID NO: 398829 - protein, 422 aa, unidentified
MRFYTKPHRYYCGIDLHARRMYVCVLDAEGQIRVHRNGPATPEHFLATIAPYREDLVVAVECIFTWYWLADLCAREGIAFVLGHALYMKAIHGGKAKNDKIDAHKIAALVRGGMLPMAYVYPREMRATRDLLRRRCHFTRKRAELLTHIQNTASQYLLPPLGKIAYHGNRGGVAEQFHDPEVRKSVETNLALVDEYDRLLTELELHLSATAKVHDVNAFYRLRSVPGIGKILALVLLYEIHDIHRFPRVQDFVSYCRLVKCAKQSDGKHYGYSGTKIGNAHLKWAFSEAAVLGLRKNPPAQRYVARLAHKHGKGKALTILAHKLARAVYYMLRRGQAFEATKFFAVSTRGGGPARPDINRVPLGESHDASRLGPPDDDPEGGRYLNPPEIAPRGARRRRHDRDRGTTQRAAGAAARVMEAGR

SEQ ID NO: 398830 - protein, 321 aa, unidentified
MNKDKEIHGVDISKDVFDVFDHEGVHHQYPNTLKGFRDYFRCLNLNSLVVMEATGYYHYLLAQFLYDQGMAVSVVNPLSVKRFVQMKLSKVKTDKSDAKAIAEYAKVNAVPLYDGKGEDQAESLQLLALMDVYLKQRTQVKNKLHGEKVLGIPSRAVHSSLVRSLKSLDRELEGLQSRLLALVKKTQQRQLTNLKSIPGLGDKTVALLIILTDGFTKFENAGQLCNYAGITPMTRRSGSSVRGKSRISKVGNRKLRNLLFLCAFSACKHNKACREMYERITAKGKSKKLALIAVSNKLLKQAFAIAKSGIPYDENYVSRLA

SEQ ID NO: 398831 - protein, 451 aa, unidentified
MSLKKRSSEFSVVHPHAAGIDIGATFHVVAVSPEFDPNPVREFKSFTTDLHRLSRWLRDVGVTSVAMESTGVYWIPIFEILESDGFEVILVNARDVKQVPGRKTDYNDAQWLQKLHQFGLLRASFRPSEHIASLRAYMRHRERLIEYAAAHIQHMQKALMQMNVQLHHVVRDITGVTGMRIIRAIICGQRDAAGLATYRDVRCKESEATIAAALTGNYRDEHIFGLKQAVELYDFYQELINKCDKEIEKSVAKLNHQKKTPDNPLPKARHKTRQRHEPDFAVRDALYTFTGVDITQINGFGPYTALRLIGECGSDMSKWPTEKHFTSWLCLSPGNKKSGGKILSQKTMSTKSRASTLLRIAAVNVGKTDTALGAFYRRLAARVGKAKAVIATARKLAILFYSLLKNGGIYVERGAAHYEEQYRNRVIINLKKRAKRLGYDLVTQPPSIEVS

SEQ ID NO: 398832 - protein, 347 aa, unidentified
MRFYNQAHEHYCGIDLHVKTMHVCILDATGRILLHRNVRSTPEAFRDVVAPYRQGLVVAVECMFTWDWLADVCADDGIAFVLGHALAMKAIHGGKAKNDKIDSHKIAVLLRGGLLPQAYVYPATMRSTRDLLRRRLHLVRKRGELLAHIQNTRAQYNLPVFEKRLAYAANRVDVLEHFPDPSVRKSVEVDVSLIDHYDGLITDLELTIVREAKRHDADAFPRLRSVPGIGKILALTILYEIHDITRFARVQEFASYARLVKGRHESAGKVVGGGGAKHGNVHLKWAFSEAAVTFLRQNREGQRLKARLERRHGKGKALSILAHKIGRAVYYMLARHTTFSMERFLAA

SEQ ID NO: 398833 - protein, 348 aa, unidentified
MSQSKQYVGLDVSLKETSICVIDDVGKIVWRGRTESTPEAIASAVKQHAPYAVRIGLESGQLSSWLFHGLKVAGLPVICIDARHAKAALSLKVNKTDANDAFGLAQIMRVGWYREVTVKGLDCQAVRALLVARAQIVSQITTTKNCVRGILKTFGRVLPKGLRSQFPGRVRAAIDGDPILGAIIEPTLRVLEAMRAQLLVYNKAVIQRARNDDTARQLMSAPGVGTVVALAYMTGVEDPARFKRSSSVAAYFGMTPRRYQSGEVDHAGRISKCGDGMVRGLLFESAKVLLSRSARPSALKTWGEALGKRIGPKKATMAVARKLAVILHRMWTTGTTFQWNAEAASPAA

SEQ ID NO: 398834 - protein, 354 aa, unidentified
MSGKHNSVIAAIGIDIGKTWFHVVGLDGRGAIALRQKWSRGQVEARLANMPACLIGMEACVGAHHLSRRLRLLGHDARLMPAKYVRAYSKGQKNDFRDAEAIAEAVQRPTMKFVATKTADQLDLQALHRVRERLVSQRTGIINQIRAFLLERGVAVRQGLRLLRAELPGVLATRCDVLAPRMVRIIEDLAGDWRRLDQRIEALSGEIEALARRDGGCERLMSVPGIGPIISSATVAAIGTGDAFAKGRDFAAWLGLVPKQFSTGGRTVLGKISKRGNRYLRVLFVQAAWVVLIRSKNWERYGLKPWIEAAKRRLHRNVLAIALANKLARIAWSVLAHGRIFAAGEVAEAATQPA

SEQ ID NO: 398835 - protein, 362 aa, unidentified
MASATLTQPRPDSDFDAVIGVDTHRDFHVAVAVSPNGARLDEYRISTNPRGYQALLGWSELFGNKPVFAMEGTNSFGAGLCRELMAAGFVVVEANRPDRSTRRRLGKDDGIDAEMAARAFLAGTAMAVPKSGEDQVEMIRMLKVAKDSAIDARTKAINQMRALLVTATPALRERLNGLSRGELISTCAAFRAGALVGPLAAAKQALRTLARRVQVLDAELDELLKDLDVLTQEACPGMRQTYGIGVDGAAILLTAAGDNPERLRSEASFAALCGASPPLCQESSGNTRRHRLNRGGNRQAIAALHRIAVGRLRYHQATKAYAERRRGEGLSNKEILRCLKRFIAREVFHLLMGRDPMRTAAT

SEQ ID NO: 398836 - protein, 381 aa, unidentified
MKTNSDTTRALYLGLDVHKEQTVIAILESGRDAEPRQYGSVNTSQHALERAIRRIAKQQNRCLSDLHVCYEASGCGFWIARRLLQMGVRCDVIAPSLIPQRSGDRVKTDKRDAAKLAKMLRSNDLVAVHIPDSVDEAIRDLCRARTDAVDDLRRARTRMLAMLRRLGFRYDGKTHWTQSHQNYLRGLQLPDAAHNRVLEDNITTIDFHEERIARLEDEMLQLLEDWQRKPLVEALMAFKGFQLVAAMVTISEIGTFSRFEHPKKLMAFLGLVPSENSSGGSRRQGGISKCGNPHARWLLVEQATHYRVPPKISPQLSERQRKTPRWIKELSWKTQTRLSHRFTVLRKRQMHHNKIKVSIARELTGFVWELGTRFESRQAQP

SEQ ID NO: 398837 - protein, 407 aa, unidentified
MIFVGNDWAEAHHDVWLMDEVGDRLAYRRLSEGIEGVSGFHELVGGFVSDPADVVVGIETDRGLWVHALVAAGYQVYVINPLAASRYRDRHHLSGAKSDRADAKMLADLVRTDRHLHRQVAGDTPHVEGIKVVARTHQTMVWEKRRQTNRLRSALREYYPAALEAFNDLAHHDAIAVLAVAPTPTMGSRLTKPQIRAALKRGGRQRNLDRRTVEIQTALRVPHIAPAHQLADGFGTAATAILAVIATIDTQISELEKTIADALHAHPDAAIYLSMPGLADVLGARILGEFGDDPNRYANAKSRRNYAGTSPLTKASGTTKTVIARYIRNDRLYDATVRWAFTSLTSSAGSRAFYDEQRAKGSHHAQALRTLANRLVGILHGCLKHRVNYDEHTAWAHRQPAIETIAA

SEQ ID NO: 398838 - protein, 419 aa, unidentified
MTNQLNIVCGADIHQRFLVATILCRDGRTWANRFLMNLNGLIDFKSWLVSHGCQKVAVESTGRFWIPVHMILEGTIDVIVANAYKIKHIPKKKTDLKDSEWLAELCLNDMIEPSRIFPKEDRELRNLTRTREAYVRDLSKEKNRIHNVLESCSIKLASVISDIFGKSGMHILKGLLSGTSIDEVLKGIPDKRVREKKSEELRDALMGKLEATDIFLIRQSLQIMSQFEMRIEELDREIRSRIASRPMDIKILRSIPGIGMVSAYTILAEIGNYLDFKKPEKLAMWAGLVPSVYQSADKLITGGITKQGSKHLRWILVQVAHAIAHAKGGKLKKFFLKIRAKKGYLVAVVALARKVLCLIHHLLVNQEMYEEEGCLSKRDAPIPKNKNPAILTIEDMIQCIAQAGYEVKKVNFGGDGQCR

SEQ ID NO: 398839 - protein, 428 aa, unidentified
MNTTTTKNFAATIGLDWADRKHDLWICPASQAKPEHLRLDQTPAALHEWVAKLRERFANQPVAIAVETSRGPVISALMAYDFIVLFPVNPKSLKDYRAAFCISGAKSDRTDAMLLEELVRLHRDKLKALEPDTPLTRKLAGLVENRRHLVDERTRLVNQLHSTLKTYFPLALDLLDNQMNTLMASEFLARWPSLEVLQKEKAKVLRAFFYKHNSRSAERIEERIQAVPKAKPLTTDAAIIEPACALVSARAGMLRPLHKALQGLDKAIAQAMDAHPDAAIFRSFPGAGPALAPRLLVAFGTNRQRFESAAEVAQFYGIAPVVQQSGNSKTVHMRYRCPKFGRQSFHENAACALKREPWARCYYENHKNKHDDKHHPACRALAFKLTRIYFACWRDKKTYQAALYLKALEKNGSPLNKALQTQPTASCE

SEQ ID NO: 398840 - protein, 416 aa, unidentified
MKIVRPICCGMDVHKNIIVATIGITNKKTRITEYIQETFSTLNPDLLNLKQWLINHKCFDACMESTGKYWIPVFNILEDEINIYLTHPKYVKAIKGKKTDKKDSKWICDLFKHDLIKFSFIPPKEIRALREISRYRYKLVGMRSSERNRYQNCMTVSNIGIGSVFSDPFGKSAQAIMKEVLESDIIEDEKILKCIHGSCKNKDKILDSIKHCNIETDQRFKMNESMTHMEELQVHIDNCEIEMMKRAAPMFDQFMHITQLPGISTLSAILIISEIGVDMKQFESDKQLTCWAGLAPANNESANKKKSVRISKAGQYLKPLLVQCALGAIKDKEGYFGIKYSRIKKRRGHKKAIIAIARMMLVSIYHMILTGETFNPSDYESFRNPKPPIKQQVLTEESAIEFLKKSGFDVSKLTKP

SEQ ID NO: 398841 - protein, 330 aa, unidentified
MIDTGDIDVFLGLDVGKGEHHATAVTPAGKKAFDKRLPNTEPKLRELFAKLQAKHGTVLVVVDQPASIGALPLAVARDMGCPVAYLPGLTMRRIADLYPGEAKTDAKDAFIIADAARAMPHTLRAIDGEDETIAELGMIVGFDDDLAGEATRVANRLHGLLTQIHPSLERVLGPRLQHPAVLTLLERFGSPAQIRKAGRRRLVTLLRPKAPRMAERLVEEIFAALDEQTVTVPGTEAAALIVPSLAASLTAVLDQRKLLAGRIEELLEAHPLSKVLTSMPGVGVRTGARILMEVGDGSTFPTAGHLAAYAGLAPATRSSGSSIRGEQPSR

SEQ ID NO: 398842 - protein, 401 aa, unidentified
MGTVRDNATRVKRFRELKASLRTDRSRLLVGSDIAQAEHVVHFRHAHTRVVVPTLTIPNTTRGFTQLWARIQQAQRTTGCREVVCGLEPTGTYHQAVATFLATQGADVLLLSSSVAYWNRRTQDGTWDKHDRKDAANCADLLEQGKVLFYSQPTGPLAELRYLVKLLRRARGELAACKARWRTTLRPALAPMGEALPQRLWAELPAVLQAWERAAPGRPALAKGRLPLGLASAWADLGAQVTGVQARIAAIEQALTPVAERLPAYPLLRTIPGIGATVGAILLAEIGDIAWYTQFSQLRKLAGLDIVRVQSGQFAGQARISKSGRGLLRWALYHAAIGLARTGAGRTRLAALKAKRRGDRFAGFKAIVELAAKQLRVIWGVWRSGLPYDPRRGGGLSRQAC

SEQ ID NO: 398843 - protein, 411 aa, unidentified
MRIVGLDVSRSVAEIAYLEDGTLHAGGRTGLRRDELERFAAKLRATDHVVLEATGNTTAIVNVLRAHVARVAIANPLQVRLIAEARVKTDKIDAAVLAQLYASGFLPEVWMPDEHTLALRRQIARRSQLVRQRTRLKNEIHAVLIAHLIERCPATDLFGKKGRAWLGVQPLPLDERLGVEQRLRELDRLGDDLREVEQALAQATIDDARLRVMLTITGVNTTVAIGLLSAIGDIARFPNPEKLVSYFGLNPSVYQSGPAPARHGHITKRGRSYARAMLVEAAWGATQAPGPLRAFFLRVRDRRGQQIAAVATARKLAVIVWYVLTRGEPFAWDRPALTAHKLRALELQAGMPAQHGPRKGSAAAYSLKSVRQQERAVAEQSERTYQRLFNRWKQSRPKSDSAPIRWPQART

SEQ ID NO: 398844 - protein, 344 aa, unidentified
MKVTTVGIDLAKNLFQLHGVNECGKVVFKKQLRRDQMAEFFVNLPACLIGMEACSSAHHWARKLQEFGHTVKLMAPQFVKPYVKTNKNDAADAEAICEAVTRPNMRFVPVKNVEQQAVLALHCVRQGFVKARTAQANQIRGLLGEFGLIVPQGIGHIAGRVPELIEEASNDLPGSFRLLVQRMLDHLKELGRQVDELEMQIVKWHRQSDASSKLAKVPGIGPITASALVASIGDAKSFDNGRQVAAWLGLVPKQHSSGGKQNLLGISKRGDTYLRTMLIHGARAAIYWAEKKPDTCSWINRIVSRRNKNVAAVALANKNARIVWALLAHDREFRPDYTPAKASA

SEQ ID NO: 398845 - protein, 406 aa, unidentified
MFIGWDWATETHDVTVMDATGKRIDRWELAHTEEGFTKTLARLRKHGAPADLPVAIETSRGLAVDRLLAAGHPVVPVHPNAFNAMRARWGASKAKTDAGDSMKLADYLRTDGHLLPRLEPTEQATLDLQALTRQRADHIEAKVAAVNQLASLLDEHWPGGKAVFADLDSDIAMAFLERYPTPTKAAKLTAGRLEAWCKRRGYSGKKPGSVLIERLRSAPKAASRLSDAVAEQLVRVQIQLVQGIRATIRTLDKAITEATGTHPYAPLFATMPRIGKVSLGQVIGEIGPILERAQSCEQLIAEAGVVPVTRASGKSRTVAFRFATNRRARVALTTFVDNSRHGSAWAAKIYNDARARKKRHPHAIRILARAWLRVMWACWRDGTCYDPAIHQANDKINAPADEHLAA

SEQ ID NO: 398846 - protein, 479 aa, unidentified
MPSKRGKQRKPRQVQGRGRKRKQKGMCLEDRPVLEPNAAGIDIGAREIFVAVPPGRDEHPVRVCATFTEDLEQLADWLVVCGITTVAMESTGVYWIPVYDILESRGLQVCLVNARHMKNVPGRRTDWHECQWLQYLHSVGLLRGAFRPEVEVTAVRTVMRHRHELVQMSSQHVLHMHKALTQMNLQIHHVIDDITGLTGLAIVDAILAGQYDPAELAKLRNWRIQADEETIRKSLVGNWRREHLFTLEQSRELYRTYQQQIVKCDQEIETLVGGFEPRVDPEKKPLPPDRKRYRSDKKRAKKNGRLETGFNLRTEAYKLFGVDVTQIPGLETMALPLFGEVGRDMSKWPTADHFASWQGLCPDNDISGGRVLWKGTRKIHNRAGQMFRQGAYSLHHSLTPMGDYLRRMKTRLGPAAATTATAHKIAVIFYTMVKNQVEYDETIWATRDVKRQQRIEARLKRQANQLGYQLVPLEEKPAA

SEQ ID NO: 398847 - protein, 457 aa, unidentified
MKPEAVSALRSKRGLHLDGRDAEPQVVGLTPQTNNERRANTVKTYILHPCPPVEMRSQSFATPPSAPATPTPAAALLGRPAASPPGHVLFLGLDVHNDTIAVSLAPSDSAEVRRYGIIGGTHDDVLKLLKKLQAAHPGSQLRCGYEAGPRGYPLCRFIRSHGHECILVSPSKVPRKPGDRVKTDRRDADQLARLYRAGELTAIYVPDPQDEAVRDLIRARYQVTTQQHRARQQLKMFLLRHNIRYVGKTPWTPAHLRFLARLKLPFAEQQFLFQEMVNVIQEAGQRLEHYEAQLPGVVAGWRWEPVVRALMSLRGLALLSAATLVAELGDLHRFPTAGQLMSYLGLVPSEDTTSDDRRQGGITKMGNGIARRALIEAAWHYRQPPRVSRGVLARQEGLPKPVIEAAWAAQTRLYHRYQHLVRQAHKKPTVAAAALGRELSGFVWAIGRMVQPYPPKS

SEQ ID NO: 398848 - protein, 422 aa, unidentified
MLQEDPQDGEIIARVAALDVGKAELVCCVRVPHEGKSGRRLQEVQTCSTMTGSLLAMSDHLRCLGVSRVVMEATSDYWKPVFYLLEAQGHEVWLVNAKDVKHLPGRPKTDKLDAVWLCKVAERQMIRRSFVPPPEIRRLRDVSRYRIDLIGVRTAEKQRVEKLLEDAQIKLSVVASDIFGVSGREMMAALIGGQTNPKVLAQLARGRMRTKISQLEEAFTGHFTDHHALLLSKMLARIDALDADIAELDTTLEEMIAPFAPAVERLDEIPGVGTTAARVIIAEVGIDMSRFPTAAHLASWARFTPRVKQSAGRKKGSGTTGHGNRYLARALGEAAVAAGKTNTFLGERYRRIARRKGKKRAIVAVGRSILIIIWHLLSNPEARFVDLGPDFYDTRIGPERKKRNHIRQLEALGYKVTLEPTA

SEQ ID NO: 398849 - protein, 387 aa, unidentified
MRASTVDTPTADHCGTIFVAIELSQKTWLVTLHSPDKGKMSRHRLDGGDHAELLALVGRERDRSARALGAVPAVVSCYEAGYDGFWLHRLLLAAGITNYVFDPASIAVDQRARRVKTDRIDGEKMLRTLMAYLRGEPQVVRIVRVPAPEQEDARRASRERGRLIKEQTAHTTRIKALLRLLGMAVGNPRRRDWLSWLSAQRDWQGQAVPPRMLAEIKYEHARLMLVREQLEGLAQASAQADPAPAAAQMAERSELLLRLKCLGPMFATTLASEVFYKDFRNRREVASYFGLAPSPWQSGGIDRDQGISKAGNPRARCAAIELSWLWLRHQPESALTRWFRSRTHNNASKRNKRIAVVALARKLMVALWRYLTTGLVPEGAMLKAAKA

SEQ ID NO: 398850 - protein, 342 aa, unidentified
MAIAVLGIDLGKNSCSLVGQDATGRVVLRRRMRRETVLTFCATLPACIVAMEACCGAHHMGRVLAAQGHTVRLMSPEYVRPYVKAHKNDDRDAEAIAEAATRPTMRFVALKSEAQLDVQTLHRVRDQLVGERTALTNQIRSILLERGTVVAQGRAKLAACLAELLDTEAGASLTPRIRALVAEVRERWQDLDRRIAALDAEFADQARSDENTRRLTTIPGIGALNATALVAAIGDVTTFARGRDLAAWLGLVPRQVTTGGKPRLVGITKRGSRYLRKSLVQGARAALPSLRRSDTHLGRWLRSLLARSHVNTAVVALAAKMARIVWALLRHGRAYDAAPMAA

SEQ ID NO: 398851 - protein, 358 aa, unidentified
MQSQDNTVSFEGEKIYAGIDVHNTNWKVSIIGEHLTHKTFSQDPEPDTLHKYLVTHFPGAEYYSAYEAGFSGFWAHDRLLALGIHSIVVNPSDVPTTDKEKRQKEDKRDSRKIARSLRNGELTPIRIPSQQNREDRSLLRVRKSILKDLQRNKNRIKSLLFFYGIQFPERFQSSTSHWSNAFIDWLENLSFTGHSGKYSLQLLVNTSKYQRNQLLEATRKIRELSRSTYYAEDMVLLCSVPGIGLLTAMTWLTELESMDKYANLDQLCSYVGMVPSTHSSSDKERVGGITPRGKKQLRSLLIESAWVAARKDPVLMKKYNQLCKRMNSNKAIVRIAKRLISRMRYVLINRTEYKILTQ

SEQ ID NO: 398852 - protein, 546 aa, unidentified
MLVPALCYVCTGMPGRAPQVGDHFLEWGAAFFKVRLEPQRIDFVGYWSTSHPLVLGVWPLPESNGHCPQECSLSANVRAEPRAAASGYHGQEASRLQRELVTMERPAPIRSSWVTLRVGDSQTQSHMRKEPVMSTVRFIGLDVHADTIAVAVAEPGGEVRSLGIVPNRPKSIRKLVKKLGAVESLRVCYEAGPTGYVIYWQLTALGVPCEVVAPTLVPTKAGDRVKTDRRDAEKLARSYRAGDLTAVWVPDAAYEALRDLVRAREAAKKDQLRARHRLGTFLLRHGRRPPTAMTAWTQRHLTWIQQVQFEQPAQEATRLDYLHEVEHVVGRIERLEHAIDEAVKTAPPSMRAVIEALQALRGIVLVSAVTIVAEVGALSRFARAPQLMGYSGMGAREDSSGPRTRRGGITKTGNAHVRRIAIEAAWAYRHRPAVGGALRKRQATLSEEVKAIGWKAATASCWAAANVRSRWSRRWGTNSWASSGRSGSPWSANSGRRRHRSRRSGSRRGRERGRQHRWRPRGTRKGEPSSGLCGRPPGRTRAVSPR

SEQ ID NO: 398853 - protein, 405 aa, unidentified
MARVFVGHDWAEDHHDVFVEDAAGARLAAARLPEGLEGVRRFHELVSAHVDEPDEVMIATETDRGLFVGALVAAGYQVLAVNPLSTARYRERLSTSGAKSDPGDARVLAELARVDGHNHRPVAGDSDLAEAVKVLARAHQTMIWTRQRQTNQLRSTLREFYPAALAAFDDLASGDALAVLAIAPTPTLGRMLSRSKIASVLRRGGRQRRVDDRAFEIQTALRAEQLEAPLLVADAMGASVRALVAVISELVTQIAALERELTDRFEQHPDAKIIRSLPGLGTILGARALAEFGDDPNRFDDAKSRKNYAGTSPITRASGKHRVVLARYARNRRLADACYLWAFAALNASPGARAFYDQRRASGDTHNRALRALGNRLVGILHGCIRHGELYDEHTAWGHRHDIAA

SEQ ID NO: 398854 - protein, 320 aa, unidentified
MGPAVAGIDVSKKTFDVALLRGDRPKNGRFKNTLDAFVMFGRWLRKEGVEGIHVCMEATGTYGEQLAEHLYEAGYVVSVVNPARIKGFAQSELTRTKTDKADAGLIARFCRAMRPEPWQPPTPEIRKLQALVRRLAELNGMLNQERNRLDTADDVVKPSIADVIKVLEEHIKHVRRLIRDHIDSDAALRGKRDLLESIPGIGPATSAMILGEFGDVARFRNAKRMASFCGLAPRHQQSGSSVRGKSMLSKTGSSRIRKALYMPALVAMSHNPLIKSFCARLKECGKCSMVIIATCDSAVDCGTQEQCAKQYDVTAKRDPP

SEQ ID NO: 398855 - protein, 402 aa, unidentified
MYNAVGIDVSKGKSTVAVLQPGGTVIRKPFDVEHSSSCLKELNDFILSLDGDTKAVLECTGRYHEPILRSLSGAGIFVTAVNPHLIKNFGNNTVRKVKSDPADAKKIARYTLDNWAQLKEYSGMDNTREKLKTLNAQLDFFTKQKASAKTNLISLLDMTYPGVNDLFSSPPRNDGSEKWVDYASSFWHVDCVRTAGLKTFTARYKAFCKREGYNYSEARAAELYEDSKELVPVLSKELSYKSLIELSIKQLRSLTESVVQIKNEMDSLASTLPEYATVMSMCGVGKTLGPQLIAEIGDVSRFTHREAITAFAGVDPGVDESGTRYSKSNRSSKCGSARLRRTLFLVMSVLLQQKPDDPVYHFLDRKRSEGKKYKVYMTAGANKFLRIYYGKVKAALTAQAEH

SEQ ID NO: 398856 - protein, 351 aa, unidentified
MNYIGVDYHKKYSYIVVKNEDGRVGGRGTVNNTKEEVQRFLEPYRPGMAVVEATRNWGLIYDWLDEVLDDVTLAHPLKVKAIAEAKIKTDKISADILADLLRADLLPRAYAPSKQTRELKNILRQRMFFVRVQTMMKNRLHDILDRHPEVLSQAPEASDLFGAAGMQWLSQTALPGEDNKLLTSELGFLKFLKEEISQSNGTVKKLAKKDRRARLLQSIPGIGPFFSVLILYEIDDISRFRDEKKLCAYAGLVPSTHASGGKVFHGRITKTGSKWLRWAAIEAAQTAVRSDSEFHAYYQRIRIRKGTNAAKVATARRLLTIVYRLLRQGRFYERRTTNTRKIVTPAALVTD

SEQ ID NO: 398857 - protein, 356 aa, unidentified
MDNRKYIGMDVHQASISIAVSDDAGKVLMECIIETKAGTVLEFIQGLRGSLSVTFEEGTSAAWLYDLLKPHVTKVVVCDPRKNALLKAGNKNDRVDARKLGDLLRAGLLTPVYHGESGVRTLRELSRSYLAASKDLTRVMNRLKAIYRSWAIPCAGQQVYSPRHRAAWLEKLREAGVRRRAEQTYQQLDFLMGIRKETRKEMLAESRKHPAREFLEQIPRLGPIRVALLIALLQTPHRFRTKRQLWNYCGLGLRTRSSGEYRYTGGQLQHARKPPALRGLNVNHNHDLKNLFKSAATRAGTLKDDPLTEFYQNLLARGMEPPMARLTLARKIAAIALKIWKKGERFDPAKLKQQAA

SEQ ID NO: 398858 - protein, 360 aa, unidentified
MQCIAFDSHKHYTWALVETEKGKLVREQRIDHAKGALQGFLEEFEPGSPVAVETIGNWYWITDEIEAAGMVPQLVNARRAKLMSGSINKTDRLDAKGINRLQRSGTLPTVWIPPRELRDARELPRTRMVLVRQRTQLKNRIHANLAKYGLKATGVTDLFGVRGRNILDDLLNEFPTQTRYATEILIENLDHLQGELKAIEKRMSKLFGDLKSLELIRTLPGVALILGVVILTEVGDIQRFPSASHLASYAGKTPRVHASGGHIRYGRTRPDVNHYLKWAYAEAANAVMLHRRRHPERHVSRLYERVQRRGGHPKAIGAVGRHLAEATYWVLKKGEPYKDPEARQQEESKKGRERGGDMNP

SEQ ID NO: 398859 - protein, 354 aa, unidentified
MTSTKYIGMDVHKESISIAVMNAAGKIVMECVIETKANMILQCIDGLRGDLHVTFEEGTSAAWLYDLLKPHVTELIVCDPRKNASMREDDQNDKIDARRLAELLRIDHLSPVYHGEHGLRTLKELVRSYLTVTKDLVRVKTRVKAIYRSWAIPCNGKEVYAACHRAEWLEKIKELGVRRRAEFYYQQLDALRVLRQEVRRELLAESKKQKAWKRLCQIPAIGPIRAAVLLGILQTPHRFRTKRPLWKYSGLAIETCSSADHRSIHGQLQRSKKNSVRGLNQNCNHDLKNLFKGAAVIAASKPGPFQEFYAALLAKGMRPEMARLTLARKIATIVLIVWKKGVCFDAQHLKPQTA

SEQ ID NO: 398860 - protein, 422 aa, unidentified
MAGLSTGSDCVERRAGVALRQRIWVGIDVGKASHHVCVMDETGKVCWSGKLGNDQRAIEAVIARARKTGIEVRWAIDLTSPLAALLITVLLSAGESVVYVPGRVVATMTGVFRGEGKTDAKDARVIAETARMRSDLQPVTAPDELVAELTQLSSYRSDLMSDWVRGVNQLRAMLASIFPALEAAFDYSTRSPLILVAGLCTPAEIRDAGIDGVTTHLTENGAWPKGVDAMAAQAMAAAGTQDIAVPGEATTATLIKRLAAKLLDLDREIKDLDKQITARFREHPQAAIIESLPGMGPHLGTEFLVSTGGNAVAEFATPGRLASYAGLVPVPRDSGRISGNLHRPKRYNRRLRRVFFMAALSSIKTEGPSRTFYQRKRTERLIHTQALLALARRLVDVLWALLRDNRPFDTQPPSINGIRAAA

SEQ ID NO: 398861 - protein, 309 aa, unidentified
METYVGIDVSKDRLDVHILPQDEAFAVERNGKGLALLVERLRPLLPSLIVVEATGGFESTTAAALAGAGLPLVIVNPAQIRHYAQALGKRAKTDPIDAMVIARFAFDIRPELRALPDEITQFLADLVARRRQIVEMMQAERQREKRATLKRVKKSIARLIAALEKELAELDSEIDDAVRGSPAWREKEDLLASVPGVGQKTARTLIAELPELGSLDRKTVASLVGLAPYTRQSGRWRGRSMIGGGRKTVRSALFIAAMVACRYNPVLKPFYERLVAAGKPKVLAIIAVARKLITILNAILRDKKPWQTA

SEQ ID NO: 398862 - protein, 360 aa, unidentified
MKKVSKQMRKWEAEAKPEMTMGLDLGDRFSHYCLLNLQGEVVEDGRMQSTEAAIRRHFQGEPCLRIALECGTHSPWVSRLLTALGHQVLVANARKIPAITGSESKNDRNDAEKLARFAAYDPKLLSPLEHRSQERQVDLNLIHARATLVRARTMIVNALRGLIKSAGGRLPACSTESLPARAPAALPPALVAVATPLVEQIALLNAQIDGMDKQVEKLAVKYPEIVLLRTVPGVGPIVAAAYVLTLDRPDAASNRSAGAYLGLRPGQSQSGEADPQRRISKTGDSCLRSLLVQSAQYILGRFGPDSELRRWGLKLAATGGKRGKKRAIVAVARKLAVILHSMWRNGERFQAFPQTAAVAA

SEQ ID NO: 398863 - protein, 348 aa, unidentified
MAVYIGVDFHARQQTISYLTTETGEIRQLELLHEDPAKVRAFYEQFAGQRIIVGFESSGYAAWFEELLEELGCEIWIGHATYIRQFAKRRQKNDRRDADLILELLLSGDFPRIHRYSRSTRQMLQQLRYRQRLVKMRTMVVNMLLFMASSRGHSFRTQLQSKRGQARLGQLPLPEPLAQQRDELLSLLAQLDQKITTIERWLEQQTAEDVAVQRLRTHPGIGLLTSICVRYTLEDVGRFATTRKVSAFAGFDPMEDRSDERRRMGAISKQGSRWLRFFLVEAGQVAMRRDADLGHVYQRISRRGGHAKAKVAVARRLLVRAFIMLRDEIDYAEFLRRGVAARSSRGSA

SEQ ID NO: 398864 - protein, 353 aa, unidentified
MGEKYVGMDVHQSSLVIEVMNEKGTCQMQTIIPTRVDAVREFFGGLRGKVHVVFEEGTMAEWLYGLLRPLVAEVVVCNPRRNKLLTSGNHGDKVDAHNLAELLRLGSVKPVYHERQGLQVLKELVHNYDALTKDRTRVMNRIKALYRGRGIPCAGNDVYYKRNREQWLNKLIEEGRRQRAGFFYQQLDHLTSLCRESRQAMLAEARRHAACKILRQISVLGPVRTAQIMAAVVTPHRFRTKRQFWPYVGLGVVTRTSSEYEFADGRVQRRKKVVGTRGLNDNYSHRLKYVFKSAAIDGMRREPFQGYYATLLDKGMRPEMARLTLARKIAAVTLAIWKTGQRFDAARLSAATG

SEQ ID NO: 398865 - protein, 355 aa, unidentified
MPTIAHNDVEVTGGVDTHKDTHTAAALDAAGRALGSAQFPATSAGYAALLAWLTGFGRLMLVGVEGTGAYGAGLARFLREHGVALVEVDRPDRKTRRWQGKSDPVDAQAAARAALAAHATGTPKQRDGRVEALRALRVARRSAIQQRANAQRQMHTLVVTAPESLRSQLRGLRAAELVAHCAGVALDPARAEQPRTATMLALRSLARRHQQLTTEINDLDTVIAPLVQLINPQLSALHGIGPDVAGQLLVTAGDNPDRLRSEAAFAMLCGVAPLPASSGRTNRHRLNRGGDRQANCALYRIALCRLRWDPETRAYAERRTKEGMSKKEIIRCLKRYLAREIYPLLMPPKDLELAT

SEQ ID NO: 398866 - protein, 348 aa, unidentified
MGMVGGLDLHRGQITFDVVATETGEVWRGRIWQPDRERFGRWLRVELAGRAGDEPVALAVEGCTGWRYVVEEICAAGFEAHLAEPAETQAARGRKRRAKTDRTDAKLLRELLVAGELPESWIPPECVLEWRERVRLYKSLLDQRTQWTQRIHAELFQHGVAVPDGEIRSEKTRASLTDPALAVSPAARRRIAAGYTMIDATDSELVPLRAELVRFGTHQAACRALVTNHFGIGGLTAVAIWSELGDCRRFSRSMQVVRHAGIDITVDQSDGHRASGHLSHQGPETLRWALYEAAKVSSRPSAPDHAYYASVKQHHDGKLAAIAMARKLVRRCYHTLRAVDPEEVYAVP

SEQ ID NO: 398867 - protein, 391 aa, unidentified
MIYAGIDVAKDKHDCFITNSVGEVLFKSFTIPNNRESFETLFQKIQSVSDDLTKVKVGLEATGHYSYNLLGFLLDKGLPTYVINPLHTNLYRKSLSLRKTKTDKVDAHTIASMIMSDVNLKSYSDTSYHNEELKSLTRYRFDKVKARAKLKSSVSRLVCILFPELEKLVPTLHMVSVYSLLSEFPSAHAIASAHLTRLTNLLSESSRGRYGKDTAICFRDAARSSIGSHIPAKSLELKHTIRLILELTSEIDEIEAEIKTIMDEINSPILTIPGISYKMGAMIIAEIGDFSRFDSPDKILAYAGMSPSIYQSGQLDNCYAHMEKRGSRYLRYALYNATKYVCHWDESFGTYLAKKRAEGKHYNVALSHATKKLVRTIYAMEKSGQAYTNAA

SEQ ID NO: 398868 - protein, 362 aa, unidentified
MKEKKARFIGIDLGKRTYAMAVTGKGTKVTMNNGTTSVEGRLKLYKKLKPTDKIALEAGTLAFIMAKELEAAVGCKVYVLNPYRLSVIYKSMKKTDKEDALKLAHIIEDFQEERLPLVNVPSDKEMERRKILSSYRRAQQGRGREINRLHALFVNQGITTVVKKDLVTDRQRQDMIKVLSGLDREDAEYLVRIIEHHETRMEELEMKMKKETEGNEMIQRLQEIPGVGPMVSFAFSAHVGAERFENAGQLSNYLGLVPRVYMSGDTVRYGSITKRGNSFIRALLVQASWALIRSRNGGKLKERYEYMTVEKSISKKKSIVAIARRLAEMMYVLMRDGTRYRTMSFIHKNEMVTDISGVKFCA

SEQ ID NO: 398869 - protein, 324 aa, unidentified
MCDAIVGIDVSKETLDVNCARGQRRQGKIFANTPEGWKLVLSWLKAMGSKQAHICMEATGRHSLGVALALHDAGHIVSIVNPAQIRDFARTKLGRNKTDKIDAALIREYAALFNPQPWKPPSLAMQRLCELQTVRAGILKNRAEWQNRIASGFGDSTATRLAAMTIEHFTTQLEAIDRAITETINQDIELRSRRDLLLSITGVGETLAGVLLAEMPEPGVLRRSGQMVAYAGLNPSHYRSGSSIDRPTRISKIGNATLRSALDMPALSAMRFNPAVAALVARLKSAGRLKPKQIVVAAMRKLLVLCFGVLKTGTPFEPTIAMPA

SEQ ID NO: 398870 - protein, 361 aa, unidentified
MDNVTRWVGLDVHLRQSAAAVIDTGTGEVTEHRIEGGAAQVAAWLEGLPRPWRGVYEAGPTGYTLARRAAAAGLELEVCAPGHVRRRPGDRVKTDARDARRLARLHAAGGLTLVAVPRVEDEQVRDLVRAREDVRADLMRARHRLGTFLMRRELLYPGPGKAWTAAHRDWLSALRLGDRASELTLADYLHAHDLLLARRAGLDAALAEIAEQCRFAPLIGRLRCLRGIQTLAALGLCAEVGDFGRFAHPDRLASYLGLVPSEASSGERRRQGAITKAGSTHARRLLVEAAWHYRRPPRASAALERRQRGQEAWAGAGAWRAQRRLHRRWQRLGAERGKQGGIVAVAVARELSHFCWELAQR

SEQ ID NO: 398871 - protein, 420 aa, unidentified
MTVAPPLTNPPLPAEALVAGVDTHKDTHHVAILDHVGRPVADREFRADGRGYAEIITFLRGHGNVDRVGVEGTGSYGAGLSRALATAGMTVIEVARHDRQARRRRGKSDPLDAHQAAVTVLADTDTAIPKSGDGAVESLRILIGERRSAAKARAQVMNQIHALLITAPELVRHAFRALTGQRLVNTLAKTRPGTGGSGDPDVVARQTLKRLATRYLTMQAEIDIIEQQLGLLVRQVNPTLLSLGGVGPVTAATLLVAAGDNPERLRTRATFAALAGVAPIPASSGQRTRHRLSRGGNRHANAALHRIVLLRMRHREPRTMAYFERRRAEGLTNRDIMRCLKRHVANEIYAALLNPAADNPTGHELRAQRQQIGIPISILAATLGVPYQRLRRLEIGTRADPELEQRASLALAQLSPPETA

SEQ ID NO: 398872 - protein, 424 aa, unidentified
MKVTYQTCCGVDVHKSFLVATIVKTTGGIEPSYQKERFSTFNNSILEFKQWLLDNDCHDVCMESTGKYWVPVFNLLEDDINVVIANPKWVKAVKGNKDDTKDSKWIGDLFRLGLVKGSYIPCKKVRILREYTRYRYKLVSCRSSEKNRYQNALTVCNAALDSVVSDIFGKSSTSIIDYLLEQSGSSINHEEIASKLLRSLKSKEDAVIESVEGYQMTDAQKYRMRLVRAHMDYITAEINDVDKMIENMISSNTDFENAVQFLCTIPGVKRDSAITIISEIGTDMSQFSSSRRLCCWAGLTPGSNESAGKKKSVRITRAGVYLKPALVQCAHAAVKSDKSPYYKKKYESLVKRRGKKRAIIAIARMILTAIYQMLSTGEQWNPSDLYKIDMPVALVEKQKAKAIKQAKKLLQREGLLPPDEPLAS

SEQ ID NO: 398873 - protein, 376 aa, unidentified
MKKIVICGADVHDNSITARIAVNKDAPETRVFRYTAKGRNSLFKYLKFVARNNGTELVVMAYEASSLGFGLCDEARDAGIECYVLAPTKMPQSEEQGKRKTDARDALKILEQLRGYLLAGNELAKVWIPDPQTRDDREVVRMRLEVADKLTSVRTQVRTLLKRNKVEKSKEIGKAGTVSDRQWLQRLTEPGHELALGGRVALASLLRQIAALEAEIQKLDEAVKTLAATDRYRAAVEVLDTQLTGVAVLTATVFLTELGDMRRFKNRKKVGAFLGLVPSSHESGERNDRKGHITRQGPARVRKVLCQAAWARIAFDKEDHKVHARIVEKNPKKKKIATVACMRRLGVRMWHLALEAQLQAGVYLDKELPQAQLRAG

SEQ ID NO: 398874 - protein, 376 aa, unidentified
MRKVALDLGARKTAYCEVRDGKVVQRETVTTVQSLDSLLGPEQPPAVVAIEACREAWHVHDLLTSWGNEVVLVDTTRSRRLGIGQHGRKTDRIDAEVLALALERGGIPVAHVLSPHRRELRRHLGVRRALAETRAQFVTTARGIAREYGSPLPRCTTDNFVSKVRKMQIAPDLQAAIEPLLKMLETNSIELEGVEERLAKLCVTEPVIPLLATAPGVGPVVAACFVSVIDEAKRFRCAHHVESYLGLVPSEESSGGKRRIGAISKKGNKYMRALLIQSSWTILRTASRSDPLRLWAEAVAARRGKPVAVVALARRLVGVLWAMWSKGTAYEASRLAAASGRGLSQAAQSLEFRAEALKKAGQKQSMKKLTAAGVTH

SEQ ID NO: 398875 - protein, 357 aa, unidentified
MAKKPKNRRVTGGVDTHKDTHHAAVVLMNGRRLADREFPATAAGYAGLLDWMNSFGRLHAAGVEGTGSYGAALARHLRAGGITVIEVNRPDRRQRRAKGKSDPLDAYSAADAVLAGRATAVPKAGDGIVESIRALHTVRAGAVKARTACINELQALLVTAPSEVREHLTGRKGAKLAEACARLHPASDLAHPAQGTKAALRHLAGRHHALTSEIGEADTELAVLVKQSRPDLLAVRGVGVETAAQLLATCGDNPDRLNSDAAFASLCGVSPIPASSGKTKRHRLSRGGDRQANRALYMIVLSRMATCPRTREYVERRTSGGLSKKEIIRCLKRYLARELYKILTSPSPENQDLLVTP

SEQ ID NO: 398876 - protein, 343 aa, unidentified
MGEVTTIGVDLAKNVFQVHAVDEAGSVVVRRQLRRSQVLPFFTKQPSCLVGMEACATAHHWAREIAALGHEVRLMPPRYVKPYVKRNKNDMADAEAICEAVTRPTMRFVAIKTPHQQSVLMLHRTRHMFVRQRTMLINALRAHLAEFGIVAGIGRNGLERLLQVIEAGDDDRIPPAARDCLLALRDQLELVKQQILEADRRILALYRASEASRRLADIPGVGPLIATALVASVPDPHAFRSGRDLAAWIGLVPKQNSTGGKDRLGHISKAGNRYLRMLLVVGALSVIRRAKKLGYTRRPWLMRLMQRRPTKIAAIALANRIARTAWAMMAHGTIYQEPVEQAA

SEQ ID NO: 398877 - protein, 309 aa, unidentified
MKEQLVYLGVDIAKSYLDAAMGNEKRCFSNDTIGHRELIKWVKQLSTPVQVICESSGGYERALVQGLARARIKISLVQANRVRQFARAAGILAKTDRIDAEVLCEFGKLMRPQTVTAAKLEQEQLRELESQRRHLTHLLVMEQNRGARLSDASVQRLNRSLINQIKKQIDQFDLLIKGHIDQSHELSAKAAKLTSISGVGARTAALLLAQLPELGELNRREVAALVGVAPFNRDSGKMRGKRAIYGGRRSVRHGLYMAALVAARHNPILRGFYLRLRAAGKPAKVALTATMRKLLIVLNSALKPDLSYA

SEQ ID NO: 398878 - protein, 372 aa, unidentified
MNYNTVYVGMDVYKESFTFCAYTIDAENGSHFQRTEADYKNVLKYLEFLRTVYGNDANFICGYEAGCLGYTLYHQLTEHHVNCVILAPTTMLEQCSRRRIKTDRRDAEIIAKCLAQHNYSPVHIPTATDEETKEFLRMRDDHKLALKKVKQQILAFCFRHNYRYDGNSHWTAAHIKWLKSLKPEALYKEILDEYLLTYTTLSDKLERLDKRIEELASKDEYRESVKKLCCFIGIKTHTALSVLVEVGDFQRFASAQKFASYLGLVPGEDSSGDEQTRLGITKAGNRHVRMLLTEASQCYARGQIGFKSKELKSRQAGNSPQVIAYADKANERLRRRYYKMVLGKSKKHNVAKTAIARELACFMWGMMTDHIT

SEQ ID NO: 398879 - protein, 390 aa, unidentified
MRFYNQPHQFYCGVDLHARTMYLCILDHAGAIVFHDNLPAEAHAFLQAIAPYREGLVVACECLFCWYWLADLCQAHGIPFVLGHALYMKAIHGGKTKDDHIDSEKIARLLRGGTLPYGYAYPKGQRETRDVLRRRMYLVHKRAEIVAHTVNTNSQYNLPVLGKKLIYARNRAELDVPSRFIDPSVRLSMDVNMRLLDTLDELIGEVELHLTRTVKVEAPHSYYLLQSIPGVGKILALVLLYEIHDVKRFANEGDFLSYARLIRPKKTSAGKITGMGGAKIGNAQLKWAFSEAACLLARESDQAKRFLARKTNKHGKAKALGILAARLGRAVYHMLRQGRPFDPRRFWNGAATPAPNEGLGTHRAKAQAKRAKAKKKTSRPSEAPRCVLEA

SEQ ID NO: 398880 - protein, 354 aa, unidentified
MNKSTSEKLIVTLGVDLAKNIFQLHGVDATGKVVVQRAVRRRDFLRMLTGIPRCLIGMEACATSHYWARRLMELGHEVRLIPPAYVKAYVRRQKNDAADAAAICEAVSRPSMRFVPVKSETQQSVLILHRTRELLVRQRIALINALRGHLAEFGVVAPQGAHHVGGLIALLEDVSDGRLLAAVRLALRPLAAQLHNLQTSIGVLDEQILAQHRGDPTSRRLATVPSVGPLTASAITASITDVSMFGSGREFAAFLGLVPRQSSSGGKERLGRISKMGDRYLRKLLVVGATAVLRYAQKGNSASKLWLQRLLAKKPFKVVAVALANKTARIIWALLRRGGVYRAQMSTSSAVQAA

SEQ ID NO: 398881 - protein, 409 aa, unidentified
MKLFIGLDVSSQDAKVCFLNGDGDRLQAFTITNDLPGAITLKEKILDTASRSTCETIKIGLESTSIYSYHPAMFLHNDKELRTYGSQVFMINPKQIANFKKSYSEMDKTDAIDAFVIADYVRFGRHTMSIVKEEQYIALQQLTRSRYQLVHALTKEKQHFLQHLSMKCSQFSQDVNSSVFGNAMMELFLEQFCLEELIQMPLQELALFLQEKGRNRFGNPEEVAKSIQKAVKRSYRLSKVVEDSIDLLLSTSIRIMRTYQTQIKEIEKGIESLMSTLPQTLESIPGIGPVFAAGIVAEIGQIERFTDETKIAKYAGLFWKKYQSGRFTAENTSLSRAGNQYLRYYLVEAANSVRRNVPEYRDYYAKKSAEVPKHKHKRALVLTARKLVRLVDALLRNNQIYAFGRGADR

SEQ ID NO: 398882 - protein, 395 aa, unidentified
MFIVGIDIAKRSHEAIIIAEDGQVVRKAFSFRNNCTGYNLLLEQVRKLTLVKSQIVFAMESTAHYWLALYARLLKDGYTVMVLNPIQSHSLRELYIRKAKTDARDSLIIADLVRFGRCKASNVPQDKSLALRELCRSRAYLVDMAADLKRKLIALLDRIFPEYESLFDSVFSKASIAVLCKYSTPQKVKNANLRKLTDLLMESSNGHFGEWKAHQLKEAACSSFGIDDSGGVYSTLLGMFLEQILSLTAQADSLEKQISVFFQEFNNPLTSIPGVGTVLAATILSEIGDITRFSSADKLLAYAGLDPSVKQSGEFKSNQNRMSKRGSPYLRRAIWLASTVAVHRDPMFQTYYEKKISEGLHYMNVIGHVSRKMTAVIFAVLRDGQPYQPILQSAG

SEQ ID NO: 398883 - protein, 336 aa, unidentified
MMSMKSANNELDKHYVHFVGIDVAKKSFVLATSLSPKTKNYDNTAQGIDQAICFIKEEHKQCDNGKTLVVLESTGGLEVPLAKAIHLAGICVMIANPRQTHQFAKSQSLTKTDNKDAKMLAFYAKMMAQRDDLATLLYCPPSQSQELLTALINRRNQFVQMCVAEKNRLEQSHHSQISSIQAHITYLTEQIHELDKQIKTHLDDDNHPDLKQTSSVIQSVKGVGTTTATLLAMLPELGTISHKQLASLVGVAPHPKQSGETKFKGLCQAGRPEVRKALYMATLVATRFDEKIKTFYQRLRANGKPFKVAIVACMHKLLTILNARVRDELQKQVVVR

SEQ ID NO: 398884 - protein, 345 aa, unidentified
MKITTVGIDLAKNVIQIHGVDERGKTVLRKQLKRAQVAAFFATLEPCLIGMEACGSAHHWARKLQGFGHKVRLMAPQFVKPYVKTNKNDVADAEAICEAVGRPNMRFVPLKTTEQQGVLALHRARQGFVKARTAQANAIRGLLGEFGIVIPQGMSPLAKRIPEILEDGENGLTGSFRQLLQRLMEHLKELDRQVGELEREIQVWHRENEASCKLAKVPGIGPITASALVASVGDAKNFANGRQMAAWLGLVPRQHSSGGKSTLLGISKRGDSYLRTLLVHGARSVVRYAEGKTNPAADWLKSLLTRRHTNVAVVALANKNARIAWALLAHDREFRSDYAPARAKA

SEQ ID NO: 398885 - protein, 410 aa, unidentified
MEVLYPHCAGLDVHKDTVVACVRHMVNGSVRREVRSFKTTTKELLALSDWLAGEGCTHVAMEATGVYWKPVWHVLSDGDFTLVLANAAHVKNVPGRKTDVNDATWLADLLAHGLIRSSFVPDGQTQEMRTLLRTRKQLVRECSRHVQRLQKTLEDANIKLDSVISDIVGLSGRRMIEALIAGETEPGALAAMAHRRIKATPDELEAALRGRVTRHHRFLLQLHLQQIDAVNAAIHQIDQEVDAYVEPFRATVRLLTTIPGIDELSACVILAEIGRDMSRFPTAGHLISWAGLCPKNDESAGKRRSTRMRKGAPWLKTTLVQCAAAAARKKASYLQAQFHRLRARRGAKKALGALAASILTSVYHMLISGELYRDLGPHHFDQRAKAVNTRRLVVRLQNLGYAVQITPLAA

SEQ ID NO: 398886 - protein, 418 aa, unidentified
MTEEIEWFVGFDWASQTHVVCLLDRHGETIGEREVAHGGADLSELCDWLVAKSDAPPARIGVAIETPHGPVVETLLERGFAAFAINPKQLDRFRDRFTVAGAKDDRRDAHALGDSLRTDRRAFRRLAVDDPTLIELREWSRIAEELKEERSRLANRIRQQLWRYYPQMLQAADDLAAENFLALWEFAPTPAKAARIDEAGLAKVLKDHRVRRIGAAELLRILRQTPLEVAAGATEAAVAHIEIAAERARLVNRQIREAEQTLETLCARLEQPGDGERESEPGQRSGRRDATVLRSLPGVGRTNLAALLAEAAEPWRRRDYQVLRVLSGVAPVTRRSGKARLVSRRSACNERLREAVYHWARVAMQTDPECRQRYAALRRRGKSHGRALRTLGDRLLAVACAMLRNQTLYDPNYKGAAA

SEQ ID NO: 398887 - protein, 458 aa, unidentified
MTVRRKKSAASLRPSLPVVRPNVAGVDVGSSEHWVCGPVRPDGSSNVKVFGTTTSQLDDLADWLIEEGVVSVAMESTYVYWIPLYELLESRGLEVLLVNARDLHNVPGRKTDLHDCQWLQLLHSCGLLRGSFRPRESIARMRALQRQLANLIAERTRCVQWMQKALDQMNVQVHRAVTDVTGLTGMAIIRGIVAGERDPVELARLRHGRCRKSVQQIADHLAGNWREEHLFNLASALRLFDALQSEIASYEAWLLKQMQALQPPERRHKPVPSHPNPLKERAIRSRGDQDSRTALWRLAGVDLTRIDGISAGAARVVLTEIGPNLGAFPTENHFVSWLRLCPRTPISGGKPIKKRRNSLGANRIAGVLRMAATSLQRSKSALGAAFRRIARHKGGAVAVFATARQLARLIYRMLRYGHDYVDIGEQAYEQQFQARRLATLTETAKSLGYTLVSQPGTV

SEQ ID NO: 398888 - protein, 343 aa, unidentified
MQTITTIGLDIAKSVFQVHGVDVGGQVIVRRQLKRRYVLTFFQKLSPCLVGIEACGSAHHWSRELQALGHTVRLMPPTYVKPYVKRQKNDATDAEAICEAVTRANMRFVPTKTPEQQSGLVLHRTRHLFIRQQTSVINAIRAHLAEFGIVAPVGRRGVEELLNVVADPNDRRVPEIARACLSALGAQLRRMKEQILEFDRLIRAWHRSNEMSMRLEEAPGVGPVLATALVAAVADPKSFQSGRNFSAWIGMVPKQHSSGGKNRLGNISKQGDRYLRGLFVAGALSVIRYAKIHGTKHRPWLTALLARRPTKVAAIALANKIARMVWAMMARGERYKEPVALAR

SEQ ID NO: 398889 - protein, 316 aa, unidentified
MENTQPFVGIDVSSKRLDVDTLPVSQPFSEANTDDGIASLTAHLQALNPQKVVVEATGGYEITVAYALYEVGLPVVIANPRTVRHFAKALGRLAKTDKLDAQILALYAQMVQPPVRPLPDREQQELGSLMARRRQLQGMIVMEQNRRRTSTPQVRPNIEQLLAYLRQLLKDLDREIQDVIRRSPLWHEDAEILMSCIGIGPKVSACLIAEMPEMGSLPRTKASALAGLAPMNRDSGRHRGKRMIQGGRPVVRQALYMAALVASKHNPVIRDFYQRLLQAGKPPKLALTACMRKILVILNAMLKNRTYWNPQLALAA

SEQ ID NO: 398890 - protein, 326 aa, unidentified
MAKRTTICAGIDTGKRKLDVAIDGSSLQLQVENTAEGHKVLLEWLRRHKVKRIGIEASGGYELPVVAELRRKRFVVVVFQPAQVRAYAKFHLQRAKNDKIDAALIAACTAAVKKIHAAPDPRLQPFAEHLTLIEQIGEDITRYKNRLETCRDPRIQKLWKEEITRLAKRERVERKALVAAIREHRDLAQRLDLICSVGGAGLPTAVAVLVRMPEIGQLSREQAAALAGLAPYDDDSGEQIGARHIDGGRKRLRRALYTAALPASLRWNPQLIALYSRLKAAGKEHKQALIACARKLLIFINTVVARGAPWQAKPPLAATIGASPAS

SEQ ID NO: 398891 - protein, 436 aa, unidentified
MRGCRCSMIMGFTKPIEHSNLITKEGDFMNPLYVGIDVSSKSNVVYFMLPNGDKHSNFSVANSHDGSTQLVKRICSVLSSESLDTVSIGLEATSVYGDNLVYFLREDASLASFNRKIHVLNPKQVNKFKESYNDLPKNDWVDSFVIADCLRFGRINKEVYIGDYHYKALQNLTRARYFAVCNLTKEKQRFMNVLFKKYSTMTQEKVFSDTFSTTALAVYDEFESAEALAYMDLQELTAFIIEKGKNRFPDPDAVAKAIQKAARSSYRLPKTVNDSVNQVLSISITSMKALESQIKEFDKAIAAQMELLPNVLISIPGIGPVYSAGIMAEIGDINRFDNQASLAKYAGLAWTQHQSGNFEAQNTRLIHSGNRFLKYYLCEAAFSLVRCDKEYKAFYHQKYKEVNRYQHKRALALTARKFVRLVFTLLKDNRLYRPAE

SEQ ID NO: 398892 - protein, 310 aa, unidentified
MQAVRPVIGIDVAKAELVIHFQNQTITVANTPPSIRHWLKSLPDSCDIAIEATSTYHMEVTELAHQKGHHVYVVDGYRLSNYRKGTGGRAKTDASDAQLLARFLTREKEDLRRWSPPPKVYRTLQTLLRRRAALIKARTAIQQSLGSEPLLKAGLKKLISQIDQLDTQIQKYLRQAIRETGLCDQVKRCKALEGVGELTAFALVMAFLRGDFKNSDAFVAFLGLDTQVRDSGTQTGKRKLTKKGDSEVRRLLYCAAMAARRSPRWAGVYQGYLDRGLATTQALIILARKLVRIAFALMKNRADYQPAMPS

SEQ ID NO: 398893 - protein, 455 aa, unidentified
MPRTKPRTRSSKQLSTIHPDAAGLDVGSTFHVVAVPGDRDDQPVRTFRTFTSDLHQLADWLKAVGITTVAMESTGVYWIPVFEILEARGFEVLLVNARDAKNVPGRKTDVNDAQWLQQLHQYGLLRGSFRPRDGVVRLRAYLRHRERLVDYAAAHIQQMQKALIQMNVQLHHVVSDITGLTGLRIIRAIVAGNHAPEQLATFRDVRCHASEETIREALTGNYRPEHVFALRHALEIYDVHQTKIAECDVEIEAILAILNDARQAPRDPLPSVRHAKARNEPRFEARPALYTLLGADLTQIHGFGPYTVLRLVGECGDDMRKWPTDKHFTSWLSLAPGNKISGGRVLSSKTRRSANRAAALLRIAAVNVGRTDTALGAFYRRLAARIGKAKAVTATARKLAVLFYRALRFGLAYADPGASHYEARYRQRVVHTLHRRARELGFTLVANSAAGAGVS

SEQ ID NO: 398894 - protein, 334 aa, unidentified
MKQVNDVGVDVDSKALVCAMQRAGQRLPLASFANTAAGHKKFIRWATKGACPARVCLEATGIYSLDFALALHHAKNVEVMVVNPRAIKDFVRACMQRAKTDAVDAGGILDYLERMPFVAWQPPAAEVLQLQAINRRIVQLNTELAREKNRRHASEFAGACADAIAHDIEVNIHHLERRIERMHDSGLKLVRGVPALATKLAHLVSTKGIAEASAMRLLGELLVLPDELAAPQWVAHAGLDPRPYDSGTSVHRPRRISKVGNRHLRAALYMPALVAIQHEPNVKAFYDKLVAAGKKPMQAVVAVMRKLLHAIWGMLKHDQDFDGNKFFKIAPETA

SEQ ID NO: 398895 - protein, 429 aa, unidentified
MKIIYPRVCGIDVHKQFIVAVICISESVEPTYLKKRFSTFHNDLIRFRDWLIQNDCQNVCMESTGKYYIPVYNVLESHISNIVVANPKWVRAVKGEKDDDKDAKWIADLFKFGIVRSSFIPQKDFRILRELTRYKYKLVNMRSSEKNRFQNALTSGNCKLDMVFTDVFGKSASNIIDLILSDNPYTDEDILSKVHKKCKASPDMILDSVNGTDLTPVQKSRIELVNDHIKQLSSNIQKLDKLIDLMIEPYEDYISFLCQIPGVSRNSAIIVLSEIGVDMNQFTSSRRLTSWAGLTPSSNQSAGKKKSVRISRAGVYLKPCLVEVAHAAVKDKNHPYYANKFNKISKRRGKKRAYIAIARKILVAAYHMLLTGEIWNPADLAEVETPVEQRIKYVKNNLKSDIKQLLDIGLTVEELTLMIQQNANTIAAQ

SEQ ID NO: 398896 - protein, 427 aa, unidentified
MPEGRAEVSVRSFGAYTAQLDELVQWLKDCRIKTVAMESTGVYWIPLYQKLEEAGFEVLLVDAHQAKHVPGRKSDVQDCQWLQQLHSYGLLRAAFRPEDSVCRLRTLQRHRKNLVESGAMWVQHIQKALNEMNLHLHHVLSDISGLSGLRILDAILAGERDPAKLASLAHHRVQKSQAQIEAALTGDYRPEQLFVLSQSLQNYRQVQQQITQCDLGIEKQLAKMTDCQNPSQAAKPMPQSLDLGAEKPRKRKPPVALEISLAGHLKRILGVDLTTIPGLNVLTILTLVSEIGTNMTKWRNEKAFVSWLGLSPNNKISGQRVLSSRTRKVVNRAATILRLAAMILGKTNTPLGSFYRRKRAQVGGPKAVTATARKLAGLVYRLIKNGQGYNEPDLHTYELKYKDQILNSLRKRAITLGFDLVELPKAA

SEQ ID NO: 398897 - protein, 376 aa, unidentified
MSKVQCVGLDVHAETIAVAVAETEGEVRSIGTIPNRLESIRKLIHKLGPVEHLRACYEAGPTGYVLYWQLTQLGVKCEVIAPSLIPTKAGDRVKTDRRDAERLARCYRAGELTAVWVPDAAHEALRDLVRAREAAKKDQLKARRRLGKFLLRHGRRPEGLKAWTKKYLEWIKTHVHFDQPALEVTLADYLEEVDHVAARIVKLEKAIDEVVQKAPPETRAVIEALQALRGVAQTTAATIVSELGSVSRFRSPSKLMGYSGLVAREHSSGNRVQRGGITKTGNSHLRRVLVEAAWAYQHRPNVTGFLLRRQKNLALSEDVKKIAWKAQQRLHKRYQAFAARGKNKNQIVTALGRELLGFIWAIALEAEKQQKLAKAA

SEQ ID NO: 398898 - protein, 535 aa, unidentified
MIVVLGQVAVDGGLKVDDRSEDTTPDALASEFREKAFNGIEPGAGLRGEVEDPTWMPGEPGFDLGMFVGAVIVEDGMDQFPGRDRALDGIEKADELLMAMPLHAAADDIALDDVEGGEQRGRAMPLVDAMGRAARACDLGAATTAGRCPMRQANDLSRSLAAFDQPTTLIAVIEMSQSSWLVAGIVPGLERHPLKKLAVDEGSLLRLLQRWRDQAIRAGCRIERITVAFEAGRDGFWLARWLRAHDIEGYVIHPTSVAVSREHRRAKTDRLDTELLKRAFLGWLRGEADHCNMAAIPTIEEEDGRRPHRERESLVAERTRIVNRMKGCLARLGIRGFKPTLQRAPKLLSTLRTPEGTPLPPNALAEMGRDLARLHFVEGQISEIETARLERLEQAPTEKSHAMVRLLARVIGVGIETADMLVREILSRNLRDRRALARYAGLTGAPDESGSKRREKGLARAGNARVRRGMIQLAWRFLMFQKESALAQWYRSRTVDARQGTRKSLIVAMARKLLIELWRLVTTGETLLGVKMRPA

SEQ ID NO: 398899 - protein, 360 aa, unidentified
MVDRIAVGLDVHARSVVGCGVNEATGEVFEARLGASPGEVVAWVQHLPGRASVAYEAGPTGFGLARVFEAAGVDCVVAAPSKLLPVPGSRVKTDRNDARHLAELVAAGLVTPVRVPTITEEAARDLVRARDDARGDAMRARHRISKLLLRHGIVWDKGTWTKQHLAWLAGLHFDDPVTQMVFDNDLAAVLDAIRRRDWLDTQIAELIPGSPWEPVVTALGCLRGVSTLTGFGLAVEIGDWARFTGSTIGAFVGLVPCEHSSGGSRCQGGVTKTGNTHARRLLVEAAWQHRSRYEPGHSPHLNQRWAKASPALIQRGDQANRRLHHEWVKFDTRGKKPAVANAAIARQLAGFCWSIAMMVS

SEQ ID NO: 398900 - protein, 342 aa, unidentified
MEIATIGIDLSKTTFHVIGLNTRGEIVLRRKLSRKQLLLYTANRQPILIGMEACGGAHFLGRALRDQGHDVRLMPAQYVKPYVKTNKNDYLDAEAIAEAVQRPTMRFVPIKTDEQLDLQALHRVRDRWVARRTAVMNQMRGLLLERGVVIRKGPSYLMAQAQEILAGRSILFSARLCGLLRELKQEWDELDRRIERTNAELQHIAKQDDACRRLMEVPGVGPLVSTALVAAIGNGVTFRKGRDLSAWLGLVPRQHSTGGKPKLLGISKCGNEYLRRMFLHGARSVVMQIGRRPSAMSSWLTELTKRTHRNVAVVALANKMARIAWAILSNGTSYCTPVLKTV

SEQ ID NO: 398901 - protein, 380 aa, unidentified
MASVHDCVRSKTTVYAAIELSKKSWVVAIARPDRDRPSIHRIAGGNLADLIGRLRKAAGEKQRIVVCYEAGYDGFWLARSLAKIGIDCRVLDPASIQVNRRARRVKTDRIDSLALLRALIAIDRGERHVCAVVRMPTVEEEDARRSHRERQRLVRERTGHINRIKGLLFAQGIRGIEPKRRRTRIDFGKLTTAEGRPLAERLRRELEREYQRLELVQSQLRIVEKERDTADAQDPAVERKRELLCALQGVGGASAAILAREVFARPFASRRQLGSYLGLTPSAYDSGSTTRCQGISKAGNSWARRVLIEVAWLWRKYQPGSPLSHWYARKTADQSPRIRRIMLIALARKLAISLWRYVETGLVPDGAVMAKTTPHMAAAT

SEQ ID NO: 398902 - protein, 383 aa, unidentified
MEVLYPRCAGLDVHAGSVTACARVASGPQITYEHRTVPTTTRGLLELDEWLTGHGCTHVAMEATGVYWKPVWHVLEAHFTLVLANAMHIRNVPGRKSDMNDATWIADLLAHGLIRSSFVPPAPIQELRDLTRTRRQLVHEIARHVLRVQKTLADANLKLTQVISDIVGVSGRAILNALVAGETDPDRLVDLTRGRLKASRAELLDALHGRVTDHHRFMIKLHLSQIDALETAVATIEARIGDALGPFRAAVSLLTTMPGLSETTARVLIAEIGTDMSRFPSVGHLISWAGLCPRLDESAGKRRSTRTRQTTPWLKPTLINAAWAATRKKDSYLRAQFLRIKSRRGAKKAILAVASSMLTAVYFMLRDGVEYHDLGVAVEVKAA

SEQ ID NO: 398903 - protein, 347 aa, unidentified
MNITTVGVDLAKNVFQVHGVDKRGKPLARKQLKRGQVIGFFANMPPCLIGMEACASAHFWARKLIALGHDVKLMAPQFVKPYVKTNKNDASDAEAICEAVARPNMRFVPVKSVDQQAVLALHRARQGFVAARTAQANQLRGLLGEFGIALPLGISWVPRKIPEILEDAQNGLPVISRELFARLLSHFRELDRQVKEIERQIEAWHRDDAASQRLQAIPGIGPITASALVASIGNASTFKNGRQLAAWLGLVPRQCSSGGKNQLLGISKRGDTYLRTLLIHGTRSVMQHLKPGAGPTQGWLESLIKRRHHNIAAVALANKNARIVWAVLAHGRDYQPGYVSTRVAMSV

SEQ ID NO: 398904 - protein, 396 aa, unidentified
MSTSITSADTLTTLYVAIELSKAGWLVAMQTPLDGRPRRYKLEAGDIAGLLALVERWRERVIGADGGKPAVFCCYEAGYDGFWVQRRLAAQGISCHVMDPASLQVDRRARRVKTDAIDVEALLRALIAWSRGEIQVCRMVRVPTVAEEDARRLHRERKRLVGERIAHVNRMKSLLALHGVGDYQPLRSDRHTRLERFVGADGCALPPQVQRELERELARLELVMAQIAEVEAARDAVVTTTARPEDEKSRLMIANLTRLRGIGPEIATVLVREIFYRCFGNRRQVASYAGLTPSPYASGGTSRDQGISKAGNALVRTTMIELAWLWLRYQPDSALSRWFRERAGKMAGRIRRIMIVAVARKLLVALWRYVNGGLVPTDAVIRRACQRACQREPVAA

SEQ ID NO: 398905 - protein, 356 aa, unidentified
MSEGSWVGLDVHARSVVAGVIDQGSGQVRSLRLPPGGEVTVAWLQTLPAPVRVVYEAGPTGYRLARACAEAGISCVVAAPSRIRAATDRVKTDRRDAERLARLLRLGEITPVRVPAPEEEAARDLVRAREDARGDLMRARHRLSKLLLRHGLVYDATAWTRTHDAWLRRQRFHGGPLAIVFDECYGRMLDAKSRRDALDKAITELAATPPYVNVVGRLVCLRGVSTLTAFALTVELGDWTRFRPESLGPFLGLTPSEHSSGERRRQGGITKTGNSNARRLLIEAAWHHRRPPRRSVTLERRRTGKPQVVQAQAERSARRLHGRWHALEARGKPRSIVVVAVARELAGHCWALATME

SEQ ID NO: 398906 - protein, 406 aa, unidentified
MLFLGDDWAEAHHDIELQDEQGRVLVRRRLPEGVAGLGQLHALVADHLEDTDESSSVIVGTETDRGGWVQALVAAGYVVYAINPIQAARYRERHTSSGAKSDPGDAHVLAEIIRTDRDHHRPVAGDSERAEVVKTLARTHQTMIWTRQRQTNQLRSMLREFYPAALAAFSEDLAGRDAIAVLAVAPTPTLGQSLTKPRIVAVLRSAGRQRNLERRAEQILTALRTEQLGLSEALTEAYGVSVRSLVAVIITMADQVQSLEAEVERCFGQHPDAEIITSQPGLGVVLGARVLAEFGDDNTRFADAKARRNYAGTSPITKASGTRRVVLARYARNRRLADALHQQAFAALTASPGARAFYDSHRARGATHNQGLRALSNRLVGILDGCLRHRIRYNEATAWSHRAAAA

SEQ ID NO: 398907 - protein, 359 aa, unidentified
MQTQSNKIDFTGQNIYIGLDVHLKSWKVTIMTEKLPFKTFSQDPKPDQLYHYLTKNFPNGIYHSAYEAGFCGYWIHNKFKAFGINSIVVNPADIPTTDKEKVQKGDKRDSQKIAKALRSGDLRGIHVLSSKTLEDRCLIRTRAIIVQDLTRNKNRIKSFLHFHGIEMPERFKQMNHHWSKRFMAWLKSIEMTEPSAKKSLDLFIAEAEHLRSTILEATKDIRELSEKEPYVNQVELLRGIPGIGILTAMIILTELETINRFGNFDKLCSFIGLIPTTHSSGEKENIGAITHRGNSFLRGALVESAWIAARIDLALNKSYHDYCKRMESNKAIIRIARKLLNRIRFVLKNNQPYVCSIVK

SEQ ID NO: 398908 - protein, 366 aa, unidentified
MAKRRIWVGLDVGNDQIQLCAIDSKERVIREVAVPTEQAALAQSLVISGCTVEKIALEAGALSIHLVRHLTEAGFQVDCYEARQISRYLRVRVNKTDTNDARGLAEIAKRGPNSLSTVHTKKPENQRVRSKLVFRHKLTLHRMAGESMIRSFIRLNGGKVPRAKTAATLEKNVRHELKRMRSEVGVDLEEEILPLLKLTMSLRAYLADLDRNMKHWAERHPVCARMMKIPGVGPITAASFCSAVDDPDRFRRAKDVGAYFGLTPIVHQSGKTLKHGRISKRGNKLTRSHLTLAASSILNVASDGPLKAWGKNIAERAGPGKARVALARKLAVIMLAVWKSGEKYDPDHSENSALQEQAIGGSLDRR

SEQ ID NO: 398909 - protein, 354 aa, unidentified
MMVSGGFTLGLDLGDRSHHVCVMDATGQIVREGALSNTRPALAKLMADFPRATVAMEAGTHSPWISRYLTDLGAHVLVANPRKLHAISRSERKCDRRDAQMLARLARVDPALLHPIQHGTAQAQHDLLGLKLRDALVRTRVNLINAIRFTLKALGHSVRNPSSESFHKTVLADIPADCLPVIQPLLTVLAQVTEQIKGMEHDLVQRGKKEYPATQRLQQIAGVGPLTALCFVLKIGDPQRFSRGRDVGAYLGLCPRRDQSGGTDKQLRISKCGDGLLRRLLVSAAHYVLGPFGPPCALREHGQRLTGTGSVREKKRAVVAVARKLAVLLLSLWKHGTDYEPRAAASPVLVMSPA

SEQ ID NO: 398910 - protein, 318 aa, unidentified
MPDSIVVGIDVAKRSFDAALGVAGSIKTFSNEDAGHDALVAELGGQSVELVVMEATGGLERDLACALQAAGFAVAVINPRQGREFAKAMGYLAKTDRIDAKALAELAQVLSRHPERERFVRALPSAEQQTLQALVARRRQLVTMQVAERQRLSSSHAVARSSIEAMIIAIRAQLDAVEAELSAHIERHHGELAHQLGSVRGVGPATVASLIAEVPELGRLSRREISALIGVAPFNRDSGQMRGKRTIYGGRAQVRRGLYMCALSAIRFNAVIRAFYARLVLAGKPKKVAIVACMRKLLTILNAMVRSGQSWDDSLHSA

SEQ ID NO: 398911 - protein, 412 aa, unidentified
MKEKVYVGIDLAKSNSRVAAFDTSGEAVCKPFSITNSKEGVKKLLSKLSGYKPGQIVCGMEISSNYWENMCSYLKGMDVEVILLNPYQVKKYRQATGAKIKTDSIDAEAIAGLIVGRKYDSLYISDDATAELRELVRIKYGFQRRVKDLKKSVLALLHLVFPEYTRIISYPFSKVSMEILSKYPTSCHMAKASASKLVKIFRRYQGCNFSLDKAKELVSAAKDSFYSGRASKSRGISIAMQLDEIRSLSAKIADIEEEIKSILCPNDPSGGSSAFSSLNSIKGVGIGTIATFIGCVGDVSRFSSADKLVSFIGFYPRIFESGKYKKSNPTIQKAGPKELRYMLYLASVACIKHNSELKKYYYDKVSSGMPVKKAIIKVAVKLARMMYSMLKYGSQYDPSRVFFQPESLKNAA

SEQ ID NO: 398912 - protein, 411 aa, unidentified
MNNTLFVGIDISKRSNVATFMNCEGKVVGRLTFSNSGSGADRLVAKILSYYEKEDFEAIRIGMENTSVYSKNLVWFLYEHEALNEHKLSIIPLNALMVANYKKSFLDMDKDDITDSFAIADFIRIRPGLLPFKLDARQEALKIMTRSRYNYVQALSRMKSQFLTRLFLSFSEMEAGKPFYSIFSKTSLSLLEEEFTLDELAEKPIPELVEFLQEKGGGKFQNPEEIAKVLKKAASSSYRVPAMVRESLNRTMASDMEIMRILENEIHNCDKNIEKLMKSVPAILVSIPGIGPVLAAGIMSEIGDISRFQKQESLGKMAGFKWKRNQSGKKESEDKAAVLSGNKKLRYYLVEAANRVRIHDPVFEAYYRKKYAESKTHAHKRALILTARKLVRVIFYLLKENKLYKPDVGIS

SEQ ID NO: 398913 - protein, 417 aa, unidentified
MKGTTPKEKYRRCCGMDVHKETVVVCVLAPDGEEGKPLKKVYGTFRNDLGRMRGWLKQLQVTEIAMESTGVYWRPVWNVLEGHGFHLILANPKQVKALHGRKSDKRDSQRIAEFLQDRRIDPSFVPPPELRRLRDLLRYRVSLLEQQNETHNKIRDLFETANIKLSSVASDLLGVTGQKIMEALIAGETPPDRLSWKVKGSLRKKEKEVRQSLAGCFDEFHRQMLELLWKQYKFLSGQIEQVETKTRREMEPHGELIELLDGVPGIDEMVAWTLIAEMGTDMGVFPTTGHVASWAGMCPGTNESAGRQMSTKTRKGNRYLRRALLEAAWAATRKKNSYLRAFFYRLMYRKGWGKAIVALGHKLLVIAYGILKTRIPYYELGADYYDQLNPEKTIQRLVRRLGKLGVEIVLTPKEANA

SEQ ID NO: 398914 - protein, 457 aa, unidentified
MPQPKHSRSRTGLSAVHPAAAAIDIGATMHVAAVGPDRDAEPVRTFQTFTDDLHRLADWFARCGVKTIAMESTGVYWIPVFEILEQRGFEVMVVNARDAKHVPGRKTDVSDAEWLQRLHEYGLLRPSFRPQAEIAGLRAYLRHRERLLDYAAAHIQHMQKALMQMNLQLHHVVSDITGVTGMTIIRAIVAGERDPNVLASHRERGCHASVETICQALVGNYREEHVFALSQAIELYDVYQTKVAACDKQIEVILKRLKKSATPPASKLLPPKHRTRQSNAPSFDARAALHAILGVDLTQIHGLGPYLALKLVGECGTNLTAWPTAKHFTSWLGLAPHNKISGGKVLSSKTRRTSNRAASLLRLAAVSVGRTDTALGAFYRRLSARAGKAKAITATARKIAVLFYNTLRHGMSYADPGATYYEERYRRRVLGNLQRRAKSLGYVLHQADRDPTQMVVS

SEQ ID NO: 398915 - protein, 356 aa, unidentified
MTSTIKYVGMDVHKESISIAVRNAAGKIVMECVIETKAGTILQFFDGLRGEVQVTFEEGTWAAWLYDLLKPHVTKVVVCDPRRNALLLEGNQTDRVDGRKLAELLQNNQLRSVYHGDHGLRTLKELVRSYLTLTRDLGRVMTRVKAIYRSWAIPCSGKQVYAARHRAEWLGKIKEPGVRQRAEFYYQQLDALRSLRQGVRCELLAESKKHKAWKRLCQIPSIGPIRAAVLLGILQTPHRFRTKRQLWTYSGLGIEIHSSADHEVANGQLRRKKKPVDIRGLNENCNHDLKNLFKGAAVVASIKSGPFAKFYAALVGKGMRPEMARLTLARKIATIVLIVWKKGVCFDASHLKPQTA

SEQ ID NO: 398916 - protein, 456 aa, unidentified
MGHARARRIPARLVEDEDYQLRYERVAGVDVAKAKADVCTRLPPAREGGRRMSRVEEVPATAGEVLALAGRLVADGVELVVMEATSDYWRVWYYLLEGAGLTVQLVNSRHARQLAGRPKTDQKDAQWIARLAEMGLLRPSFVPPPEIRALRDLTRTRLQLVRDRTREWQRLEKLLEGALVKLSSVVHSLAGTKTARDILAAIVAGERDPKVLAALAHGKVKGGRAAVEQSLDGMTLADCHPLLIGLHLDHIALLDRSAAAVEDEIEAALGAIPAAWGVSADGARSADPGPDAAALTAVQRLAEIPGVSPKLAMAIIAETGLDMTRFPTADHLVSWAGLAPVARQSGPRQRKPQKGQGDAYLKGYCTQAANGAANTSTFPGERLRRLSRRLGGNKAKCAVGRSILVIIWHLLADPGARFTDLGPGWHDDHTSRNRKIRTHLRQLQALGLDVTITPAA

SEQ ID NO: 398917 - protein, 387 aa, unidentified
MPQPNDLSRSLVALDQDSTIIVVVEMSQSSWLVAGMLPGIERQPRKKLEPSAERLLGLLHRWRDEAVKAGRKITRIALAFEAGRDGFWLARWLRAHGVEAHVIHPSSVAVSREHRRAKTDRLDTELLKRGFLGWLRGERGHCTMARIPTIAEEDAKRPNRERECLVRERTRIVNRMKGTLARLGIRNFKPTLRKAAERVTTLHTPEGSALPPNVSAELQRNMARLGFVVSQIKEIEAARQKRLEQEPETEPHAMVRHLARVVGVGVETADILVNEVLSRPMRDRKAVARYAGLTGSPDESGAKRREQGLAKAGNARVRRGMIQLAWRFLRFQKESALALWYRARTADSRVGTRKTMIVALARKLLIALWRFVTTGETLEGVVLRPAG

SEQ ID NO: 398918 - protein, 361 aa, unidentified
MRIIGCDLHARQQTLAMLETTTGEVVNLTLMHEGNEVREFYSQLPRPVLVGIEATGSMQWFLNLMEELGIECRVGHPATIRAAEPRKQKHDRRDAELILKLLVENRFPAIWLPTKELLDLRALVLHRHQWVRIRTRIQNALQAIALANGLRRGPGLWSYDGQAKIAFLPLPPHASCRRSALQAMYRKMEEEIENLTKQIAEQAEQRTRARRLMTHPGVGPVTALATDIFLGDPGRFVDGKALASYVGIIPREYSSGGNQRLGRITKQGSPLLRFLWCEAGTHAVRKDPELQRFYRRKLVQKGLGRARVAVARKPGIRLWIMLRDEIDYEEFCRRGQKHHSGAACAGMLDVACGANSHRPVD

SEQ ID NO: 398919 - protein, 349 aa, unidentified
MVADELDYVVGVDTHLDEHVLAVGAAPSGAVVARRSVDASGRGYAAAFRFAAEKAEGARVWAIEGTGSYGAGLARYLAGRGETVLEISRTPRAERRLRGKDDSLDAARTARAALASERLALPRGGERREALRLLLVARRSAVDVRREALGQLRGVIVTAPDQLREELRRLSVGRLLERCSRLRRSSAMSADEIATRLVLRSLARRVQAATVEAAELERELLGHVRALAPALLDERGVGPIVAAQLIVAWSHRGRLRSEAAFARLAGVAPVPASSGKTTRHRLSRGGDRQLNRALHTVVLHRRQHDAATKDYIARRIAEGKTRRDAVRLLKRYLARHLYRLLQQQEPLMT

SEQ ID NO: 398920 - protein, 360 aa, unidentified
MKRQRTSIGLDVHARSIVACGLDADTGEVFQRRLCPDHREVLEWIRGLPGPVAVTYEAGPTGFGLARALIGAGIDCRVAAPSKLQRPAGDRVKTDARDAAHLARLLHLGQIVEVTIPSVTQEAARDLVRTREDCRGDLMTTRHRISKLLLRQGVVYYGGQAWTGKHELWLRGQHFDDPALTLTYESTLDAMVTCVHRRDRLDDAIAAMAADSAFTPVVNRLCCLRGVSTLTAFGLAVEIGDWGRLTGRTIGAYLGLVPTESSSGASRSQGGLTKTGNGHARRLLIEAAWHHRPGYRPSRDLRRRWEAAPAAARERGHTANHRLHTRWAGFDARKKRPVVANAAIARELAGWCWSLATMTD

SEQ ID NO: 398921 - protein, 475 aa, unidentified
MNIKGTKKKNQVVTANIFEQQELLKKSEVIKENLTASTWRELETNGKFDKNKKLSFISDDMLILGCDVGSETHYVRAIDTRGRELSKSAYSFNNDYEGFQSAKEWAVKIAAEHDKSQIVLGLEPTGHYWFCLATWMIANGISVVQVNPYAVKQTKEVEDNSQLKDDRKDPKLIANLVKDGNFGMPYLPEKIYAELRRLSMFRDQLNEDRIRTINRMHREMKIYFPEYKDALGKVDGAFSLELLKEAPFPEELTALGEEGIRQIWHAAKLRGRGYSRAREILQYAKASVGIKDGSIASKAAVKWFVQKIMELDVELAVIENQINQKCQEIPHTGNVLEISGIGENTLSGILAEMGDISRFDDVKEIQKLSGLGLVACSSGKHKGETKISHRGRKRLRYWLFQAAKSAVAHAEEFKELHMYYTTRADNPLKKMQSLIVIACKLLRIIYTILNTGTFYDPKKMLMDIRRPENKEAIVA

SEQ ID NO: 398922 - protein, 270 aa, unidentified
MEPTTIAIDLAKRVFQIHYVEPETGTIHSKVLKRAQLVPFFANRPASRVVMEACGSAHYWARVLARLGHDVRLIAAQFVRPFVKSNKNDAADAAAIWEAAQRPGMRFVAVKTEDQQAMLALHRMRQQLVRIRVMQVNQLRGLLYEFGVVLPQGRRASIEAAKAALTSLSDQLPAMLAVSLQDQFSRLRALDEQIAQIEQRILEWRRNDDACRRISEIPGVGVLTATAAVSVIGQAKTFRSGREFAAYLGLVPRQNSSGGKVKLGGISKAV

SEQ ID NO: 398923 - protein, 354 aa, unidentified
MYDMASDAGCCTESIDFPNNRTGFNQMVKWSRKESQKGFPLVYLMEPTGSYYEPLAYHLHKIGQTLYVVLPNKARKFCEYEGIKTKTDAMDARCLALMGCKNRKLRPWEPPLPIYRELRQLTRLRADLVKMQTQMLNHIESIDHMEDVAPEVRKSYEKLLDTIEKQLEKNEKDIAAKLAQDKELETKVKRIATAKGIRVGTVTCIVAETQGFHLISNRKQLTSFAGLDVKARQSGKDDPRHHITKKGNAHIRAALYMPALSAAHCNRQMAQAYGRICAKHPDVKMIGVTAIMRKMLLLVYSLWKSGEEYDETRDNTHTPRKKEPQPTNSPEDCLKPNAEPPDWNAADKEGNPPF

SEQ ID NO: 398924 - protein, 409 aa, unidentified
MRLFVGLDVSSFDMKVCFLNEEGDKIDAFSVSNDLPGATTLKEKLLQCVTGKEVEMLKIGLESTSVYSFHPSMFLHHDTDLQRFGAKVFLLNPKQIANFKKSYSDMDKTDELDAFVIADYLRFGRNQMSIVKESQYVALQQLTRTRYQLVKMLTKEKQHFLQHLSFKCNTFSQEVDSSVFGNAMMELFLEKFSLEELANMPLEELAEFLREKGKNRFGDPRCIASSIQRAVKASYRLDKVVEDSIDVILGTSITVIRTFQQQIKELEKSIKKIMAGLTQTLESIPGVGPVFAAGIIAEIGQIERFEDETKIAKYAGIYWRKHQSGRFTAEDTSLSRTGNHYLRYYLVEAANSVRRHVSDYQEYYIKKYNEVPKHQHKRALVLTARKFVRLVDALLRSHQLFTPERCVKI

SEQ ID NO: 398925 - protein, 370 aa, unidentified
MSVRRILAKTIDTDLEYEAIGIDLAKNCVSAALLTTDGEVVCIDRLDYSELEKSAQALSPTTFAMEPCTEMNYLVQKLEAWGHRCLVIGGKNVQNYVENHYSGQKTDLNDAQALAFLAQDTQLRTIKAKDMEQQKYASLTTLREQYIKQYRQTIVSLKGICQAWGLNISKGISGKAQLKDLIENHAAFPEELRESLVDMVTHAQTTQKVLNKITKTLEVLAKNDKVCQLIQTIPGLGTICSCRLRATIGDIKRFKNPKDFPAYYGLVPRSIATGHNEKKGKITHRGDRTMRSLMVQGAGCVIRLATCGKLKSKHLTKWILKKQKEKMPWGKLVCAVAAKLLRIVRAILISSKPYNPKIAGVAKCSLSKGS

SEQ ID NO: 398926 - protein, 301 aa, unidentified
MVVAAVAEEVADATGAAVELEGRKFGSGARERNHLVSWLQQRRVHEVVLESTAPYWKPVWLDLEPHLEKLHWAQAQSNRAPKGRKNDFRDAQRWGRRWLAGELMLSFVPEPEQRTWRWMTRGRLPLVRERVRLPNQVEALLEEARIKLSSVISDLLGVSGRRILEALSQGETDAVKLAELGDDRLRCTQEQLADALRGSPEPSHRALLKLHLERLKLLDQQIDQLSQRSATALKQHQDAVVRLAEVPGFGIESAQQRIAEVGVDAEAFPSAGELASWCGACPGSAVSAEENYSSRCPKGNR

SEQ ID NO: 398927 - protein, 338 aa, unidentified
MKLYGAIDLHSNNNVTVVIDEQDQVVYQKRLPNDLSLIAEQLAAYQASLEGIVVESTYNWYWLVDGLMEKGHRVHLANTAAIQQYNGLKYTDDHSDARWLAHILRLGVLPQGYIYPKQERAVRDLLRKRGQLVHQRTANLLSIQSQVTRNTGSSISANRIKALDVQEVDELLPNGDLALAVKANLSVMGSADEQIEILEKTVQERVKLRPQFRFLKTVPGIGPILALTVMLETGEIGRFAGVGNYASYCRCVGSQKISNGKRKGSGNTKNGNKYLAWAFVEAANFAIRFSPRIKSFYQRKKSKSNAIVAIKAVAHKLCRACYYIMKDQVPFDITKAFA

SEQ ID NO: 398928 - protein, 325 aa, unidentified
MILEHSLPTTPMGIQQVFSRMPRSRIALETGTHSPWVSRQLTPMGHEVIVAHARNVRLIGESSRKDDQLDARTLARLARIDPGLLGPVRHRSAQAQIHLTVIRARATLVSARTALVNAARGLTKSYGERLRKCGSGQMSREIATGLSQELREALEPLLKEIESLNERVDDYDRRIEQIAKEVHPEVALLKQVKGVGTLIALTYVLTLDDPYRFRRSRDAGCFLGLRPGRRNSGMSEPQMHINKEGDGYLRTLMVQGAHYILGPFGADSDLRRWGLKLAERGGKNAKKRAVVAVARKLAVLLHKLWVSGEVYEPLRNNHKVVSAVA

SEQ ID NO: 398929 - protein, 383 aa, unidentified
MQASNVCTPTIEDNGTIFVAIELSQRSWLMTMHSPDRDRMSRHKFAGGDHAGLLALIDHVRARCERALGSAPSVVSCYEAGYDGFWLHRRLMAAGIANLVFDPASIAVEQRGRRAKTDRIDGELLLRTLMAHCRGEPRVVRIVRVPEVEQEDVRRASRERGRLITEQTAHINRIKALLRLVGLATGNPRRRNWLRFLEQQRDWQGRPLPPQLAAEIRREHARLMLVRDQLEALAQASDAAPASVAAAQMAKRRELLLRLKGVGPVFAATLASEVFYKDFHTRREVAGYFGLSPSPWRSGGIEREQGISKSGNRRARHKAIELAWLWLRHQPDAALSRWFHARTRNASKRIRRIAIVALARKLMVALWRYLTTGLVPNQAVLSA

SEQ ID NO: 398930 - protein, 409 aa, unidentified
MAVGACAGIDWAKDTHDVLVTDADGERLWRETIAHTEAGIDRLCRTLITLRVARVAVERPDGLLIERLLDAGLTVLAIHPNMVAAARPRFRPAGGKSDQFDAFVLCELARTDSHRFRALSPDSDQTKALKALTRGRDVLVEQRVAMCNQLRGELERFWPGATQIFRDLDSPISLAFLQRYPSPIDVHRLSEKRLGQFLARHHYCGRKTPAELLNKLHAAPAGRAGELEADARRGLVLALVAALKPIVEQIRLLTSEIGHAVRAHPDGHIFLSFFKSPDSVICAATLLAEIGDDRGRYPTPEHLAADAGMSPVAVESGRKKVATFRRGCDHRLRDATCILADATRHWHPWAQDRYATARSRGHDHPRAIRTVGRAWTRVLWRCWQDGTPYDPNRHTGLQRHLEIKIPAKG

SEQ ID NO: 398931 - protein, 353 aa, unidentified
MSQYYVGLDVHKASICIAVLNAAGKLVMESVVETSAATILGFLKGLRGQVEVTFEEGTHAAWLYDTLKRTKVKVVVCDPRKNRLLRDGNKSDKVDARKLAQLLRAGLLSPVYHGEQGVRELKELVRSYEYLVEDSTRTMNRIKALYRSRAIACAGTDVYKPRQREGWLAKLAGPGAQARAERLYSELDHLTGLRREARRALVAECRRHPAARVLLGVPTLGVVRVAQLIAAVVTPHRFRSKRQFWSYCGLAVVTKSSADYRIEGAQLRRTKKAADTRGLTRSHNRTLKHVFKSAAQAASRCEPFKSWYAGLLAKGLRPELARVTVARKIAAVTLAVWKSGGSFEAGEVMNQAV

SEQ ID NO: 398932 - protein, 331 aa, unidentified
MHFSQFIGVDISKDTLDAAIYPAKDKKMDFLHFDNTTRGLNEMLKWLKSRGIKPSEMVICAEHTGVYTNPLIDFTEKKGLSLSLNSPLDIKHSMGITRGKNDAIDAGRIAEYAHDHKDKLRLYQKPSEAIVKLKYLLTERRQYVRQRTAMLSFNKIMGKYETPEARSRNGSDIHHCETLILKVERQMLDIIKENPELKRNYDLVSSVKGVGLINAINIVVFTNNFKSFETPRQYACYIGVAPFGYTSGTSVKGKTQVSKICRTQQKAELSMAARSAIIYDPGLKRYYQRKMKEKGEGKDAHGVVLNAVKFKLILRMFAVVKSGQPYKILLC

SEQ ID NO: 398933 - protein, 318 aa, unidentified
MNSEKYIGLDVHQATISVAVMDSMGKLIMESILETKAATILEFVAGLRGSLSVTFEEGTWATWLYDLLKPHVDELVVCNPRKNALLKDGNKSDRIDARKLADRLRLNDLKPVYHGETGVRMLRELARSYLNLVKDQTRVMNRLKAMYRSWAIPCAGRDVYYARHRAEWLGKIREAGVRRRAEHLYQQLDMLQHLRQQARRELLAESRQHPITAKLRQIPSLGPIRSALAVALIRTPHRFRTRRQLWAYSGLALETRTSGEYRCVEGQIRRSKKQISIRGLNKDHNHDLKGLFQGTATGFPRAPSGCSPKLALELVLRY

SEQ ID NO: 398934 - protein, 356 aa, unidentified
MSDGSWVGVDLHARFAVAGVLDGGSGELRTERVPAASGSLLEWLAGLPAPVRVAYEAGPTGFALARACARVGIVCLVAAPGKIPRAPAERVKTDRRDAERLARLLRLGELTPVRVPDELEEQARDLVRAREDSRADLMRARHRLSKLLLRHELLWERSAWTREHDRGLASLRFEGPLAVCLDESYAAVLESKARRDLLDRAIAELAAGPRYADTVARLCCLRGVSTLTALALTVELGDWTRLQPASLGAFLGLVPSEHSSGGQRRQGPITKTGNSHARRLLVEAAWHQRRPLRPSIALTGRRAGQPAAVRAQADAVARRLHRRWWDLERRGKRRTIVAVAVARELAGHCWKLARME

SEQ ID NO: 398935 - protein, 331 aa, unidentified
MKKKDVIGIDVSKLTIDAYLKLAQAHAVFGNDTKGFRQLIKWIRKHTDCKTEELLICFETTGLYSLQLASFLSQSNIDFVMENPIQIKRSMGLVRGKDDHVDSKRIAEYAYMRKEKLKLTQLPSEELIKMQNLLAIRERMIRQKAGYQASLGEYKRVLVQQQQKDFFLLLNNMINALKKQIRKAEETLIEIIHSSSKLLNIYTLLTSIKGIGVILAANIMVTTICFTKFNDSRKYACYCGTAPFKYSSGTSINGRTKVSQMANKKMKALFNLAALSAIQHDPELKLYFDNRMANGANGMSTINIIRNKIIHRVFAVVKRGTPYVVMAKYAA

SEQ ID NO: 398936 - protein, 320 aa, unidentified
MQDILEVCAGLDVHEKTVVACVLNGKLNKAPQKEIETFGTTTQELFQLLEWLEVRGCTHVVMESTGVYWKPVWNILESGSFELILANAYQIKNLPGRKTDIKDSEWLAQLLRSGLISKSFVPSQPIRELRDLTRYRKKLLYEVNKEKNRVHKTLQDCNIKITSYLADIFGDTGRKIIEKILEKRTVTEGDLYVILSGRGKSKLKGKAGDLLKALQGKVEEHHVRMIQYCYDHILFLEKQIEGIDEEIAQYMNAYEEEVTLLDSIPGINETAAAVIIGEIGADMNQFPTDKQLSSWAGLSPGNNESAGKKKEVKSLRETKC

SEQ ID NO: 398937 - protein, 391 aa, unidentified
MNKRFFGLDVHKKYATICGISQQGEVVVKEDHLPLDRLATWAAGSLTSEDAVALEASTNTWWAYDCLAAHAGRVVVVNPIKTRLIAQARISTDELSAEALARLLQSNFICEVWVPDERTRGYRQVISHRIRLAQEGTRLKNRIHATLHRQQLRSPYGNLFSQAGRAWLGKLELPELEKLLLRQNLELLRSSEAALAEVDQLLARLAQEDQRVPILMQIPGINIFSALAILAEIGEIGRFASAKKLSSYAGLVPCLHRSGQKHSTGPITKAGRSRLRWVLVEAAHVAARHDPRLGRFYYRLRAKKGTNVAVVATARKMLVVIWHLLSGDGVYRGRQVQMIARKFLEWGWKVGERNRCGTTKEFVCTRLHQIQINNLTHVQAGRHAYALNGQS

SEQ ID NO: 398938 - protein, 415 aa, unidentified
MLFIGDDWAEGHHDVVAQDDAGKTLARRRLPEGADGIARFHELVASCLGEDAEPDPARVIVVIETDRGPWVKALAAAGYRVYPANPKQAARHKETIANSGKKDDFFDAGCLADMGRTRLHQMRELAADSDVAEAVKIAARAHQKLVWERTRHLLRMRSALREYFPAALEAYADLTLAGKDALELLAKAPDPESAARLTVTQITAALRRAGRRGDLAQRARDIQAALRAPHLAQPDVIAGAYAASVQAAAAVITALNEQVKIMEAKVSGLFRRHPDAGLYLSQPGIGDITGARILGEFGDAPGRYASAKARKNYAGTSPLTIQSGKKKTVHARYIRNRHLIDALHAQALSALTGSPGARAYYDELRAHDAGHDDAMRRVASRLVGILHGCLKTGREYDEATAWSHRAETPEAEAAA

SEQ ID NO: 398939 - protein, 348 aa, unidentified
MTEAYDGRQVVGIDLHRRRSVIVRMTEDGRKLETVRITNSAAALRAVIARAGKNPRVVIEATYGWYWAVDVLEAAGAEVHLAHPLGVKAYSYRRVKNDERDAADLADLLRMGRLPEAWIAPAEIRELREITRYRHKLVKARTSVKDQVHGVLAKLGIPVTHSDIFGVHGQAWLDELPMPQPYAGKVASLRQLAGDLAGEITLLEKVTADLLAGHEGYAAIQALPGIGPVLAAVIVAEIGDIRRFPGPGQLASWAGLTPRHYESDTKVIRGHVTKQGSRMLRWAVTEAIQRQPAGSRPREVKDAIIARRGKEAKNIAKIAAARELLTLVFYGMRDGRVRRLAAPRRPAA

SEQ ID NO: 398940 - protein, 364 aa, unidentified
MSEDRRAVVVGLDVHKSSVRLVAVRDGELLRERTLSYDHEQLLGEVRAWPGARVCQEAGPTGFGLHRALVAAGVDSVIVAPGLVPSRPGDRVKTDKRDARRLAGLHAAGLLTEIFVPAPEHEALRDLVRAREDARLDRMRARHRLGKFCLRHELQMPTTCWGTTRRAWLGRQAFSLPGQQQAFDDYLFAVDQVDRRIETLEAELHRLACGGPHRELIGRLRCMRGIDTLTAIGLVAEAGDFTRFKTAEQFMSFVGLVPSERSSGESRKQGSITKAGSAHARRLLVESAWNSRRRPTVGYELSRRQRGQDPRVLERAWRCQQRLHRRWSRMAGRGKPHQKIVVACARELAGFVWAIATEQPLRTA

SEQ ID NO: 398941 - protein, 390 aa, unidentified
MIYVGVDIAKTNHFATIIADTGVSIKEPFLVTNDIKGFSTLLELIKDYDKDNLVIGVESTAIYHLNFVRFFYERNFKLTIINPIITSKLRKSNIRPAKTDKIDSVNIVKSMIVNGYTIFEQDDLNSLELKELTRFRKSQKEKNAKLKTQLVKCIDLGFPEYQFFFKSGIHSKTSYALLKEATTPDEISKIHLRKLTNILSSNSHGRFKQSKAVELRDLAMKSIGSCSLSLSLEIKQLISQIEFINLQIDDIEKEIKNLLDKVESPIKSITGVSDTNAAILIGEIPNIDKFVSPAKLVAFCGLDPVVKQSGKFNAPQTRMSKRGSKLLRYALINTAWQLSLNNDIFAKYYKLKINQGKRHYNVLGHLASKLVRIIYKLLKDNISFDTNYLK

SEQ ID NO: 398942 - protein, 316 aa, unidentified
MNQQQVYIGIDVSKKQLDVAIRPGNDFFQVANDDLGIAALVQRLVSLQPQLILLEASGGFETLAAASLRQAELPAQIINPRQVRRFANSTGRLAKTDKIDAGVLAHFAEVLKPPLRPWPEAQQQELAALMTRRRQLVEMVVMEKNRLSTAWSPKVRKSLQVHLHSLQEQLKELEQDLDDFIRRSPLYLEKDQLLQSVPGVGALTSQSLMAWLPELGTLNRKQIAALVGVAPFNRDSGQMRGRRTVWGGRKQVRPSLYMATIAACRFNPAIQNFYQRLLQAGKRKKVAITACMRKLLTILNAVLKHQQPWRLDSLCP

SEQ ID NO: 398943 - protein, 403 aa, unidentified
MSIVGAFDVHRRQLTFEYLDTVTGELKRGRVMPGDRPQLRAWLSRFAGQQDVQFALEGCTGWRYVVEELYAAGITPHLAEPADTAALRGKKRHAKTDKTDTRHLRVHLMAGDLPECWIPPEHVLEARATARLYKDLVDERGGWHQRVAATLFHHGVPAAVSVAKPEGRAAAEQAFLSPAGRQATETGLRQIDRLTAELEPLRRQLDMLSRRQPGCAALRAAHFGIGAVTSVAIWAELGDVRRFANSDDVVRHTGLDITVYSSDGKRSGTCPGRDRRCCAGRYMRRPSAPPAPPRRTTATTPRPATTAAAAGPPCPWPASSPAAATTPCVNSERRLWPPPRNPGRSRPRRRARHADDQRPAPASCQLPGPWPGQPRKNERPHPRRGTPSRIMSPEHPEPLRAPR

SEQ ID NO: 398944 - protein, 324 aa, unidentified
MPLDSNANCWVGIDVSKEWIDVVVLVEENRVEQLRCERSAGALGGLAKTLLPYRPQGVVLEATGGLEGAVIGALAGAGLAVMRMNPKRVRDFAGAHGLLAKTDALDAYALALFGARMRPPLRAWPEAERQQLAAWVARQQQLIVDRATERTRLKQASEPALRKSVERMIAFLGKEIARLEKQLAAWVAASETWTEQAALLRTAPGVGPKTAVRLLAQLPELGHVNRRQIAALVGVAPFASDSGKWRGRRSIRGGRAGVRAILYLASWTAVRAAGTLQRFYRHLVAAGKPKQVALIAVARKLLLALNEMVRTRQPWRSANAAIPA

SEQ ID NO: 398945 - protein, 344 aa, unidentified
MTSAVTIGLDIAKSVFHVHGVDAAGQAVVRQRLMRRRVLVFFEKLQPCLVGIEACSSSHYWARELIARGHEVRLMPAQYVKAYVKRGKNDAADAEAICEAVTRPTMRFVPVKTPEQQSVMMLHRVRLMLNRQRTQLSNSIRAHLSEFGIVAPIGRRGLDQLLAIVADEKDPRVPADARLCLKMLAAQLIVVKQQILENDRRVRASARSTNTGRRLMEIPGVGPLLASAFVATIADPAAFKTGRDLAAWVGLVPKQNSSGGKDRLGGITKAGNRYLRQLLVVGAMAVIRYAERHGTRRPWLVQLMQRRTTKIAAVALANKMARIIWALMTSGERYREPAVAALAL

SEQ ID NO: 398946 - protein, 311 aa, unidentified
MKKEIQFQQVIGVGCGLDVHKDTIVATIRSSSSDYETKEFSSFTSSLTELRDWCKQQGVTHIAMESTGIYWKPVFNILEDDAFEIILVNARHVKNIPGHKTDKKDSAWLSKLLLSGLLKGSFIPPMDIRELRDLVRYKNKKTQVISSEKNRMIKILEDCNVKLSSVVSDVQGVSATKIVNAIAGGETNIEKLMVHVHGKIQANREDIKKALEGKVTEHHRFMLNMSRESIEVNEALIKKLDLQIEKAIEKYQVELDLLQTIDGIGKDSAIAIISEIGVDMKQFPNEHHLASWSGVSPGNNESGGKKKAQEP

SEQ ID NO: 398947 - protein, 441 aa, unidentified
MSREPEEIHDPDHEIRLERVAAIDVAKASGKVCTRLPHPTQPHRRVTLVWDVVSTTNELCALAQRLVTDQIERVVLESTGDYWRPFYYILEAHGVTVWLVNANDVKQVPGRPKTDKLDAVWLAKLNEHGMLRPSFVPPKAIRDIRDYTRLRHDLVADRTRYKLRLDKLLEDALIKLSTVATNFLGLSGRAMIDALVAGERDPHRLAELALGKLRVKRPALVEALTGRFDDHHATIAAVLLQQIDALDAEIDKLTVKIDQLIVALPAAGTDEGRRAAAAMMPSVLERLDEIPGVGSRVAQIIIAETGGNMAQFPTAGHLVSWTKLSPRTMQSGPKTRRGPTGHGSPYLKSVLGDAAAAAARTNTFLGERYRRLVKRRGKARALVAIARSILTIVWHILADPTARFIDLGPDHYATHINKHRKTRSLIRQLEALGHIVQLHPA

SEQ ID NO: 398948 - protein, 436 aa, unidentified
MPTRFLRLQPNLNHILILKNIPSPIPYRATVGVDWADQKHDVFVRFANGDSYRRKIDSRPEAIQEWLLELRSLCAEGKIAIALEQRRGALFFQLCTHSGWIDLYAINPHSLASFRQTFFSSRAKDDPVDSQLLEELLRTHPERLRSYQPEPTSERKLDQYCRQRRSLRDLATKTELKLISTLKQYFPLAVNLFAEVGLKSDIALNFLSRWPTLDELHRAKAQTVRSFFYAHNSRSQSLIEKRLQLIAQAHPVTDDLALIEPLVLTTKCLVAQLRQFNQAISQFDQNIRELFKSHPDHFLFESLPGAGEQLAPRLFAVFGSNRARWAEAADIQKYSGIAPVVERSGKSLWVHRRLARPIFVCQTFHEFAQQSSHRCSWANQFYRRQRDKGKSHHSAIRALAFKWIRIIFACWKANMPYDESLYLNAVAKRISASSST

SEQ ID NO: 398949 - protein, 341 aa, unidentified
MNNIKVLGIDLAKNVFQLHGTDSNGKGVLRKRLSREKLVEFMANLSPCLVGVEACGGAHYWSRLFVEMGHTVKMMSPQFVKPYVKSNKNDAKDAEAISEAVTRPTMRFVPIKNMTQQDVLLLHRAKELAVKQRTAQANQIRGFLAEYGIIIAQGIQRLVQLPEILDANEDKISSCSKKIFLQLHEQLKLYDEQAKYYDKEIREQAKTDPRCVAIQSIEGIGPITASAIVATIGDPTVFKNGREVAAWLGLVPRQNSSGNKIVLGSITKRGDRYIRTLLIHGARTVIKTCGNKKDKKSQWVIEKKLRIGFNKTAVALANKNARTIWAMLATGESYRKPLAIA

SEQ ID NO: 398950 - protein, 338 aa, unidentified
MGYKRISIDTSKHVFAIHGVDEAERPTLRLELRRLQIEAFFARLAPTEVVLEACGGAHHWGRQLSAMGHQVKLIPPQYVKPFIKRNKNDRHDAEAIGEAASRPSMPTVAVKTVDEQASTMIAKHRELLVGQRTAAINALRGHAAEFGVIAAKGTAKIEALLVVLTSEPGIPAAAKAMFAAMGEHIADLDAKLTAAERQLLEQHKRNPVSQRLAAIPGVGPITAITMALSVNPANFESGRHFAAWLGLTPRERSTGGKQRLGRISKAGNERLRQLLVVGATAVIRVARPGRPSSSVWLLGLLARKPKKLAAVALANKVARIIWAMMARGEAYRHQPITA

SEQ ID NO: 398951 - protein, 355 aa, unidentified
MRNSSTAGRRVGITKKDHIYVGLDVHKRSVYAAVRINGKETGLKSLPADPEVVKSFLEKHRLGLRKVVYEAGPTGYGLARRLRERGMPVEVVAPGRIPRPAVEGAKSDRLDCRKLAEYAEKGLLKSVVIPTVEEEAYRQVLRLRSSLAEKRRRVKQQIKSFLLQYGLREPEGLNHWSRKAMKALGDLELHPALRFTLDHLFEELSHLEEQIRKVGGQIKEQYSSKAYEMKERILRSHPGVGEVTAAQMLAEVYQPERFENARQVAAYVGLAPRVRQSGESRKEGPLLKAGKGHLRAALVESAWAWIRVDRQAAKQFRRLMRNTGNANKAIVAMARKILVHLWTMLVRQEAYRPTA

SEQ ID NO: 398952 - protein, 354 aa, unidentified
MNIKYIGLDVHKETISIAVMNGEGKLVMESIIETKAITILQFIQGLRGDLHVTLEEGTWAAWLYDLLKPHVTKLVVCDPRKNALMKEGNKSDKIDARKLADLLRGGYLRSVYHGENGLRTVKELARSYLTISKDLSRVMNRVKALYRSWGILCGGQQVYAPRHRSEWLNKIGEAGVRRRAEFFYQQLDALRALRQAVRRDLLAESRKHGATKLLRQIPYIGPIRAALLIALIQTPYRFRTKRQLWTYSGLAIETRDSAQHRYVAGQLRRSKKPQQVRGLNQNHNHDMKAIFKSAATMASSREGPFNDFYQGLLTKGMKPAMARLTLARKIAAITLIVWKKGAHFDAEQLKPQAA

SEQ ID NO: 398953 - protein, 387 aa, unidentified
MYYCGIDVAKHKHTSVIIDQDGQQQGKALNIQNERKGIEQLEQQLAGCCGAVEIGLEATGHYWLALYDQLTRRGYPVAVLNPLQVKAYRRIDLRKRKTDPVDAYWIADFVRFAHPSATPEQVPTLMQLKELSRFRFRLVEQIGDCKRKIITILDRVFPEYESLFSDVFLASSQRILQEAVTAEEFAEFDLSELAQILKQASRGRFGLSKAEEIQTAARQSIGISFLADAVRLEMSCLLNQIRLLEEQVEAVEAKLEELMGQLPQFITTIPGIGLVTGAMLLAEIGDVQRFETLEDLVAYAGIDPAVYQSGKFKGDQMHMSKRGSPFLRNALWQAATAALLHNSELKAYYDKKRNEGKHHGVALGAVCRKLLARVYVVLKEQRPYVIR

SEQ ID NO: 398954 - protein, 349 aa, unidentified
MTKTSHAGAIATIGIDIGKNTFHLIGLDAKGAIVLRQKLSRGQVGTRLANLRPCLIGMEACVGAHHLSRQLVALGHDARLMPARYVKPFVKGQKNDFRDAEAIAEAVQRPTMRFVPTKPVEQLDLQALHRVRARLVRHRTAVINQIRALLLERGIAVRQGYQHLRAALPDILGRESERLSPRMIRMIADLSGDWRQLDERLEAVTDEIETLARADEACRRLMSVPGIGPIIASAMVSAIGDGAAFTKGRDFAAWLGLVPRQISTGDRTILGRISKRGNSYLRTLFVRGARVILMRPANWPKHSFGPWLQAASRRMHRNVLAVALANKLARIAWSVLAGARPYEARQLAA

SEQ ID NO: 398955 - protein, 359 aa, unidentified
MQTHSNTLDFKGQKIFVGFDAHLKSWKVTIMTDRIVHKTFSQPPKPEVLHQYLTKNFPGGEYHSAYEAGFCGYWIHNKLNSLGIKSMVVNPADIPTTGKEKVQKDDKRDSRKIARSLRNGELVPIYVPTSKTLEDRSLLRTRTMLVRDMTRYKNRVKSFLSFHGVEIPDIFNKPQSHWSRRFITWLEEIEIAEESGKQSLMILIQQVKLLRMTILKVTGQIRELSRTDTYNKRVKLLRSIPGIGLLTAMMLLTELDTISRFRNIDQLCSFIGFIPSTKSSGEKEKVGEITPRGHIILRTAIIESAWMAVRIDPALMKSYHEYCKRMEPNKAITRIAKKLVSRISFVLKNNQPYTCSVIK

SEQ ID NO: 398956 - protein, 281 aa, unidentified
MNSTKYIGMDVHKEATTIAVMNAAGKLVMESIVETKAATIVQFLEGLRGELCVTFEEGTWAAWLYDLLKPYVTKVVVCNPRKNALLKTGNKSDRIDARKLAELLRVGLLSAVYHGETGLRTLKELGRGYLAISKDLTRTMNRIKALYRSWSIPCGGASVYAPRHRAEWLGKITEPGVRRRAELFYQQLDGLQKLRQQARRDLLAESRKHGAATLLQRIPYIGPIRSALLIALMQTPHRFRTKRQLWAYSGLALETHSSGEYHYVQGQLQRSKRPIALEPQS

SEQ ID NO: 398957 - protein, 318 aa, unidentified
MSKYTTVCAGIDTGKRKLDVALHGSQQRLQVDNTPEGHAVLLEWLGKHRVKRVGIEASGGYEQVVVATLRKYRVVVIVFQPAQVRAYATFHLQRAKNDKIDAGLIADCTAAAKKIHEAPDPRLAAFARHLTFIEQLGEDMSRLKNRCETCRDPRQLAFWKSEIVRLKKLEKAELKLLVKDIRQHKDLAERLDLIASVDTVGLPTAVSILVRMPEIGRVSREQAAALAGLAPYDDDSGDHAGHRHIDGGRERLRKALYSAAFAGAFHWNPQLQALYRRLIAKGKEHKVALIACARKLLIYVNAVVARKTPWLSSKTATV

SEQ ID NO: 398958 - protein, 388 aa, unidentified
MQDVADQSVAPTTLGPDLCAIFISLELSRSTWLVTSLSPGRGEKMSKHSVSAGDIAALLARFSELKRKACARTGKSFPIVVIQEAGLDGFWIHRVLLSEGIESHVVDAASIATSRRRRRAKTDRIDGETLLRALLAHKRGEPRVCSMVRAPTPEDEDRRRICRERKVLIMERVQHVNRIKGLLFSQGASGYEPLRRDRRARLDALQTGDGCRLPPHLRAQVCRELDRLELLLEQIKAVEAERDALLNAEQTKVSAPPLMLLGVHGVGPEFASVLWSEGLSRHFDNRRQVAAYAGLAPTPWQSGSVNREQGISQSGNPRLRTMMIQLAWLWLRHQPRSALTLWFKDRINRNGGRRRKATIVALARKLLVALWKYVSAGVVIEGAMIRPA

SEQ ID NO: 398959 - protein, 370 aa, unidentified
MNRLFIGMDVHKDKIVVVGLPEEGSHAVVREEFPGGDLSRLLKRFKDLSKMWRMDTCYEAGPSGYVLARVFSKAGIPCRVVAPSLIPRRPGNRIKTDSWDARELALALRAGTLEFVRMPTLEEEEVRGLVRCREDIARQVRTFKSTVSHWLHNRGHQPPTGLKRWAPPYWKWIRALALSPMDRLTLDHYLDLLSVLDDRRKQVEEQICEQGEQEPYRGRVQRLVALRGFSPLAAMRLIAEVMVFERFRSAPSFMKFAGLIPSEHSSGDHIRRGKITKAGNSHIRHVLVEAVQRAHVSPHPSKALARRMRTVIGPLRQIAMDCMKRLHHKFWSLTRRGVSVGKARVGMARELAGFVWALMTHPDPEVRAVA

SEQ ID NO: 398960 - protein, 429 aa, unidentified
MKIIYPRVCGIDVHKQFIVAVICISESVEPIYLKKRFSTFHNDLIRFRDWLIQNDCQNVCMESTGKYYIPVYNILESHISNIVVANPKWVRAVKGEKDDDKDAKWIADLFKLGIVKSSFIPQKDFRILRELTRYKYKLVNMRSSEKNRYQNALTSGNCKLDMVFTDAFGKSASNIIDLILSDNPYTDEDILSKVHKNCKASPDMILNSINGTDLTPVQKSRIELVNNHIKQLSSNIQRLDKLIDLMIEPYEDYISFLCQIPGVSRNSAITILSEIGVDMNQFTSTRRLTSWAGLTPSSNQSAGKKKSVRISRAGVYLKPCLVEVAHAAVKDTNHPYYANKFNKISKRRGKKRAYIAIARKILVAAYHMLLTGEIWNPADLAEVETPVEQRIKYVKNNLKSDIKQLLDIGLTVEELTLMIQQNANNIATQ

SEQ ID NO: 398961 - protein, 357 aa, unidentified
MSIMVGIDMHVKELVCEIGYGTEEPKRVRYANTYEGHMELLKTIGKLKESTGREDVLVCYEASGLGYVLYDRIEKAGYRCEVLAPTEMQRSASGYKRKSDAKDAHYIYETIRGHVLAGNRLCHIWVADRQLRDDREVMRLRYDITQQITRVKIQIRTLLRKNGIKSNDGQRSWTKQFCQWLLTITEVQGSGFGFTMETLLERLRFLETQQARADRKIKQLSEQPRYRESYRRLIGIYGVGMITAMSFLTELGDLSRFPNRRALGAYLGLVPASYESGETSDRKGRITRQGPYRVRGILNQALWMHLRYNGELKGVYERIVERNPRHKKKAVVACMRRLAILMWHTAQGGEERERQVA

SEQ ID NO: 398962 - protein, 356 aa, unidentified
MSYDVKYIGMDVHKEAIVIAVLNEGGKLVMESVIETKASSILQFLHGLRGELHVTWEEGTWAAWLYDLLQPQVQHIVVCNPRRNALLKEGSKSDKVDARKLADLLRTGMLRPVYHGENGLRTLRELGRSYQTISKDLTRVMNRLKALYRGWGIPCGGTQVYAPHYREAWLNKIPQAGVRRRAELLYQQLDGLQGLRRNLRPEFLAESRKHKAAKLLRQIPCIGPIRAARLIALMQTPHRFRSKRQLWTYSGLGIETHDSAQFRFVRGQLQRSKKPQQIRGLNRNHNHEMKEIFKSAATRASCGRGPFHDFYAGLLAKGMKPEMARLTLARKIAAITLTLWKKEERFDIELLKTQAA

SEQ ID NO: 398963 - protein, 337 aa, unidentified
MDYFAGLDISMDETHVCVLDREGAVVRESKAASTAEAIAGELSKAPSCRRIVFETGRMAPILFHGLNQLGLPVVCVESRQAYQALKSLATHKTDRNDARGLAHLARTGFFKPVHVKSLQAHALRSLISARKKLVGQRVTLENQIRGLAVVFGIRLPRALTTAFIDQALKASEGVAGLSAAMRGLSAARVAVMTAVAAIDADIRRMTRASAACRRLMTIPGVGQLTALAFVAAIDDPSRIRRSRDIGAYLGLVPRRYQSGEVDYTGGISKCGDGRVRTLLYEAANVMLTRYKGQLKLKDWAFAIAKRSTMRKARVALARRLAIIMHAMLRDGTEFAPT

SEQ ID NO: 398964 - protein, 349 aa, unidentified
MVIVDTRTVCGGVDTHLDFHVAAVLDHIGGLLGVETFETTEAGYRKLLEWLEGFGTVSRIGVEGTGSYGAGLSRFLHDHEVEVVEVDRPNRQLRHREGKSDPTDAVAAARAAMSGQATVRPKLRNGPVEQMRVLMVARRSAREQRIQTLNQIRHLVFTAPEPIRVRFLGRYQKGLIAELAALRPRKSSQDPISYVTLTTLRDLARRINTLDEETKRIRRNVEGLVTTVAPSMLELSGLGPEGAATLLVAAGDNPERIRSESAWAHLCGVAPIPASSGKTIRHRLNRGGNRQANAVLYRIVITRMSSDPRTRIYVARRREQGRTNGEIVRMLKRYVAREVYKRLPRDLLH

SEQ ID NO: 398965 - protein, 348 aa, unidentified
MMIIGCDLHTRFQQIAMLDTATGEIVERRLEHGTGEAQQFYAALPVPARVGMEATGYARWFERLLREQGHELWIGDASAIRAAQVRQQKTDARDALHLLNLLVENRFPKIWVSSPAERDRWQLLRHRHKLVGFRTSLRNQLHALAMGEGVCRKQKLWSARGRQELEALVLGEWASRRRQELLALLDQLNGSIEELNLAVVEQAAQHPTAVRLRQHPGVGPITGLALALAVGPIERFPNSRKLVSYLGLNPREASSGGKQRLGAISKQGNSLVRFLLVEAAQTAARQDTELRRVYQRLVHRRGRAVAKVAIARKLAVRLYWVLREAAAPTRMQGGPCSPVVSAAPGSNA

SEQ ID NO: 398966 - protein, 323 aa, unidentified
MQGKVSFQEDAMPVVYAGVDVSKEWLDVHLHPLGESRRFCNDKTGIRQLKRLLARHQPKSIVMEATGKFHRPAHRSLWLDGFAVAVVDPLRARMFARACGYLAKTDRLDARFLALLAESLRPPADTPPSPHIEALQELVNARSAAKCDITALQNRSKTATTALLRGELNRLLRRLEQHVERLDKEIERCVGEDPQLCRKAEILTSIPGIGRVTALALMAGMDELGSCSGKQAAMLAGLAPIANDSGARTGRRSIRAGRPAPRRALYMAALSARRYNPALARFADTLKAAGKPAKVILVAIMRKLLVLANCLLAHDRIWTPNPP

SEQ ID NO: 398967 - protein, 341 aa, unidentified
MQITTIGLDIAKNMFQIHGIDAAEEVIVRKQLRRGQVMAFFEALAPCLVGMEACATSHHWARELTKLGHEVRLMPAKDVKAYVKRNKNDAADAEAICEAVRRPTMRFVRIKSAEQQGQLMLHRARDLLMRQRTQVINALRAHLAEFGITAAQGREGIRELLAIVAQEEGSRLPSDAHASLTVLATQLQAVQTMIGSLEKRIVAQHRSNEASKRLETIPGIGVIGATTIAAVVPDPRAFRSGRDFAAWIGIVPRQDSTGGKQKRGRSRNRATNTSGAFSLSEPMPFCGVRASSPKNIPGSLSFWPVDRSRSSPSHLPNKMARVAWALLAKGGTYRAPQLVAA

SEQ ID NO: 398968 - protein, 360 aa, unidentified
MLCQRTSVGLDVHARSVMACGLDRETGEVFKRRLTPDHQEMLDWLAGLPTPVAVTYEAGPTGFGLARALDAAGIECVVAAPSKLIRPAGDRVKTDARDALLLSQLLQLGQIVAVTVPSVEQESARDLVRSREGCRNDLMRVRHRISKLLLRQGIVYYGGHPWTLTHERWLRQQRFGELGLQRAYEDAFDAMLSTRDRRDRLDEAIEEMAEHSCFTPVARRLGCLRGVSTLTAFSLAVEIGDWGRFTGQSVGAYVGLVPTEYSSGTSRVQGGLTKTGNGHARTLLIEAAWHHRKPYSPTVAMRQRWDIASPAARARGHAGNRRLHHRWKDFDGRAKRAVVANAAVARELAGWCWSLAVLDE

SEQ ID NO: 398969 - protein, 326 aa, unidentified
MIVIGIDVSKAKLDCLWIRDLVGMKVKSKIQANNPAGHQALLDWAMKQTGEDIGGLHFVMEATGVYHEALAYALYDAGAQVSVINPARIHHYAKSLGSHSKTDKKDSVNIARYGMTQSPQLWVPEREEIRQLKALIARRDAVKQDVQREMNRMEKAQVSAVSKEVHTSIETVHAQLEAEKKRLESLIDDHINNHPDLKKDRALLESIPGVGPVISQQMVAVIRSRSFNRARECAAFLGLVPIENESGSTVYFKPRLSKRGDARIRAKLYMAAVVAIRHNPDIRCQYNRLLKRGKSKMSAIGAAMRKLVHICFGVLKHQAPYQPQTV

SEQ ID NO: 398970 - protein, 390 aa, unidentified
MDVGKRSHHLVAIGAASQEVILSRAVAQDEAELRLVLSGLAAQGPVLLTVDQKGTLGHLAVAVARTLGIDTAFLTPHDFHAFSAGYTEVKSDATDAFVIADVSMRLTPRLYPVEEQGEDIERLRILASQRASLVRSGTQDKNRLHSLIAQAHPALESVFGADEMDSPLYLGILQHYGGPSGLRRAGQARLRAFISKMPYYRNRAGCVSERIFEALSAQSLTLAPADTTERVIRALCASVLARKEALSALEEDIAALYASMPASAVLSSMPGVGPVLGPVILGEIGDIARFEDAGHLAAYGGVAPSKRQSGSTLRSAKKKKRCNRALKNAFCESARISVASDRRSAEYYAKKRAEGKEHRAAVLALARRRTDILYAMLKTGSCYEPAAKAL

SEQ ID NO: 398971 - protein, 343 aa, unidentified
MKLFVGLDVSLEKTAICVVSEHGKIEREAQAASEPEALTRWMADLDGTIAAIGLEAGPLSQWLHRGLTEAGLDVVLMETRQVKGALKAMPIKTDRRDAEGIARLLHLGWFRPVHCKSVSAQEVRAVLNARKAVQHGFIALEMSLRGLLRNFGLKVGSISRGRFEQRIRELAAGNPMLEAATEPMLRARLSLRQELAGLERRVRQLAQEDPACHRMMSMPGVGAVVALTYRSAVDDPGRFTSSKKVGPWVGLTPSRNQSGERDVSGGITKAGDVNLRRALCQAATVMMHRGRATWLRTWAAQVARRRGSKRAMVALARRISVILHRMWVEDSDFRADAAVPNVF

SEQ ID NO: 398972 - protein, 346 aa, unidentified
MPETEVDTFAGIDVSARELSVALRRGKGEDQPAMAKFSNHPSGHKALIAHLLRGGRRVRVCLEASGNYSLDLALTLQAHRQVEISVINPRRARRFAESLGQRSKTDPVDARVLCEYVARMPWVAWQPPSSVALHLRAVARAIADLGVIHTQQNNRAHASAASQALPVLVVKEMQRHQKYLEQRMTRLRREALRLIAGDSELDRRFRLMLTTTGIAETSALQILGELAVLPDMLDARQWVAFSGLDPRLFKSGKSVEKRPRISRGGSRHWRRALYMPALVALRRDPCLRRFYQNLLARGKARLQAVVAVMRKLLHALFAMFRTNQPYDGSKLCCAVDMAGKAIAACA

SEQ ID NO: 398973 - protein, 355 aa, unidentified
MKQLCAGVDVSAASLEVAWRGKDGRIVRRTVRNDVTGHRALIKELRRAGSGAPVRVAMEATGIYGLDLAVALDGAEGVEVMVANPRVIANFGKALLQRSKTDVLDAETILMFVERMPFIAWHSPSAAALQLRAIARRIAALTKMASGEKTRRRHAAASEVIGTLLERSARQTAALLEREIAKLRKAALALIAADTQLARRMSLLTSIKGIGEVSAVPILAELMLLPADMTDRQWVAHAGLDPRLFESGSSVRARTRISKAGNHYLRASLYLPALVASRYEPNVKAFREHLSARGKRPKSIIVAVMRKLLHAIHAMFRNDALFDGTKFYRSTPARVAATSGIPPSAIFELSSALSS

SEQ ID NO: 398974 - protein, 346 aa, unidentified
MDATTIASIGIDLGKTTFHLVALDCHAKVIIRKKFSRTQLLAYTANLPWSLIGMEACSGSHFLAAKLRAQGHEVKLIPAQFVKPYRKSNKNDFIDAEAIAEAVTRHNMRFVPIKTDDQLDLQALHRVRERLVRRRTALINQIRGFLLERGLVFAQRPANLRRRLPFVLEDAEAHLTPLFRRLLADLWQEWQHVQADIAVLDEAMEQICSSDENCRRLREIPGVGPLVATAIVAAIGNGAAFGNGREFAAWLGLVPRQYSTGGRTQLFSISKRGNSYLRRMFIHGARAVLWRVKYDIGVLREWTTQLQSRAAKNVVAVALANKLARIAWAVLSSGEHYRLKPAVTAA

SEQ ID NO: 398975 - protein, 331 aa, unidentified
MEFKIYVGIDVSKLTLDVFIREKLSHKKFKNDKNGFESLLRWLEKQTATAFESILICFEHTGLYSLPLAVYLEENDIPYSMISALTIKRSLGITRGKNDYIDSRRIADFSYRYKDKISLTRLPAQDIAKLQSLLTLRGRLSVTLGRFTVSKNEAAKFMGRDGTEELFLVYDNMISTIKEQIKNLERSIKEVIGNNEKLKLSYELVTSVKGVGLIVACYLISYTHNFTRFSTWRKFACYSGIAPFDHQSGTSVKGRTQVSSIAKKDMKRIFHLESICAIHTDAEMTEYYSRRQNEGKHKMTIINIVRNKIVSRVFAIVKRGTPFVDLKKYAS

SEQ ID NO: 398976 - protein, 413 aa, unidentified
MKTAVDQFAAHVGLDWADKKHDVCVQLKNGERTFHVINHSPEALDTWLNELHQKFKGRIAIALELKKGPIVYALQKYPFITVFPVHALSLARYRQTFWPSGAKDDPQDAELALDLMLRYPQKIKAIEPDNADIRLLLQLVEQRRLLVEDKRRFVNRLINTLKQYYPQPLEWFSHRDSSLFCELIIRWPSLQQLKRARSDTVRHFMNARGGPAVAYTEQRVTSIANAIPLTTDKSVIEANALMATALASQIKLVGELIRTYDERIESLFDTLPDAELFKSLPSRGPCMGPRMLAALGDNRDRFNSAEEIQNYAGIAPVTERSGQKSWVHWRWQCAKFVRQSFVEWAAKTVNSSYWAKLYYQGMREKGKSHQSAIRALAFKWIRIICRCWKTRTRYDEAKYLLALEARKSPLLMP

SEQ ID NO: 398977 - protein, 408 aa, unidentified
MKVFVGDDWAEAHHDVHVMNEAGDKLAAKRLPEGLDGIARFHALIAEHATEPGEVFVGIETERGMWVQALIAAGYRVYAINPLSVSRYRDRHSLAGAKSDPGDAKLLADLVRTDSHNHRPVAGDSDDVSGLKVLARAHQNLIWDRTRHTNRLRNDLREYFPAALVAFDSLAHGDAVAVLAKAPHPDQAKALSIAQIRSALKHGGRQRNLDTRSTEIRKALREPQLAAPPATAEAFAATTESLVEVIAGLNASIAKLETKLATHFRNHPDAGIYLSMPGLGVTLGARVLAEFGDDPERYNSAKSRRNYAGTSPRTIASGKKRAVLARHVRNRRLYDAIDQWAFCAINTSPGCRTFYDQRRTAGDLHHQALRALGNRLVGYLHGCLKTHQPYNEHTAWAHRQQPPVTIAA

SEQ ID NO: 398978 - protein, 348 aa, unidentified
MKNKSFVGIDISKNVIDVSIFREDTNIKMFPHEVFNNTRKGFGDMCSWLKNSRVVLSQALFGMEFTGCYSLDLEKFLTSKNYSFCMLSTRIVKHHPMGTIDKRDKNDSAKIADFLYRYDGTECAKPYKLPSKAMQQLKQLVNERKFLVEQRTNFMNRMQMFETKEDSAMYESYIKKLNHDIEKIDQEDCELMSKEEDVFDTFQNLLTIPGIGFVNATNIIAITRNFTAFDTARQYARYVGVAPCSHTSGTSVKWRARPSAHCNGQVKADLSMAALRAVEYDVEMQMFYNRKLGGRKDSDTKRKALNAVKFKLIRRMFAIGKQKRKWEVLNTSDDRKNLHIEKSKASEL

SEQ ID NO: 398979 - protein, 342 aa, unidentified
MAERRYLGVDLHRKVFTCCVHLESGRQFLKEWRLEHLSQFIKKLRATDEVAVEATSNTRLFYDAVAPHVARVAVVNANQFRVISQSVKKTDPNDARNLALYLAKGLLPEVRMKEKEQAQVASLVQTRDRLVKLRTALKNKVNNLLSARGIELKKEELSGEKGLTRVLEMDVEELTRFELQVIVEQIRSLNHSVAELEKVIEQEGQKLQGYGNLTSIKGIGSLGASILLSVIGDVRDFPDEGKLASYFGIVPRVHNSNETERSGRITKRGSKLGRTALVQCGLIAKRYSPYLANYYERIRSRRGTGRAIIALARKFLGIIYHTLKNHWVFQDFPNFVLREATA

SEQ ID NO: 398980 - protein, 353 aa, unidentified
MERYIGMDVHAQSCTLAVVSAAGRRLGLQVVETNGTALKQAVAGIPGTRHICLEEGTQSAWIYELLKGLAEVVVTVPDGHGGPKDDARDAWALAESLRVGGIKRRVYKDCGPYSELRAAMRSYLMLRDDVRRTKNRLKAVYRSRGLMPPADTPFHSERHLVWARKLPPEQARTAAMLLEQLQLQEALWTKAEERLALASKRHPVVKLLATAPAIGPIRSAQIVATVVTPHRFRTKRQLWAYCGLAIVMRSSANWERDRNGSLVRSWMQQSLGLNRNRSSVLKEVFKGAAHQVVTRMTTHPLHHDFMRLVEGGMKPNLAKVTIARRIAAAVLAMWKHEEVYAPGKHVSRITAKA

SEQ ID NO: 398981 - protein, 367 aa, unidentified
MKKVSTAATKQSRNISQQQLTIGLDLGDRNSWYCVVDESGRIQLEQRVRTTAKVLQEVFGAMPRSRIALEIGTHSPWISRLLSELGHEVIVANARKVRLIGESRKKDDRLDAQTLARLARIDPQLLYPVKHRSVQAQADLMTIRARAGLVRARTALVNTARGLAKSYGERLRGCNVRDMDPEKAEGLSPELQAALEPLLNAIESLSERIVEYNDRIENLAQQSYPQAALLKQIKGVGTLIALTFLLTLEDPHRFRKSRDVGGYLGLQPGRRNSGQSEPQLHISKEGDPYLRTLLVQGAQHILGPFGVDCDLRRWGLKLAERGGRNGKKRAIVATARKLAVLLHHLWVSGEVYEPLHNSSRVTVAAAA

SEQ ID NO: 398982 - protein, 367 aa, unidentified
MKKGSTAAKQRVRNISGQTLTIGLDLGDRNRWYCVLDEAGRIQREQRVRTNAKALQEVFGAMPRNRIALEIGTHSPWVSRLLSELGHEVIVANARKVRLIGESRKKDDRLDAQTLARLARIDPELLYPVKHRSAQAQADLMMIRGRAGLVRARTGLVNTARGLAKSYGERLRGCNARHLNPEKAEGLSPELQAALEPLLNAIESLSERIVEYNERIEKLAQQDYPQVALLKQGKGVGTLIALTYLLTLEDPHRFQKSRDVGCYLGLQPGRRNSGRSEPQLHISKEGDPYLRTLLVQGAQHILGPFGIDCDLRRWGLRLAERGGKSGKKRAIVATARKLAVLLHHLWVSGEAYEPLHNRNRVAVAAAA

SEQ ID NO: 398983 - protein, 372 aa, unidentified
MSANGITWVGMDAHKNSIKVAVLSPGPAEAVEWTEDTTSEAIRRLARRLQRLAPGGVRACYEAGPTGYALQRQLRTHGVDCIVIAPSLTPVKPGTRIKTDKRDARKLAELFRAGLLTEVQPPSENDEALRDLCRCRDDVRVDLLRARHRLTKFLLRRHCIYRQTKHHWGTRHMAWLEELRFDDAVSQVTFDSYFLSVQQLEERQRQLDQRLAEYGGVEPYRDRVAALRCFKGIDTVTAVCLVAELHGFERFRSPRQLMAYVGLVPSESSSGEREQRGPITKSGNRHVRRLLVEAAWHHRHRPALSAPLRARREGQPARVLAIADRAQERLCARYRRMTEHGKVHPKTIVAMARELTGYLWAVLHPAATATRN

SEQ ID NO: 398984 - protein, 394 aa, unidentified
MILVGIDIGKNKHTFSIIDKNSGEILLSPSDFSNNLKGFLFLIQKLSSYTKSKLLIGMEDTGHYHFALLKYLLDRRYTVVLINPTTTDLTRKLQGGITKNDPLDSLTICDVISSNHRNKPYRVTTLNRFDLYEQKQLTRHHHNLKEELNTYKNRLQKCIDIVFPEFNSLFHSKYGIVYMNILKTFSSAKAIANADIRSIRKCFEFKGQGKRISLSAEQLKLTAKSSIGIPSVAEEIQIRHLVSQIELLEKQLSEIDKRIEEFSLKNNSPILTIPGISHFSGTSIISELGDICNYTKASQIIKFAGVAPYHYESSQFTAQHTAITKKGSKYLRKTLYQIILPVISNNEVFYAYYTKKLNEGKGHRCAQGHCIRKLLRVIYHLLSTRQPFNPKLLV

SEQ ID NO: 398985 - protein, 346 aa, unidentified
MDHVAIDLGGRESQICVRAADGQILEEKRVATTALRKYLEGRTEPSVVVVETCAEAFRVADDALELGHQVKVVPASLARSLGVGSRGMKNDVRDSRNLSEASCRMSRLPSVHIPSAVSRERKSVCGMREGLVGARTQLVNTVRGWMRGQGVGTMRRGAVETYTKRMRDHYQLRRKTPVPDYVERQLKAIESLNQLISEADDHVENVAKSDPTCQLLMSMPGVGPVTALRFASAIDDPHRFASAHTLESYLGLTPGEDSSSEKKRLTSITKAGPKAVRWTLVQAAWVARRYRKSDPMVAWSFEVEARRGRPIAIVALARKMAGILWAMWKNGTKYDPAKGAASRTPQ

SEQ ID NO: 398986 - protein, 368 aa, unidentified
MGLDVHAETIAVAVAEPDGEVRSLGTIANRAESIRKLVKKLGPVEHLRACYEAGPTGYVLYWQLTELGVQCEVIAPTLVPVKAGDRVKTDRRDALKLARSYRSGDLTAVWVPDEGSEALRDLVRAREAAKQDQLRARHRLSKFLLRTGQRPPQGMKAWTQVYLVWVQQIHFAQMAQEATKLDYLHEVEHMSERVVRLEQAIMEAIQLASPQIQEVVKGLQALRGIAQISAVTIAAELGNISRFEGARQLMGYSGAVPSEDSSGKRKQQGSITKTGNSHLRRIAVEAAWSYRHRPGVGPALGKRQQGVAEEIKEIAWKAQHRLHKRYSRLAAAGKDHRKVITAVGRELLGFIWAIGIKAEAAAKQRMAA

SEQ ID NO: 398987 - protein, 393 aa, unidentified
MSCILTGDFNEQPRKEIRDFGTITKEILTMANWFLDNEVYDVAMESTGVYWKPIFNILESKGIKVVLVNARHIKNLPGRKTDIKDAQWIAELFRTGLISASFIPPKEIRELRDLNRTRRKLVEERTRIKNRIEKVLQDSNIKLSSVVSNVFGVSGRALISSLPNQTQLTEDDISSMVKGQLKNKVTLIGDAMEGKFSETNKFLLNQHLRHLDFLEISIAEIDMKIEENMMVFQTESELIQTIPGISTIAASSIIAEIGTDMSRFPNEHHLSSWAAMCPGNNESAGKKKSGKTRKGNNYLKGILTECAWAASRTKDTELSAFYHRLVRKKGKKRALVALGHKMLIEIFRVLKSGNTYVEKGPEVIAKDAIKREEYFIRKLEKMGYSIQKLEIPA

SEQ ID NO: 398988 - protein, 402 aa, unidentified
MKVSGLDVHKDIIFCAIYDGKSYSEVKEYDSTTNSIRQLGTHLKKEGVKQVAMESTSIYWIPVWDILEEMGFDLILVNPFLIKQMPGRKSDVKDAQWIASLLHKGLLRGSMIPCPTIKELRIYTRKYTRLQQKAMQLLTEMDRIMVTANIRISSCMSKLTSKSVIQVIEALIRGESNPDNLVKLVYGNTKNKQSGKLREALTGNVKEHHRQSLKWTKELYDLHQKQIQECLVCMEKICQEHYSIEIALLQSLPGISKVSAMCIIAEIGVDMSAFENSGKIAGWAGLRPRNDESAGKFKSKAITKGNKYLRSILVLVAWAASRTKGSYFKEKFNRLALRKSSKKAIVAIARKILVIIWNMLNEKKPYNPTLVHIYDPVKVERSIAYHQKEIEKASKLLPKKVV

SEQ ID NO: 398989 - protein, 344 aa, unidentified
MLYVGLDYHVNGSSLCILDHGGKLVKQFRVNGRWPAVVEAVRRLAEEGDHRVAVAFEACGGCAVLYEELCKVAVRVGVAHPGHLRLIFKSKRKNDRVDAGKLAKLLYCDAIPRAHIPKAEVRQWRRLVELRRVLVSRRTAVKNQLRGLLRTLGLESPRGLFTGKGVAAVEGQAMDDASGLERDLLIEELKAAGERIRRVQRELNRLAKDDPRVSLLMSVPGVGQRTAEAFVAYVDHVERFGRANQLGSYFGLVPCQDASAGRDRLGHITKEGPSSVRWLLIEAAWQAVRRDPGLKEMFQRLCGGKRERKKVAIVAIARHLGCAMGAMLRSGERWRSPDVKTKAA

SEQ ID NO: 398990 - protein, 357 aa, unidentified
MKSKIKQLDFKGERIFTALDVHKKNWRVTVGSKEFELEHYSQNPNAKDLARHLKKNYPGAKYMVAYEAGFCGFGIQRSLKEEGIDCIVVNAADIPTSNKEKRRKQDKIDSRKIYKRLAAGDLAAIYIPQTAMEHARSLMRERSRIVQDQTRCKNRIWSLLLFSDLTVDSNRPKQYWSRKFIESLKQLDCGSEPLRQALDLAIEEYILVRQLLTKATTKVRELSGTKFFVQIQELLRSIPSIGLINAMVIQTEIQDIFRFKTLDRLCSYAGIVPDLDSSGEKDKKTGITHRSNNYLREAIIESSWVIIRKDPAMLMLYKTYCARMDENKAIIKIARHLLSRIRLVWSNHTKYEIGIAA

SEQ ID NO: 398991 - protein, 375 aa, unidentified
MQGSTFIGLDVHKATISVAIAQGERGGEVRHLGTVPHRPDHVRKLVEKLAAGAQLQFCYEAGPCGYGLHRQLVAMGHDCSVIAPSLIPLKAGDRVKTDRRDAVMLAKLHRAGELTAVWVPDAAHEAMRDLVRARATAMRVAGKARQHLQGFLLRHSRIYPGKKGWTGAYRRWLALVRFTHPAQQIVLQDYIDAVADAEARVERLTEQIADLLPHWSLAPVVEAVQAMRGVGFIVAVTVVAEVGDFGRFDTPRQLMAYLGLTPSEHSSGASVRRGGITKAGSGLARRALIEGAWSYRMQARISVKLLARLEALPKVVRDIAWKGQLRMCQRYRHLIAVGKAKVVAVTAIAREMLGFVWAIARAVTAPPASPDATAA

SEQ ID NO: 398992 - protein, 401 aa, unidentified
MQDTQQHGAVDVFIGVDVGKGQHHAVALDRNGKRLYNKALPNDEVKLRALIAELRTHGRLLFVVDQPSTIGALPVAVARAEGVFVAYLPGLAMRRIADLHAGEAKTDARDAAIIAEAARSMPHTLRSLRLADEQLAELTMLCGFDDDLAAQVTQTSNRIRGLLTQIHPALERVLGPRLDHPAVLDLLERYPSPAALAGTSEKTLANRLTKLAPRMGKGLAAEIVQALSEQAVTVPGTQAATIVMPRLAQQLAALRKQRDEIAAEVERLVLAHPLWPVLTSMPGVGVRTAARLLTEVAHKAFASAAHLAAYAGLAPVTRRSGSSIRGEHPSRRGNKVLKRALFLSAFAALRDPVSRAYYSRKIQQGKRHNQALIALARRRCDVLFAMLRDGTIYQPKSAPNA

SEQ ID NO: 398993 - protein, 313 aa, unidentified
MPSKKQNTSTVSVVHEICCGLDVHKKTVCACLLWSDASGAEQCEVMEFETFTDDLFRLKEWLIERECPVVAMESTGPYWTPIHNILEGFFQVILVNARHMRNVPGRKTDLSDSRWLAGLLRHGLLKAAFIPPKYQRQWRDLTRRRNKYQQTVGHFKRRVHQLFQKANIKIDSVLSDLFGLTGRNLMKLLISKETVPNLDEVEQCLRSSLKSKRTELYRAIQGFFEKHHRDLLALMLDTIEKLESQVVDLDHRIVQAMSAHQDKIDRLDEIPGVSDVSGPAVLAEVGPTLEAFPNADALASWCGICSGNNQSGG

SEQ ID NO: 398994 - protein, 410 aa, unidentified
MLCVGDDWAEDHHDVELMDEAGRVLAKARLPEGAVGLARLHAMIGAQRGEDAHEAEVLVGIETDRGPWVAALVAAGYTVYTANPLQAARYRQRHAVSGAKSDAADAHSLADMVRTDAHQLRPVAADSPQAEAVKVVARAHKTLIWERTRHTQRLRHGLREYFPAALEAFDDLDAPDALELLGKAPDPASAAKLNRSQIQAALKHARRRDIDTKTTRIQSALRSEQLGRDQVITNAYAATTRSIVAVLTVLNEQVKILQGQVEQHFGRHPDAEIILSQPGMGTILGARVLAEFGDAPGRYADAKARKNYAGTSPITRASGKKKVVLARFVHNDRLIDALMSQAQSALQASPGARAYYDKQKDRGLDHQPALRQLANRLVGILHGCLKTRTLYDEATAWSHYNQDQDQQPAA

SEQ ID NO: 398995 - protein, 372 aa, unidentified
MTQSNILFIGMDVHKESIVISLADDDRSEVRRYGAIGGTMADFKKILRKLVSTGKDLFFCYEAGPCGYALHRLITAQGHQCIVVAPSLIPKKAGDKIKTDKRDADNLTRLLRSGDLTSVFVPNEEDEAMRDLSRAREDVVLALKSAKQRLKSFLLRHNKRFDGSANWSEKHLRWLTEDINMPYPEQKIVFQEYLSSVTEANERVKRFDKEILFYTQQWRLYPVVKALMAMRGVRMVVAVTIMAELGDLTRFENPKQLMCFLGLTPSEYSSGDKQKKGPITKAGNQHARRVLVEAGWSYRFPAKVSKEMQKRHEDVPLNVRDIAWKAQLRLTKRFRVMANKGKANNLIVVAMAREIAAFMWAIANEVPILPRD

SEQ ID NO: 398996 - protein, 300 aa, unidentified
METRVTALPKLFIGIDIHKRSWKIHCSTDLFGGKSFTMPPEPEKLYEYVQKHFCDHQVTTAYEAGCCGYSAHRSFEVFGWKSLVVNPADIHRKGKERYTKTDRIDAQLISRELKDGRLDGITVPDIEREGLRSLFRRRNELVKDFRRIKSRIKMHLLYFGIKIPAEFDNDHWSHAFRHWVDSQEFHYPTAQETMASKMRTFRFIDKELREVSSQLRAYCRKHFKKDYYLLRSVPGIGGIVAVGILAELGDLRRFNTLKHLAGYVGLAPGIYQSGATSKALGMNPRCHPIVWTQLFTSLRD

SEQ ID NO: 398997 - protein, 356 aa, unidentified
MQTQVTKKIDFKGKDLYIGLDVHKKSWSVTILIEGMEHRTFTQPPDPLALYTYLQKMFPGGTYHSAYEAGFCGYGIHRELNVLGIKNIVINAADIPSSQKDQLQKRDPVDSRKIARALEKGLLRAIHIFDRDMEELRSLNRTRFYLMRDFRRSKNRIKSFLQYYSIPIPPDYDNNQWPLKFIDWLKQIQMKTLSGQDAFSNLIQSFEYHREQILILSRQIRIRVREYDKELYNLLKTVSGIGPLTSSALITELGDINRFPHINHLSSFVGLVPRVKQSGETSYNAGMTFRCNEYLRTLLIESSWQAIRLDPALMQYYHQHVINNKGQKVIIKVARKLLNRIRYVMKNRQPYVTGVA

SEQ ID NO: 398998 - protein, 411 aa, unidentified
MDAFCGIDWAEDHHDIALVDRDGQLLARQRISDNAAGLARLLELLAEHGDTPGDPVPVAIETPRGLLVACLRATGRKVYPVNPMAVARYRDRHSVAGRKSDKGDAAVLANVLRTDMHAHRPLPADSELAQAIAVLARAQQDAVWDRTTAHNKLRSHLREYFPGFLHAFADARGGIMRPEARAILAAAPDPASAAKLTLTQLRALLKKAGRVRGIDAEAQRLREAFREEQMRQLPLVEQAMGRQTLALLRQLDAACASAGDLEQAAAESLNQHPDAGIITSFPGIGTLTGARVLAEIGDDRSRFQDARGLKAYAGSAPITRASGKSRSVTHRRVKNNRLATAGYAWAFAALTASPGARAHYDRRRDAGDRHTAAQRNLFNRLLGCLHHCLATGQHYDETTAFPAQAAAPAAA

SEQ ID NO: 398999 - protein, 274 aa, unidentified
MFIDELKNIIIDATLIEHNKNEFDNLFNSIKNYSNLIVVMESTSIYHLPVENYFRSKGIDTVVMNPKLVKQFKDTLNKSKTDKLDCFKIARCYLGTIDNFYYKNDEYFMYNLLARQYWSLFEGQTRLKNRYKQLIEIVFPEFNLVFNDLYDDLALNFIHDFPHPILFVNTRFDDKYQFVSFLGIDSVTSQSGISAYHGAISKTGCKFGRTILFNVVTIILQISAHANTSNSIYLFFRKKQSEGKHHYKCIIACETKLYKIIYKLCSSNCLYENK

SEQ ID NO: 399000 - protein, 316 aa, unidentified
MSTPPLFVGIDVAKAQLDIALRPTGERWAVANDDTEIAALVARLQAVHPTLIVLEATGGYQRAAVAALVAAGLPVAVVNPRHARDFAKATGQLAKTDPLDARALAHFAEAVRPTPRPLPDAQAEELRALLARRRQLVAMRTAEQNRLGNAPPRLQTDIQAHITWLNTRLAALDDDLDTTLRMSPVWRAREELLRSVPGIGPVCARTLLFDLPELGTLSRQRLAALVGVAPFHRDSGTRHGTRLVWGGRAQVRTTLYMSTLVAVRYNPVLKVFYERLRTAGKAAKVALTACMRKLLTILNAMVKHQTRWQPQEVPSA

SEQ ID NO: 399001 - protein, 348 aa, unidentified
MKFNTQNAKIKAITETTLVLGIDVGSETHYARAFDYRGIEYSKKPFKFSNDEAGFVMFKAWILDIKEKHGKDKVVPGMEPTGHYWFNLGKFLQDNEMKPVLVNPHHVKKSKELDDNNPTKNDRKDPKVIAGLVRGGRYMIPYLPEGVYADLRTASNMRFQLQAELTRIQNRISRCFNIYFPEYKTVYGQPDAKSGMLIIKVAPLPEDIMTLGIDGVNQIWRDAKVRAVGKARAKTLIEAAEHSAGSKEGERSARMEIRMLLEDYESRNTRLQEVVALIEELVKKIPMAEKLLEIKGVGIKTVSGFLAEVGDISRFNNPKELQKLAGLALVENSSGKHKGRLAVSDNIE

SEQ ID NO: 399002 - protein, 444 aa, unidentified
MFARLSGVPWLLIEICARSLGYGCVSGVFHGPLLATGTNGWRSVVAQRDIAWIGIDVGKTHHWACMVDAEGKKLSSIKVANDEAEIVALITNAGSQARQVVWAVDIIGAPSALLLALLARADHAVRYASGRVVAAMSAAYVGEGKTDAKDAYVIAETARLRGDLPVIDTGTDLVRQLAVLTGHRADLIADRVRMINRLRDLMTSVFPSLERAFDYSSHKGAVVLLTGYATPDGIRRIGQTRLTGWLRNRNVRGSADVAARAIAAAKAQTVVLPGQDLCASIITELATAILALDDRLKALDAQIEATFAEHPQAAIIQSMPGFGPFLGASLLVGSNDLRAFPSAGHLAAAAGLVPVPNDSGRRTGNLHRPLRYSRPLRHVFYLSAQTSMMRAGPNRDYYLKKRSQGATHSQAVISLARRRIDVLWALLRENRMWTAAPPPLAQAA

SEQ ID NO: 399003 - protein, 475 aa, unidentified
MPDYSSIRTIECEWITGKPRVNCRYQALTLIENWPNRGQCIMKKRPPAEGRGRMWRRLRCAALCRASLRYGGAWGVTAVVYAVGRTAKGHRQIVWRMAFYLEGKTSVDANDLSPKEATQMSYDVKYIGMDVHKEAIVIAVLNESGKLVMESVIETKASSILQFLHGLRGELHVTWEEGTWAAWLYDLLQPQVQHIVVCNPRRNALLKEGSKSDKVDARKLADLLRTGMLRPVYHGENGLRTLRELARSYQTISKDLTRVMNRLKALYRGWGIPCAGTQVYAARSREEWLSKIPQAGVRRRAELLYQQLDGLQALRRDVRPEFLAEGRKHKAAKLLRQIPCIGPIRAARLIALMQTPHRFRSKRQLWTYSGLGIETHDSAQFRFVSGQLQRSKKPQQIRGLNRNHNHEMKEIFKSAATRASCGRGPFQDFYAGLLAKGMKPEMARLTLARKIAAITLTLWKKEERFDVEQLKTQAA

SEQ ID NO: 399004 - protein, 421 aa, unidentified
MQVLYERCAAVDIGKDVIAVAVRLPADGPDGRATHKRTFKTFYGVLREAARWLNSLGVTHVAMEATGIYSMPVYHALIEHGKFDQVLVCNAGHVKNVPGRKTDLADAEWLVHLLECGLLRGSFIPPAEIKAARDVIRYRTKVVQSRTSEVQRLGNVLQDAGIKIDSVASSIATKSGRAMIEALTDGERRPGVLADLAKGKMRVKIPDLTLALEGRFGDHHALMCRLHLDHIGHLDAMIARLDTQTETMMAPFRTERDLLTTIPGIGMLAAAAVLSEIGANVTEYFPDAAHLASWAGLCPGNHESAGRRHSGKRRHGNQHLQHILVEATWAAVRHDGYLKALYHRHVMKWGGYRSPTAKKKAIIVAAHAILVIIWHVLAAGKPYDELGTDFFTRRLDPERETRRLIAKLEALGHQVRLQPAA

SEQ ID NO: 399005 - protein, 357 aa, unidentified
MTTTTSMSEASGQRRVIVGVDTHKDTHVAVAVDEVGGHLGSASFSADRDGYRALIMWAMAFGGTVVFGVEGTGSYGAGLASAIRRSGIGVLEVLRSDRRDRRLRGKSDTIDAENAARAVLAGIVHAIPKTGDGIVEMIRVTKVAKDNAVKARSSAMISLKQVLVNAPDDLRQSLQGLPRMTLIRRCAGLQLGPVDSVTAATKNALRAIATRWLGLDEEIKSHDLLLASLTSTVVPTLVEAFGIGPDGAAEMLIVLGDNPERIHSEAAFARLCGTNPIPASSGKTTRLRLNRGGHRQANAALYRTVIVRMQYHEPTIAYVTRRTAEGKTKPEIIRCLKRLLAREVWALTRDFRQPQRA

SEQ ID NO: 399006 - protein, 381 aa, unidentified
MRPSARIGDCRVQANQEKSGGEEIEMAVYVGIDVHKKYCQAAIMNNNGHIIKELRFDNTTKEASNLITLAKSIDPQVQAVVEPSANFWIRIYDKLEQEGVEVKLSNPLRTKAIAEARIKTDRIDAKTLAYLLRGDLVAESYVPNRKNRERRALIRHRAGLIQMRVDIKNRIHALLDKHELQHSYTDLFGKQGLEWLRSLQLPTPDQQILQSNLHVVETLTEQIREMDIQIAKDATSEEKAKLLMTMPGVDYYAAMVLLSEIGDVHRFSSDEKLVSWVGLAPQTHQSGDSNWTGHITRKGSKRARWILGQCANIARQHDPRMREFYERIERRHGSQKAIVAVARKMLAIMYVMLIRNEPYRGENHELTERKHKRLDTLANSA

SEQ ID NO: 399007 - protein, 346 aa, unidentified
MGEVTTIGLDLAKHVFQVHGVDASGATVLRRRLRRSQVVAFFAALPRCVAGLEACATAHYWARELQAIGHEVRLMPAQYVKAYVKRNKNDAADAEAICEAVGRPSMRFVAIKTAEQQAALLLHRGRERLVRQRTSLVNALRAHLAEFGVIAPHGLRNVARLIAIVRDESDTRLPDLARRVLDVLATQLEQVAAAVAAVEKQLTAWHRDNPASQRLASIPGIGPIIATALAATVVEPIGFASGREFAAWLGLVPRQHSTGGKARLGGISKRGNRYLRRLLINGASANLLRSKATNADPWVIGLRRRRPSLVACGCVGQQDGARRLGGDAPGGKLPASVRGGINRRRT

SEQ ID NO: 399008 - protein, 392 aa, unidentified
MRIAVGVDIAKEVHWATALNEVGEALLDRRVPNDPRSLEELIEQLRALDAEITVGLDVVGGIASLAQAMLSAAGLPLVHVPGLAVNRARQGTTGGESKSDPRDARVIADQVRSRRDLRPIAAAEELDTGIRLLVGRRRDLTDEQTRRLARLRDLLTSIHPGLEREVDVTNKGGLWLLTRYVTPAEIRAAGQSRLVAYLRRAGNLRQVEKLAEAALAAARAQRIAVPGEAVAASLIRELAREALATRERLEGLDKELGELLARHPDAALIRSLPGMGAVLTAEFIAEAGTITRFRSADALAAAAGLAPVLRQSGKVRFLRRPAGGNKGLKRVFYQSAFCSLNTPSSRAFYQRKRTEGKRHHQALIALARRRIDVLWAILASRQPFSEEHRKVA

SEQ ID NO: 399009 - protein, 399 aa, unidentified
MKDSGKRYIGLDVHKHYLIALGVDEDLTVVLPARRVELSHLESWIKRTLTQQDEIVLEMTTNTWQLYDELCVHAGSVLVVHPPHVALITRSQVMNDKIAASILARLLAKGMLVGIWVPPQEVRELRGLVAQRKKMTGLATQAKNRLHAVLQRHHLLPPEGNPFHESQQDWWLALPLGTLEKVNVLSDLETLRFAQTQQFRLTSMMEEIANQQEQVTRLLQLPGFGVVTAVTVWAAIGNIQRFRDAQHLVGYAGLGTKVHDSGMTSRSGRITKAGRRDLRVVLIEAAQVAANSHPHWKAELARLEPRLGRNKAIVAIARKLLVAVWYILAQHRTDRFAQPEAIAQKFLKFAYQLGKENRPTGQSAAQFVRQRLDALQLGSELTSIAWGSKKPIPLPPQKK

SEQ ID NO: 399010 - protein, 419 aa, unidentified
MSCLTGPAGADPSDREGITIMTNQQHHVGGVDSHRDTVHVAVVTALGQPVVDQEFPTTAAGYRRAVAWLIEHGPLQAVGIEGTSSYGVGIAAAVTTAGIHVVEVNRTRPAERRKQGKTDRLDAYRAARSVLSGEATTDPKRASIEPLRALTVTRRSAVKAQQAAWRQIGSLLVNAPSHLRDRYRDLPQAKLIGALTGTRPDQVRDLGQADTLHALRSLARRHRHFGEEIADLEQRMLTRATAANPGLLAIKGVGPVVGAQLLITAGDNPDRLRSSASFAALCGTAPIPVSSGRTDRHRLSRGGDRQANAALHHIVKNRMTNDPRTRAYRDAHLDKGWSTKAVYRALKRAVAREVFAALNGHCAVPDYNDLRPARRAKNITLTTVATALEVWPARVGELELGRRRDDDFADRYRASDLRR

SEQ ID NO: 399011 - protein, 347 aa, unidentified
MAIVGGFDIHRRQVTFDYLDTVTGQVRRGRISPACRETLRHWLERFAGREDVTFAVEGCTGWQFVVEELQRAGITALLAEPAETAHLRGPKRHAKTDKTDSRHLRMLVADGRVPLSWIPPRQVCELRALLQLYRDLAEEHTAWTQRIHATLFHQGVPSLAGRLGDPQVRARLADGAGMGLSPAGAQAVAVALRRMDDLEAELGPVHARITAFARRQAGCKTLARELFGVGPLVAAIVWAFLGDARRFSSSAQAVRHTGLDVTVRSSGGKGPPGYLSHQGPPILRWALFEAGHQSSRTASPDHRYYADVAGRIDANRAALSVARKLARRSHHILRRLGDQAYAPVPDW

SEQ ID NO: 399012 - protein, 341 aa, unidentified
MKTFIRIGVDLAKNVFQLHGIEREDGSPFQRKLTRVKFREFFSRLTPCRVGMEACGSAHYWARVLGAMGHEVVLIAPAYTKPYVKRGKNDAADAAAICEAMSRPEMRFVPVKSADQQAVLMLHKTRDLLVKQRTMAVNALRGHLHEFGLIAAKGIHRVQELVALALADEGLPEEAKEAVTLLAGQSEQLDMKIDALEKQIAKASGKNPMSRLLKEIPAIGPLISSAMAASHPDPNVFKSGSDFAASLGLTPSQHSSGGKERLGSITKKGNRYLRKMLVVGCTSVLRVAHKYKGALAEWIIAIKARKPERVAAVALANKLARICWAVLSTGESFRQELYTRA

SEQ ID NO: 399013 - protein, 370 aa, unidentified
MLNTITTHFVGLDVHQATIAIAVADPGRGDPRVMPTIPNDFKTLIKSLKRLGDLDHVLCCYEAGPTGYGLYRQLKKAGVRCVVIAPSLVPVKSGRRIKTDRRDAAKLAGYLRSGDLTPIHVPDEATEAVRDLERARDDAKRSERVARHHLSKFLLRQGRIYTGATRWGKPHAGWIAGQTFEHPASQHVFGDYREAVELATARVERLTLRLREVADAWDRAPLIKALQALRGVEMVSSVTLVAEIADFRRFASAAELMSYVGLVPSENSSGSSRRLGGITRAGNGHVRRILVESAWQYRRPPGMSKSLRARNEGVEPEVRAIAWKAQHRLHSRLKKLLNRGKPANQAVTAVARELVGFIWAIARTEVLMAK

SEQ ID NO: 399014 - protein, 337 aa, unidentified
MNFSFHFFQDQFMKKIIIGIDISSKSLDICLQKEGKTEFITIANDVKAINGFFKKLAKQEVVVAMENTGRFNWQLYEALPKYNFAVYVISALHLKKSMGLVRGKNDRVDAERICKFIQKNQDECGVWKPVAANIQKMKVLLTERTSRIKMKRQLLAQQSDYKLMNTIGLEKQLAKMNQGLIESIQQQIEKLETEIEKIIKSDESLKEQAKQIQSVPGVGPITCWSMIAKTEGFTTITEPRKMACYCGIVPFDYQSGTSIRRQPRVSTYADKSMKSILHLAAMSAIRFDNKLRDYYQRKVAEGKNKMSVLNAVRNKIVHIIFALIKNQATYQDHLVLS

SEQ ID NO: 399015 - protein, 343 aa, unidentified
MQVSTIGVDLAKNVFQVHGVDSAGKVVIIRQLRRKQVIDFFSKIPPCLVGMEACGTAHHWAREVSKLGHTVRLMPPSYVKGYVKRSKNDAADATAICEAVTRSSMRFVPIKSADQQALLMLHRTRDLLIRQRTQLINALRAHLAEFGLVAETGREGLAQLAAIITDESNREALPSAMKQALQAIVDQLAALELQIGTLDRAIHAHHRANDMSCRLETVPGIGVIGATAIASTVTDPSDFKSGRDFAAWIGLVPRQHSTGGKERLGGISKQGDRYLRRLLVIGATAVVRHARQCPQKHPWVMKLLGKKPAKLVAVAVANKMARIAWAIMAKGGYYRAPELAAAA

SEQ ID NO: 399016 - protein, 334 aa, unidentified
MTLFVGIDVSKYKHDLAILDEHGEILSKHFRFANTYQGFQKLKEHLETLELPTSELRIALEDTGHYADNLIAFLQNIGYPTFTYNPLIIKEFVKSLTLRKSKTDKKDALSIARKLLADPTPERYTVEPQLQELKELTRYQNRLIHERSKNKTLYVRTLDIVFPEFAKIVKNVHNQFVYDLLSKYPSPQKIKRAHFQSLLTIKRLTADKIKQIQEAAHLTIGNSSLALQLELTQLIDMIRIQTIQINKVQEQINHLMTEIDSPITSITGIGQRLGAIILAEIKNIHNFKTPSQLQAFAGLEPSIYQSGTMDNRAYGQAWFVLLALCTHSSSQVNR

SEQ ID NO: 399017 - protein, 385 aa, unidentified
MNQTSCFATSTHALHCALELSKKSWLLAIQFPDREQPSVYSIKGGDTEKLMAKLTAARDCWAKVSGSLPVITLCYEVGYDAFWLARFLKARGIECLVIDPGSLQVNRRGRRVKTDRVDVKMLLRTLIAWCRGERHVWSPVRIPSVEEEDLRRSHRERSRLVRERTAHINRIKGLLFAQGIRDVNVKSQYKTLAVDRLLTADGHRLPPRLASEIARELQRLAMVQEQIAEIERERDTAPTPCEATERKRQLLLQLKSIGPAISALLSREVYYRQFANRRQVGSFLGLTPSPYSSGEEERCQGISRAGSGQVRAIMIETAWLWIRHQPKSALTRWFVERTAGQSTRMRKIMIVAVARKLAIALWRYVEQGLVPQGAILNPPTTGRAR

SEQ ID NO: 399018 - protein, 323 aa, unidentified
MGGCGLSTESNKVFVGIDVSKKRLDVALWPSRKHFSEPNTHAGIQTLVERLQQLEPQLIVLEATGGYELPIAFGLVQAQLPAVIMNPRLIRDFARSTGKLAKTDKIDARVLAHYAAVIQPEMRSWKEAELLELQSLLSRRRQLQEMVVMEENRLQMATPRVRPSVESAVQHLRKLLADLDREIEDFIRRTPMWQEKAEMLQSVPGIGPVTAMKLIAYLPELGHLDSKEVAALAGLAPINCDSGQQRGKRRIRGGRTEVRRALYMSALVAAQYNPLIRAFYQRLKEAGKPFKVALTACMRKLLVIINAMLKHRTHWNEAVALAV

SEQ ID NO: 399019 - protein, 406 aa, unidentified
MEKKEKRYIGLDVHKHYLVALGVDADLNVVLPMRRVELSHLESWMKKNLTKQDEVVLEMTTNTWQLYDELSEHAGTVTVVHPPHVALITRSQVMNDKIAASILARLLAKGLLVGVWVPPQEVRELRGLVGQRQKMTRLATQAKNRLHAVLQRHHLKAPAGNPFAKTNNGWWQALTLGKLEKMNMQSDLETLQFAEQQEVRVEKEMTLIAADDEKIGRLLQISGFGVITAVTVSAAIGDITRFIEPKKLVGYAGLGARVHDSGLTTRTGKITKAGRRDLRVALVEAAHVAANNHPHWKAELARLQPRLGYNKAIVAIARKLLITVWYVLQGKSDKYAEPKAVAQKMLKFAYSVGKTNRAGKTAAQFARERLDGLEMGEGLSSIPWGAKKPIPLPPSTLKGRSAVPNK

SEQ ID NO: 399020 - protein, 341 aa, unidentified
MQDVTLVGIDLGKHSFHLHGQDRHGKAVFRRKVSRKQLIEFFSTFHACRVVMEACAGAHHMARKLAGFGHQVRLISPQFVRPFVKSNKNDFVDAEAICEAASRPSMRFVTPKTESQQTLSALHRVRESLIRDRTKTVNQLHGFLLEFGISLPIGMAVIKRLPAVLAEHPLPPRLIGILERLHAHFKYLSEQICEIDREMARQLADDELGQRLLTIPGVGPVTASVLAAEMGDGKQYGCSRDFAASVGLVPRQYSTGGKANLLGISKRGDKNIRRLLVQCARAYMQRLDRQTGRLAEWVRAMLTRRHSNVVACALANKFARTAWALAARHTTFDTGVSPMPA

SEQ ID NO: 399021 - protein, 388 aa, unidentified
MNYAGIDISKYKHDCFILSDFGEVIHAGFSFANNAEGFKTLEQELRKCGKGNVRIGLEATGNYGINLKLFFEKIGFDYMEINPMLIKQHIKSTTLRRTKTDKLDAKAIADYIREREYRPNQGGFYGLFALKQLTRLRSRLIGIRSRYLVRLTNVLDCTFPEFKPFFGNRFSLTALYILANYKTPEAIANMNSRSYDILRRKSRGSFSMDKFVTLKALAKNTIGVSHKCYVVELDSLLDLYCQIDAEIEELETEITQTLEMINPPTLSIRGVGSVSAAVIISEFGDISRFDGPNQMLSFAGLEPGYFQSGTAEHKGRMVKRGSPHLRCVLINCCRSMRLHNEVFAAYYRKKVAEGKPESIALSHMAKKLIRLIYALETTGVPFDPEKLR

SEQ ID NO: 399022 - protein, 343 aa, unidentified
MQVVRIGLDLAKYVFSVHGVDAHGKSCLRKTLRRDAVARFFANLPACLVGMEASNGAHYWARVLTDLGHQVRLISPQFVTPYVKSNKNDRNDAEAICEAVGRPSMRFVPRKSSDQLAVQAVHRIRRRLVADRVRLVNQIRGLLSEHGIVIARDISQLRRGLAFIVGNDNDGLSEMVRSLMRELQTELAELDRRIASYDRRIREIFRANEQCQRLGKIEGIGPVTATALIAAVGDRACFKNGRQFAAWLGLVPKQRSSGGRARLFGISKRGDRYLRTLMIHGARAALSRAGGKQDPRSLWLGKVRQRRHPNVAAVALANKNARIVWAMLSGDTAYEPAQSVKAA

SEQ ID NO: 399023 - protein, 400 aa, unidentified
MLSIGIDVSKGKSTVCGMKPGGEIVYAPFEVQHTREGMSELVSLLHNSGEEVRAVLESTGSYHCPVVAALLENGIFVSVVNSLRMKRFCSQSIRKVKTDRIDAMQIALYGLAYWQELQPARLPEDTYRELQLLARQYYQMTSMLIKAKVDFNALCDQALPGMQELMNDHAGRHKLSDFVLRYRHTTHILEMGETRFRKDYCKWAEKKGYRNCERMAAHIFATAQNGIPVLPNAPSTQIVITEAIRVLHTVEASRDAILTQMQALAKTLPEYSLVREMPCIGDTLAPRLIAEIGDVRRFHSKRALIAYAGIDAPPYQSGKFRANNRHISKRGNRYLRKTGYEVMQSYVMHKPANDPIFTFIEKKRSEGKCGKLAMVAGLNKFLRVYYGKVTELYRSLSAIE

SEQ ID NO: 399024 - protein, 400 aa, unidentified
MTTIAKTTAAETILAIDLGKYKSVACIYRSADDQRFTTFPTTRVELTRLIEKHRPDVILIEACLLAGWVRDLCVEKRVRCLVANTTSEAWKFKHLKRKTDRDDALRLAEVYRLGKFPSVAIPEKEVREKRGLIETRQKLVGRRVALQNRIRALLVAQGLPAPCGHKAWTEIGLAGIAAHAQPIAACGPLDLWRGRLHLALTELAHVKGLLALAEQKLDELAKSNEGMKLLDTIPGVGPRTAEAVVAFLPEPKRFRTTKQVSAYGGFVPRQYQSTDTDHRGRITKRGPKTLRKLLVECAWVMLRYNAWARAVYQRLTHGGKTRKKQAIVALAQRQETSCSIVRRTAGVSRPVGRTYQPADAGRSPKRSPDPALARKLLVRCWAMLRDGTPWRTETPAEGAT

SEQ ID NO: 399025 - protein, 367 aa, unidentified
MKKGSTAAKQRVRNISGQTLTIGLDLGDRNRWYCVLDEAGRIQLEQRVRTNAKALQEVFGAMPRNRIALEIGTHSPWVSRLLSELGHEVIVANARKVRLIGESRKKDDRLDAQTLARLARIDPELLYPVKHRSAQAQADLMMIRGRAGLVRARTGLVNTARGLAKSYGERLRGCNARHLNPEKAEGLSPELQAALEPLLNAIESLSERIVEYNERIEKLAQQDYPQVALLKQVKGVGTLIALTYLLTLEDPHRFQKSREVGCYLGLQPGRRNSGRSEPQLHISKEGDPYLRTLLVQGAQHILGPFGIDCDLRRWGLRLAERGGKSGKKRAIVATARKLAVLLHHLWVSGEAYEPLHTRNRVAVAAAA

SEQ ID NO: 399026 - protein, 350 aa, unidentified
MAVEKPETEAKDIMYAAIDHHKAVFQAATLDPETGVAGDERFQGSRDGLGIWMERWQGRVTDVALEASTGWRWITQELEAHGFRVHLADPAEARAKRGRTKKAKTDKLDARWLVLLLCKQDLPEAWIPPEEIQQLRAKTRLRKALADDRTRWAQRLHAVLHHEGWPCRRSQLLTKKARQWVAALRLPGAAQQQVTAYQFLIETLEAQLQPLENELRHFAEGDPRCQALMKLFGVGPIIACHLLAEIGSALRFRRARQLVRLSGLDPIVEESGERRRRGKLAKQGPPLLRWAAVEAAQHGRRFNSPDRHLWAASSRRSGPNRATLTVARKLLRRSYHVLRRIELGEQEVAA

SEQ ID NO: 399027 - protein, 386 aa, unidentified
MSRPSNIPLRAINYDHTLVLAIELSNKSWVLAAQVPGLPRTKAQRTIEPNKNALLAAIDGYRARAAAVGYAVDRVITTYEAGWSGFWLARWLVALGVEVHVVQPSSVPVDRRLRRAKSDGIDAELLLRTLLAWLRGEPRVCSMVPIPDEADEDARRCVRERTELLSDRVGLTNRIGAVLATLGVNDYNPLLQSRRRRLAELRTGLDEPIPPNALAKIERLLARLELVLAQIAELERERDEVAAADAPDRAGKMIQQLASLRGIGVQSATVLVREAFVRHFPNGKALGSYAGLTSTPYSSGGIDREQGIGKAGNRRLRTVMVELAWLWQRYQPGAAQVAWFRDRVGSTGRRIRKVMVVALARKLLIALWRFVIDGVMPEGAVMKPSI

SEQ ID NO: 399028 - protein, 321 aa, unidentified
MSESSVVVVGIDVAKDHVDVAMVGASLTPMRFDNEIDGHTALIAALQPLSPQLVVMEATGGYEAALACALQAAGMAVAVVNPRQARDFAKALGRLAKTDRIDAEGLAEFGRMLLTRPDLARYLRPLETPAQQDLAALVARRRQLVTMLGMERQRLAIARPAVRRSVQALIRAIEKQLDQVDGEMTRHLTTHFRELEQLLRTTGGIGPVVSATLIADLPELGRLTRRQIAALVGVAPMAWDSGQMRGRRRIQGGRFEIRRALYMATLVAARYNPVIRAYYERLVAAGKLKKVALVACMRKLLTILNAMARTGTAFNPEHHHA

SEQ ID NO: 399029 - protein, 343 aa, unidentified
MKITTAGMDLAKNVIQVHGVGARGNAVFKKPLKRSQVLPFFANVPPCLIGMEACGSAHHWARKLEKLGHTVKLMAPQFVKPYVKTNKNDAADAEAICEAVSRPNMRFVPIKNGEQQAVLALHRARQGFVRARTAQGNQIRGLLTEYGIVIPQGICHITKRLPGILEDGESDLPGMFRQLLQRLGEHLKELDRQVGELELQIQLWHRQHDASCKLAQIPGIGPITASALVASIGDAKSFENGRQLAAWLGLVPRQHSSGGKSTLLGISKRGDTYLRMLLIHGARAVIRVAERKVGYAQSWLARLIGRRHPNIAAVALANKNARIVWALLRHDRIYQPAYQSPGA

SEQ ID NO: 399030 - protein, 345 aa, unidentified
MELHTIGIDLGKTVFHLVGLDLRGEVVVRKKLSRKQLLHYTVNLHVGLIGMEACGGAHFLGRALRGQGHEVRLMPAQYVKPYVKTNKSDFIDAEAIAEAVARPTMRFVPIKTDDQLDMQSLHRVRERWVMRRTAIVNQIRGLLLERGITLRKGRRYVDEALPSILEDATAKLSGALRILLAQLKLELDQMAVRINEADAVLNQTARENAAYQRLLAIPGVGPVTSTALIAAIGNGAAFHKGREFAAWMGIVPREYSTGGKQKLLGISKRGNTYLRTLFILGARAVLQQKAKQTSGLRAWLAQLSARTHPNVTVVALANKLARIAWAVLAKNEVYRPQVLIGPAAV

SEQ ID NO: 399031 - protein, 394 aa, unidentified
MLKKMLANVPIGAGLVASASAASRRDQTGRREIEYPLANQAAGERDPRRPCGKIPDSRLSRRRTTRPSSSHRQDREIAMSEPLYVGIDVAKDSFDVASDPAGFVLSLPNDPPGRQHLLDALRNHTVALIVMEATGGYERTLVADLLGAGHKVVVANPRQVRDFARGIGQLAKTDRLDARVLAQFASMVKPEPRQKASEQAVNLAELVTRRRQLSDLMTQESNRLPHARHPHVQRSLKKSIRTLEKQIDDLDKLIRQNIDSDDGLRRKDEIVQSFKGVGPGTSAMLLSHLPELGRINRQQIAALAGLAPWDFQSGQWAGQSRIWGGRMPVRNMLYMAALSAIRSNPIIRKFYQRLESQGKKFKVAITACMRKILVILNTLVRNDCLWSPPTPENA

SEQ ID NO: 399032 - protein, 343 aa, unidentified
MKLSRVGVDLAKNVYQLHGVDRHGKTVWKRRLRRAQWLQALLDNTDPSCEIGMEACTGAHHWARELQSRGYTVRLIAPQFVKPYVKSNKNDANDAEAICEAMSRPNMRFVTVKCVEQQDIQATHRVRTELKNHRNAKGNQIRGLVAEYGLVAAPSLLALRRAIPEWLEDAENGLTDNFRCLLHGLWDDLLTLEDRFKELDKEIEKLARSNEVTKRLQQLRGVGPIVATALVATVGTGEQFKNGRQMAASLGLTPRQSSSGDKCRLLGISKRGDVYMRTQLIHGARAVVSQAKNRDDPLSRWATDIAKRRHPNVAAVALANKTARMAWAMLQNETDYDPNLAVG

SEQ ID NO: 399033 - protein, 413 aa, unidentified
MVKREKIELVKRQRIFVGIDIAGSKHRARFIDNMGEEQIKPLSFFNDREGLEKLERRVNEIPRIGDDIIFGLEPTGDYWKPVAQYLREKGYPVVLINPYHLKRTKEIIDNSQDKTDDKDSYLIADLTKQSKYFFPVIPEGVYAELREVSINWKRTSQQLARLKCHLSNFLAKYFPEYKGIFSDILGKTSLYILKHFPLPEDIERLGINKLYRVMKKVSKGSIKEGKIQLLYEKARTSIGLKGGSQTAKVLLKEVLSDIEILKKRKEKLTKMMDELLYQSGYRKNLLSIPGVGIVTGSLFLGEIGDPDNYERASQIEKMAGLNLVENSSGAMKGEKKISKRGRSTLRYVGHLVATVAIGKSPEIKALYRYKVEECKKEKMKALTGLSAKMLRIMFAVCKNKTFYKHEEITRYFR

SEQ ID NO: 399034 - protein, 388 aa, unidentified
MPQSNDLSRSLAAFDQDRTLIAVIEMSQSNWLVAGLVPGLERRPLKKLSPDEDALLKLVQRWRNEAAQAGREITRIVIAYEAGRDGFWLARWLRRRGIEAYVIHPSSVAVSREHRRAKTDRLDTELLMRAVLGWLRGEKRHCSMAAIPTIEDEDAKRPSREHEKLVGDRTRLVNRMKAMLARFGIRTFKPTLRKAADRLDDLRTAEGTPLPENTRAELRRDMMRLRMVREQIKEIEQERLRKLTAAPAEKGPPTMVRFIARIIGIGIETADMLVSEILSRGLRDSKAVARYAGLTGAPDESGRRRREKGLAKAGNARVRRGMIQLAWRLLIFQKDSALAQWYRARTANARGATRKRMIVALARKLLIALWRMATTGEIPEGISLRAAP

SEQ ID NO: 399035 - protein, 353 aa, unidentified
MTGPKYIGMDVHKESISIAVRNDAGKIVMECVIETKANIILDFIHGLRGELQVTFEEGTWATWLYDLLKPHVTKLVVCDPRKNSRQGNKNDRIDARELADRLYMNKLSSVYHGGGGVRTLKELARSYLTISKDLARVMSRVKAIYRGWGIPCAGKQVYAPRHRAEWLAKITEVGVLRRAEFYYQQLDALRSLRHEVRRALLAESKKHKATKLLCQIPSIGPIRAALLIALIQTPHRFRTKRPLWKYSGFAIETHSSADYRSVKGQLHKSKKQVSVRGLNRDCNHDLKNLFKSAATIASVKPGPFQEFYATLLAKGMRPEMARLTLARKMATIVWIVWKRGVSFDAKYLKPQTA

SEQ ID NO: 399036 - protein, 420 aa, unidentified
MKVVYQTCCGVDVHKSFLVATIIKTTSGVQPSYQKKRFSTFNNSILEFKKWLLDNSCRDICMESTGKYWVPVFNLLEDEINVTIANPKWVKAVKGNKDDTKDSKWIGDLFRLGLVPGSYIPCKPIRILREFTRYRYKLVSARSSEKNRFQNSLTVCNIALDSVVSDIFGKSATSVIDYLLEQSDNSINHEEISSRLLRSLKKKSESVIESIEGYQMTDSQKYRMRLVHAHMDYITSTIADIDSMIDSLVEPYDSAIKLLCTIPGVDRNSAVTIISEIGTDMTQFSNSKRLCCWAGLTPGNNESAGKKKSVRITRAGVYLKPALVQVAHAAVKSDKSPYYKAKYERIMKRRGKKRAIIAIARMILTAAYHMLSTGEVWNPTDLYKIDMPEPLKNKQKEKAIKQAMKLLIAEGILEESPIAS

SEQ ID NO: 399037 - protein, 419 aa, unidentified
MRIVYPICCGVDVHKTFLVATIITTQGIVPSYKKKRFSTFNKSILAFKQWLLDNNCFDVCMESTGKYYIPVYNLLEDSIRVTVANPKWVAAVKGNKDDVKDSKWIGDLFRLGLVPSSFIPSKDTRVLREYTRYRFKLVSCKSSEKNRFQNAFTVCNVALDAVVSDMFGKSASSITDYLVNSDSFDPMYCISLLQRSLKKKADEVIESIEGFQMTTEQKTRIRFVRKHLEFVEQLIAGLDKVIDGMVQPFENAIALLCTIPGVDRSSAITILSEIGTDMSQFSSSKRLCCWAGLTPGNNQSAGKKKSVRITRAGVYLKPALVQAAHAAVKSNSSPYYRIKYERIAKRRGKKRAIIAIARMMLTAAFHMLQTGQVFNPCDLYQIDMPVELRNKQKEKALRQAAKLLVAHGVVSPEHIMLPA

SEQ ID NO: 399038 - protein, 313 aa, unidentified
MHLGIDVSKQTLDCCLISDGIFYERKFYNDSSGMNKLQKWLDEHGADHTLHCCCEATGTYYETVAVALSGQYKMSVVNPRTVKGFGAAVLNRIKTDRQDAKLIARYCQAMKPEQWQPLKPEHRQLQELVRYIARTKRQRAAEQTKRQTAPDYLKPHIQSTIEHLTELLNRLEQDLKAHYRSHPEQDKRRKRLKTIDGIGENAAAVLCSIITDRFTHAKQFVAYLGLDPKQHQSGTSVNGRTRISKIGKSDIRAALYMPALVAYRIGAFPDFTARLKAKGKPPKVIIVAIMRKLAVIAFHLLKNGENFDRSRYH

SEQ ID NO: 399039 - protein, 387 aa, unidentified
MNVVTDKSEPLTAIHTQLGAIFVSLELSRSSWLITSLSPGGGEKMSKHSVRGSDFAGLMQRFAQLQEKAKLRTGRSFRIIVVHEAGLDGFWLHRALQNEGIESHVVDAASIATSRRRRRAKTDKIDGETLVRTLLAYKRGEPRVCAMVKAPTPGEEDRRHLCRERKALTAERVRHVNRIKGFLFSQGISGYQPLRRDRRQRLEELQTGDGRALPQHLKALVSRELDRLELLLKQIKTVEAARDELLAEEQTAKLAPAPMLLDIRDIGPEFAAILWSEGLFRPFENRRQIAAYAGLAPTPWQSGTVDREQGVSKAGNPRLRTTSIQLAWLWLRNQPRSALSVWFHERVSRNGGRLRKTTIVALARKLLVALWKYVTAGVVIEGVTMKA

SEQ ID NO: 399040 - protein, 413 aa, unidentified
MEVVYERCAGLDVHKKTVVGCAIVPGAAGHPRRAIRRFETMLDELAALAWWLAEQGVTHVALESTGVYWQPVWNVLEAHGGFALLLVNARHIKAVPGRKTDVRDSEWLAELLRHGLVRGSFVPDRAQRELREVTRYRTALIEERSAHVNRLQKTLEAANIKLGSVASDVTGVSARAMLAGLVAGPAAPATLAALAVGRLRDKLPALERALAGRFGDHQRYLVPRILAAIDFLEAEIADLDARVAELERPFGAAVDRLDAIPGVGRRVAESLVAEVGPTVDRFPTAQHLASWAGLCPGNHESGGKRLSGKTRKGNRALRRVLVQAAHAAARARQTYLSAQYRRLAARRGKKRAAVAVAHSILVITYHLLLDPTVPFHELGPDYFDRRTSDATRRRLVERLEHLGFDVTLTRRVA

SEQ ID NO: 399041 - protein, 387 aa, unidentified
MARKRTLSTLDTSIAYEAVGLDLAKTDVALAAFDSDHKEPYLIDRIPYDKLYELLADMAPTLVAMEPCSGAHQIAEQIQELGHEVMMISGRHVQAWVKDHCNGQKTDLNDAFAILNLAYDRWLTPIRGKTREECRLLALQASYRQLKGQRTKTMVHVEATLHAWGFPIRTGSFNQKALHELIDANREAFGDEVVETLHLMINRVHDLDHDIATVLKLLTEATQRDPRASLLRSIPGFGVLTTSRWCAVVGDIARFDSPKQTMAFIGLVPNNRITGHHTETSSGREARGQGKMSKRGDKMLRSLCILGAGALCLMVRNDRLPDCPFVASIKERLASPRPWFKVLVYVAAKLVRIATALLKYGETFSFEKAGISKAVLKQWELEQAKAA

SEQ ID NO: 399042 - protein, 370 aa, unidentified
MLNTITTHFVGLDVHQATIAIAVADPGRGEPRVMPTIPNDFKTLIKSLKRLGNLDHLICCYEAGPTGYGLYRMLKKAGVRCIVIAPSLVPVKSGRRIKTDRRDAAKLAGYLRSGDLTPIHVPDEATEAVRDLERARDDAKRSERVARHHLSKFLLRQGRIYTGATRWGKPHTGWIAGQTFELPASQHVFSDYREAVELATARVERLTLRLREVADAWDRAPLIKALQALRGVEMVSSVTLVAEIADFRRFASASELMSYVGLVPSENSSGSSRRLGGITRAGNGHVRRILVESAWHYRRAPGMSKALRARNEGVEPEVRAIAWKAQHRLHSRLKKLLARGKPANQAVTAVARELVGFIWAIARTEVLMAK

SEQ ID NO: 399043 - protein, 369 aa, unidentified
MNTIYIGVDFHARQQTICYLKTETGEIVTDELKHEDKQQVRAFYAQFEGPVIVGLEASGFSPWFEAMLEQLGCQVWLGDATEIRRRARWRQKNDRRDAELILDLMLHNEFPKLHRPAVQSREVMRMLRYRHKLIKLRTMSKNSLQAVALQAGLAKRSSLFTKAGKEQLLKAEMSPVMRWQCEHWLQLLEPLNQQLLESMLWLKVQTKDDDRIKRLRTHPGIGLLTSLCLVHTLEPIARFSNQRKVAAYAGFDPVERSSAERKCFLGISKAGSRILRHLLVEAAHSAVRKDEDLNRFYKRLAERRGRPKAKVAAARKLLIRAYIMMRDEIDYAEFRRRAVAARLARAGCRPNMPDFLIGQPASTECRERK

SEQ ID NO: 399044 - protein, 424 aa, unidentified
MQNIAARKRKQVPEGYLVVGVDPHKKKHAAVAITQDFTTQAKFKFDNTREGLEMMLDRARVEMLKSGCRGIIFAIETGGHYWRNIAYYLDERSIPFRFINQYTLKRRREGKDLNRRKNDYRDSEVAAQLLCTGEFVESVIPQGVYAELRTSHNAYQRLVKERTRIINLVKGLLDALFPEFTRVFKDPGGLTALSVLSTCPIPKVIIGMTGDEFVATIEAQHKGRRLMRKKLRALHYSAKTSIGIDAGARSVSYEIAFLVAKLELIRRQIGIMEGTLVRLVDETEEGKYLLSIRGLNYIAVAGLLAELGCFKLYRSAKQMIKMAGSNPTESESAGKKRAKTPMSKQGRPLLRYCAWTAVIPMLRFNTDFRAWAKQRRERPAHANPLSGREVVGAALNRLLRLAFALVKNQTYYQDVKPSLIPVAV

SEQ ID NO: 399045 - protein, 345 aa, unidentified
MIIGCDFHPSWQQIAWLDSETGETGERKLVHAAGDAKVFYQQLAAPARIGMEATGNSQWFIELVQDLGHEIWIGDAAQIRASYVRKQKTDKRDAAHILKLVVEGRFPRLWTPDGEQRDLRQLVLHRHKLVEIRSRVKNELQHLALNKGMQRKAKLWSQAGQKLLRELPLKPWAACRREDLLGLLALLNQQIGTLDQAVQQAADQHPQAKLLMTQPGVGPNTALAFVLTMGDVSRFPRGKQVASYLGLIPREESSGGRQKLGAISKQGNRLLRSLLVEAAQIAVRYDPGLRKQYLHRCHQKPKGVAKVAAARKLAVRLYWMLRTGKPYPEIVRIESSPRVALVGAS

SEQ ID NO: 399046 - protein, 409 aa, unidentified
MMKQNIIFGIDVSSKSSTVCVVIDRIKQGETFKITNDSFGYQDLLDRLNQYLITPLVVFEATGVYSLSLQAFLEDYHIKYLKLNPLKAKKLMDNNLRHNKTDKVDAYRLALIQFNAPQKLRAPQPKEYHELQNASRYYEELTQALIINKNQLHRNLQSTFPQIESILSTSSGRVYWTIVSLFPHAQYVLNHNENQVFQSLLAISGIGRQRAHYLTTRLYALARQAYPYDNESSITIRAIQRNIANLLSLSAERDNVINYMEKLAMQANARSLTIYESIPGIAKTTAVRLVAELGDLSRFDTSAQIDAFVGIDPGRYQSGEKDSHLGITKHGNHLARKILYRTITQMETVKATQPCHITDYYDKKKRSSNSRGYKKIAIASVHKLIRTMFALIKHDQLYDYNVATHNQRL

SEQ ID NO: 399047 - protein, 347 aa, unidentified
MAAVMIGVDPHKGSHTAVAIDTAEEPLGEVRVRACAAQADRLLAWAAAWPQRVWAVEGAAGLGHLLAQQLVAAGEQVVDVQPKLGARVRLLASGDTNKNDPNDARSVAIAALRSPARRQVAPDDHAAVFKVWSKRHRDLGRSRTQVVCRLHAVLCELVAGGVAKEITAGHAARLLESITPPGAVEAARCELAAAFLDDLRRIDAQLLETKKKLNAAVRASGTTLTSIFGVGPVVAATVIGDVRDVARFPGRDHFAAYNGTAPIEVSSGRRKIYRLSRRGNRRLNHVIHMAAVTQIRYRHSEGRAYYERKLAEGKTPKEALRALKRRVSDAIFAQLQADTRRAAAGSR

SEQ ID NO: 399048 - protein, 382 aa, unidentified
MVDKARFATTTAGLAELAEWLADREVTVVGMEATGVYWKAPYYALEGRFEVWLCNAQHVQNVPGRKTDLADAEWLADVVAHGMVRPSFVPPPPIRELRDLTRYRKRQVDVHAAEVQRLEKVLQDAGIKLTSVASEVLSMSGRHMVEALITGQQDPATLAQMAIGRMRNKLPELKEALTGHFGAHHAAVARQILDHIDFLDARIAAISEEVAVRILPFDAAMQRLIDVPGISQISAEVSIAETGGDMSRFPTPAHLASWAGLAPGNHESAGKRRRVGTRPGDRWLRRVLIEAARAAARTKGSYFGAQYRHIAQRRGPNKAAVAVAHSLLDLVWHLLSTSEQFEDLGADYFQKRHDPEREARRLVRQLERLGHRVSLTPAPSTA

SEQ ID NO: 399049 - protein, 372 aa, unidentified
MKEMIRFIGLDVHKDFISVAIADEGRGDVTSYGEVANTSSALSKLARKLSRHGCDLCFVYEAGCFGFVLYRQLTKMGHSCVVAAPSLIPRKPGDRVKTDTRDALKLARLLRSGDIDCCHVPDESDEAMRDLVRAREDAVCAYRVSRQRLNGFLLRHGKVYGGKSRWGTTHMRWILDIKLPHEAQQVVMEEYRRRVEHDADCVDALTAQVRRLNEAWRWAPVVNALQALRGICLITAVTVVAEMGDLRRFAHPKQMMAAVGLVPSEYSSGGKRHQGPITKTGNGHVRRILVESGWNYRFPARLTRHMERRQRGLDKAVVDIAWRAQRRLCARYNQLNMRGKNIKLITTAVARELCGFIWDIAQQTEPKANLNR

SEQ ID NO: 399050 - protein, 318 aa, unidentified
MNLPSPLPAVTHLGLDIAKRTLDLSTHPALAQRTYTNDPAGHRAFIAAVRQIEGPIQIICEATGGYEHQLLAALHAAQIPVTLVNPRQVRDFARAKGLLAKTDVLDAAVLAEYGRMFQPAPAVALTPAQQRLTALVTRRQELLEMITAEQHRGEHHHDPFVVKKARSLTATLRRHLDQVEEEIVALEKVDAPLAAQVQRLTGIQGVGRRTAWLLLAALPELGTLARGQAAALAGLAPYNRDSGPQRGQRHIAHGRPLARGALYMAALVAARFNPVLRPFYQRLRAAGKPGKVALVALMRKLVELANLLLKSSSLQLTQ

SEQ ID NO: 399051 - protein, 318 aa, unidentified
MDEDVYVGIDVSKTELVVAVRPSGQSFTLAYDRVGLKQLVGRLGELKPKLVVVEATGGLQRQVVAALWTGGIAVAAVNPSWVRSYARGGGLLAKTDRIDARLLALFAQREQPVPRPPLDAETQALQELATRRDQLLEMRVAEQQRLKRSSAQVRKELRQHIAYLEGRITQIDDDIDKTVRRSEAWRRKSEVLRSFPGVGKVFCTTVLSKLPELGTLSGKAAAALVGIAPFPDDSGARRGRRVIRGGRYPVRSKLYMCALSAIRFNPLLKQFYERLLARGKLEKVALVAVMRRIIVILNAMLKTNTTWRQPCAVALDKN

SEQ ID NO: 399052 - protein, 414 aa, unidentified
MRVVGLDVHKKFVVASIVEVSFLEKEDDKPDIMVRVVARRKFKRDWEDLDNLADFIRENGANKVVMESSGPYAHMVYYALEAIGLDVWMAHPRDNKPQNQIKTDMLDAERLAKKFVSGELRAYKLPSDPKLRSLRRLTRLRSKLVEKRAAIKNEIIMVLDEAGLDIKRAFSDLGKGASILIKGLLRGWSIEKIIQSCPSLAKKKEEIERLMKQRGRIDTTMAFILKSLLRLLREIDKHISSVEKQIESVLSEFEEEVRLLTTIPGVGVQLAAVILAEIGGISRFASPKKLASYAGLVPAVYQSGGKTIYGKLRKDCNRRLRWAFYETGLHAIRFSPRLRSFYERLISRGKKHKQAIIAVGRKIAVGMWHILTKKVPWNENVKQGYKPRQRRLRKISLDKAIDILRELGYMLSIE

SEQ ID NO: 399053 - protein, 338 aa, unidentified
MKLYCGIDLHSTNNWLGIYDEEDRAVVSKRLPNDVGVVLESLEPYKAELAGIAVESTYNWYWLVDGLMEQGYRVLLTNPAGNEQYKGLKYTDDRHDSRWLARMMRLGIVATGYIYPKEERPIRDLLRKRMRLVQHRTAHIVSVLNTIARNTGSSLSWSKIEEMSDDQISKLLGDELIGMAPRASLAVIKSLDHEISKIEKTVKARAKLRSEYKLLKTVWGVGPILALTIMYETGEISRFSQVGDYCSYARCVGSVRISNGKKKGENNTKNGNRYLSWAFVEAANFASRFYPQAHRFIQRKRARGNHTLAVKALGHKLARASYYVMRDQVEFDPGRLFG

SEQ ID NO: 399054 - protein, 463 aa, unidentified
MTWKGNKVKSKERKRLSRSLKTIQENAAGIDLGSREHWVCGPPLKDGAPNVERFGTTTPELLRLADWLKAQAVKTVAMESTGVYWIPLYEILDSHGFEVLLVNARHISNVPGRKTDMLDCQWIQLLHACGLLRGSFRPSDVICRLRALIRERNTMVDQRSDWVRRMQKALDQMNICVHHAVSDITGLTGMAIIRAIVNGERDPFVLARLRDARCRKSEKQIAEELTGNWRLEHLFNLRQSLKMYDQICKVIEEYDTEILTYITKHQPKDATPAPPHCSKSKARNLAKRGQEPLRQALYGFCGFDLTTIDGIGVDTASVILSELGLDLSMFPDEAHFVSYLRLAPNLSISAGKKVPSKFKLTTCTRVSNALRMAASTLRNSKSALGGFYRRLAWRKGASVAIFATARKLAQLIYRLVHYGQAYIDIGAELYEARFNDRRFKFYTKALREMGYTVQPLTENTLAQ

SEQ ID NO: 399055 - protein, 343 aa, unidentified
MQAITTIGLDIAKSVFQVHGVDPDGHVVVRRQLKRRYVLAFFEKLAPCLIGIEACASSHHWSRQLQALGHDVRLMPPSYVKPYVKRQKNDATDAEAICEAVSRANMRFVPTKTPEQQSGLVLHRTRHLCIRQQTSVINAIRAHCAEFGIVAPVGRRGIEELLNVIANANDEQVPEIARACLSALGDQLHRIKAQILAFDRMIGAWHRSCAASKRLDEIPGVGPALATALVASIADPRTFRSGRDFAAWIGLVPKQSSSGGKPRLGSISKQGDRYLRGLFTAGALAVIRYAKIHRIGHRPWLTALLARRPTKVAAIALANKIARMAWAMMARGERYREPAALAA

SEQ ID NO: 399056 - protein, 327 aa, unidentified
MHNIITGVDLAKEEIQVCVCKRNKVQSNLAMTPTEFGSWLASSKPMIIVFEACSTSNYWKQKALEYGHDARLISAKLVASVRQNQKTDKNDALAVAQAAQLTDVSFINGKSKEQQELQTLVRLRELAIKHKVAMQQQIKSLLLEFNIRVSSSQGGLNGVVENVLEDAENGFSMIFRQALNTSWKQLQRSIESIKQYDLYIEKAANEHETCKSLQALEGVGPLNAVNLYMALGCGEMGQFKKGRDASACIGLTPIQHSSGGKVKLGSVGKYVKNNMLRSCLVSGAMSAVNQAMRRPAKTKKERWIQQMVERRGKRCTAVALANKTVRT

SEQ ID NO: 399057 - protein, 374 aa, unidentified
MKKDTRFVGLDVHKDTIAVAVAESGGEVRSLGTIPNLADSVRGLIRKLGGPAGLRVCYEAGPCGYVLYWQLAKLGVRCEVVAPTLIPVKAGDRVKTDRRDAEKLARLHRAGELTPVWVPDAEHEALRDLVRAREAAKSDQRRSRQRLLKFLLRRGCTPPAKMRSWTDKHRAWVMELKFEQRALEETLTDYATEVDHQAKRVARLERSLDEAVDKVPVKMRAVIDALQSLRGVSKLTATTIVAEVGELSRFERAAQLMGYSGAVPSEHSSGGKTRRGGITKTGNSHLRRVLIEAAWTYRHRPRIYGALRARQEGIEEPVKEIAWKAQHRLHRRYRRLADRGMPHQKVVTAVGRELLGFIWAVGVHVERKHLAAAS

SEQ ID NO: 399058 - protein, 412 aa, unidentified
MLKIVYPICCGVDVHKNFVVACIASTNDKGVTSYQSKRFSTYTKGLRELSDWLAANNCKDICMESTGKYWHPVWNVLELTCRPVLAHPKYLKAIRGKKTDKKDARWIADVFKHDLVSGSFIPPAIIRQLRDLMRYRFKLTNYTSGEKNRAQNCLTTSNLKLDHAFSDVFGKSATAILNHLLEHPDEKNFDVTPFVDGRCKTPIEEIQLSIDGNISREQAEKLKIIRSHMDSLELCKANLESAILTLAEPLRPQINLVLSVPGIKDFSAIAVIAEIGVDMSVFPTAKHLCSWAGLAPQCNESGGKKKSSRVSRAGVYIKPLLVQCANAVVKSNKHPEIRNRYLAIKKRRGHKKAIIAIARMLLTAIFHILKKNEPYNPELYRQSDVSPVDPVEQAVKMLEKRGFMVSQTTDIQ

SEQ ID NO: 399059 - protein, 355 aa, unidentified
MKRAHWIGLDVHCRFCEVAVLDPAARLLKRQRCATSIPALIEVLEAVPRPRQVVLEEGPLADWLCRNLREHADGIVACDPRRNRLIAQDGDKDDPLDAERLAQLGRGGYVKAVHHPESLARAVFKQHVALYHDRVRHRVSEAHRAWSLLRRHGVMARQRDMLRREDRAALLSRLPPSPVLREDVELLWRGYDTAAALEEQARRRLVQLARQDEVVRRFEALPGVGWVRAATLVAFLDTPWRFASKQALWRYLGVGLERRRSGNGPERLQVPRRMNRLLKGTILGAARSAVLQGENPFAERYRGWVGTGLSPRLARRNVARGLAAVLWGMWKSGNVYHPEWVGRAATPASAAAVSR

SEQ ID NO: 399060 - protein, 390 aa, unidentified
MRPAGARGVRSDSKEVWEHHPKSECPTRATMVTEVRPKRRYARMKVLIGVDPHKASVAVAAVDEDLGELLERAAFPQNRDGLRSLERWARRFPERRWAVENAGGLGRHLAVRLVATGESVVDVPPKLSARVRVLSSGNARKNDGVDALATALAASRNVRLAAVDPEAASEALRLLSERREDLVAERTRALNRLHALLRELLPGGVARTLSADRAARILRGIRAQGGASVRLRRRLASEVLRDVRTLDRKIADLNGRIEAEVEASGTTLTEIFGVGPILAARIIGTVGNVARFPTKAHFASYSGTAPLEASSGEVVRHRLSLAGNRKLNYALHMVAVCQARSDARGGTYYRKKITEGKSRKEALRCLKRRVSDAVFRSLLADSQAPSRSAA

SEQ ID NO: 399061 - protein, 421 aa, unidentified
MEVMHKRVAGLDVHKQTVVACVRVMAARKPTRECRTFATTTEGLLALLDWLRASRVTHVAMEATGVYWTPVWKILSEGEFELVVANAAHIKQVPGRKTDMNDAMWIADLQACGLIKASFVPEENVQEWRSLTRTRKQLVREQTRHVQRIEKTLEEANIKLGTVLSDLMGVSGRRIIEAMIAGEDNPHRLAALAARNIKASRQALYEALHGRLREHHRFLLKLHLQQWDGLDRAIREVDRQVAWQIERMDAAAADGQPPFRELIHRLSAIPGVSFLSATAILSEIGRDMSRFPTAGHLVAWAGLCPGQNESAGKRKPARLRRGAPWLKTMLVQCAWAAKRAKDSYYRAQFHRLRSRRGPQKAICAVAASLLTAIYHMLKSGLPHRDLGADYFDRRSPDAKAKRLVAQLAKLGFAAQLQPLAA

SEQ ID NO: 399062 - protein, 390 aa, unidentified
MQVIADQAEAPSAIRSNLGAIFVSLELSRSTWLITSLLPGGSEKMSKHSVPAGDICALLARFSELRQKAFTRTGKSFPIIVIQEAGLDGFWIHRVLQNEGIESHVVDPASIATSRRHRRAKTDRIDGETLLRTLLAYKRGEPRVCAMVKVPTPEEEDRRRLCRERKVLIAERVQHVNRIKGLLLCQGVSGYEALRRDRRQRLDELKTGDGRALPDHLKAQISRELARLELLLEQIKAMEAERDALFAAAKATMPASGPVAMLLEIKGIGPEFAAILWMEAFFRSFANRKQVAAYAGLAPTPWQSGSVDREQGVSKAGNPRLRTMLIQLAWLWLRHQPQSALTLWFKERVSRNGGRFKKTTIVALARKLLVALWKYVTAGVIIEGAVMKPA

SEQ ID NO: 399063 - protein, 363 aa, unidentified
MTESSDYESVQVFIGVDVGKDTHHAVAINRSGKRLFDKALPNDENKLRSLISDLKQHGQILLVVDQPATIGALPVAVARSEGVLVGYLPGLAMRRIADLHAGEAKTDARDAAIIAEAARTLPHALRTLKLADEQIAELSMLCGFDDDLAAQTTQASNRIRGLLTQIHPALERVLGPRLDHPAVLDLLQRYPSPEKLASLGEKKLAAQLCKLAPRLGKRLAADIAQALAEQTVVVPGTNAAAVVLPRLALQLITLCKQRDEVALAVEQRVLAHPLYPVLTSMPGVGVRTAARLLTEVACRAFASVAHLAAYAGLAPVTRRSGSSIRGEHPSRRGNKALKRALFLSAFAALRDPLSRAYYTRKMS

SEQ ID NO: 399064 - protein, 413 aa, unidentified
MHSAYTVVAGIDVHKRVLMAVVGQPGAEEAGVAQGKFLTTRSGLRQMMQWLKENHVEAVVMESTAQYWWPVWVELEQDWPLYLAQARSNAAPAGRKTDFRDAARMVRRFFSGDLRYSFVPRPEQRAWRRLSRTWKSLGEQIVETRNEIEALLEEGQIKLSCLLSDLLGASGRRILRALAEGHSDAAALAQMCDRRVRASQRERVDALDGRLPEAHRLVLRQHMDRIEMLEAQRAELQRKLEELLQEWVPAVRRLAAVPGMNVVAAQHLIAEIGPDVAAFPSPAQLASWVGVCPGRQESAGVSRSNRCAKGNRFVRALICQIAHAASRTKGSRWEALFQHWQRRLGRNKALWAVAHRMLRLIWKLLATGVDYIELGPRALDPARLEARMRRLQREFRQHGIEISFTPTNAVSTA

SEQ ID NO: 399065 - protein, 320 aa, unidentified
MMAQVDLVVVGIDVAKDKVDACIRSLPLRQTCPSTAQGQRKLVAWLRKHKVNKAVMEASGGYEREWVRVLHQAGIEVRIVDPKRVRSFALSAGRLAKNDAIDAEMIAWFAETFSEAPSPTHDAAHEELQALVKARKGLLDLKIRLQNQNEHAAPGPVQRAYARILKSLAAEIAKLEAAIAVKIKATPDFAERAEIIESVPGLAETTSATIIAGMPELGQVSNKISPALLGAAPYDDDSGHRRGERHIKGGRRWLRNAIYMPCLGAATQNNPVLKAFYRRLIAKGKEPKVALIACMRKLIVILNTMIARRQKWDPSRYALN

SEQ ID NO: 399066 - protein, 411 aa, unidentified
MAKDTMQLACDWSHSSAPSEPEGRRPVYEVEYERFTLNGAVVFVAMELSKSAWLLAAQGSPSGKTASHRLESGDIPGLLALLRRLQARERQTCGGDDVQIVVGYEAGYDGFWLQRRLAAEGITCWVMDPGSLQVNRRARRAKTDRLDAAMLLRALIAWCRGDRAACHMVQVPSVAREDARRTHRERQRLVAERVQHVNRIKGLLATQGINDYQPLRRDRSARLEELRSCDGHELPPRLRREINRELKRLELVLEQLEAVETERDAAVAEPAADDADAAKVALLAKLGGIGNELATVLVREGLFRSFANRKEVAAYAGLTPMPFASGERHREQGISKAGNPLLRKAMVELAWLWLRYQPDSTLARWFTERVGSARGRIRKITAIALARKLLVALWRYLTAGLLPEGAHLKTA

SEQ ID NO: 399067 - protein, 342 aa, unidentified
MDRLSPVTRIRKVGFTMENEQHFIGIDVAKAKLDVDILRPDGRHRGKKFDNTLSGHEELVRWLRSHDVNHAHVCMESTSTYMEDAAIYLSDAGYTVSIINPALSKGFAQSEGLRSKTDKVDARMLAHFCREKRPSAWEAPHPTERALKALVLRHQALTEMQTQEKNRQETAPEVQLASIDVLLECLRAELKRIEKQIKDLTDNNPDMKQRRKLLNSIPGIGEKTAAVLLAYTGLKLRFATARQFAAYAGLTPVQHESGSSVMRASRMSKAGPVHLRKALYMPAMSALYHTAWGKAFRKRLEGNGKRAKVIIGAMMRKLAQVAYGVLKSGEPFDASQHRMQTG

SEQ ID NO: 399068 - protein, 343 aa, unidentified
MNVTRIGLDLAKQVFQIHAVDRDERVVAKRQLKRSQVRDYFEKLPACRIGMEACASAHYWAREFGRMGHEVKLIAPQFVKPYVKSQKNDANDAEAICEAAGRPNMRFVTVKTVAQQDLQAVHRIRSELVRQRTAKVNQIRGLLAEYGLVVATRIDALRKALPDLLEDAENGLSGLFRRLLEGLRQDLVELDRRVAELDGEIQAAAREDATALRLQTIPGIGPITATALAASVGDGRQFKRGRDLAAWLGLTPRQHSTGGKERLLGISKHGDSYLRTLLIHGARSVIQAAANKTDPRSRWILGVAARRHKNVAAVALANKNARIVWALLVRGGAYDSQFGMAAA

SEQ ID NO: 399069 - protein, 349 aa, unidentified
MSQKVSPAIAVIGIDIGKNSFHAIGLDRRGAIVLRQKWSRSQLATRLAAMPRCLIGMEACVGAHHLSRKLRSLGHDTRLMPAKYVRPYSRGQKNDFRDAEAIAEAVQRPTMKFVATKTGEQLDLQALHRVRERLVSQRTGIINQIRAFLLERGIAVRQGLRFLRAELPHILTTPSDALSPRMLRIIEDLAGDWRRLDERIEALSSEIEILARHDSGCERLMSVPGIGPIISSAIVAAIGTGDAFTKGRDFAAWLGLVPKQISTGDRTILGKISKRGNRYLRVLFVQAAWAVLIKPKSWHRHGLKPWLEAAKRRLHHNVLAIALANKLARIAWSVLAHGRIFEANKMQAA

SEQ ID NO: 399070 - protein, 356 aa, unidentified
MAMLADTIDGVIGVDTHRDTLTAAAVTAIGGLLADATASTDAAGYRQLLGFATSHLPGRRCWAIEGAGSFGAGLATFLLDQGEQVIEVPRRRRSTRRTAAKSDPLDAVHIARDALITQHPAIVRRRGDHQALRVLLTTRRNAVTAWTQTVSQLKALIVSAPEELRAELRGRGTKAQITYCAALRERPTRSLEHQMTARALHATARRCQLLRAEINQHQHDLHTLVVAITPWLLELPGVGPITATQILISWSHAGRWRSEAAFAAQAGTSPIPASSGQTKRYRLNRRGDRQLNHALHTIAIVRMRDDPLTHAYVQRRTAQGKNPREIRRCLKRIIARQLYNLLKHYDRPAIQILHTT

SEQ ID NO: 399071 - protein, 394 aa, unidentified
MILVGIDIGKNQHTFSIIDKGTGEILSNPSVFNNNQEGFLSLIKKLCSYAKSNLLIGMEDTGHYHFALLKYLLDNRYTVALINPTTTDLTRKLQGGITKNDPLDSLTICDVISSNQRKKPYRITKVNRFDLYEQKQLTRHHHNLKEELNTYKNRLQKCIDIVFPEFNSLFCSKYGVVYMSILKTFASAEKIANADIRTIRKCFEYDGRGRRISLSAEQLKASAKTSIGIPSVAEEIQIRHLVCQIEMIEEQLSEIDKKIEEFSLQNNSPILSIPGISHFSGTSILAELGDICNYSKASQIIKFAGVAPYHYESSQFTAQHTAITKKGSRYLRKTLYQIILPVINHNKVFNVYYNKKLAEGKGHRCAQGHCIRKLLRIIYHLLSTGQTFNPALLI

SEQ ID NO: 399072 - protein, 407 aa, unidentified
MYYLGIDISKKSFTVSVLDEEGEAITKALTYPCTGKGFEKLADKISSLKLKKSEVVIGIEATGNLWENLYSFLQGYKVVILNPYQTRKYHQVLSKKAKTDKVDALVIAGLLRSKEALASYVPEEEVQVLRELVRLRHHLQKDKKNYLRKAYSLLNLVFPEYSNLIKSPFKKVSSMILKKYPTAVHMARARKTDLVKMARKIQGNNYSSELAEKLIEAAKESIYSGKASEVRGIVLRIIIDEIESLRNKIKEIEDKIEEILSSDEPSSPQKRLLEIPGVGPKTVAAFLGEVGKDVSRFSSANKLIGFIGWHPKISESGEKKNLHPKMSKKGPSALRASLYMAAVASLKHNPYLRSLYHRKISEGKESKQALICVGKKILSIMYSMLKYEADYDPQRIFFQLEKERILT

SEQ ID NO: 399073 - protein, 417 aa, unidentified
MIIMTEVLQVAAGLDLHKKFILATILTLAGNKMQERFERTQVGLLKLKDWIINNHVQAIGCESTSDYWVVVHDLLDKYIPVIVGNARDIKSLSHKKTDKVDSEFIALLTLKGMIRPSRVMPRSHRQFRSQSRLRHRLVQKRTDFKNEIHHILDSELFRLSDALKDVFGKTGKIVLNGIINGMPVEEILKCIPTNVKYKERQLQEIMEQTLSIDAILRLKVCMNALRCLDEQIDLITRSAVDYAYKNYSEEMKILISVPGIGEIGAMTLIAEIGNVNDFPSGDKLASWLGIVPRVYQSADKLRTSSITKRGSEHARWILVQIAHAASRARNNALKPFFIRKKAIIGAGKAIIALARKIVVIIWHLLTNRESYDDGLYVKSRQPLHINVKVPSVISMEEVIQLLKDASVIIKKRDPDPT

SEQ ID NO: 399074 - protein, 375 aa, unidentified
MREKLRFLGMDVHAETIAAAIAEPDGEVRSLGTIPNRMESVRKLLKKLGPVEKLRVCYEAGPTGYVLYWQLAELGVQCEVIAPSLVPVKAGDRVKTDRRDAEKLARSYRSGDLTAVWVPDAGSEALRDLVRAREAAKQDELRARHRLGKFLLRSGHRPPPGVRAWTHLHLIWVSQIRFTQMAQESTRLDYLHEVEHMRERVLRLEQAIMEAVKLASPALQEVIQDLQALRGIAHISAVTIAAELGQISRFEGARQLMGYCGVVPSEDSSGKRTRRGSITKTGNAHLRRIVVEAAWSYHRPPAIWAGLRKRQQSVSEEAKEIAWKAQHRLHKRYARLAAKGKDKRKIVTAVGRELLGFIWAIGTRAEATARQRIAA

SEQ ID NO: 399075 - protein, 429 aa, unidentified
MNYKQNDRLNQLTDETLIIGIDIAKEFHVARAQDIRGIEFGKSIKFNNSLSGYLEFESWINEIKVIEAKEQVIIGMEPTGHYWLNLARYLKAKDYTVVTVNPMHVKKIKELDDNLQTKTDKKDAKIIAQLVKDARYSTPNLLEGEYEELRNAKNLRQVVVKDLNRTKNQIHNWLDRYFPEYKEAYASWESKSFIKIIKKYIFPSVIESISPNQIYEMLPPKMRRGVGLGKIERLVTASKNSIGIKEGLSFAKVEINYLLEKYDGFLEQIEEIDKYVADICSNLAETEKITQIKGIGIVTASGIVAELGDIRNYKTPKQMIKMAGLSLTENSSGKVKGTTSISRRGRKDLRRLLYQVILGMIRTNTAFKEMYIYYTTRRKNQLTGKQAIIALCRKLLRIIHTIIIKDVDYDESKMMSQIKYPDEFLNSAA

SEQ ID NO: 399076 - protein, 570 aa, unidentified
MVVVGTDAHKYSHTFVATDEVGRQLGEKTVKATTAGHATAIMWAREQFGLELIWGIEDCRNMSARLERDLLAAGQQVVRVPTKLMAQTRKSARSRGKSDPIDALAVARAVMRETDLPLATHDETSRELKLLTDRRDVLVAQRTSAINRLRWLVHELDPERAPAARSLDAAKHQQALRTWLDTQPGLVAELARAELTDIIRLTGEINTLAQRISARVHQVAPALLEIPGCAELTAAKIVGEAAGVTRFKSEAAFACHAAVAPIPVWSGNTAGQMRLSRSGNRQLNAALHRIALTQIRMTDSRGQAYYQRLQDAGKTKRAALRCLKRRLARTVFQALRTVHQPSSEHTQPAAACHRSYCSSHLGEPPRLTDMTQKTRIQPLPPKRAGLLIRALYRIAKRRFGEVPEPFTVTAHHRRLLIANVVHEALLQRASRKLPPSVRELAVFWTARSIGCSWCVDFGAMLQRLDGLDVDRLTDIDNYATSSKFSDDERAAIAYAEAMTADPHSVTDEQVADLRARFGEAGVIELTYQIGVENMRARMNSALGITEQGFNSGDACRVPWAAPDVPSAESR

SEQ ID NO: 399077 - protein, 408 aa, unidentified
MDLTPMHKRVIALDVHQAKITACAVVEHDDGRVEVAKRDFGAFKRDRRALAEWALQMAPEVVVMESTGVYWKSPFAALEAVGIIAWVVNARHVKAVPGRKTDMADAQWLATLARAGLLRASFIPPVQMRQLRLVARQRQKLVGMCSAEKNRLHKVLVDAGIRINVLVADIHGASARAMVKALIAGKPMHEVLDCKGRLRAGRDELFDALSTEQFSVVHRFVAEEIMQHIEQLEQRIARLDQYLLEGLRPWQPQLKLLQTLPGIDEQGAAMLLVEIGADMSVFGNAERLASWVGICPGNNESAGKRKTGRIRKGNAWVRRLLCEFAQAAARTRCALKAKFEALAIRKGRKKSVVALAHKMLRTVYAMLANGTHYQDKEVDYEALNVQRNAPRWIKMLRKHGFIATPSAA

SEQ ID NO: 399078 - protein, 409 aa, unidentified
MVLQVIYPNCCGIDVHKTFVFACIAITDNKGIPSYYRKRFSTFTHGLRDLAEWLEYYSCFDVCMESTGKYWIPVWNVLETAGIHQTLAHPKYVRAIRGKKTDKKDAKWIADLFRHDLVVGSFMPPALIRQLRDLIRYRWKLGNNMVSEKNRFQNSLTVSNIQLASVVSDTFGVSAQKIIKSILDKKLGDTEQLEDLIHGSLKKKLPELELAVDGAITSDQEAKLRVIMDHYKSLVLARTTIETEVEMRAQPLAQEIALVRTVPGLDKPFTAISVLAETGVDMSQFPDAKHLCSWAGLTPTNNESAGKKHSVRISKAGAYLKPLLVQVANSLIKSDKYPEIKQRYQILKKRRGHKKTIIAIARQLLTAVYHILANHEVYNPKQFVDRPERSMSVREAVEFAKARGFDVLA

SEQ ID NO: 399079 - protein, 401 aa, unidentified
MLTLWAGIDAGKTTHHCVVIDCDGTVVLSTKVNNDETPLLDLIATVIDLDSEGDICWATDLTDGGAALLIALLAAHGQQLLYIPGRVVHHAAATYRGDGKTDAKDARIIADQARMRTDLQPVRIANQIAVDLRLLTSHRLDVVHDRVRAINRMRATMLEYFPALERAFDYSKNKAALVLLSHYATPESIRRIGVTRLTAWLKARGCRNSAGIAKAAVDAAHTQTTTLPAQHVGSALVTKLAAKIAAIDDDLASIDAEITQQLAKHHSATNLLSMPGFGPVLAATFLAQIGGSLDAFDTVDRLACVAGLAPVPRDSGRISGNLHRPRRFNRRLLRTCYLASLSSLKNSPASRAFYDRKRAEGKSHKQALIALARRRMNVIWAILRDNTPYIEPATTKVLTAA

SEQ ID NO: 399080 - protein, 402 aa, unidentified
MHYLGIDVSKASHQCIVLDTSGEALGKSFTVQSSKDDFIKLTKKLSELNIPKADLTIGLEATGNLWENLYSFLKEQGFNVILLNPYQTNKFHEAMLKKAKTDSIDALVIAGLLRSGCASSSYIPDDDIQSLRDIVRLKDGYLKDVKNYKRKAYSLLNLVFPEFLSLVKDPFNIVSTDMLLKYQTASDFKNLKPKDLIKIFKHRQGNNYDDSWADKVISSAKDSIYSGKAHKARGLVLKSLVQNIKYLKEQIELLDNEIQLLLKPDDKSQNSDVDNLLTIPGVGPKTIAVFLAEVGNIQRFLSCKDFIGFVGFYPKIEQSGSSLNKAKLTNKGSSILKHALYMASVASLIHNPYLKSVYHDKVSQGKCPKQALIVVARKLACIMYSMLKNNSVYNPERVAIAI

SEQ ID NO: 399081 - protein, 335 aa, unidentified
MEPTTIAIDLAKRVFQIHYVEPDTGTIRSKVLKRAQLVPFFANRPASRVVMEACGSAHHWARVLARLGHDVRLIAAQFVRPFVKSNKNDAADAAAIWEAAQRPGMRFVAVKTEDQQAMLAMHRIRQQLVRIRVMQVNQLRGLLYEFGVVLPQGRRASIEAAKLALASLADQLPAMLADSLQDQFSRLRELDEQIARIEQRILEWRRDDDACRRISEITGVGVLTATAAVSVIGQANTFRSGREFAAYLGLVPRQNSSGGKTKLCGISKRGDVYLRTLLIHGARSVIAASKHLPERVRALLVRRPTNVVAVALANKMARTIWALLAYGRTYQPTPA

SEQ ID NO: 399082 - protein, 354 aa, unidentified
MIPIKLLKTGNFMEKDIIKQNIGIDIAKDDFKVCYSSMCSNFHIKILGSRSFTNNLKGFNEFLIWITGKRKTSDNLYFTMESTGVYYESLAYFLWQISDFRVRVILPNKVKHYAKSLDFKSKTDKIDAQILARLGLERELQIWQPISPNLLELKQLTRERSALVRNRTAASNQLHAAEHQGKVNKKIIVRAKTHIDLLDKQVKEIEKEIKVIVNQDAKLKKKFAYLQSIPGVNTLTIATIAAETNGFETFTSIKQLTSYAGLDVRIAESGKWKGESHISKRGNSHIRKALYMPSISRISCDKSAKQFYENIKERKGQDKSMVALVAVQRKMLGLMFSLWKNEQMYKLTPLIVIG

SEQ ID NO: 399083 - protein, 393 aa, unidentified
MPDIENTVKSHTRKAKTTLEEKIKGIPVEEIIVDISDEDKLCPQCGTGLELIGKETIRHEIEYIQSISDDLTKVKVGLEATGHYGYNLLGFLLDNGLPTFVINPLHTNLYRKSLSLRKTKTDKVDAHTIASMIMSDVNLKSYSDTSYHNEELKSLTRYRFDKVKERAKLKSSVSRLVCILFPELEKLVPTLHMASVYALLSEFPSALAIASAHLTRLTNLLCESSKGRYGKEAAITFRKSARNSIDSNMPAKALELKHTIKLIRKLDTEIKEIENEIKSIMDEINSPILTIPGISYRMGAVIIAEIGDFSRFDSPDKILAYAGMSPSTYQSGQLDNCYSHMEKRGSRYLRYALFIMQPNTSVTGMNPLGLILKRNEPKANITMLLYPTPQRNW

SEQ ID NO: 399084 - protein, 395 aa, unidentified
MDVMHPVCCGIDVHQKSIVCCILDGPLTSNEPKKYQTTFGTTTKELKAALDWLLEHQVTHVFFESTGQYWIPLFNIFSDSDLELVLANPQHIKNVPGRKTDVKDAEWIAQLGRCGLINQSYIPSQEVMQLRYLIRYRISVKQRLTQIKNHIHVILQRGNIKITSYLSDIFSKTGQALLTLFINGEVINEDNVESCIHGRIKASTRQLIEAMDGKLSTVDRFLIKECMEEYKLQKKISDELNKEINEYILEHFPEEYQLLLTIPGISDNCCATILAEIGPNVDAFKTDKNLASWAGMCPGSNESAGVKKSSHTTQGNKYLKQALVMSVLSVQRAKEITFSLFYQRISSRGSKMKAIIACGHKMLRIIYKILQSHQPYNSQKALGLRQQTNALSLTI

SEQ ID NO: 399085 - protein, 342 aa, unidentified
MVKQIAGIDVAQKELVVTIGRMDESWTAELYGYKVFPNTAKGFALLLDWVKNKSIPDLPFRFVMEATGVYHESLAYYLDEQQQAVTIVLPNKISNYARTLDIKTVTDKTASEAICRFGLERKLSDWKRPHPVYKRLRQLTRERDQVIQSRTVAKNQLHAETSEAEPYDQSIARIKQQIALLDKQEKQIKEEIADMIKQYPEIKAVVELLCSVPGIGVLTAVTILGETNGFELVRNKRQISSYAGLDIQEKQSGTSVKGKPRISKRGNKHLRKSLHLPALAAIRHCERFKAIFTRLVSKHGIKMKAAVAIQRKLLEIVYTVFKTKCRYDNNYLNKQHEIVAHQ

SEQ ID NO: 399086 - protein, 339 aa, unidentified
MKYTPVGVDIAKHLIQVHFINEHTGEVVDKLLRSKDFLTFFSNREPCLIGMEACGGSQHWARELKKLGHEVRLLQARFVKAFVMGNKNDVMDARAIWMAVQQPSKEIAVKTEEQQSVLVLHRSRRQLVKFRTAQINALHGTLLEFGETLHKGRAAMDRELPAALERMKTKLPPYLITVLEDQYTRLSELDMLIDDLEKQLNSVARQSETCKRLMEIPGVGPLIATAAVATMGKASAFKSGREFAAYVGLVPKQTGSGGKVRMLGISKRGDTYLRTLFIHGARSAALLTKEPDPWITELKKRRPTGVAIVAMANKLARTVWAIVAHDRKYDKNHVSIRPY

SEQ ID NO: 399087 - protein, 343 aa, unidentified
MQAVTTIGLDIAKSIFQVHGVDAEGNVIFRRKLKRRYIVAFFQKLPPCLVGIEACASSHHWSRELQALGHTVRLMPPAYVKPYVKRHKNDAADAEAICEAVTRANMRFVETKTPGQQSCLMLHRTRHLFIRQQTAVINAIRAHLAEFGIVAPVGRNGVEALLNVVADTSDKRIPEIARACVIALGAQLRILKTQILEFDRLIMAWHRSNETSKRLDEIPGVGPALATALVASVGDPRAFRSGRDFSAWIGLVLKQNSSGGKEKLGSISKRGDRYLRSLFTTGALAVIRYAKLHGIQHRPWLTALLARRPTKVAAIALANKIARMAWAMMARGERYKEPVALAA

SEQ ID NO: 399088 - protein, 319 aa, unidentified
MMPQKTGLVGLDVAKSKVDACIRSAGLRLSSPSTAEGEAKLVAWLRANRVGRAVMEASGGYERGWAQALRAAGIEVLIVDPKRIRHFAKAAGRLAKNDPIDAETIAWFGETFPEAEAQAHDPAREEVDRLVQARGALKDLDERTKQQREHRPPAMVANALRAIAKTVRAELRKLDATIAAKIKANPAFARRAEIIRSFPGLGAQTVAGITAWFPELGHITDEAAAALLGAAPYDDDSGERKGERRCMGGRRKLRNLLYMPVMGAATQHNPVLKAYYQRLIARGKEPKVALIACMRKLIVILNTMLARDQTWNPPARAAA

SEQ ID NO: 399089 - protein, 429 aa, unidentified
MQNESTPGARGPVFCGVDTHADSHWLCVLDWRGRKVLSRQFPADAAGYEALAGAIAAAGEPACIAMEGTSSYGAGLTRHLASLGMPVREAPSPARMQRRRPGQGKCDESDAERAARAAMSGSRLGTPKSQDGWVDGVRCMLAARSGAVKARTSAINTARSLLTTAPEGLRSRFRGMGGPRLMGELPSVRAEGALGAALGALADLWAAARDAALDMERAIEASLEENCPALLAMYGCGPVSAAKLAVAAGDNPGRLRSEASFAAICGACPIPASSGKTVRHRLNRGGDRQANSALHEIARQRVMRDPETAEYAERARGRGKSDREVMRCLKRYVAREAYRALMRPHEIRRPEDASELVAARRAAKVSQVRAASILGTSEKYISMLERGQRELKPIRRAYEAWVEAGLPLDWDRQAFEAERKMDSKKHLAK

SEQ ID NO: 399090 - protein, 385 aa, unidentified
MSELNDLSRSLTSLEQDKTIIAVIEMSQSSWFVAGIIPGIERHPLKKLEPSEEELVRLLMRWRTEATKNGHTITRFAVAFEAGRDGFWLARWLRARGIETYVIHPTSVAVSREHRRAKTDRLDTGSLKRVFIGWLRGEPDHCHMAAIPTLAEEDAKRPNREREGLVRERTRIVNRMKSCLVRFGIRNFKPTLRKAPERLATVGTPEGVPLPPNTLLELRRDMARLRFVMDQIKEVEEARAQRLEQAPQEKTHAMVRLIARVIGVGIETADMLVHEILSRQLRDRRAVARYAGLTGAPDESGNKRREKGLAKAGNARVRRGMIQLAWRFLVFQKDSALARWYRTRTESAGKKRKTMIVALARKLLIALWRLVTIGEVPAGVVLRAA

SEQ ID NO: 399091 - protein, 387 aa, unidentified
MTRVIIGMDPHKRSVTIEVMAPDESVLGGGRYATDRPGYAAMLHDAQRWPERVWAVEGCSGIGRHVAPRLLADGEQVVDVPPKMSARARVFSTGQGRKTDATDAHSIALVGTRMAGLRPVVDDQQLAVLRVLADRRRALGEDHTRMVAQLHHLLLELIPGGAKKDLSAAQAKALLAKVRPRDAAGKARRRVAAELIADLERIYARKKVADKELRELVEATGTSLLTLNGIGPSGAARLLIDVGDITRFPTKGHFASWNGTAPLDASSGDQIRHRLSRAGNRQINRTLHIMATVQLRNPTEGRAYYDRKKASGKTSMEAMRCLKRRLSDIVYRHMVNDAVRAMTGPGGQPGTATQSSATGSHPDAGSSDKSLPGPAATEPRTDLPAAS

SEQ ID NO: 399092 - protein, 322 aa, unidentified
MIKYKETYGVDISKDVFDVHGSNKGHGQYKNDEPGFKRFLKELPKGSLVVMEATGYYHYRLAQFLYKKGVMVSVVNPLSIKRFIQMKLAKVKTDKSDAKAICEYALVNEVSLYNALTDTQSECLQLFRLLDTYLKQRTATKNKIHGEAVLGVPSKFVHRSLVRNKKQFDKEVEAIESKILSLVRQEQQEQLTLLTSIPGIGQKTALFLIVVTDGFSKFETAAQLCSYVGITPTIRESGSSVRGRARISKVGNRKLRNLLFLCAFNACKHNKACKALYERIVNKGKSKKLALIAVANKLLKQSFAVAKSGRPYDETYVSILPR

SEQ ID NO: 399093 - protein, 342 aa, unidentified
MDIEVLGIDLGKTVCSLAGLDGAGAVVFRKRLQRHRLLDFLDRLAPCVVAMEACGGAHHIGRFCLQKGHEPRLMSPLYVRPYVKVHKNDDRDAEAIAEAATRPTMSFVGIKSEEQLDLQALHRARERLVSDRTRLINQGRGFLMERGIRVGAGRHVFQKELTRLTTEGSDDLSRRMLMLLSDMASELDLINNRIAAIDAEIKTLAKADADMQRLMEIPGVGPTIATALVAAVGTGSSFGKGRDLAAWLGLVPRQITTGGKAKLIGISKHGNRYLRKLFIHGARTVLHLVRDRASPITAWADGLKERAHVNVAAVAMANKMARIAWAVLTKGERYRPNALSGL

SEQ ID NO: 399094 - protein, 344 aa, unidentified
MDYFAGLDVSVKDTSVCIVDETGKIVREVKVASEPEALLAVLKSPAYRFKRIGLEAGPLSQWLFSALAEAGLPLICVETRHMRAVLKAQINKTDRNDARGMAQMMRVGLYRPVHVKTLRSQKLRMLLTHRKLLQSKAIAIDNDLRGTLRNFGLKVGMVGAVRFEARIRKLVENLPDLAALVEPLLVVRRTLREQFCILHRRLLAIVRGDEVCRRLMTTPGVGPVVSLTYRATVDVPARFRKSKSVGAVFGLTCAKYQSGEVDWSGRISRCGDEMMRVMLYEAAQSMMRSKKWSWLKAWAMQIARRRGMKKAIVALARRLAVIMHRMWVDGTEFHWTREQASAAA

SEQ ID NO: 399095 - protein, 430 aa, unidentified
MKSNTQNAKIEAITEKTLVLGIDVGSETHYARAFDYRGIEYSKKPFKFSNTEAGFVTLKEWILDLKERHEKDKVVPGMEPTGHYWFNLGKFLQDNEMKPVLVNPHHVKKSKELDDNNPTKNDRKDPKVIAGLVREGRYMIPYLPEGVYADLRTASNIRFQLQAELTRIQNRISRWFNIYFPEYKTVYGKPDAKSGMLILKAAPLPEDILTLGIDGVNQIWRDAKLRAVGKARAKTLIEAAEHSVGSKEGAVSARMEIRMLLEDYESRNICLQEVMTLIEGLVKQIPMAEKLLEIKGVGIKTVSGFLAEVGDISRFNNPKELQKLAGLALVENSSGKHKGETTISRRGRKRLRYLLFEVAMSLVAKNPEFRELHNYYTTRRLNPLKKMQSLMAIAAKLIRVFYAMLTKGVDYDPKKMVSDIKRPAVYLQAA

SEQ ID NO: 399096 - protein, 343 aa, unidentified
MEHYVGLDVSLKHTSICVVNQVGSVVREGVVDSDPEVIAAFVRSNAPGAIRAGLETGPTATWLWSELKQLGLPVICIDARHARAVLKMQINKSDRNDAAGIARIMQTGWFKEVRVKGLDSHSVRALLASRALLVKIKRDLENQIRGLLKNVGLVIGRAKFNVFTVRAEELIEDRPELIAIVGPLLKARQAIEQQTDDLDRKVLKLARHDAQVRRFMTVPGIGPITALCFKATIDDPTRFKRSRSVGAYVGLTARRHASGEIDWTGRISKCGDAMLRSYLFEAASVLLTRVPKWSALKAWGMRLAKRNGLRKATVAVARKLAVILHRMWIERTEFNWSKKEIVA

SEQ ID NO: 399097 - protein, 412 aa, unidentified
MEVFCGIDWAEDHHDIALAGRDGQLLARRRISDDAAGLAQLLGLLSEHGDSAEDPVPVAIETPRGLLVACLRATGRTVYPINPMAVARYRDRHSIAGRKSDHGDAVVLANILRTDLHSHRPLPADTELAQAIAVLARAQQDAVWDRTTAHNKLRSHLREYYPGFLAAFAGSRGGITRPEARVILAAAPTPAAAGKLTLAQLKALVKNAGRRRGIDAEAARLRDALRAPQMRQLPLVEQAMGRQAQALLRHLDAACESASDLEQAAVESFNQHPDARIITSFPGLGPLTGARVLAETGDDRSRFADAKGLKAYAGAAPITRASGKTRTVVHRRVKNQRLAAAGYIWAFAALTASPGARAHYDRRKKDGDRHAAAQRNLFSRLLGCLHHCLATGQHYDETIAFPAGTAKLLQAA

SEQ ID NO: 399098 - protein, 348 aa, unidentified
MAMTIVERDRTVIGGVDTHLDTHVAAALDPIGGLLGVESFVAAPRGYKAMLEWMGTFGTVSKVGVEGTGAYGAGLGRFLRRAGIEVVEVDRSNRQVRRTQGKSDPADAVEAARAVLSGRATGAPKSRDGNVEAIRALLVAKRSAREGRLRAIHQMRQLSYTAPDQLRCRLKGLPIKEFTAEASAMRPRPGGDTVLYATKVALASLGRRVHTLEEETAAIDELLDELVTATAPSMLELFGVGIDTAATLLVAAGDNPERLRSEAAWAHLCGVAPIQASSGKVTRHRLDRGRDRNANQALWRIVMTRLSFDPRSREYMERRTKAGRSKREVIRILKRYVAREVFKHLPRG

SEQ ID NO: 399099 - protein, 348 aa, unidentified
MHVYNTPHAFYCGVDLHARSMFIHILDAHGNTVLAKDLAAAPDVFLEAIAPYRQGLVVGCECMFAWYWLADLCEDHSIAFTLGHALYMKLIHGGKAKNDRIDAEKIAGLLRGGMFPMAYVYPRGKRATRDLLRRRSHFVRHRAQLITHITNTNSQYNLPPFTATLSRASNRADDLAERFADPSVRCSVQADLDLIDAYDAKILELERHLIKTAKVDNAPTLDLLRTIPGIGKVLGLVLLYEIDNISRFPEVGNFLSYSRLVRCEHESAGKKKGSGGKKIGNAHLKWAFSEAACLMLRAVPAVKKWLAKQERKRGKRKALSILEAKIGRCAFQMWRQQKPFDAKRFLGQ

SEQ ID NO: 399100 - protein, 397 aa, unidentified
MIYVGIDIGKRNHEATILDESGKEIAESISFKNSGSGVEKLLSRIPDPSDAVFGLEATGHYWIPLYCSLIANGLKVLVLNPIQSDSLRNLYIRRTKTDKKDSFIIADILRIGRCPESQLANEETIELQTLCRLRFEFIDQVISLKQRLISVLDRIFPEYESIFSSVFIESSRALLKNAPTPEDILELDLSELSELLKAESHGRFGEEKARELKETASNSFGITIALNAFKLELRLLLEQMEFIEAQIQQIDNKVKELMENMKTYITTIPGIGEVLGASIMAEIGDISRFSNPKKLVAYAGLDSTVHQSGQFTGSRSRISKRGSTYLRRAIWSAAALARKHNPVLSEYYQKKIQEGKHPQAAIGACARKLTHLIYYILKEQKPFDPDYQWSGVTQNFS

SEQ ID NO: 399101 - protein, 448 aa, unidentified
MTATSVLAVLDPLAAFVDVGSEHMHVSIAGGPPEVFGTVTGELHRLRDWLQERGVKSVAMEATGVYWLPLYGVLEAARFQVSMVNGKQTRNLPGRKTDMKDCQWGATLQAHGLLQAGFVPPAQIRRLQDYLRLRADHLSSAAACVQHQQKALERMNVKLHDVISSLVGDSGIRVIQAILAGERSPERLLALCDVRIQNKKAQRVKESLRGTWAEEHLFALRQAVENWQHYQRQIAACDRQIEAVLHEMSALDQPHDKEVKTSPLKRTGANAPQIEGLHKILAKLCGGKDLTVLPAHTDYSLLQLIGEVGTDLGKWPTEQHFTAWLGLAPGSHQSGKRNGSVRRKRNRAGRLFCLMARSLARSKNIALGGFYRRLAARRGGLVANLALARKLAALFWRVMVKGLDYAESGLKAYEEQVLETKRRALCHLAKQLGRVVLPSLAELQTVKN

SEQ ID NO: 399102 - protein, 322 aa, unidentified
MNAPLTPDSLLIGIDVAKDKLDVARSDASQVATFTNDPAGIRQLLKALADDKPALIVIEATGGYEHDAVAALLNAGLPVAIANPRHVRHLAKGLGITAKTDAIDAHVLVAYARHASPRLAEKRSKNSVELEALVTCRRQLQMIQTEQTNRRAMTRSAKARKAIDAVLKTLAGQIKNLDEQIQQLIESDDDMADRDRIIRSVPGLGPVTSATVIAELGEIGNMDRRQAAALIGVAPYNRDSGKFTGQRAIRGGRAPVRSVLYMATLVAMRFNPVIKTFAQRLLDAGKKNKVVIVAAMRKLAAILNAMLRDGLEWSQLNLVKNA

SEQ ID NO: 399103 - protein, 377 aa, unidentified
MHSENIAAYIGLDVHKETLAVAIAAPERLGEVRYYGTINNEAQAVRRLFQKLQGLYGNILSCYEAGPCGFGLCHQLTAMNIKCQVIAPSRIPKSPTDRIKNDHRDAISLARLLRAGELTPVWIPDLTHEAMRDLIRARAAAKRDSRVARQRILSMLLRTDKRYAGKHWTGKHRTWLANQSFSQPSQQIAFQHYCQSLEQIEDRILQLDQEISRLLPEWSLCNLVCQLQALKGVGQLIAITLVAELGDFSRFSNPKQLMAFLGLVPGEYSSGNSIRPRGITKVGNSELRRLLYEAAWSYRTPAKVGAWLIYYRPDSVTQYSKDIAWKAQQRLCSRYRTLTAKGKKSQVAITAVARELTGFMWDIALAAQSSFSQQKQN

SEQ ID NO: 399104 - protein, 346 aa, unidentified
MAAVMIGVDPHKGSHTAVAIGAAEEPLGEVRVRASAAQAQRLLAWAAAWPERTWAVEGASGLGHLLAQQLLSAGEQVLDVPPKLGARVRLLAAGAVNKNDPNDARSVAVAALRSASRREVAADDHAAVLKVWAKRHRDLGRTRTQVACRLHAVLCELIPGGVSKRISAAQAGPLLEGIRPSGAVETARCELAAEFLADLRRIDAQMRDAKNKLTVAIRASATTLTEVFGVGPIVAATVIGEARGVSRFASRDHFAAYNGTAPIEVSSGRRKIYRLSRRGNRRLNHAIHMAAVTQISHRHSPGRAYYERKLAEGQTPKEALRSLKRRLSDVIFARLQADARQAATGR

SEQ ID NO: 399105 - protein, 357 aa, unidentified
MEYGAIDLHKKESQVRIMTEGGEVIDRRIATTRDRLTTLFWGRPHARILIEASTESEWVAQHLETLGHEVVVADPNYTLMYGHRSRRVKTDRRDVAALAEACRHGIYRPAHRRSAQQRAVQWQLNIRRELVATRTRAISVVRAIARHTGYRIAGGATDTFLQRVAALNLPVPLEETLSPVRKVMEVLDQELAQADAQFEALIANAPIVKRLTTCPSIGAITAAAFVAALDDVGRFVGPRGAAQVTSYLGLVPREYSSGEQQQRGGVMRSAHPYVQALLVQAAWRVYRSSDPRVAALRSWEQAIERRRGKKIAIVALARRLARILYAMWRDGTDYQPAKIRTHQTHMAVAAGTQPATV

SEQ ID NO: 399106 - protein, 340 aa, unidentified
MGDITTIGLDLAKNIFQVHAVDEAGSVVMRKRLRRGQVLAFFGEIPPCLVGLEACATAHHWARELIALGHEPRLMPPSYVKAYVKRNKHDVADAEAICEAVRRPSMRFVPIKMVEQQSALMMHRARDFLIRQRTMLVNALRGHLAEFGLIEAQGLHKVARLIAIVMDENDGRVPDIARQVLKVIVNQIEDTQTRIVGLERQVLAWYKNNPVSQRLATIPGIGPIIATAIAATVADPNIFRSGREFAAWLGLVPRQNSTGGKARLGGISKRGDSYLRRLLVNSAHTVLLCSKHAKTDPWLTSLLSRKPRLVAAVALANKTARVAWAIMSKQDTYRHAALAA

SEQ ID NO: 399107 - protein, 352 aa, unidentified
MEKITTVGLDLAKQVMAVHATDREGRMVLRKVLRREQLLRWTATLLPCVVAMEACGGAHYWARELTRQGHTVRIIAAEFVQAFRKSGKNDANDAEAICTAAQQPNMRFVAIKSVEQQAALCVHRLRQGLVEERTTLINRLRGLLTEFGVVAPLSPEKLRRELASCQDPDDVRLPATVRQLVGDQVTALDQLEKRMADYAEQIAAQAGSEIAKRLQTIAGVGPTTAAAMVATVGEPREFRNGRQFAAWLGLTPKQHSTGGKTRLGRITRRGDAYLRTLLILGAKSALQAALRKPPEARHRLQQWIVAVFGRIGYHKTLVAIANKHARIIWALLAKGEYFDVQRLTPKVVVVAA
